United States Patent Application Publication US 2004/0031072 A1 - sequence listing, part 41

SEQ ID NO: 254425 - protein, 322 aa, Glycine max
  Clone ID: PAT_MRT3847_7176C.1.pep
MRIMVWGSEIVFAILLCGTLSCTAQAHHNRVSLSITTSICPARSLLDFILGFSDSTCPLPNSLGSIAVTEGDEVSLQKALNMVHKNNHEYVAVLFYASWCPFSRVFRPVFSVLSALHPSIPHFAIEESSVWPSTLSKYGVHSFPTLYILNSTMRVRYHGSRTLGSLIGFYNDVTGIRIDSLDELSLEKIGRSSADESHGNTEPESSPFSRARSPENLLRQETYLALATTFVVLRLLYLFLPTLLICIQYAWRRVIQNIRIGSLLEHPLIYLKRLTQSFNCLKEPYKRSNLQEGAMNARAWASKSLATVSIGEESSSSRGTHQ

SEQ ID NO: 254426 - protein, 49 aa, Glycine max
  unsure (1)..(49): unsure at all Xaa locations
  Clone ID: PAT_MRT3847_71770C.1.pep
FFALKEPLSWEEKFQIHTCESSLTQMICFPSVVNKQASTFFLXSSRIRA

SEQ ID NO: 254427 - protein, 64 aa, Glycine max
  Clone ID: PAT_MRT3847_71771C.1.pep
VKVHLVQRTGTKEVQSYVAQEPHLRNKGLPPIAFPVKVVKACNPNHRTRSMASRRKVNLATPVY

SEQ ID NO: 254428 - protein, 31 aa, Glycine max
  Clone ID: PAT_MRT3847_71772C.1.pep
QSLRQRRNFSPVVDTSGSQIFMLVFQCQTLA

SEQ ID NO: 254429 - protein, 54 aa, Glycine max
  Clone ID: PAT_MRT3847_71773C.1.pep
LCVGPINLPPSSRRSSSPSVLYSLYCESNMNVTFSAVLLKCHVLSSSMFDVSMA

SEQ ID NO: 254430 - protein, 37 aa, Glycine max
  Clone ID: PAT_MRT3847_71774C.1.pep
FFEGMGMLLVIHGDNLVRTVQMSEQLSLRASASAYAE

SEQ ID NO: 254431 - protein, 81 aa, Glycine max
  unsure (1)..(81): unsure at all Xaa locations
  Clone ID: PAT_MRT3847_71775C.1.pep
SEXXERRXTXXXISXHXACPXXMHXXTXLXQXLXCXXRSGXIXXXLXQXXXXXXXXXXKVXXXXXXIXSSRIPELTYACMR

SEQ ID NO: 254432 - protein, 52 aa, Glycine max
  Clone ID: PAT_MRT3847_71776C.1.pep
RFERSPPPIDTPHLSDREGRALYYDSLSLSKRSYAAIDEVPPLYAYTVAFLI

SEQ ID NO: 254433 - protein, 65 aa, Glycine max
  Clone ID: PAT_MRT3847_71777C.1.pep
MCAELHMIVSLVQDVDSDRAFFSFFIHEGCLYACFFNLAYRNFHGKRKNSILCVVNMVTGPTKSC

SEQ ID NO: 254434 - protein, 222 aa, Glycine max
  Clone ID: PAT_MRT3847_71778C.1.pep
MGRGKIEIKRIENTTNRQVTFCKRRNGLLKKAYELSVLCDAEVSLIVFSSRGRLYEYSNNNIRSTIERYKKACSDHSSASTTTEINAQYYQQESAKLRQQIQMLQNSNRHLMGDALSTLTVKELKQLENRLERGITRIRSKKHEMLLAEIEYFQKREIELENENLCLRTKITDVERIQQVNMVSGPELNVIQALASRNFFNPNMLDGGTVYPQTDKKILHLG

SEQ ID NO: 254435 - protein, 44 aa, Glycine max
  unsure (1)..(44): unsure at all Xaa locations
  Clone ID: PAT_MRT3847_71779C.1.pep
XVNSSSLXFKRXGGVVXSLDQXWXXXLCSLCFLXCFKTEEGAMX

SEQ ID NO: 254436 - protein, 120 aa, Glycine max
  Clone ID: PAT_MRT3847_7177C.1.pep
MRMRIWVLEIVFAIFLCGTLSCTAQPHHNRVSLSTTTSICPAGSLLDFVLGFPDSTCPLLNSLGSIAVIEGDEVSLQKALNMVHKNNHEYVAVLFYASWCPFSRVFKPIFSVLSSLHPSI

SEQ ID NO: 254437 - protein, 29 aa, Glycine max
  Clone ID: PAT_MRT3847_71780C.1.pep
KVFHLFVIYQIGSLTCDANYSTYHHSLSV

SEQ ID NO: 254438 - protein, 89 aa, Glycine max
  unsure (1)..(89): unsure at all Xaa locations
  Clone ID: PAT_MRT3847_71781C.1.pep
ECLLAVALAGAPYQAVGLVQGTTPVLQGLNGAVXKPEVPLRRDLPLLLFRTQTSDPAMLPTMIGLAEAGVRLLSYQTSLVSDGETWHVM

SEQ ID NO: 254439 - protein, 91 aa, Glycine max
  unsure (1)..(91): unsure at all Xaa locations
  Clone ID: PAT_MRT3847_71782C.1.pep
KGLXYGSXXVXRQNGPVNGNLWPXAXLQIHSYDFEXRLCSSGXAPXXGKXLXKPXPKNPSXFNLCNMPKCXGRKXRQVXXXTQFADWIVRN

SEQ ID NO: 254440 - protein, 40 aa, Glycine max
  Clone ID: PAT_MRT3847_71783C.1.pep
AWIINYIAIYVSRDRFEQYKRPLSQSNTLNLLFIFLLTLL

SEQ ID NO: 254441 - protein, 107 aa, Glycine max
  Clone ID: PAT_MRT3847_71784C.1.pep
KIKTKRKIKKGSRVEPTLGAPNRGLPKKKNHGGTWDIIHQRLGRFKPGRPFWAPYRNPFPFKKWGVSNFNRVPRAKLGALSVSGGPPTIIGEAKLRGGGLDKGGDKP

SEQ ID NO: 254442 - protein, 138 aa, Glycine max
  unsure (1)..(138): unsure at all Xaa locations
  Clone ID: PAT_MRT3847_71785C.1.pep
MNTLNLLLRCHLTTIHETLQGFGXTTPPSSCSDKGSCDDVIKMAEQVLNQATTEGMLRTGQKPDAKAVEENMALYLNTLQGLLLLSHGHSEGAGPTLASAVHAYGKQVVDCSFRLMKETASLYGYHSKDLRXSVPQLV

SEQ ID NO: 254443 - protein, 56 aa, Glycine max
  Clone ID: PAT_MRT3847_71786C.1.pep
HHFQYLPPIDILQLNAPQLLSLNHYRSSYCWLLASAVLASVRPIFSYHRSLPSGSR

SEQ ID NO: 254444 - protein, 57 aa, Glycine max
  Clone ID: PAT_MRT3847_71787C.1.pep
VFHGLVTANGVGLGCRGDIAVRDGRELTSLSKIVFEDREIRFAWRRYECASRQLAAA

SEQ ID NO: 254445 - protein, 86 aa, Glycine max
  Clone ID: PAT_MRT3847_71788C.1.pep
FEVSSFFKGPRTHMVPFFRALPGFGNLMSPSLFHRPSIGPGFTPSAIYFWVGNFWLPRKWAWKDASDTWCWGERKSLQKKTPELFK

SEQ ID NO: 254446 - protein, 44 aa, Glycine max
  Clone ID: PAT_MRT3847_71789C.1.pep
DVNQGLSNCHCLISYMVINRPDNVHMLALMPVFFLRLRKALNIC

SEQ ID NO: 254447 - protein, 47 aa, Glycine max
  Clone ID: PAT_MRT3847_7178C.1.pep
HSSFNCLKVPCKRRNLQEGVMNARAWASKSLATVSIGEESSSRGMHQ

SEQ ID NO: 254448 - protein, 59 aa, Glycine max
  Clone ID: PAT_MRT3847_71790C.1.pep
VGARPRREQQEGSSHGRRLGWELGGQNPSRAPAMGIEQPPKGHGRAARTNWEPPRAEYR

SEQ ID NO: 254449 - protein, 116 aa, Glycine max
  Clone ID: PAT_MRT3847_71791C.1.pep
MLDGRPSERDQPANGGIPPTRPTKMARSSAYPLFLISSILFISHIYASQVEAKPPVVKGLSYSFYSKTCPKLESIVRKHLKKVFKDDNGQAPALLRIFFHDCFVQVIFFLSKNVNC

SEQ ID NO: 254450 - protein, 47 aa, Glycine max
  Clone ID: PAT_MRT3847_71792C.1.pep
LALPAPDYSQSITRTGDMLELEAYSVLRCARRDTTKVSRYSVPTPAL

SEQ ID NO: 254451 - protein, 83 aa, Glycine max
  Clone ID: PAT_MRT3847_71793C.1.pep
LFQGIKSNPYFFWSTKIPLGKFLFFLVKGPNFFPLKNGGGGRKNKIFLNPRNFFKNALPNTMDLAPQKLCGGSHLIFHLSAGG

SEQ ID NO: 254452 - protein, 81 aa, Glycine max
  unsure (1)..(81): unsure at all Xaa locations
  Clone ID: PAT_MRT3847_71794C.1.pep
MKRYLASQGYVVPINFLFKPVTVSILNQPYIFASIAFAYDWGESKTSLHVLGFLCLLLLDFQIPYKINCSIILVAAMSHXK

SEQ ID NO: 254453 - protein, 144 aa, Glycine max
  Clone ID: PAT_MRT3847_71795C.1.pep
MGSLMAGWDSLILDPESATIERNRSLTKEEINAYWRVKKETELEHLRAMSKLSETIQARKFEDSENSHKSSTVTLASIKESLGMDVDQKSLEQLIKKNGWWTKSSWAFLNEPPVIEAASNKYASQFHVANLGSTKLSPGDGINA

SEQ ID NO: 254454 - protein, 35 aa, Glycine max
  Clone ID: PAT_MRT3847_71796C.1.pep
VLGCFAPSVQPTSVLVCFSCVQPVCFFPNYCQCLR

SEQ ID NO: 254455 - protein, 144 aa, Glycine max
  Clone ID: PAT_MRT3847_71797C.1.pep
MGSLMAGWDSLILDPESATIERNRSHTKEEIHAYWRAKKETELEHLRAISKLSETIQTRKCEDSENSHKSSTVTLASIKESLGMDVDQKSLEQLIKKNGWWSKSNWAFLNEPPVIEAASNEYASQFHVANLGSTKFNPGDGISA

SEQ ID NO: 254456 - protein, 86 aa, Glycine max
  Clone ID: PAT_MRT3847_71798C.1.pep
SFLLTYSNCFTGAFLKYSGAVFNLLQMGFKLFEIRDETQNRFLYAANAPWKHLVFGKPHSKGLLPPLSAGNGFKRTGGDSPFGGHL

SEQ ID NO: 254457 - protein, 57 aa, Glycine max
  Clone ID: PAT_MRT3847_71799C.1.pep
ATLNRKCTSAFLHLSYRSVSKSCLADYSNLLGRVQIFLWSSTNQVLIKMASICEMVL

SEQ ID NO: 254458 - protein, 38 aa, Glycine max
  unsure (1)..(38): unsure at all Xaa locations
  Clone ID: PAT_MRT3847_7179C.1.pep
YPAAVERSRKEGREMFFVIRHTIHXPCLFRNQTLVFCI

SEQ ID NO: 254459 - protein, 74 aa, Glycine max
  Clone ID: PAT_MRT3847_717C.1.pep
LGSEKNLFCLKQNLLLALKCLGQIHEKVFPLLPPGTKKMFFLKKKPVQKKGEGGHLVIQPLLKIGLSPLPPPMP

SEQ ID NO: 254460 - protein, 57 aa, Glycine max
  Clone ID: PAT_MRT3847_71800C.1.pep
VPVLPGQSVSYLNGKKEHRDTRLNSGSKGFIQCKAFLSSIMLSKPSYSANNVLKFYS

SEQ ID NO: 254461 - protein, 180 aa, Glycine max
  Clone ID: PAT_MRT3847_71801C.1.pep
HASAPRPLPRASAQVLLSTPCHRNSLFSCINLLVKSATDASNTAARRRHKGVLQHLFCLAETGALTEPLWDSATNPYPYPSNAAFVREFTINLLSTSFPNMTASEVTQFVNGLLESTNDLPTFKTHIRDFLVQSKEFSAQDNKDLYAEEAAAHRERERQRMLSIPGLVAPSELQDEMVDS

SEQ ID NO: 254462 - protein, 64 aa, Glycine max
  unsure (1)..(64): unsure at all Xaa locations
  Clone ID: PAT_MRT3847_71802C.1.pep
KLAKALIPPPPGWTGSMLXQWTGVQCNANRVTIIKSANQTLGGTLSPDLNSLFQLNKLSLWNNK

SEQ ID NO: 254463 - protein, 96 aa, Glycine max
  unsure (1)..(96): unsure at all Xaa locations
  Clone ID: PAT_MRT3847_71803C.1.pep
CLNYLHTWTFDHIRYFNGDIDIEINRDMITATVIQSERSYLFVHXSMYIMMVTGDSAGADTDLYISCQNTEHDEIDFEFLRNISGQPYILQTNVCH

SEQ ID NO: 254464 - protein, 292 aa, Glycine max
  unsure (1)..(292): unsure at all Xaa locations
  Clone ID: PAT_MRT3847_71804C.1.pep
MDPVLGDYARNVPDARESEVLSLFATIENNDEAAMVEDVPQILEAEFQXTLEMITKNFEDYPEHRLKFFYILRAIATHCFPALICLSSQQLKLVMDSIIWAFRHTERNIAETGLNLLLEMLKKFQASEFCNQFYRTYFLTIEQEIFAVLTDTFHKPGFKFHVLVLQHLFCLAETGALTEPLWDAATNPYPYPSNAAFVREFTINLLSTSFPNMTASEVTQFVNGLLESTNDLPTFKTHIRDFLVQSKEFSAQDNKDLYAEEAAAQRERERQRMLSIPGLVAPSELQDEMVDS

SEQ ID NO: 254465 - protein, 62 aa, Glycine max
  Clone ID: PAT_MRT3847_71805C.1.pep
SLPWPFRQFAETSNVGSGNNDSNNNNNSNSNSDSSGNNGGQSNSGNRGNQNFDSETRQEDLD

SEQ ID NO: 254466 - protein, 62 aa, Glycine max
  unsure (1)..(62): unsure at all Xaa locations
  Clone ID: PAT_MRT3847_71806C.1.pep
NFLYFHILKVTIXCIFENQIIVPPLRVCTIFLRKHYWYFISPKHIVHPHYSCFAGPCGCFWS

SEQ ID NO: 254467 - protein, 92 aa, Glycine max
  Clone ID: PAT_MRT3847_71807C.1.pep
LLIKHVLCLKFIVTVIKHNTRTYSKSKHKCNVITKQDYRMKLTLTTTISLLILLIYACFAKFFYAAGATSMTPLSSSSSSPSFEIQKLWPNS

SEQ ID NO: 254468 - protein, 126 aa, Glycine max
  Clone ID: PAT_MRT3847_71808C.1.pep
MVDLQTVCCMCGDVGFPDKLFRCNKCRHRFQHSYCSNYYGELAEIELCDWCQSEGRNYSRHSSNSKKLPVAGNDAGTTTRSEYSGEKIKHHDRHEEMSGSSEKGKSPVPSPRISTRRYKLLKDVMC

SEQ ID NO: 254469 - protein, 52 aa, Glycine max
  Clone ID: PAT_MRT3847_71809C.1.pep
CLQIDPIIYPLLHTIILYHIIHNHFIQTASPPYTIHSLTFLMILLSLFPLTL

SEQ ID NO: 254470 - protein, 81 aa, Glycine max
  unsure (1)..(81): unsure at all Xaa locations
  Clone ID: PAT_MRT3847_7180C.1.pep
KAPKPPPGLFFYHAGQRDKVVDFPWKAFDPWPNGRVFKDCERRGGGGPPQIWGMIKIXICPKEKGLPELDKFRSQIFGGNS

SEQ ID NO: 254471 - protein, 81 aa, Glycine max
  Clone ID: PAT_MRT3847_71810C.1.pep
KKRVFVPFLSKEKTPSQEQQGKLIIPPYSKKELLHTWGKNFGAPNPPKVFCPKNAEKNDIRVIKNGGHFFFFSRDSENLSL

SEQ ID NO: 254472 - protein, 83 aa, Glycine max
  Clone ID: PAT_MRT3847_71811C.1.pep
KRLFYHFYARISEFSIKKANKLRTILLIFAMCGGNSSLSSTPLSECCGPLVYILRHASLCSLRLITAINLFVWWNSCCSKHAN

SEQ ID NO: 254473 - protein, 75 aa, Glycine max
  Clone ID: PAT_MRT3847_71812C.1.pep
YLLLNKVHTLISSIQPNRSLSFSETCWLTYYCSTLSSTSNGPLTSSSSPASPSPSSSSTSSSPRSTFQSPAPDQT

SEQ ID NO: 254474 - protein, 215 aa, Glycine max
  unsure (1)..(215): unsure at all Xaa locations
  Clone ID: PAT_MRT3847_71813C.1.pep
RILNISFPTYGSFASHELSIINSTQKISLVQQMMAGNPNWWTMHPPSLIPPQYVFGSSSIPFNSSTQNQEPPQSLSQLLFTGLPGEEERIAFSPFQSKKLDEWNDQMLNIPSPIVPMPDVIKQEVSQSGSLYHHGHDQEFQVSGAPWSHMVPISSSPRSSVASFSSNNLLDFTYNKTDHRKNQLPDTHPSVIAQPLLEFTRRLRANHLQANHLXR

SEQ ID NO: 254475 - protein, 141 aa, Glycine max
  unsure (1)..(141): unsure at all Xaa locations
  Clone ID: PAT_MRT3847_71814C.1.pep
AKHNTQSFSQRLVWLHIQGNITKQMMAGNPNWWTMHPPSLIPPQYVLGSSSIPFNSSTQNQEPPHSLSQLLFTGLPGEEERVAFSHFQSKKLDEWNEQMLNPSSIVPMADVIKQEVSQSGNLYHHGHDHEFXVSGAPWSHM

SEQ ID NO: 254476 - protein, 317 aa, Glycine max
  Clone ID: PAT_MRT3847_71815C.1.pep
MSPTWVFVLGVAAMLVVVSGQSSVKPLVKTVKGKKVCDKGWECKGWSAYCCNETISDYFQTYQFENLFAKRNSPVAHAVGFWDYRSFITAAALYQPHGFGTTGGKTSGQKELAAFFGHVGSKTSCGYGVATGGPLAWGLCYNKELSPDKFYCDDYYKLTYPCTPGAAYYGRGAIPLYWNYNYGKAGEALKVDLLNHPEYIEQNATLAFQAALWQWMNPPEKHLPSPHDVFVGNWKPTKNDTLSKRVPGFGATINLLYGDQTCGQGSDNEAMNNIISHYLYYLDLLGVGREEAGPNEVLSCAEQAAFKPSGSPSSATN

SEQ ID NO: 254477 - protein, 35 aa, Glycine max
  Clone ID: PAT_MRT3847_71816C.1.pep
EHTPRASHAIHLAHGGNTQARAQYSMGGHHAIRGQ

SEQ ID NO: 254478 - protein, 90 aa, Glycine max
  Clone ID: PAT_MRT3847_71817C.1.pep
MMVYKTFQVGNYARSKRRFVSREQVECQPFSNHTYKGGGKVELLCQDRGIRGWWVKGAGVQVGRKEVEVQYGYFQDGDWRGNLEGWVPGF

SEQ ID NO: 254479 - protein, 77 aa, Glycine max
  Clone ID: PAT_MRT3847_71818C.1.pep
EMSRFLLKNDGLFLGSSSAMNCVGAVRVAQAIGPGHTIVTILCDSGMRHLSKFYDAEYLSLLGLTPKATGLELLGIK

SEQ ID NO: 254480 - protein, 45 aa, Glycine max
  Clone ID: PAT_MRT3847_71819C.1.pep
RGSIICCVCQKINLSLVFSTICCQSSSGTLVSFCISSTVQWSFRS

SEQ ID NO: 254481 - protein, 173 aa, Glycine max
  Clone ID: PAT_MRT3847_7181C.1.pep
WPGNSFTFKRIQDLPTLVGNRDDASSVEGYVVLNRPWAFVQWLEKADIEEEYILMAEPDHIFVNPLPNLAHGTLPAAFPFFYMNSYENVDIIRKFYPEEKGPVTDVEPIGNSPVIIKKSLMEEIAPTWVNISLRMKNDPETDETFGWVLEMYAYAVTSALHGVEHNLRKDFML

SEQ ID NO: 254482 - protein, 30 aa, Glycine max
  Clone ID: PAT_MRT3847_71820C.1.pep
SVGINTAWGLLMASISVDTGRETPLQFAYM

SEQ ID NO: 254483 - protein, 79 aa, Glycine max
  Clone ID: PAT_MRT3847_71821C.1.pep
YVYVDVGATIYGSSIGRWVMKQFPQQNKTFHVCANEAGKTFHQEGETKKGVSLLPYAAWGKKERLGFEINRDPPEKGNE

SEQ ID NO: 254484 - protein, 86 aa, Glycine max
  Clone ID: PAT_MRT3847_71822C.1.pep
PLLCSDPSKLAKPNQLLCFVPQVEKRGSLELSASWWQLIKNLRCLKFLIPILYSGYSQLICMPLFPIMLLRATNLIDKDPASAECT

SEQ ID NO: 254485 - protein, 73 aa, Glycine max
  Clone ID: PAT_MRT3847_71823C.1.pep
KNIVLLKKVPPPWGLGRHSSTRTHLNLKQSFERELFQQKKISPPRRGNNVERKQGNHLNLLNGKNFLKNKKGI

SEQ ID NO: 254486 - protein, 157 aa, Glycine max
  Clone ID: PAT_MRT3847_71824C.1.pep
PVYLLKLGRMHTPGKGISSSAIPYKRTPPPWLKTSTSEVCDQICKLAKRGHTPSQIGVALRDSHGIGQVKNVTGSKVLRILKASGLAPSLPEDLYHLIKKAVSCRKHLEKNRKDADSKFRLILIESRIHRLARYYKRTKQLPANWKYEADTASALVA

SEQ ID NO: 254487 - protein, 55 aa, Glycine max
  unsure (1)..(55): unsure at all Xaa locations
  Clone ID: PAT_MRT3847_71825C.1.pep
RSSLLKXGPGPXIHXXGQRVKGTXTVXRHQCXXVWLAVQPXLVSPXIXHPCSXRI

SEQ ID NO: 254488 - protein, 101 aa, Glycine max
  Clone ID: PAT_MRT3847_71826C.1.pep
TDKEVIVIHLSTNPITTFLGTIKMPSRTEAYLARKRKIIAKSPRSTVKRSKLCPKVEAAEKVECVFCKLLRGPQFKKFFDLGTTCPGFLLSYSMIQHCQAI

SEQ ID NO: 254489 - protein, 106 aa, Glycine max
  Clone ID: PAT_MRT3847_71827C.1.pep
ILFSLIFLTTMDTGLATVRRITRSQIAFNNNIPVSRKKNADCPDKSVLKTRDTNSLQQQEQCALTDISDDSPIAGLGDWKDIIDTRLYIFDIKRRVQETMNTSVSP

SEQ ID NO: 254490 - protein, 100 aa, Glycine max
  unsure (1)..(100): unsure at all Xaa locations
  Clone ID: PAT_MRT3847_71828C.1.pep
AGVRRRCKSRTAASAQAASPRSLRRWRREEKEGVAVEEVVKXXKRRHSGRHRKERLSLVPFQPPSTSSPTTFAGGENIRXFYRXGALVRHLLVCGGGPPP

SEQ ID NO: 254491 - protein, 102 aa, Glycine max
  unsure (1)..(102): unsure at all Xaa locations
  Clone ID: PAT_MRT3847_71829C.1.pep
RITRNXXXRFLEIEXLLLCQRXDXXXXSHXIPXSSXXXXFXRXRXLXXXXLXXPLXXXXSGXIHSAXXHXXSLHXXDXXSYXELXXTCXXAEFPXYVXVXRL

SEQ ID NO: 254492 - protein, 118 aa, Glycine max
  Clone ID: PAT_MRT3847_7182C.1.pep
HASEILQPPTGTKNDVNKWEQSILMNVGHFMQYLPHGGQILLFMDQITSSKMRDTNAGSSFISQLAADEGSRTGIKGTGILSSISTINAVTEKTSSILGGIRPKPVTNIDPESSTPLK

SEQ ID NO: 254493 - protein, 69 aa, Glycine max
  Clone ID: PAT_MRT3847_71830C.1.pep
FVHLRVQIYGYDFVAGDVIPHNIGNQAPVDGILITGHVFARDQTWITGESKNVRVDLYLQEHGKMDTLS

SEQ ID NO: 254494 - protein, 420 aa, Glycine max
  Clone ID: PAT_MRT3847_71831C.1.pep
MAMATMEEIPQSPEAKLGMRVEDLWDVQEAQLSPTEKLNACFESIPVSAFPLDPSNTEIEIKSDATLADAVKILAGHNVFSAPVVDVEAPEDASWIDRYIGIVEFAGIVVWILHQSEPTSPRTPSTPSSARAIAAAANGAAFALELEALGLGSAATTAGNFFEDLTSSELYKNTKVRDISGTFRWAPFLALERSNSFLTMLLLLSKYKMKSVPVLDLGSGAIDNIITQSAVIHMLAECAGLQWFESWGTKKLSEVGLPLVTGNQIIKVYEDEPVLQAFKVMRKKRVGGVPVIERETKKAVGNISLRDVQFLLTAPEIYHDYRGITVKDFLTEVRSYLEKNKNASPMLNEYVTCKKDCTIKELIQLLDQEKIHRVYVVDDDGDLQGLITLRDIISRLVHEPRGYFGDFFDGVLPLPANSRV

SEQ ID NO: 254495 - protein, 54 aa, Glycine max
  unsure (1)..(54): unsure at all Xaa locations
  Clone ID: PAT_MRT3847_71832C.1.pep
SLRFQRRVSQYITGFIRTSEKKVLVVGLCSEPLFSIKSVSSCYWLVCSRXXXXK

SEQ ID NO: 254496 - protein, 95 aa, Glycine max
  Clone ID: PAT_MRT3847_71833C.1.pep
VKNFLTEVRSYLEKNKNASPMLSEYVTCKKDCTIKELIQLLDQEKIHRVYVVEDDGDLQGLITLRDIISRLVHEPRGYFGDFFDGVLPLPANTRV

SEQ ID NO: 254497 - protein, 70 aa, Glycine max
  unsure (1)..(70): unsure at all Xaa locations
  Clone ID: PAT_MRT3847_71834C.1.pep
MASSQEEVTLXGATGSPCVSRVHIARKLKGSQYLYVEVNSRSTRELPRRSNPVRKKVPLLMHSVMPIAEP

SEQ ID NO: 254498 - protein, 49 aa, Glycine max
  unsure (1)..(49): unsure at all Xaa locations
  Clone ID: PAT_MRT3847_71835C.1.pep
XXXXIFFFFFFFFFFFFFFLGKTQILAFGVENPKLLQSTTEPRSKLLDG

SEQ ID NO: 254499 - protein, 61 aa, Glycine max
  Clone ID: PAT_MRT3847_71836C.1.pep
MSLYQPFLDNLSQAQSAGKLRWASPQYQRGHSAVRPQEPHYAAKSWPMANVNIGCHSVHTF

SEQ ID NO: 254500 - protein, 185 aa, Glycine max
  Clone ID: PAT_MRT3847_71837C.1.pep
MERERALFERVRKNSTVEEEVENEVEEEDESGVSITEEEKKKGVGSSGGRRGSSGGSGGVSPPSCQAERCGADLTDAKRYHRRHKVCEFHSKAPVVVVAGLRQRFCQQCSRFHDLAEFDESKRSCRRRLAGHNERRRKSNPEASNEGSTKGHHPKETTHCRLANERERIQMNLPGSSGYKSFNIR

SEQ ID NO: 254501 - protein, 47 aa, Glycine max
  Clone ID: PAT_MRT3847_71838C.1.pep
VQSYMIERQILKHCCKAMVECCQISRFSQYYIYQDTASDMNMIEIVA

SEQ ID NO: 254502 - protein, 65 aa, Glycine max
  Clone ID: PAT_MRT3847_71839C.1.pep
GFFIPLVWSRQQIFSIGGNPIQDRNHPKRDEASSPSGYLYKHKANQLNPKLWLREIKYVPLEPVF

SEQ ID NO: 254503 - protein, 60 aa, Glycine max
  Clone ID: PAT_MRT3847_7183C.1.pep
SRAAVFVESIGDPVKDAYWPTHTQPYEAHERSASIGHSLLVRTWWPACQELNSVDRRKSI

SEQ ID NO: 254504 - protein, 103 aa, Glycine max
  unsure (1)..(103): unsure at all Xaa locations
  Clone ID: PAT_MRT3847_71840C.1.pep
GAXWXXXRXXXXXAXXLXXWXXVXXGGXRXVXXGXTXXPXXVXCXAAXVXXVXGXXXVRXXCXXVSCCXXXIDFXFXXFXXXSXXXXVXXXXXSSXVVXVXXF

SEQ ID NO: 254505 - protein, 55 aa, Glycine max
  Clone ID: PAT_MRT3847_71841C.1.pep
LKKGAPVQKYKKGPAVKNQRLTYLIGRAKNNFFGRLLKKKKRQKLWPFPTFPPPE

SEQ ID NO: 254506 - protein, 60 aa, Glycine max
  unsure (1)..(60): unsure at all Xaa locations
  Clone ID: PAT_MRT3847_71842C.1.pep
TTTLNFSLHCSLTXLSNLSLSSSFQCVSILSKCAALRLHITHQQQLQNIKQPSVIKIQEP

SEQ ID NO: 254507 - protein, 111 aa, Glycine max
  Clone ID: PAT_MRT3847_71843C.1.pep
MSGIIHKIEETLHVGGHKKEEEHKGEQHHGGEYKGEHHGEHSTEYKGEHHVGEHKPEHHGGEEHKEGFLDKIKDKIHGEEGGTAEGEKKKKKKEKKKHEHGHDSSSSSDSD

SEQ ID NO: 254508 - protein, 198 aa, Glycine max
  Clone ID: PAT_MRT3847_71844C.1.pep
MNREKTGLTRVLQEIKESELASYGMIVNSFYELEQVYADYYDKQLLQVQGRRAWYIGPLSLCNQDKGKRGKQASVDQGDILKWLDSKKANSVVYVCFGSIANFSETQLREIARGLEDSGQQFIWVVRRSDKDDKGWLPEGFETRTTSEGRGVIIWGWAPQVLILDHQAVGAFVTHCGWNSTLEIKLSIRTTAGRPLYR

SEQ ID NO: 254509 - protein, 54 aa, Glycine max
  Clone ID: PAT_MRT3847_71845C.1.pep
DWESDSWSHIGFEMRAILYATGEVLSNGEPILLGYWFVRGYWALRTVIRLNSAD

SEQ ID NO: 254510 - protein, 89 aa, Glycine max
  Clone ID: PAT_MRT3847_71846C.1.pep
RGKVFFSYLNTHALHKARSEEGKRKEIQTVTSTRKKNKIEQSSLIGETGHPQQWLGSEGKQSGAIVKTANRCKGNHPPVLEKGAPPPRP

SEQ ID NO: 254511 - protein, 87 aa, Glycine max
  Clone ID: PAT_MRT3847_71847C.1.pep
NLFGLQMCIICLNYVLGLTFSICSPLFLRGGRRGLMGLYHCRRFSFWSLGELQNFRFLFLHSANIHVGRACCIFPILLAYSSCINIM

SEQ ID NO: 254512 - protein, 42 aa, Glycine max
  Clone ID: PAT_MRT3847_71848C.1.pep
YDVYYLSYFRNYNVHIGFILIDTDSKSFFVMHMEAWVEPGIP

SEQ ID NO: 254513 - protein, 89 aa, Glycine max
  Clone ID: PAT_MRT3847_71849C.1.pep
AFITGVHMSLTRSTKASVQQFSALCLQHLGDRVAAGEPDSSAFSGRHSCVFTECSIHISECQKLRVTSCASIIVIISNWVHVTYSAWTY

SEQ ID NO: 254514 - protein, 105 aa, Glycine max
  unsure (1)..(105): unsure at all Xaa locations
  Clone ID: PAT_MRT3847_7184C.1.pep
LPVRLRGGMHIVVNNHTGIFGTLQVXSSETIDNVEATMQDKDGIPPEQXRRIFPGKELEDXAPIGDYKMRNESSLHLVLRHLCGRQIRVRILTGKTNTLQVQSSD

SEQ ID NO: 254515 - protein, 92 aa, Glycine max
  Clone ID: PAT_MRT3847_71850C.1.pep
YYITHFTHYYFFFLEERKNRGRVFFLFIRAMPNPPLLRGTNEPSKGKTYPTKCFGIRITRRGGRPLLISGWKHISVTKDVKKLVRYPGDGYL

SEQ ID NO: 254516 - protein, 26 aa, Glycine max
  Clone ID: PAT_MRT3847_71851C.1.pep
GGLQNDQNFTSDRTHVNDPRSLHMMN

SEQ ID NO: 254517 - protein, 74 aa, Glycine max
  Clone ID: PAT_MRT3847_71852C.1.pep
PQNKNYYKPMDKYYCVIDYDQLNKPRIELRAGRRSSHCKFFKFCTKILHLPLFYTLLIALWEQPMKQTRSFHHY

SEQ ID NO: 254518 - protein, 169 aa, Glycine max
  unsure (1)..(169): unsure at all Xaa locations
  Clone ID: PAT_MRT3847_71853C.1.pep
EATCKEHPDTVGGAMMSGLREAVRMIDILSSGNDYIADVEALAAARGQLDTERDEVRDIIKRLDALELSNIMYKNSLDGAHILTREALLREMFFNTKTTAGRLHVAKQLLTLPXDTLKSFAGRKEGLAILNSWMLDSMGKDGTQLLRHCLRLLVRVSTDLLAVRLSMKT

SEQ ID NO: 254519 - protein, 55 aa, Glycine max
  Clone ID: PAT_MRT3847_71854C.1.pep
KSSFHNMQEHQQLQCLISNISTENKCMEKRRFKMRQKIYVVNDKEENKSLQNEDY

SEQ ID NO: 254520 - protein, 99 aa, Glycine max
  unsure (1)..(99): unsure at all Xaa locations
  Clone ID: PAT_MRT3847_71855C.1.pep
XSXSLAXXWGWXXXSXXXXXXXXXXCXXRXXXXXXXXLLXLXXVXAXRXXVWLXFAXGXXPXXCXXRXXXGSXXFXXGYVFXXXXXXVVXXXXVRLXXX

SEQ ID NO: 254521 - protein, 60 aa, Glycine max
  unsure (1)..(60): unsure at all Xaa locations
  Clone ID: PAT_MRT3847_71856C.1.pep
TITMXPPXXNTTXXXXTXYASXYHSXXLIXPLXXXNXLXXXSQXXSXXXLNPQSPXYVXX

SEQ ID NO: 254522 - protein, 72 aa, Glycine max
  Clone ID: PAT_MRT3847_71857C.1.pep
MNTHEETGMAKFKHKCGEGKGVVEMLECLEREAIMGEDVGKEPMDYNRRAQIFDRSSRVFQALKELNNNNSQ

SEQ ID NO: 254523 - protein, 36 aa, Glycine max
  Clone ID: PAT_MRT3847_71858C.1.pep
HTNINASLTSAHIRLKRKGTGTLNSHTRVQISDPLV

SEQ ID NO: 254524 - protein, 77 aa, Glycine max
  Clone ID: PAT_MRT3847_71859C.1.pep
FFQSLSEARLLDPTSQTLDVFQSSNYAKTHARVHITLSFVLHNELGHNASLLYRKTKLHALVSLRNCGLLLNRNPIL

SEQ ID NO: 254525 - protein, 73 aa, Glycine max
  unsure (1)..(73): unsure at all Xaa locations
  Clone ID: PAT_MRT3847_7185C.1.pep
MQVCCHAQVHPFFHAVTYVAHNIEQGHERDVLGENVGFDSEXLFRMEKVYSSYAQFVSGKSLKFDRTGDRLHY

SEQ ID NO: 254526 - protein, 143 aa, Glycine max
  unsure (1)..(143): unsure at all Xaa locations
  Clone ID: PAT_MRT3847_71860C.1.pep
MLYFCGFKGKRLVSSYRWPGTGCFDQTSASLYIRKKAHGHFFRRFFTQKFNGWCQCYKDNXLFWPHIDYGSSDTMEMHKAKLANGLAVLLSTVFLQQXIKLXQLRKEALCPIEWLEIIGGPPLTHIGLVLLLQTMMNATVSND

SEQ ID NO: 254527 - protein, 107 aa, Glycine max
  unsure (1)..(107): unsure at all Xaa locations
  Clone ID: PAT_MRT3847_71861C.1.pep
MVGLFFFVMNCFCRYLKRGVNDRGRVANDVETEQIVLDEESGSCKGKMSSVVQMRGSIPLFWSQEASRFSPKPDINMQRYDPTYSATXLHFEDLTXKYCNPIIGLNL

SEQ ID NO: 254528 - protein, 42 aa, Glycine max
  Clone ID: PAT_MRT3847_71862C.1.pep
RAFRDWPRSYSFFFKISCSNQFFNPSLKRIRRLSSSELNLRT

SEQ ID NO: 254529 - protein, 56 aa, Glycine max
  unsure (1)..(56): unsure at all Xaa locations
  Clone ID: PAT_MRT3847_71863C.1.pep
SGFKGELYWSPKVMCRYIHHRHSAPHSADDXVRTSFSLCLTYPFCVCMCVKGGKHR

SEQ ID NO: 254530 - protein, 85 aa, Glycine max
  unsure (1)..(85): unsure at all Xaa locations
  Clone ID: PAT_MRT3847_71864C.1.pep
KRAAGDPPKGGTEQGPHKDEKQEEEKPKDTRPRDESGAALETGGGRXGDAGGHKQTTAATKEKEDMPTAKEETSGPQQTMGKSKD

SEQ ID NO: 254531 - protein, 82 aa, Glycine max
  Clone ID: PAT_MRT3847_71865C.1.pep
AKMKVANTHQIVLAGTSLGVRNTFHSIVAILTTLVVVTTVCLRQDGGHLPPKINASGSNSSSSSSSKCDLFYGKWVFDNESY

SEQ ID NO: 254532 - protein, 334 aa, Glycine max
  unsure (1)..(334): unsure at all Xaa locations
  Clone ID: PAT_MRT3847_71866C.1.pep
FFSSLLQQWLLCTLLLSFAVIFFTVALLYLRRVFRRRQFRLPPGSHGLPLIGETLQLISAYKSDNPEPFIDERVERYGSIFTTHVFGEPTVFSADPEVNRFILQNEGKLLDCSYPGSISNLLGKHSLLLMKGALHKRMHSLTMSFANSSIIKDHLLHHIDRLICLNLDAWSDTVFLMDQAKKITFEFXQHVIAVYVMKMRMVNQIPWFGTMCPISLHMSLSYRITFKARTKVAEALALVVRQRRKEYGENKEKKSDMLGALLASGDHFSDEEIVDFLLALLVAGYETTSTIMTLAIKFLTETPLALAQLKVRHDPTCAVRHPGAPLVWSEFCYK

SEQ ID NO: 254533 - protein, 134 aa, Glycine max
  Clone ID: PAT_MRT3847_71867C.1.pep
MYVMEMGMVTQIPWFGFFTLPFPLFSTTYRRAIKARTKVAEALTLVVRQRRKEYDEDKEKKNDMLGALLASGDHFSDEEIVDFLLALLVAGYETTSTIMTLAIKFLTETPLALAQLKVPNKPKLALDLIYLFMV

SEQ ID NO: 254534 - protein, 73 aa, Glycine max
  unsure (1)..(73): unsure at all Xaa locations
  Clone ID: PAT_MRT3847_71868C.1.pep
HNALVGHRAYXVLATIRPTXALMAQLFLNKPIEWSEFQHAVVDGLQNRQWDLRLRXPIQSIFRYPAPDCMRQA

SEQ ID NO: 254535 - protein, 213 aa, Glycine max
  unsure (1)..(213): unsure at all Xaa locations
  Clone ID: PAT_MRT3847_71869C.1.pep
FCNRNQRTFRPKKSTPSGSKGAQLRKHIDATLGSGNLREAVKLPPGEDLNEWLAVNTVDFFNQVNLLYGTLTEFCTPENCRTMSAGPKYEYRWADGVQIKKPIEVSAPKYVEYLMDWIEAQLDDESIFPQXLGSPFPPNFKEVVKTIFKRLXFRVYAHIYHSHFQKXIVSLKEEXAHFNTCFKHFILFTCEFGLIDKKELAPLQELIETIIPY

SEQ ID NO: 254536 - protein, 64 aa, Glycine max
  unsure (1)..(64): unsure at all Xaa locations
  Clone ID: PAT_MRT3847_7186C.1.pep
LANYLPRLLHXWVTQNWLPSNSVIEKSPAFFNKGDIYILETIPGLPMLTKASYMFDVSFTCSIM

SEQ ID NO: 254537 - protein, 82 aa, Glycine max
  unsure (1)..(82): unsure at all Xaa locations
  Clone ID: PAT_MRT3847_71870C.1.pep
XXIDDPDXKXWLALGTKTKKXGGGKKKKGXKGEXADEXXEXXPMDXTNEGHFLSDLTIPLFLSQTMVFSFHFTIPLSFWTVH

SEQ ID NO: 254538 - protein, 93 aa, Glycine max
  Clone ID: PAT_MRT3847_71871C.1.pep
GSFSDNIEDGEVIGIITLEDVFEELLQEEIVDETDEYVDVHKRIRVAAAAAASSVARAPSIRRLTAQKGAGGQSKPGLTLKKSAEDGSNTRSQ

SEQ ID NO: 254539 - protein, 52 aa, Glycine max
  Clone ID: PAT_MRT3847_71872C.1.pep
MVLAEFCACISRVLQLMSNATVIDEPELHDRVNDNHRALLHSDVQFKLAPRN

SEQ ID NO: 254540 - protein, 287 aa, Glycine max
  unsure (1)..(287): unsure at all Xaa locations
  Clone ID: PAT_MRT3847_71873C.1.pep
MELSVPFRFRSRNLLSPSTHIPITYPSKHQPPFLTKFVNKPKISKLTVRAQRRAPIEGLSDELNAIARCNLDFAYTRRRVRAAFADMQQQLDHCLFKNAPAGIRTEEWYERNSRGLEIFCKSWMPKPGIPIKASVCFCHGYGDTCTFFFEGIARIIAASGYSVFAMDYPGFGLSEGLHGYIPKFDYLVDDVIEHYTKIKARPDLSGLPRFILGQSMGGAVSLKVHXREPNNWDGMILVAPMCKIAEDVLPSDAVLKVLTLLSKVMPEAELIQHHDIADLFFWIPSNR

SEQ ID NO: 254541 - protein, 98 aa, Glycine max
  Clone ID: PAT_MRT3847_71874C.1.pep
STKDATIINATEWGLQEHSIQSHHEAPILGDYLCSWVNRCSECCTVPSNRREILYVLRMRTIEVPVRVLKAASERKRYVNRSCNTVGKCSVILSKFSL

SEQ ID NO: 254542 - protein, 69 aa, Glycine max
  Clone ID: PAT_MRT3847_71875C.1.pep
KLLRLLFFFLLACLTYFMIKSIRLLALSILTLLHMDDIIVILIVLTIKNKTYFHIYIFKKFSLINFALN

SEQ ID NO: 254543 - protein, 50 aa, Glycine max
  Clone ID: PAT_MRT3847_71876C.1.pep
QLPFKSPPILRIDKRHLYKRASYLGTETIIIKAPVETEGFRLQTIYIYDS

SEQ ID NO: 254544 - protein, 127 aa, Glycine max
  Clone ID: PAT_MRT3847_71877C.1.pep
RADSARDPYLWMSIAQENGWHVLIDACALGPKDMDSFGLSLFQPDFLICSFYKVFGENPSGFGCLFVKKSAITTLESSSCAGIVNLVPDRLLLHPSEDKDSSKQKPLSILQEQDLSSLSSFSGRIQT

SEQ ID NO: 254545 - protein, 188 aa, Glycine max
  unsure (1)..(188): unsure at all Xaa locations
  Clone ID: PAT_MRT3847_71878C.1.pep
TKDYMKGEQFRSHGHTMDQATLCYAXERKLHIATYLYTEYDHTVXCSNVQYYEKHGYGVEDDSETLYHERAYMGNTPDXTQTLKTNNLLLMLGYTIAFSSXDIMTNRSXPYSLLYNAVKHTYEQWMIKDTHLMTTDALSYKSPMIERLXRHGYRIVGIIXGDKWSDLVDDHTSXSMTFKLSNTMYYIE

SEQ ID NO: 254546 - protein, 50 aa, Glycine max
  Clone ID: PAT_MRT3847_71879C.1.pep
MSHPYDVGQLYILSTGQGESQKDAKYDQFFLGDYRPLIQDTHGNVLDQVS

SEQ ID NO: 254547 - protein, 59 aa, Glycine max
  Clone ID: PAT_MRT3847_7187C.1.pep
MSRPPSWLRLWSVSPRQIRLLLAACRCPNCRHSAFSYLGVPFIPTSRDYQYYMAVACIV

SEQ ID NO: 254548 - protein, 42 aa, Glycine max
  Clone ID: PAT_MRT3847_71880C.1.pep
AFPIRKENLLIIFCYVAFKTLKTPSKKKKKRSFKYNLGFQIA

SEQ ID NO: 254549 - protein, 43 aa, Glycine max
  Clone ID: PAT_MRT3847_71881C.1.pep
RFKQPFILCFVFLAKKLLEFYNSKWNLGKEISIKALHLCSNKK

SEQ ID NO: 254550 - protein, 57 aa, Glycine max
  Clone ID: PAT_MRT3847_71882C.1.pep
PVRLEKNTKRATFPVLPNQLLQQRLLPGKKMVKFKLPRSFWKSCLRAIIKNIKGFFL

SEQ ID NO: 254551 - protein, 131 aa, Glycine max
  Clone ID: PAT_MRT3847_71883C.1.pep
MWHLLLLVAVAGSTGFATKRFLTHHRNTGEGENVNLHDPNELDFSGSESISQTHHSDGVFTFSSSKSESLTQRDGPKSRRSRASKNGVRAPKVEARSEKRSGGTRLHFRLKRGEITKNVAAKAPVRSSKDD

SEQ ID NO: 254552 - protein, 174 aa, Glycine max
  Clone ID: PAT_MRT3847_71884C.1.pep
GNHERDYIDSGSVYVTPDSGGECGVPYETYFPMPTSAKDKPWYSIEQGSVHFTVISTEHDWSENSEQYEWVQKDMASVNRRGTPWLIFMGHRPMYTTNHGFLPSENKFMEAVEPLLLENKVDLVLFGHVHNYERTCSLFQNECKAMPAKDKNGVDTYDGRNYSAPVHAVIGMAG

SEQ ID NO: 254553 - protein, 83 aa, Glycine max
  Clone ID: PAT_MRT3847_71885C.1.pep
KKTALHIYIFFSPGFSFSPPPSKNEGQNYPKGSFLLTTTKLFSNASINTKLGGKKKNGGEGETTHTRSPPGWVFFSFFYNLGG

SEQ ID NO: 254554 - protein, 60 aa, Glycine max
  Clone ID: PAT_MRT3847_71886C.1.pep
PDLARVPYCQNVVIWAPVSSLVGSSQGDDGICFHPISISRFGLTPFGFSELKSGLCMVKS

SEQ ID NO: 254555 - protein, 115 aa, Glycine max
  unsure (1)..(115): unsure at all Xaa locations
  Clone ID: PAT_MRT3847_71887C.1.pep
WHHKKNKLAAVLQQRDXKKNPVTNQNNLLAKHPFSSSWKNKKKATNDPSKQXCNLKNEKNNPPCSAXKTAGVVVTPSITTTILTTAIPPPPNNIPPFLPTISGFSPKKTKKGLLL

SEQ ID NO: 254556 - protein, 89 aa, Glycine max
  Clone ID: PAT_MRT3847_71888C.1.pep
PLFLPFTGGLGFKCCNLEPKWTKLSQRFKKKPLFWGPQLPYKIWGKLGKFFSTPPGVCFLLNPILFHPRVGLGVGFFSPISAPPIKKRK

SEQ ID NO: 254557 - protein, 79 aa, Glycine max
  Clone ID: PAT_MRT3847_71889C.1.pep
MDLSGAFSIILGLLAPILQEPFRQILKRLPGTMDSTIESTNEKLSGPLDEIVKKRLEDKNRPSQNFQSLILGARESKKV

SEQ ID NO: 254558 - protein, 387 aa, Glycine max
  Clone ID: PAT_MRT3847_7188C.1.pep
TDVPYDVVQYLKKAYDDLEEPLTRFLESSKVDWLFYDLIPFWAGTVASKLGIKSAFYSICTPPCMGFLGPPSVLMGEDPYRTKLKDFTVTPPWISFPTTVAYRYFEMMRNSDAVSDNDSGISDMYRFGAVIKNCDIVVIRGCTEFEPEWFQVLENIYQKPVLPVGQLINREFEGDEDNITTWQWMKDWLDKQPCGSVVYVAFGSEAKPSQDEVTQIALGLEESKIRFFWVLRVQRGPWDPDVLRLPEGFEERTKGRGIVCTSWAPQLKILSHVAVGGFLTHSGWTSVVEAVQNEKPLILLAFLADQGLNARVLEEKKMGYSVPRDERDGSITSDAIANSIRLVMVEDEGRVYREKIKEVKDLFVNTVRQEKYIDELLHYLSRNLSNC

SEQ ID NO: 254559 - protein, 195 aa, Glycine max
  unsure (1)..(195): unsure at all Xaa locations
  Clone ID: PAT_MRT3847_71890C.1.pep
MKKQKRSDPQNDTTNPFEVLTEELMFVILDFLETAAPLDKKSFSLTCKWFYSLEAKHRRLLRPLRAEHLPALAARYPSVTELDLSLCPRVGDDALALVAGAYAATLRRLDLSQSRRFTGSGLMSLGARCEYLVELDLSNATELRDXXASRRWARARNLRRLWLARCKNVTDMGXGCIAVGGAGSLRVICLKWVCW

SEQ ID NO: 254560 - protein, 102 aa, Glycine max
  Clone ID: PAT_MRT3847_71891C.1.pep
LELTFRRLRRGLGDMATSISWRQLSCSGLWTVSLIQNRTLLLSCHAHDLFRRRPVATSGHGHRAGYAAKRACTHNKCSECTSATGCARATTVTGIIQKKTIE

SEQ ID NO: 254561 - protein, 74 aa, Glycine max
  Clone ID: PAT_MRT3847_71892C.1.pep
HFSNKIQYALICRSCSLKRFATISLHIILYECHSCTPKSGEPLVNQKSYVPSTKNFSNQNLPSMFRSFDNFSCR

SEQ ID NO: 254562 - protein, 51 aa, Glycine max
  Clone ID: PAT_MRT3847_71893C.1.pep
RFKRPKMEVAGRVWISSIWGQKELFKDWIFCPAFYAPLVSNKIFMAPTALV

SEQ ID NO: 254563 - protein, 126 aa, Glycine max
  unsure (1)..(126): unsure at all Xaa locations
  Clone ID: PAT_MRT3847_71894C.1.pep
FQDRLQLTSIADNLNYRHRNAQYAGRASVELHTLIXFRKRPTDTEARIVKIRSNGFFVFVPKYGIEGPVYLTKAEKGSGEWYVDDQQQKIKKMDGSLSYSVLQTVQIHMEVVEPQPNRPKLQLTLI

SEQ ID NO: 254564 - protein, 50 aa, Glycine max
  Clone ID: PAT_MRT3847_71895C.1.pep
LLLIYDLVIILCFRILVRQIIITLFTPVKPIKRGFIHTSGHLLHPNNQFG

SEQ ID NO: 254565 - protein, 170 aa, Glycine max
  Clone ID: PAT_MRT3847_71896C.1.pep
EEYHHYGLAAPLYTHFTSPIRRYADVIVHRLLAASLGISKLPPVFQDSLHLTSIADNLNYRHRNAQYAGRASVELHTLIYFRKRPTDTEARIVKIRSNGFFVFVPKYGIEGPVYLTKAEKGSGEWYVDDQQQKIKKMDGSLSYSVLQTVQIHMEVVEPQPNRPKLQLTLI

SEQ ID NO: 254566 - protein, 516 aa, Glycine max
  unsure (1)..(516): unsure at all Xaa locations
  Clone ID: PAT_MRT3847_71897C.1.pep
IARDSNPSHASGDTETEVVLIENDINTRPFSSQVLACLPPLPWVVSSEDLSNPIRKDLCHLCVFSVDPPGCKDIDDALHCHSLPNGNFEVGVHIADVTNFVHPGTPLDDEAAQRGTSVYLVERRIDMLPKPLTEDICSLRSDVERLAFSVIWEMTPEADIIATSYTKSVIKSSAALSYVEAQARMDDSRLMDPITADLRNMNSLAKKMRLRRIERGAXLASAEDKFQIDTETHDPLDIGMYQIREANQMVEEFMLAANVSVAQQILNSFPLVSLLRRHXPTREMLEPLLRTAAAVGLHLDVSSSKALADSLDHAVGDDPYFNKLIRILATRCMTQAVYFCSGDLSPPEYHHYGLAAPLYTHFTSPIRRYADVIVHRLLAASLGISKLPPVFQDSLQLTSIADNLNYRHRNAQYAGRASVELHTLIYFRKRPTDTEGRIVKIRSNGFFVFVPKYGIEGPVYLTKAEKGSGEWYVDEQQQKIKKMDGSLSYNVLQTVQIHMEVVEPQPNRPKLQLTLI

SEQ ID NO: 254567 - protein, 108 aa, Glycine max
  unsure (1)..(108): unsure at all Xaa locations
  Clone ID: PAT_MRT3847_71898C.1.pep
AQFCPLWKTXWFFKNIWGFPHEAQKGFLQGTKGPKIPDNPSKIQAQPPSIKFKPPGKGKEGVPQKNKELPQKIPEKFGFFIYKKKRLAKGDFLFFPERKFKIGPKIFC

SEQ ID NO: 254568 - protein, 32 aa, Glycine max
  Clone ID: PAT_MRT3847_71899C.1.pep
NALEFMKDDDPYDLPKRPHRTETVEHLNPTSI

SEQ ID NO: 254569 - protein, 125 aa, Glycine max
  unsure (1)..(125): unsure at all Xaa locations
  Clone ID: PAT_MRT3847_7189C.1.pep
MWRXFVGDLIFDVSKMTSPYIKCTLSFFIAFGNSADDPITFEAFPHKLVHAXARFREKAALKFSQEEFLTACSTHVRPATTLLADGCPYLHAMVHDSSVPTVPLDLDIGVHAATINNMRAYGLNP

SEQ ID NO: 254570 - protein, 77 aa, Glycine max
  unsure (1)..(77): unsure at all Xaa locations
  Clone ID: PAT_MRT3847_718C.1.pep
AKKTXFKPSNSPHPNLKPPPMTHPFRTRFFLRVSFGAWGRGGWNFLHHPLKLKPLIXNSIXXVLSQPGIFQTLFFPL

SEQ ID NO: 254571 - protein, 39 aa, Glycine max
  Clone ID: PAT_MRT3847_71900C.1.pep
EITPISGKCSITFIIYARLLAFNGHLSDVCLDIPNETMM

SEQ ID NO: 254572 - protein, 127 aa, Glycine max
  Clone ID: PAT_MRT3847_71901C.1.pep
PPPGGGFFPKPKIFETIGQLGWGFQNKLPQGKNFWGFFRALENFLPAFFFCFSPPSPFWEGQGGPFLPLPGLPLGPLRNFFKNVFPLFLAIQNSQKGIFGIKKRGGGFPPPGWGGHPVLFFSRPLFF

SEQ ID NO: 254573 - protein, 70 aa, Glycine max
  Clone ID: PAT_MRT3847_71902C.1.pep
PTTKAHVEGWPPIRSFRINSLATTSKNKEEVDGKVGCGALFVKVIMDGAHLVWIVDLKNYSTYYELCGAL

SEQ ID NO: 254574 - protein, 58 aa, Glycine max
  Clone ID: PAT_MRT3847_71903C.1.pep
SHNTNQFSLQLTPPFDSARFDSVRFSTSLNPHFHAQFAISEIKQCSSCMNLANKPVLT

SEQ ID NO: 254575 - protein, 33 aa, Glycine max
  Clone ID: PAT_MRT3847_71904C.1.pep
NLSYSNSLVIITNSKTNSLYVDTDICLHYFQIL

SEQ ID NO: 254576 - protein, 853 aa, Glycine max
  unsure (1)..(853): unsure at all Xaa locations
  Clone ID: PAT_MRT3847_71905C.1.pep
MALSMHKDSANNQMDSSKYVRYTPEQVEALERVYAECPKPSSLRRQQLIRECPILSNIEPKQIKVWFQNRRCREKQRKEASRLQTVNRKLTAMNKLLMEENDRLQKQVSHLVYENGYMKQQIHTASAGTTTDNSCESVEMSGHNQQQRXPTPKDPNREANNPAGLFVCFSLLAIAEETLAEFLSKATGTAVDWVQMIGMKPGPDSIGIVAVSRNCSGVAARACGLVSLEPTKVAEILKDRQSWYRDCRCVDVLSIVPTGNGGTIELLYMQTYAPTTLAAARDFWTLRYTTSLEDGSLVICERSLTSSTGGPTGPPSTTFVRAEMLPSGFLVRSCEGGGSIIHIVDHIDLDVWSVPEVLRPLYESSKFLAQKLTTAALQHIRQIAQESSGEVHYGGGRQPAVLRTFSQRLCKGFNDAVNGFVDDGWSLMGNDGVEDVTIAINSSPNKFLGSNYNASMFPAFGGGVLCAKASMLLQNVPPALLVRFLREHRSEWADYGVDAYSAACLKASPYAVPCARPGGFPSTQVILPLAHTIEHEEFLEVVRIEGHAFSPEDVAMARDMYLLQLCSGVDESAVGACAQLVFAPIDESFADDALLLPSGFRVIPLDPKSDGPAPTRTLDLASTMEVGSGNARPAGEADLNGYNLRSVLTIAFQFTFENHTRDNVAAMARQYVRSVVGSVQRVAMAIAPSRLNTQLAPKSLPGSPEALTLARWIFRSYRVHTGTELFKAESTAGDAIFKQLWHHPDAIICCSVKTNASPVFTFSNQAGLDMLETTLVSLQDIMLDKVLDESGRKILCSEFSKIMQQGFASLPAGICVSSMNRPVSYEQVVAWKVLNDDDSNHCLAFMFINWSFV

SEQ ID NO: 254577 - protein, 53 aa, Glycine max
  Clone ID: PAT_MRT3847_71906C.1.pep
VLKAQLYISMSLMSQKERAISTSRLFCMITNIHLHILHICVGVDRAIRSVPVC

SEQ ID NO: 254578 - protein, 163 aa, Glycine max
  Clone ID: PAT_MRT3847_71907C.1.pep
LNTQLAPKSLPGSPEALTLARWIFRSYRLHTGTELFKAESTAGDAILKQLWHHPDAIMCCSVKTNASPVFTFANQAGLDMLETTLVALQDIMLDKVLDESSRKILCCEFSKIMQQGFAYLPAGICASSMNRPVSYEQAVAWKVLNDDDSNHCLAFMFMNWSFV

SEQ ID NO: 254579 - protein, 35 aa, Glycine max
  unsure (1)..(35): unsure at all Xaa locations
  Clone ID: PAT_MRT3847_71908C.1.pep
EEAFPETLQALSXPLHSEMMVARYGLCARDRTKMY

SEQ ID NO: 254580 - protein, 132 aa, Glycine max
  unsure (1)..(132): unsure at all Xaa locations
  Clone ID: PAT_MRT3847_71909C.1.pep
SKCPFSFVSVVNNASSNSSTTPPSCLHPISQLQSTKNRKPKRHHIPRTTCSENQNNPTPNPSEGELSHIVGHRRNVLLGLXGLCGAVTLNNNPFAFAAPISPPDLNTCGPPDTPAGANPTNCCPPSSKIIDF

SEQ ID NO: 254581 - protein, 141 aa, Glycine max
  Clone ID: PAT_MRT3847_7190C.1.pep
MEGGVGLLEWGEGSLYGGDRFQLWNESDLRNKRYLDTCGTACQRRLTLAEYLRTRRDTGVGKRVNYRVREGAGEYDARKHFIYYFSNSAIERHREVQSASASEPDLFSLSLKSHADSLSTNFSEVLLITINLSSWLLPANV

SEQ ID NO: 254582 - protein, 68 aa, Glycine max
  Clone ID: PAT_MRT3847_71910C.1.pep
NRNNQAQTRAKTKEVTELPGRTAKLKARKQGTAAAAEEMFTRGKKYNTRKSQALEAQTEYNRRGAEQP

SEQ ID NO: 254583 - protein, 135 aa, Glycine max
  unsure (1)..(135): unsure at all Xaa locations
  Clone ID: PAT_MRT3847_71911C.1.pep
MESFFMITPFQNHTFHQHVSFTGTDLSWMVEFLKGMVKPVAATAVVLLAVLLSFMQKLGLEGEMVYAMFRAFLQLSIIGFVLQFIFNQGNAGWIILAYLFMVCVAGYTAGQRAKHXPRGKYVAGAFILTGTAVTM

SEQ ID NO: 254584 - protein, 71 aa, Glycine max
  unsure (1)..(71): unsure at all Xaa locations
  Clone ID: PAT_MRT3847_71912C.1.pep
WIHXXSAXRSXDLPXGXVLIXRXTXPLLXKMXXPXXHXPCELSLPHPTGDEFGAVXRVVLXADXGXXSTXG

SEQ ID NO: 254585 - protein, 50 aa, Glycine max
  Clone ID: PAT_MRT3847_71913C.1.pep
CSSNQNDSFIRLDVFITIIYWSILFSVAFSCIWWELYSLYDCYKHIKSNK

SEQ ID NO: 254586 - protein, 83 aa, Glycine max
  Clone ID: PAT_MRT3847_71914C.1.pep
VGKEPLNLCPASAERYVDIYTPEELIFFFKKKECALGNDSFGQASAERYCEALSCVYKRPRMENKQTKKKKKKRHPSGRIEET

SEQ ID NO: 254587 - protein, 55 aa, Glycine max
  Clone ID: PAT_MRT3847_71915C.1.pep
FKKKKTLPKKNVNISTSHSKNLTNEEMKKVYMFYKKKKKSLQTVRWCSRKRKNVI

SEQ ID NO: 254588 - protein, 185 aa, Glycine max
  Clone ID: PAT_MRT3847_71916C.1.pep
NFQDCISLRKLPRSIYKLKSLKALILSGCLKIDKLEEDLEQMESLTTLIADKTAITRVPFSIVRSKRIGYISLCGYEGFSRDVFPSIIWSWMSPTNSLSSRVQTFLDVSSLVSLDVPNSSSNHLSYISKDLPLLQSLCIECGSELQLSIDAANILDALYATNFEELESTAATSQMHNMNVLTLIE

SEQ ID NO: 254589 - protein, 107 aa, Glycine max
  Clone ID: PAT_MRT3847_71917C.1.pep
FNSSGSHSGLHHNTHCDCTIHSSQLNAYKLQDPIKPFTKQKINLQQSIIKVYRRRDRSNKTSMGKGAQEYVMHLSNNTCFLILIIALFSKFSPINSIVISIPIKNLK

SEQ ID NO: 254590 - protein, 464 aa, Glycine max
  Clone ID: PAT_MRT3847_71918C.1.pep
MAKLKTGIDSGSWAHNVRVPDEILIWAKANPGDPFQLDFWVASVAPPQLHEGWVESVPGDPLTFPGLAPTSLNRLGQLSVKGIVLTLPDIVPSLSPTGHFGSRKLIADVKIVNFPTPRCPLTMPTQFGPSPLITALDPYVSTAQNSARPSTSLLLAIEGHGEKERLRRKMMVFHKLHDHDLTLEAAWPQLFVDHKGKYWDVPESLSVDLSSLVSESGLRYHFGIHKNGGNPQAMNATDGNPPLSLLPGLCAKVAVSYEKIKYFWRDKGAAEQENEEALPYDVRLKEPHAAVSGIIGSTFASWIWNGRSLSSVDSREDQEVSTSKRSRHNADLFGSVCYSFQHGKFTKKYGDLTRVDARLDISSASAFAKKILNGSSSSTADVSKQPSASPRLNLIFQQQVAGPVVFRADSRIALESFARKNGVSVEDFICSLSYSLKDLQSGKIVAWYSPKRKEGMVEFRMYEF

SEQ ID NO: 254591 - protein, 57 aa, Glycine max
  Clone ID: PAT_MRT3847_71919C.1.pep
KLFKSKLLQMPLCLCPDKKTNDFSRLTMACKKPTMQNYFFPTYKVFTKRRLRAKPSS

SEQ ID NO: 254592 - protein, 90 aa, Glycine max
  Clone ID: PAT_MRT3847_7191C.1.pep
MSSIIPSRNHAWLIFAGDQAFAYALMSAGSAASGVTNLNRTGIRHTALPDFCKPLHNFCDHVAISIAFTFTSCFLLATSAVQDVIWLSQH

SEQ ID NO: 254593 - protein, 77 aa, Glycine max
  Clone ID: PAT_MRT3847_71920C.1.pep
FFYDNSRGRQKVGGVGYLILSAGPPILPAPAMLGGVLCVSRAKKHWDFHKDHIFFGVRLFYPRNTHIEIYFCACAVA

SEQ ID NO: 254594 - protein, 36 aa, Glycine max
  Clone ID: PAT_MRT3847_71921C.1.pep
FARGNANSHATLGTYKGDATPAEGASESLHVKGSKN

SEQ ID NO: 254595 - protein, 402 aa, Glycine max
  unsure (1)..(402): unsure at all Xaa locations
  Clone ID: PAT_MRT3847_71922C.1.pep
MVVVVPLDWLSFQHCLRNRTTHLPLSSRFTTTTTTSLCFHSPIIQAKLPFFTNSDSFQVGRPIGTYGFINVTSYSAFPSGPGTDYSLEDLGGLKTQDVGEGNVKIRLYEGRVSRGPLTGTPVTFKVYPGRRAGGVVADALAANELNTHLFLQSSSKGIGQNLVLLVGGFETTTGEQTMQNLQVRGXSRDREGSSWNPFEQGLTTKRRQNFIIKMLQGVMKGLAYLHDHDRLHQSLGPFSVVLNTISEREGSYLIPRLRDLAFSVNVRYTELDDSGQLVEGLWRRATGAGAFTQMEKRAFGIADDIYEAGLFFAYMAFVPFCEAGVMDSLSLQRLLENTFQLDLEATREYCLADDRLVNAVEFLDLGDGAGWELLQAMLNADFRKRPTAEAVLNHRFMTGAVL

SEQ ID NO: 254596 - protein, 239 aa, Glycine max
  unsure (1)..(239): unsure at all Xaa locations
  Clone ID: PAT_MRT3847_71923C.1.pep
MVVVVPLDWLSFQHCLRNRTTHLPLSSIFTTTTTTSLCFHSPIIQAKLPFFTNSDSFQVGRPIGTYGFINVTSYSAFPSGPGTDYSLEDLGGLKTQDVGEGNVKIRLYERRVSRGPLTGTPVTFKVYPGRRAGGVVADALAANELNTHLFLQSSSKGIGQNLVLLVXGFETTTGEQWLAFRDDGKYNAADYAKLASEKVSRDREGSSWNPFEQGLDTKRRQNFIIKMLQSVMEGSSLLA

SEQ ID NO: 254597 - protein, 78 aa, Glycine max
  unsure (1)..(78): unsure at all Xaa locations
  Clone ID: PAT_MRT3847_71924C.1.pep
KLFSINLQSKFYHASVRNGRWNVPSMTIKAXAAVEGDVLLDEESICVNEESDYGVVCMHHVGILCENLERSLDFYQNV

SEQ ID NO: 254598 - protein, 86 aa, Glycine max
  Clone ID: PAT_MRT3847_71925C.1.pep
HCPWPHTTSIAQFTYNSLLSINVNNPFMRPHYCPTFVLLRVLFFISPWDAIFYNLTSNILLLSVKPSGLYFIQLLFWFRHSRPLTA

SEQ ID NO: 254599 - protein, 33 aa, Glycine max
  Clone ID: PAT_MRT3847_71926C.1.pep
LLKLSFFLALISIFYTTLLFLYFTILTIILYNH

SEQ ID NO: 254600 - protein, 91 aa, Glycine max
  Clone ID: PAT_MRT3847_71927C.1.pep
SSSISSATPFTSSTNRSPPKTRRGFRVESLKRSSKPASAELVKDPNKDLSRILRTEAAIRGVHNKAKSSSHKQLPPKALLESLDDAIKRCR

SEQ ID NO: 254601 - protein, 55 aa, Glycine max
  Clone ID: PAT_MRT3847_71928C.1.pep
VVQRHPFISIPLYQIPKFIIRMNDTKRISVIIGEGWGSYVQSLPTHSEWLPSCVS

SEQ ID NO: 254602 - protein, 127 aa, Glycine max
  Clone ID: PAT_MRT3847_71929C.1.pep
HWGFRCREKFFDADPPPGGVFPPAKGFREVFGLGPGPFLGFPKPTGLFGGRWAQWGLVFPLMGEIIPGRGALPPPPFEVGGPTKKNDPQGGFKVFFFFKAALNPGTGKFFTKRGGVDYTLPLLFVWV

SEQ ID NO: 254603 - protein, 160 aa, Glycine max
  Clone ID: PAT_MRT3847_7192C.1.pep
SQVDRIRDQEYHHLNPSNVCFDYTGYGLFSHAQQQKQTASVASSSSCPPPSLPEPPFFVISYKPVTLHSQILYGGQESELESKIRERIMAFMSISEADYTLVFIANEVSAFKLVADSFQFHPDGELLTVYDHKSEAVDEIIETSFKCYWNTLFVYLLEPN

SEQ ID NO: 254604 - protein, 86 aa, Glycine max
  Clone ID: PAT_MRT3847_71930C.1.pep
FVTTTSSVKNNNLDIELVCADISYYVKSRSGNGVWFLVRQSPRCSRWQLLSPFMRSSCRSDWVVLNGEPRISIYALTPERTKPKQP

SEQ ID NO: 254605 - protein, 61 aa, Glycine max
  Clone ID: PAT_MRT3847_71931C.1.pep
KHTDSDKVEVSTNRLQNSTCFKCCGIPKVSPVILRFSMMRLQNNERTRYMSIFVCYSIMPP

SEQ ID NO: 254606 - protein, 149 aa, Glycine max
  Clone ID: PAT_MRT3847_71932C.1.pep
RAAPSLIQLITLFFFFLIKMIRTIFACLNGKASHKKSKVEPLEVTKPVYRDELTKKQRPRKAGKKTVRFAESEPTILGEDGEKEFEKTRSVSGNEVGEKEGIRVRIKLTKEEAARFLSKCNRGVLEFEDVARELGLIPVNRVSIVSDGT

SEQ ID NO: 254607 - protein, 97 aa, Glycine max
  Clone ID: PAT_MRT3847_71933C.1.pep
MDQFPIRLFFVTSLLSCPFLLIAQSPSPIISRISVVGAVYCDTCSTSTFSKQSYFLQGVEVHIQCRFRATSPKTSEQISFSVNRTTDQYGVYKLEIP

SEQ ID NO: 254608 - protein, 146 aa, Glycine max
  Clone ID: PAT_MRT3847_71934C.1.pep
IIGVTFIVWIGVNLGWDWSFIVCTLTILFAIVFICMGNSLYRNNVPKGSPLVRIIQVFVAAFRNRKLLIPDNTDELHEIHEKQGGDYYEIIKSTDQFRFLDRAAIARSSTGARTTSGPWRLCTVTQVEETKILVRMLPIILSTIMN

SEQ ID NO: 254609 - protein, 76 aa, Glycine max
  Clone ID: PAT_MRT3847_71935C.1.pep
HPSTFFRKTLTQLQSLLHSFFTTTTSLSLSLSLSLYIYIYIFQARSFISFGELETNLDSWQLGASLMHYPFSSHPI

SEQ ID NO: 254610 - protein, 141 aa, Glycine max
  Clone ID: PAT_MRT3847_71936C.1.pep
LSTFQSNLFTKPTLNNNHTTHVFITTINTPPPFSEKHLHSYRVFFIHSSPPPPLSLSLSLSLYIYIYIFQARSFISFGEREREREREGPREPGRDPQVRNKLSLVAVGGIINALSILFTSHLMFGCTNLTSIPKPPPLLVM

SEQ ID NO: 254611 - protein, 119 aa, Glycine max
  Clone ID: PAT_MRT3847_71937C.1.pep
MGNYISCTLAPPLMKNTRAARVIFPTGEVKQYKEQVINVAELMMECPTHFLANSNSLHIGRRFSPLGADEELECGNVYIFFLMRRLNSVVTAADVAVLFMAGHMTAKRITNDTDLMSCD

SEQ ID NO: 254612 - protein, 43 aa, Glycine max
  Clone ID: PAT_MRT3847_71938C.1.pep
KKPAGGLITLLGVKTKLQLDVAIAKPCIFMYKMGNPYFLRFNQ

SEQ ID NO: 254613 - protein, 105 aa, Glycine max
  unsure (1)..(105): unsure at all Xaa locations
  Clone ID: PAT_MRT3847_71939C.1.pep
QIGHDEHRDVINTNDQELAVVLYPLMASDYMTCMCMYDTDYGPGNYLYYDVRDFMTLLYHENXVTAFCIKNPIENPRQDVIADCVVESTGVFTDKDKAAAHLKGG

SEQ ID NO: 254614 - protein, 121 aa, Glycine max
  Clone ID: PAT_MRT3847_7193C.1.pep
VLASYFIRERTVAFLISLGAAPGALTDPCPEHPSGRTPADLASANGHKGIAGYLAESSLSAHLTTLDLNRDAGENSGAKVVQRLQNIAQVNDLDGLSYELSLKDSWLQVDSRGSPGNELEF

SEQ ID NO: 254615 - protein, 50 aa, Glycine max
  unsure (1)..(50): unsure at all Xaa locations
  Clone ID: PAT_MRT3847_71940C.1.pep
AIYYKRVPEKIQXELATKIKVVSXLDQKSSXXFXXXPXSFFFTLSTQFLK

SEQ ID NO: 254616 - protein, 86 aa, Glycine max
  unsure (1)..(86): unsure at all Xaa locations
  Clone ID: PAT_MRT3847_71941C.1.pep
SNQVEAEWIXQYEPGVYITLVALSDGTRDLKRVRFSRRRFGEHQAETWWSENRDKVYERYNVRSTDKSANQAARSSEGAVSPVSQT

SEQ ID NO: 254617 - protein, 63 aa, Glycine max
  Clone ID: PAT_MRT3847_71942C.1.pep
FLGLLKRAREEYGFRQKGVLVIPCYPQELEKILDHESTVGGDGGKLTDSVQDISECSAISCSS

SEQ ID NO: 254618 - protein, 36 aa, Glycine max
  unsure (1)..(36): unsure at all Xaa locations
  Clone ID: PAT_MRT3847_71943C.1.pep
EITHSYAIIDTRTGTHLNACMHLXIGSYNNMESPHI

SEQ ID NO: 254619 - protein, 98 aa, Glycine max
  Clone ID: PAT_MRT3847_71944C.1.pep
RNSARGLMRAGHSPPKYKTKHLKTNEFRALVEFKGMQFVGQPKRIKQLAERDAAIEALAWLTHTSDNNQHEDDKSPPDITDNMLKLLGKRRKSKQGHG

SEQ ID NO: 254620 - protein, 215 aa, Glycine max
  unsure (1)..(215): unsure at all Xaa locations
  Clone ID: PAT_MRT3847_71945C.1.pep
PRVRGRVGGRVGLGARYPFAKPHKEVPIIFGEWWNADPEAIITQALQTGGGPNVSDAYTINGLPGPLYNCSHKDTFKLKVKPGKIYLLRLINAALNDELFFSIANHTLTVVETDAVYVKPFATNTILITPGQTTNVILKTNSHYPNATFLMTARPYATGLGTFDNTTVAAILEYKTPSNTHHSAASLKNLPLLKPILPALNDTXFATKFTNKLRS

SEQ ID NO: 254621 - protein, 76 aa, Glycine max
  Clone ID: PAT_MRT3847_71946C.1.pep
WKFGPGPIFPRETLFPCFPQALIRLPFGETLSPSGTGPGFIPGFTSLLVGGPPFFSSFSFFFKITHTSHIITTIKR

SEQ ID NO: 254622 - protein, 76 aa, Glycine max
  Clone ID: PAT_MRT3847_71947C.1.pep
ILGSIIHFLFLFPLSPHFSLPSKFNLNLLSYEKQNLCKYNFHSLIIQQRKQQDTEGHSHVSANLSSSEIKKIFEQK

SEQ ID NO: 254623 - protein, 195 aa, Glycine max
  Clone ID: PAT_MRT3847_71948C.1.pep
MARATATTTTPLSNLTRPSHTKLCHFSANNVPFSIQPFHSRFYHNHRLKPIITNCHGKLNSSGGGEAYAMDEAGFDEYDGVEEESDDEDDAESSVDLLIRFLQSMFKKVSKRAKKASRSVLPTVISPQLVSFAVDGTLLLASLSVVKALLEVICTLGGTVFAAILVLRVIWAAVSYFQSSGNSFNQGGNSFGAVA

SEQ ID NO: 254624 - protein, 41 aa, Glycine max
  Clone ID: PAT_MRT3847_71949C.1.pep
SHHLPHYQFGISSRHILRSSFLKPRSLSIVRTVYPDLVVYL

SEQ ID NO: 254625 - protein, 72 aa, Glycine max
  Clone ID: PAT_MRT3847_7194C.1.pep
KKTQGGRGKKIPVGEKGAGFLGQKGNSKRPWIFLANRPEIGQVKFPKKSFFGPRGIKNQNWVRETLFFWEKD

SEQ ID NO: 254626 - protein, 228 aa, Glycine max
  unsure (1)..(228): unsure at all Xaa locations
  Clone ID: PAT_MRT3847_71950C.1.pep
MTDYFSGSVEFGLNLSKRVYYGKGSAPSPAPAMSRSLSKSPEGYLPTAPMCYAVISDPEKVENPDIRSYQPYVLGQCEPPALIPLELHGVGMEVECSLDTAFVTVSGKWRVHCVTASSTCDCQVAIPIGEEGSLLGLEVDGSGKSYHTELISLKDEKDKDKVAKAKDGYFVKSHIYTVKIPQFRGGSVFSIKIRWSQKILFHDGQLSLCVPFSXPSYVNPAGRKISKK

SEQ ID NO: 254627 - protein, 91 aa, Glycine max
  Clone ID: PAT_MRT3847_71951C.1.pep
MSVAVVNSFTITEFVNDKAKFDGFVNEWFARIDENGDGKLSRDKIRGRLGMLLPFGSELPPQQENEEIFKRFDEEWNGALDLKEFKALNDR

SEQ ID NO: 254628 - protein, 140 aa, Glycine max
  Clone ID: PAT_MRT3847_71952C.1.pep
VSCKKVLETKQELEALESNAKSLSEFLHSHCKMEGDQSYTNTIKAVSGYLQKRMPCKSICQNLKLWEIEDFECKDGCYKVCLNYCGYVTQRFTVNTGQSSIIISNNLNDVNIGKTFPNLDAVSAFLFVLNPHTTKKCSGS

SEQ ID NO: 254629 - protein, 51 aa, Glycine max
  Clone ID: PAT_MRT3847_71953C.1.pep
LRNFANMRPLSFTRSNFSKKEANSSPFWQNTLNNHLTSLLIKNNLGLNNQS

SEQ ID NO: 254630 - protein, 51 aa, Glycine max
  Clone ID: PAT_MRT3847_71954C.1.pep
SAYEKNYQYIYKCHTSLIEFRNAKHRALNSNNFVCLNPLFCNFSEINFNTP

SEQ ID NO: 254631 - protein, 43 aa, Glycine max
  Clone ID: PAT_MRT3847_71955C.1.pep
SRHTFISLHKTEPFCIILHMQTQKIRFRQVTNGADQNTTDKLY

SEQ ID NO: 254632 - protein, 45 aa, Glycine max
  Clone ID: PAT_MRT3847_71956C.1.pep
MWHLPNRIIIPYWSLYQFDQCSQTGTKTLLRHPTNKPKKERKNKL

SEQ ID NO: 254633 - protein, 101 aa, Glycine max
  unsure (1)..(101): unsure at all Xaa locations
  Clone ID: PAT_MRT3847_71957C.1.pep
SLQIEFRVTTESVPTMATVTFSFSAKTLTLPYHPKTSISSFAPVTNLRLSHSIRPNPPPGGKNPPPGGEEKKIXFWGGFFTNRIRAALDGDFSAKRSNNNE

SEQ ID NO: 254634 - protein, 89 aa, Glycine max
  unsure (1)..(89): unsure at all Xaa locations
  Clone ID: PAT_MRT3847_71958C.1.pep
MAVLSQPSAGKTTKLTPSAPEVAGVRMSKTATKHDYXGSPCPGPYRVKYXDPILXEPTYYLTAXTLSDYCWHTAGLYTYPETICKNREL

SEQ ID NO: 254635 - protein, 837 aa, Glycine max
  unsure (1)..(837): unsure at all Xaa locations
  Clone ID: PAT_MRT3847_71959C.1.pep
MKLSPREIEKLDLHNAGYLAQKRLARGLRLNYVETVALIATQILEFVRDGEKTVAQLMCIGRELLGRKQVLPAVPHLVESVQVEATFRDGTKLVTIHDLFACENGNLELALFGSFLPVPSLDKFTENEEDHRTRHPXMKLDLSNIALQHXRAIILRVVNKGDRPIQVGSHYHFIEVNPYLTFDRRKAYGMRLNIAAGNATRFEPGECKSVVLVSIGGNKVIRGGNNIADGPVNDSNCRAAMKAVVTRGFGHVEEENAREGVTGEDYSLTTVISREEYAHKYGPTTGDKIRLGDTDLFAEIEKDFAVYGDECVFGGGKVIRDGMGQSSGHPPEGSLDTVITNAVIIDYSGIIKADIGIKDGLIVSIGKAGNPDIMDDVFFNMIIGANTEVIAGEGLIVTAGAIDCHVHYICPQLVDEAISSGITTLVGGGTGPTAGTRATTCTPAPSQMKLMLQSTDDMPLNFGFTGKGNSAKPDELHEIIRAGAMGLKLHEDWGSTPAAIDSCLTVADQYDIQINIHTDTLNEAGFVEHSIAAFKGRTIHTYHSEGAGGGHAPDIIKVCGMKNVLPSSTNPTRPLTLNTIDEHLDMLMVCHHLNREIPEDVAFACSRIREGTIAAEDILHDIGAISIISSDSQAMGRVGEVISRTWQTADKMKSQRGPLQPGEDNDNFRIKRYVAKYTINPAIANGLSQYVGSVEAGKLADLVLWKPSFFGAKPEMVIKGGEVAYANMGDPNASIPTPEPVIMRPMFGAFGKAGSSHSIAFVSKAALDEGVKASYGLNKRVEAVKNVRKLTKRDMKLNDTLPQITVDPETYTVTADGEVLTCTAAKTVPLSRNYFLF

SEQ ID NO: 254636 - protein, 273 aa, Glycine max
  Clone ID: PAT_MRT3847_7195C.1.pep
MGLLQRPLCCHSQQDQQQQPPQSHDHLHFESSTSSSLSSQASLPSIPSLTPQKLHHPEEQPQTTHHKLVTTVKGHTSTIFSLALHGKSLYSASSNGEIRACSRDPTSTELKYISGEQPLPNTTIVVNSNAPIKSLIVSHDKLFTVHQDHKIRVWKTTDQPGNNNNGIVYTGSADTKIKMWKKLEGDKKHSLIGTLEKHKSAVNALALNSDGSVLYSGACDRSILVWEGDEDNNNNMVVVGALRGHTKAILCLVVESDLVCSGSADNSVRIWRR

SEQ ID NO: 254637 - protein, 132 aa, Glycine max
  unsure (1)..(132): unsure at all Xaa locations
  Clone ID: PAT_MRT3847_71960C.1.pep
FVLAESAEVDFDFFPVEVASHEGVAHIGELKCGVYVPLPTKTNLVETSKEWQLDLPCDKIPRVLTTTDERLVGPXHEGYDPFLGGTQKYATPTMPLAEEIIPKVAHHMGAEWFDCFARESRLQSHLLHEDFL

SEQ ID NO: 254638 - protein, 263 aa, Glycine max
  unsure (1)..(263): unsure at all Xaa locations
  Clone ID: PAT_MRT3847_71961C.1.pep
LDWSDGCVRGTKLGCDDGDGFVKYEGMRLPDTSSSWFDTSMSLDECESVCLKNCSCTAYTSLDIRGVFSGCLLWFGNIVDMGKHVSQGQEIYIRMAASELDQTWHKRHASTKLVVILATIATFIVGLILGSVIYIRRKLGKPGKTNIIDQMHHSIKHEKKDIDLPTLDLSTIDNATSNFSASNILGEGGFGPXYKGVLANGQEIAVKRLSKNSGQGIXEFRNEXXLIANLQHRNLVRSLXXCIQDDERILIYDFMPTGAWILH

SEQ ID NO: 254639 - protein, 131 aa, Glycine max
  Clone ID: PAT_MRT3847_71962C.1.pep
KKKWGFYPLFVPTKKNAPPGNVFPLKPNSLFQFFPSPNPKLGIPFPPPVDPPKRWGPRKGKNSPPAKKILGQKMLFLAQKPLLNFFGQLGPPTKGGTFFTISQGPEKKFVQFPQKKICSPGFYGKFDLSPP

SEQ ID NO: 254640 - protein, 239 aa, Glycine max
  Clone ID: PAT_MRT3847_71963C.1.pep
MAAEMERESLITEAPNAPVTAQRRVRNDLENSLPKPYLPRALKAPDTGHPNGTAGHRHHNLSVLQQHCAFFDQDDNGIIYPWETYMGLRSIGFNVVASVIMAIVINVGLSYPTLPNWFPSLLFPIYIHNIHKAKHGSDSGVYDTEGRYVPANIENIFSKYARTVPDKLTLGELWDLTEGNRNAFDIFGWLAAKFEWGVLYILARDEEGFLSKEAVRRCFDGSLFEYCAKMHTTSDAKMS

SEQ ID NO: 254641 - protein, 73 aa, Glycine max
  Clone ID: PAT_MRT3847_71964C.1.pep
MTQRTRRAAIVGKYGTRYGASLMTHIKRMEASQHRPFFCEFCGTYADPRKAVGICGCKDCRKVKAGCAYTMYT

SEQ ID NO: 254642 - protein, 67 aa, Glycine max
  Clone ID: PAT_MRT3847_71965C.1.pep
MISRPLHGALFPRGVVEHKREFWEQPDGLGYKPCLDFRREYRRESEGVAMNRRRLLTAEVFGGTSPI

SEQ ID NO: 254643 - protein, 94 aa, Glycine max
  Clone ID: PAT_MRT3847_71966C.1.pep
LRLPGTYHIPNIPRCKMEGLLLMSNAPHSLTTEKGWAELYLTSPIVEETPVSNTTKAAITDPLRSENRPYWPTQPPPCRPGNRTVSPGAPVWPQ

SEQ ID NO: 254644 - protein, 65 aa, Glycine max
  Clone ID: PAT_MRT3847_71967C.1.pep
WVQKIPEFKGILQGISRKKYLRLHMNVLRVRRHFMINRPAKPFDMMHMILHSIWLRRKNIKLIAS

SEQ ID NO: 254645 - protein, 34 aa, Glycine max
  Clone ID: PAT_MRT3847_71968C.1.pep
CNYGFNFNCISRWIKTRQVCHYNNSEWEIQIYGQ

SEQ ID NO: 254646 - protein, 68 aa, Glycine max
  Clone ID: PAT_MRT3847_71969C.1.pep
LMPTGKVCESVVSATFEVQIMLSWWNIDDDSIDVSVVSLYNKNIAVSFGAASQVSAVEGAECVGNVRV

SEQ ID NO: 254647 - protein, 84 aa, Glycine max
  Clone ID: PAT_MRT3847_7196C.1.pep
CGPVTSPSICFPPAYISALSASTEDAAPDTLVMRSADSSLASFWEPPIRDQPWLFVTGKWVGVSGRYRARGTPRGFRAGARAGV

SEQ ID NO: 254648 - protein, 96 aa, Glycine max
  Clone ID: PAT_MRT3847_71970C.1.pep
FATYSLVALRWCVCVCLCLPPIITRPAKASTHTPPHQRAHAHANLPYQHPRFYRIFFWFARGMRALPVPYRSMSRLCSLYALLVSSPHCRLTSCCA

SEQ ID NO: 254649 - protein, 157 aa, Glycine max
  Clone ID: PAT_MRT3847_71971C.1.pep
GILFFWVFCFFRLSQGKGNFLPPQGFPKKGKAFLPPKARFFGEKFFPLKGKLPLQKSQPLDSLGPPRVLAFFWSMKGPNFLFCELNPPSNFWFEGKTPKIRFPNPRDEGIFLSWRVQITLNFGGGFYFFPFPKKKKKKKKKTNKKKKKKKKKKKKQT

SEQ ID NO: 254650 - protein, 127 aa, Glycine max
  unsure (1)..(127): unsure at all Xaa locations
  Clone ID: PAT_MRT3847_71972C.1.pep
SNRGRGGSAGNKFQMSLGLPVAATVNCTNNTEAKNLYIISIKWIKRRLNHLPSTCIGDIIIATMKKGKPNLRKKVLPXVIVRQRKPXHRRDDIYIYFEDNTYIIINPKREIKSSTITNPIKKEYADL

SEQ ID NO: 254651 - protein, 107 aa, Glycine max
  Clone ID: PAT_MRT3847_71973C.1.pep
RKREQNALPVKPGHPKPAITPSACKIAGKAKPRYSHAFLSFNTLNSALFSHSPPKLLPSHTHNQKIKFHRSKMQVTLHTCEALLLLLNISDHVFLVSRRFKVSVSPC

SEQ ID NO: 254652 - protein, 125 aa, Glycine max
  Clone ID: PAT_MRT3847_71974C.1.pep
FARSFYEDPQGALCKLQQTGTVSDYVTDFEHIANRTLGLSPSCLLSCFISGLSPELLREVQALRPLSLVQATELARHQEDKMLDRRRGTRAPSHPNRTFNHRSSPNPSTAHPKVPLKRLMTEEMA

SEQ ID NO: 254653 - protein, 49 aa, Glycine max
  Clone ID: PAT_MRT3847_71975C.1.pep
RRCFRSSPGKDSSCNDSSHWIHNYTYLHDYIVLHHMLKKNDGLMSTGAT

SEQ ID NO: 254654 - protein, 38 aa, Glycine max
  Clone ID: PAT_MRT3847_71976C.1.pep
NNYHAFGPVHDNCLTCAQDLEFRPYLFDLKHFQNSILL

SEQ ID NO: 254655 - protein, 205 aa, Glycine max
  Clone ID: PAT_MRT3847_71977C.1.pep
MAEKSKELLQFEHKGTPLSSLESTLLVCDNKKESDTQTRRLPPHGTPLTAPHPPSQLLGKVKDFLGVMSEANKRLELDAKDNPENYDIEELTGNESEVIEMDLMLGVADLHTPEAVAAAESAISTCQPVIPLAADGSETDSEESSTDDDCGDDDIESSDDYHDDGNNSEKPSSLVQKSISSKDNIQEKQKGNVHSKKRPRIVELS

SEQ ID NO: 254656 - protein, 122 aa, Glycine max
  unsure (1)..(122): unsure at all Xaa locations
  Clone ID: PAT_MRT3847_71978C.1.pep
RHLITHDLXFCAGYVGLALDTIPXRLTKANQLHEARAFYGLQIAIQNIHSDMYRLLLXTYMNDSTEKNRLFRAINTIPCLTNKAQCALRXIDASXSFAERLGALACVEGIFFFGSFCAMFWL

SEQ ID NO: 254657 - protein, 67 aa, Glycine max
  Clone ID: PAT_MRT3847_71979C.1.pep
SLLNSSCSLPTPNAKLLNTFTTFTLQKHSKRWRFTPTLTLTPAGPPSPSTIWFLPCTLSAPNSKPLP

SEQ ID NO: 254658 - protein, 76 aa, Glycine max
  Clone ID: PAT_MRT3847_7197C.1.pep
LHTGGNPKKVDPNGLSSRSTSPGEKESQGKRPGAKCERISGNHPSHKGVLFRGNELANGSLWAGIIQYRRKLFICC

SEQ ID NO: 254659 - protein, 60 aa, Glycine max
  Clone ID: PAT_MRT3847_71980C.1.pep
TVPSPSCTRNRTVTHTHYTPLNRNMAFTLHNTIVIVAVNIPLEAPPMRLCDRTLTVRSDS

SEQ ID NO: 254660 - protein, 38 aa, Glycine max
  Clone ID: PAT_MRT3847_71981C.1.pep
VSTRDLVAGSIKQSKSLEFELCLSSAQSVDHCVSNGIE

SEQ ID NO: 254661 - protein, 143 aa, Glycine max
  Clone ID: PAT_MRT3847_71982C.1.pep
MEGGEQVLPSATTVAAAGYPNVSPPPLADPVGASDLAAAASDDVVAEPEIHALISDEEHDHDHDHEHEHEHDHDLEHDHEHEHDHHEDRDDHAAVAAVSLEDLKLKIIKQVEYYFSDENLPTDKYLLGFVKRNKEGFGKGYVS

SEQ ID NO: 254662 - protein, 159 aa, Glycine max
  Clone ID: PAT_MRT3847_71983C.1.pep
APPEVIFIADPEGLMMGVGSSIGPQYVGNGTSEMRLVGALREVLAGGHLGFEEVQGVLKDVLPIKEGDEKPQGVSEALLSAFLIGQRMNRETDRELKAYCLAFDDEIGPPPVADVRSLTHYGEPYDGNTRFFRSTLFVAAVRSCYGESCLLHGVDWMAP

SEQ ID NO: 254663 - protein, 401 aa, Glycine max
  unsure (1)..(401): unsure at all Xaa locations
  Clone ID: PAT_MRT3847_71984C.1.pep
MEGGEEVLPSATATSAATGNPTASPPPLADLVGAPDLAAASDDVVTQPEIHALISDEEHDHEHEHDDDLEHEHDQHEHDHHHEDRDDHAAVAAVSLEDLKLKIIKQAEYYFSDENLPTDKYLLGFVKRNKEGFVPVSVIASFRKIKKLTRDHAFIVAALKESSLLVVSGDGRRVKRLNPLRFNESRDHKLYDXFGKEFTRWMILEKSPRQYXRRXHIRMKSNHDLHIKXKYVKRSTQYKRNXIGRITSFFDQFXSKKAAEKALTRLNSVQDXTNGMWVKLLKGMGKYGHKKISLERTSXEKNSSRPEQTGDEENHGSNEHHEDTHEEEDGDHLSKDKGGQRYRNQGRSRKHKYRAGNGMGHGSTPSTHAAEASKSPPGPRMPDGTRGFAVGRGRSPVPASN

SEQ ID NO: 254664 - protein, 395 aa, Glycine max
  Clone ID: PAT_MRT3847_71985C.1.pep
MEGGEQVLPSATTVAAAGYPNVSPPPLADPVGASDLAAAASDDVVAEPEIHALISDEEHDHDHDHEHEHEHDHDLEHDHEHEHDHHEDRDDHAAVAAVSLEDLKLKIIKQVEYYFSDENLPTDKYLLGFVKRNKEGFVPVSVIASFRKIKKLTRDHAFIVAALKESSLLVVSGDGKRVKRLNPLRFNESRDHKLYTVLVENLPEDHSRKNIQQIFHEAGNIKRITIHDPHSTSESTRHIKQEMLISNKLHALVEYETIEAAEKAVAMLNNEQDWRNGMRVKLLKGMGTYGHKKQAWKGSHSEKNSSRHVSEQTGDEENHGSNEHREDAHEEEDGDHLSKDKGGQRYRNQGRSRKHKYRAGNGMGHGSTPSTHAAEASKPPPGPRMPDGTRGFAIG

SEQ ID NO: 254665 - protein, 97 aa, Glycine max
  unsure (1)..(97): unsure at all Xaa locations
  Clone ID: PAT_MRT3847_71986C.1.pep
HACRRXFNLMAWVTRVNIAIGVARGLTLLHSLDQNVIFRDLKASNILLDSDFNAKLSDFGLARDGPTGDNTHVSTRVLGTQGYAAPEYVATGIVPLS

SEQ ID NO: 254666 - protein, 154 aa, Glycine max
  Clone ID: PAT_MRT3847_71987C.1.pep
GGKILDIVQPCYCRIGIGRVISLILNLRRRKRIVVHPKSSQFGLHSSNNLGVKLFFFLGFFDRRSGTFVASLVATTRTLRRPRDKKILTLFAFPSHPGPWFAPGAPELLELVLHLFVAACFCIPGVASRPFGQLGRLSRALCASDVAARVTDGC

SEQ ID NO: 254667 - protein, 97 aa, Glycine max
  unsure (1)..(97): unsure at all Xaa locations
  Clone ID: PAT_MRT3847_71988C.1.pep
XKXRRXKARKAARXEXRGXRXRXXXXGXXKXXXXQXERGKXXREEGXXXXXXQXXGXXXXGQXXRXEEEEGXXGRRXKGRXEXXGKXKEXKXEXKXR

SEQ ID NO: 254668 - protein, 150 aa, Glycine max
  Clone ID: PAT_MRT3847_71989C.1.pep
MASPIQQQQRSTTTSSGSEGGDPHIIDERKRKRMLSNRESARRSRMRKQKQLEDLTDEVSRLQSANKKLAENIEAKEEACVETEAANSILRAQTMELADRLRFLNSILEIAEEVEGLSVEIPEIPDPLLKPWQIPHPIQPIMATANMFLR

SEQ ID NO: 254669 - protein, 62 aa, Glycine max
  Clone ID: PAT_MRT3847_7198C.1.pep
PAFILFYPNCMTTIAFFPFQAGSNNTNHFNGYRIQIKLICSIIYTITLSDTSLHSLTPNPTC

SEQ ID NO: 254670 - protein, 36 aa, Glycine max
  Clone ID: PAT_MRT3847_71990C.1.pep
RIDSLRRRQLESNSPMAGSSIMENTIPSHVRGSDQR

SEQ ID NO: 254671 - protein, 114 aa, Glycine max
  Clone ID: PAT_MRT3847_71991C.1.pep
MSSDALKVAAEGNNIDGLYQEIQQDPRILESIDSIPFVETPLHVAATLGHFEFATEIMTLKPSFAQKLNPEGFTPIHLALQCNHDEMVLRLVEMNKDLVRVKGREGLTPLHLAS

SEQ ID NO: 254672 - protein, 81 aa, Glycine max
  unsure (1)..(81): unsure at all Xaa locations
  Clone ID: PAT_MRT3847_71992C.1.pep
EPASSXFATMGDDLXXLCXXGXXSXPXQXLXNXTSSHXITGNXGKXXGRLEWSKGXEVXXXCGVXXNNTTTKKPRXSSSXX

SEQ ID NO: 254673 - protein, 431 aa, Glycine max
  unsure (1)..(431): unsure at all Xaa locations
  Clone ID: PAT_MRT3847_71993C.1.pep
CLMYALDPSLRVMLLNLSLNCHAVVCCRVSPLQKAQVTSMVKKGAQKITLSIGDGANDVSMIHVSHVGVGISGMEGMQAVMASDFAIAQFRYLADLLLVHGRWSYLRICKVVIYFFYKNLNSAXSFTLTQFWFTFQTGFSGQRFYDDWFQSLYNVIFTALPVIIVGLFDKDVSSSLSKKYPELYMEGIRNVFFKWKVVAIWAFFSVYQSLIFFYFVSSTNLSAKNSAGKIFGLWDVSTMAFTCVVITVNLRLLMICNSITRWHYISVGGSILAWFLFIFIYSGISTPYDRQENIYFVIYVLMSTFYFYVMLFLVPIAALFCDFVYQGVQRWFFPYDYQIIQEMHRDEVDSTACTGRAQLLELGNLLTPAEARSHAISQLPREISKHTGFAFDSPGYESFFASQLGVYAPPKAWDVARRASMRSRSKIGQQK

SEQ ID NO: 254674 - protein, 117 aa, Glycine max
  Clone ID: PAT_MRT3847_71994C.1.pep
GLPAVGGGAQRLVRLRATHVVGDPPQAARRFRVGEVAPPVIGQGALGLFNTKKEGSPPPKQDVCGQKKGSAVRSGSGAQGLMARSSFSCLVALLFCHCYNRFLRVLFPFLLLLKSLE

SEQ ID NO: 254675 - protein, 64 aa, Glycine max
  Clone ID: PAT_MRT3847_71995C.1.pep
SCRFLAAATMEAVLEAIFRYQCPITQRQAGLTFVECADYRISPAIRPSQGGCRKMGSTSLMRPS

SEQ ID NO: 254676 - protein, 51 aa, Glycine max
  Clone ID: PAT_MRT3847_71996C.1.pep
PHHSLKISMQHLVQRADFGTRQASYGALQSSRASRSRLTHNLSIKRGQLHP

SEQ ID NO: 254677 - protein, 70 aa, Glycine max
  Clone ID: PAT_MRT3847_71997C.1.pep
GLGNIYSRYDFFAPIPLKEEVNLGFSTNWSAYNFIRRVAQRVFIYCLPIVSITQINSLVKRDGGNNMIWE

SEQ ID NO: 254678 - protein, 117 aa, Glycine max
  Clone ID: PAT_MRT3847_71998C.1.pep
IMLLIRYQGTITRESLSLLPIPWIPTSNPFRRIAYFTFTVLALKLDHGPHIKSSISRLMVCVSSPFLMAKPLYCLEGVRSSLRHVCGKHKRATSYVEYYALLLRDKVIMENFKKKAW

SEQ ID NO: 254679 - protein, 63 aa, Glycine max
  Clone ID: PAT_MRT3847_71999C.1.pep
SLMSPVVNTTMNHFKPNDTSIDIEPLKRRVSFAEYHPNEQEPPPHKYHPIMINVPLLQKPSYP

SEQ ID NO: 254680 - protein, 43 aa, Glycine max
  Clone ID: PAT_MRT3847_7199C.1.pep
LVENLNKLQIYANKPYCALLTLISLTLINLVDLLACASKCLLF

SEQ ID NO: 254681 - protein, 194 aa, Glycine max
  unsure (1)..(194): unsure at all Xaa locations
  Clone ID: PAT_MRT3847_719C.1.pep
MTNPAPASFWTQANALLRKNLTFQKRNVKTNVQLVLFPVFLCLLLFALQRFIDTQIGGSAFKCGCVCANNTTREHSHCPDSQKVCGVQYSDSLQAAFCAIPNPIEWPPLLQLPAPSSRAVRTPSLPLSDLPDASCRRTDSCPLTLLFTAQNHSFAKNVAANMXXSALSVSDFGSDFLASLAMNVLGSESPPWGN

SEQ ID NO: 254682 - protein, 37 aa, Glycine max
  Clone ID: PAT_MRT3847_71C.1.pep
PTRPITSEQPSSLSHFRLIRQWHLPIRPLVIPSIDWI

SEQ ID NO: 254683 - protein, 86 aa, Glycine max
  Clone ID: PAT_MRT3847_72000C.1.pep
MFRCGGLAAGALKQKLVPLVRTVCVRSPRQRNRLPGNLFQRWHVPLELQMTRQMASSGASGGKIDNSVLVLIVGLSTVGAGAYAYK

SEQ ID NO: 254684 - protein, 52 aa, Glycine max
  Clone ID: PAT_MRT3847_72001C.1.pep
SDYRVKLYSDISQRLLELRNNVNASINEYTAEQLIRILTSQDKTIHNRSFKL

SEQ ID NO: 254685 - protein, 59 aa, Glycine max
  Clone ID: PAT_MRT3847_72002C.1.pep
QGGYDPVDTEWAKTGAVQHVPRTKCRHLGPTGLDEVRTASEPPFLNMSERMGTMFGRQP

SEQ ID NO: 254686 - protein, 71 aa, Glycine max
  Clone ID: PAT_MRT3847_72003C.1.pep
KCCSLLSLHCQEPEVLAALLNQPHAVPSSLGAKRPEPSPKSHDSALNLERAGQNYASNSPTEHSPSHVPSL

SEQ ID NO: 254687 - protein, 39 aa, Glycine max
  Clone ID: PAT_MRT3847_72004C.1.pep
CRLIWEIFYLQIIQQVLLHFYSSCCLNLQRFFIVSYSCD

SEQ ID NO: 254688 - protein, 65 aa, Glycine max
  Clone ID: PAT_MRT3847_72005C.1.pep
FLARFILRPKSILLVHPTLGVENRGAHPLKKRLEVPIPGLFKKNGYVLHKWPCKGENPPLIRALP

SEQ ID NO: 254689 - protein, 252 aa, Glycine max
  Clone ID: PAT_MRT3847_72006C.1.pep
MPVLRSGARKGRAAPKQQQQKQQQSPVVEGEAIATRTRRRRAAAAAAAAVPESNNNNNNTNNQQQQVEQVAVVNENVAVAAREEDNRVAEEEGVVRGGGAHREEVAEKKMGGCDSGGRSNGKANAAGEDDANTPQVPQKIQVGNSPSYKVEKKLGKGGFGQVYVGRRTGGNLNERTGPGAVEVALKLEHRTSKGCTYGPPYEWQVYNTLGGSHGVPQVHYKGRQGDYYVMVMDMLGPSLWDVWNNSNHHMTT

SEQ ID NO: 254690 - protein, 62 aa, Glycine max
  unsure (1)..(62): unsure at all Xaa locations
  Clone ID: PAT_MRT3847_72007C.1.pep
GXEPEXVXNWHXPXKXXXQXTXLXFMVXYXVYXKLQGNNTXYNNIMSWKRKLWQXSEKVQPP

SEQ ID NO: 254691 - protein, 95 aa, Glycine max
  Clone ID: PAT_MRT3847_72008C.1.pep
MGKGTGSFGKRRNKTHTLCVRCGRRSFHLQKSRCSACAYPAARTRKYNWSVKAIRRKTTGTGRMRYLRNVPRRFKSGFREGTEAAPRKRGAAASA

SEQ ID NO: 254692 - protein, 95 aa, Glycine max
  Clone ID: PAT_MRT3847_72009C.1.pep
MGKGTGSFGKRRNKTHTLCVRCGRRSFHLQKSRCAACAFPAARTRKYNWSVKAIRRKTTGTGRMRYLRNVPRRFKSGFRDGTEAAPRKRGAAAST

SEQ ID NO: 254693 - protein, 72 aa, Glycine max
  Clone ID: PAT_MRT3847_7200C.1.pep
QLSLPHLNVQNAILQTLEDIPEHMKLMATAGNPFGCRVQIALKFKGVEHQILESQLGNNSDMHHNNHPVHNN

SEQ ID NO: 254694 - protein, 45 aa, Glycine max
  Clone ID: PAT_MRT3847_72010C.1.pep
TLPPLRFSYLEGLCRRRRRSAQVKTRQLASASVDGVRRRGSSVHV

SEQ ID NO: 254695 - protein, 177 aa, Glycine max
  Clone ID: PAT_MRT3847_72011C.1.pep
QKGTIFIIIIILFSHVTASSAQVPNLFGGATSAPPPTPAAHHDNIMSSSDAADALSRLLQRLPPTLSLPTRLPSPSSAAATCPPCLSLNDVLSCVSKLGYAQLTDHSVPSELANSAESEALALFDLSQDQKQSLFPKNWPLGYGNDEDEDEDGVADSARELEMLALKSVDGSPKDLG

SEQ ID NO: 254696 - protein, 44 aa, Glycine max
  Clone ID: PAT_MRT3847_72012C.1.pep
LIPQKGKGAITLDSLVPDYTQHSRSNPVDFSTIPRSYFFLGAPN

SEQ ID NO: 254697 - protein, 86 aa, Glycine max
  Clone ID: PAT_MRT3847_72013C.1.pep
PSEADKSHLSIAIAIRIKGIRPEVVALSFKRWLTKSPAASSMLMESALFFKLVTLLITGASYSNEEPFRYCNLCNLACKHYHFPQV

SEQ ID NO: 254698 - protein, 444 aa, Glycine max
  Clone ID: PAT_MRT3847_72014C.1.pep
MILLTQQVHPLLTFSSTYKSNSPLHPHVQLKVGVGVVTPFSQVPIMPFCKGRPYRRRRKGSRCSSSAAAQAPLPPDPDKENREDSDGVVVAQGESPDLQTLFRRFWKVAAPYWTSDDKGPARLQLAGVFALTLATTGISVGFNFLGRDFFNSLANKDQEQFTKQLLYYLGAFAGGIPIFVLRDYARETLSLRWRSWMTRYYIDRYLKNQTFYKIQSQSIIDNPDQRIGDDLSSFTGTSLAFSLTLFNAAVDLISFSNILDGIYPPLFVVLIVYSIGGTAISVFLGRGLVNLNFLQEKKEADFRYGLVRVRENAESIAFYSGEESEMQLLLQRFKSAFENLTQLLIASRNLDFFFSGYRYLIQVLPAAVVAPLYFSGKIEFGVINQSLSAFNHILGDFSLIVYQFQAISAFSAVINRLGTALFFPYLSCNILIYANLMIDMSMSE

SEQ ID NO: 254699 - protein, 102 aa, Glycine max
  unsure (1)..(102): unsure at all Xaa locations
  Clone ID: PAT_MRT3847_72015C.1.pep
PGLSLPLVRLNSLSLWPCCGPLAVTCGLSFGRVFVAVPLVCVVDVFNEALLLCRFFLLPRLCPARPVPGVLLAGFERXVSNVQPALVVLPPVWFVEXYIKNI

SEQ ID NO: 254700 - protein, 93 aa, Glycine max
  unsure (1)..(93): unsure at all Xaa locations
  Clone ID: PAT_MRT3847_72016C.1.pep
ESNKPRGFFNQYDGDDTVSSPQGRLHQIDYAFEAMRQGSAAVAIRSKDYADVVALMRAQNELSSFQHKVCQLDDHXALLCSGLISDGPHFGTL

SEQ ID NO: 254701 - protein, 177 aa, Glycine max
  Clone ID: PAT_MRT3847_72017C.1.pep
LIFSLIKRCRCGCVTPDDGPSVLQHHIIKGEILDPLWRGQMGLSVDEQKKKQEQRLLLNDLRNLEDNTQDFVSCCQSSGVGCCQSNGGDSFFRQNHVLLERRMDPDVIESEAKLSADSKSSETVISRINSGKGASRKFLSMTTWLDGWEQEDTYAALAVVCAAVSVAIAYNCYKQLR

SEQ ID NO: 254702 - protein, 65 aa, Glycine max
  unsure (1)..(65): unsure at all Xaa locations
  Clone ID: PAT_MRT3847_72018C.1.pep
FHSNFFNSINYRHPHLGDSILIPPTVGGALPKRGHQRHHHMGIIFRTQILQQLXVSQGAREASSS

SEQ ID NO: 254703 - protein, 85 aa, Glycine max
  Clone ID: PAT_MRT3847_72019C.1.pep
VTSFIMKRNNWFIALYMQEQHPLFPLLQNKTDFVNSRIQYYNVYIASLTSEMHHSTFATTSPGTLVFTTGSLTNLSNLSRDDCNT

SEQ ID NO: 254704 - protein, 50 aa, Glycine max
  Clone ID: PAT_MRT3847_7201C.1.pep
HASVQLLEDHRKGSVSTRPHQIKVILVQRKGDTLLLCCTECSDHDYFFLL

SEQ ID NO: 254705 - protein, 56 aa, Glycine max
  Clone ID: PAT_MRT3847_72020C.1.pep
SYQHDILFIISEPYRLYFTADSPVYASTNAISLLLHHSSSCLSHQTTCSEPAIELF

SEQ ID NO: 254706 - protein, 92 aa, Glycine max
  Clone ID: PAT_MRT3847_72021C.1.pep
FGHESNFFLMIPVRGKRKKREEGRENLETRMTISRGFSRHKLLDIFAKHFLMVFNLLKMSFIKLLIKITPDYLMSYPVRHLLTTPNINKNEC

SEQ ID NO: 254707 - protein, 94 aa, Glycine max
  Clone ID: PAT_MRT3847_72022C.1.pep
NGIKKAEQRGPLKGTTITTRACSSDTIENGNAKIKDREGIHTDQTGKTLAGQHLRDGKTMADYNIHKESNRHVLITLRRQITDPILKGTARRYN

SEQ ID NO: 254708 - protein, 50 aa, Glycine max
  Clone ID: PAT_MRT3847_72023C.1.pep
GCFSRSGRWSIQCIRDVNSCVMENSLLIANIYTSSRDGFESLQVNYICDI

SEQ ID NO: 254709 - protein, 79 aa, Glycine max
  Clone ID: PAT_MRT3847_72024C.1.pep
HNENKLTVVKMRMLLWKSKHTIQMDSSLTTKGEGRLGNTVGKSIKNALEVVVALSTDKIHKSQWNTIVSFDSCKQSTST

SEQ ID NO: 254710 - protein, 35 aa, Glycine max
  Clone ID: PAT_MRT3847_72025C.1.pep
RFQMLIPLSVVLFVKIRSCNFVCVGGKGNNILCIP

SEQ ID NO: 254711 - protein, 67 aa, Glycine max
  Clone ID: PAT_MRT3847_72026C.1.pep
SSLSVTKTKHCNCIGSLGVLRVITPFDTDLSTVATFDVKSQGITHAQLVSSTESQIALTETSHLVTK

SEQ ID NO: 254712 - protein, 130 aa, Glycine max
  Clone ID: PAT_MRT3847_72027C.1.pep
MSYCNFPFALQTKMEFNSQNPKKSEIRWSPDNQGGPGQGKSYSCYFCKRGFSNAQALGGHMNIHRKDRAAKLKQSSEENLLSLDISIKATSDHPNDPSDFEEKILFRLGAGEEKHPRNHKYPFNFFSSQR

SEQ ID NO: 254713 - protein, 126 aa, Glycine max
  Clone ID: PAT_MRT3847_72028C.1.pep
VQKKLQMRIEAQGKYLQAMLEKAQRSLSLDGPGSLEASRAQLTEFNSVLSNFMENMKKDSKENIIEVSDFYSKSHDSAFHYQEVGRDQKPKVEGGSIQFDLNIKGSNDLVCAGGAEMDANMISYRV

SEQ ID NO: 254714 - protein, 75 aa, Glycine max
  unsure (1)..(75): unsure at all Xaa locations
  Clone ID: PAT_MRT3847_72029C.1.pep
MANERDLFWGVIENHGIESPGPNAGAXTKSVRKRRRXTGLFSXANHMCVKLGYHSLQNHVIHLVTSPMLLVVILA

SEQ ID NO: 254715 - protein, 66 aa, Glycine max
  Clone ID: PAT_MRT3847_7202C.1.pep
AGLHSLFIRNTETFKTQQRESERESQTLIRFSAFTISKQRKHYGSHLHCEGIGGNIIHGWICWQTN

SEQ ID NO: 254716 - protein, 306 aa, Glycine max
  Clone ID: PAT_MRT3847_72030C.1.pep
MAIPMLRAAMISHSQSQPLIHSISAIYETAKRRKRVVFSSSSSELNPVIRSEVSFCVGTCLIPHPKKVNTGGEDAFFVSNYNGGVIAVADGVSGWAEEDVDPSLFPRELLANASNFVGDEEVNYDPQILIRKAHAATFSTGSATVIVAMLEKNGTLKIANVGDCGLRLIRNGHVVFSTSPQEHYFDCPFQLSSERVGQTYLDAAVCNVELIQGDTIVMGSDGLFDNVFDHEIVPTIVRYKDVAEAAKALANLASSHAMDSNFDSPYSLEARSRGFEPPLWKKILGMKLTGGKLDDITVIVGQIVSS

SEQ ID NO: 254717 - protein, 42 aa, Glycine max
  Clone ID: PAT_MRT3847_72031C.1.pep
TLVENIPIHKQKECQYCIIMYIKIKIRYQGLQKIMHTDKQPS

SEQ ID NO: 254718 - protein, 50 aa, Glycine max
  Clone ID: PAT_MRT3847_72032C.1.pep
MAIPMLRAAMISHSQSQPLIHSISAIYETAKRRKRVVFSSSSSELNPVIR

SEQ ID NO: 254719 - protein, 245 aa, Glycine max
  Clone ID: PAT_MRT3847_72033C.1.pep
MAFLNKIGNLLKNSAVKHINQDFSASTPSLFQAIRSMSSAKLFVGGISYSTDDMSLRESFARYGEVIDVKVIMDRETGRSRGFGFVTFATSEDASSAIQGMDGQDLHGRRIRVNYATERSRPGFGGDGGYGSGGSGGYNRGGNYGSGGGYSSGSGYNRGGNYGSGGYNVTSSYSGGNAETSYTGGGNASNYQFNENSGGVFGSASGEFSSNQNDTAGADNDEFIEPLEDNVRENNDGPTDYAQNR

SEQ ID NO: 254720 - protein, 232 aa, Glycine max
  Clone ID: PAT_MRT3847_72034C.1.pep
MVSAMAFLNKIGNLVKNSAVKHINQDFSVSTPSLFQAIRSMSSAKLFVGGISYSTDDMSLRESFARYGEVIDVKVIMDRETGRSRGFGFITFATSEDASFAIQGMDGQDLHGRRIRVNYATERSRPGFGGDGGYRGSGGSDGYNRGGNYGSGNYNVTSSYSDGNAETSYTSGANAGNYQFNENSGGVFGSASGEFSSNQNDATGADNDEFIEPLEDNVRENNDEPTDYAQNR

SEQ ID NO: 254721 - protein, 171 aa, Glycine max
  Clone ID: PAT_MRT3847_72035C.1.pep
MEATKELVSPIPCDDGHLVTVLSIDGGGIRGIIPGIILGFLESELQKLDGDHVRLADYFDVIAGTSTGGLVTAMLTAPNENNRPLYAAKDIKNFYLEHTPKIFPQNKCWNLFSSMVKFTRTLFGPQYNGKYLHRLIREKLGETPFTLPCIIKLHSKSTMLYIFYLSIYTNL

SEQ ID NO: 254722 - protein, 57 aa, Glycine max
  Clone ID: PAT_MRT3847_72036C.1.pep
AYYNRYGGGANSGADGYNNGTGLGAAIIGTFDRVYTEFSDIDSKRNARYTNDIGLML

SEQ ID NO: 254723 - protein, 43 aa, Glycine max
  Clone ID: PAT_MRT3847_72037C.1.pep
IKFNFILTLYKILYCPIHLYINHQSFYIFRPFFFFFFFFFFFF

SEQ ID NO: 254724 - protein, 86 aa, Glycine max
  Clone ID: PAT_MRT3847_72038C.1.pep
QVFGPPFFFFAFFVLMGLLSVCDDPLVSVVFASSAVSSSPLWLTSMVLHSVCLLCTPHWWTSWARPHRLPLHTQRAASFPGVLPLS

SEQ ID NO: 254725 - protein, 52 aa, Glycine max
  Clone ID: PAT_MRT3847_72039C.1.pep
PPRPQKKKIKCPKKDKPDQQKTRPHLGNNRGEQPPPFRFSNAFYFKLNFLGP

SEQ ID NO: 254726 - protein, 98 aa, Glycine max
  Clone ID: PAT_MRT3847_7203C.1.pep
REKTFYYLKWRFFPLKLKWKNRGEGNPKALGNLAPTIIIFFFWPSGVNLPGEIPLSGPTSTEPKFFGKGNGLSFWDPLWRSDLDAWWWNPTLEEKGWN

SEQ ID NO: 254727 - protein, 80 aa, Glycine max
  Clone ID: PAT_MRT3847_72040C.1.pep
ATTTTNCHENINLLLFHLTRINRCGCGGVTRRISCPYNFYFCHVFPFHRYALTSKAHARHARALATHRDKLALYHLPLPR

SEQ ID NO: 254728 - protein, 54 aa, Glycine max
  Clone ID: PAT_MRT3847_72041C.1.pep
GFFFFFPPLANFLTYGTLRACVNLQLSYRINGLILLASTVVISENTGIIIWLCY

SEQ ID NO: 254729 - protein, 79 aa, Glycine max
  Clone ID: PAT_MRT3847_72042C.1.pep
GDVATSLSKDRWPRTKLLLTFPDHVKINGPAVIIRCGHNIVVRILIADRDVHVSTPQNVPSPLGPECRKTICNQRKRSS

SEQ ID NO: 254730 - protein, 190 aa, Glycine max
  Clone ID: PAT_MRT3847_72043C.1.pep
MVALVSQDNVVALVSRTGRELQRYRKGRRQVVGCIPYRYKIGDQTSLEAQEELEVLVISSQKGKGMLFPKGGWELDESKKEAALRETMEEAGVRGTVEGKLGKWSFKSKTHDTFYEGYMFPLLVQEQLEFWPEQNVRQRIWMSVSEAREVCQHWWMKEALERLVNRKLGRVTQIEIVGSIHCIGDGNSDL

SEQ ID NO: 254731 - protein, 382 aa, Glycine max
  unsure (1)..(382): unsure at all Xaa locations
  Clone ID: PAT_MRT3847_72044C.1.pep
PRNSARGHFGLKSFHKDNAFLLTTRAVSVAQEVVRCMLPQSIRNDPDKARGIRVTVSYLGGNVRHPVRVLVPSVARVSSPGGGGRVQKRNRNLHELCACTMVWNQASALREWVTYHAWLGVERWFIYDNNSDDDIENVVQDLDLQGFNVSRKSWPWIKTQEAGFSHCALRAREECKWVGFFDVDEFFYFPSEFQQPLGXGVFLGENYLRSXVANFSYSKSIAEIRTACHSFGPSGLKSPPKQGVTLGYTCRLQSPERHKSIVRPDLLDISLLNVVHHFQLRVGFRYHNMPEGTAIVNHYKYQVWETFKAKFFRRVATYVVDWQEDQNKGSKDRAPGLGTEAIEPPNWRRQFCEVWDTGLKDFLVSYFAEPATGLMPWEKSSL

SEQ ID NO: 254732 - protein, 144 aa, Glycine max
  Clone ID: PAT_MRT3847_72045C.1.pep
MAALVSQDNVGALVSRTGREMQRYIKGRRQVEGCIPYRYKIGDQTRLEAHEELEVLVISSQKGKGMLSPKGGWELDESKKEAALPRTMDEAGVRGTVEGKSGKWSFKSQTHDTFYEGYMFPLLVQEQLEFWPEQNGPQRIWVGN

SEQ ID NO: 254733 - protein, 51 aa, Glycine max
  Clone ID: PAT_MRT3847_72046C.1.pep
PHFPSFFYCLPRFRVYFLRHHSVNGKSTSKSVLCEQIELVGALISTEKHDG

SEQ ID NO: 254734 - protein, 59 aa, Glycine max
  unsure (1)..(59): unsure at all Xaa locations
  Clone ID: PAT_MRT3847_72047C.1.pep
RFHSFCRTAADIKKDSLPALRDIRERCINQLEQMRSDHMRRLNPTPYXGSVSAXIYDFI

SEQ ID NO: 254735 - protein, 152 aa, Glycine max
  Clone ID: PAT_MRT3847_72048C.1.pep
MSVMMDHVIGGKFKLGRKIGSGSFGELYIAVNIQTGEEVAVKLEPVKTKHPQLLYESKLYMLLQGGTGIPHLKWFGVEGDYNVMAIDLLGPSLEDLFNYCNRKLTLKTVLMLADQLINRVEYMHSRGFLHRDIKPDNFLMGLGRKANQVCYC

SEQ ID NO: 254736 - protein, 154 aa, Glycine max
  Clone ID: PAT_MRT3847_72049C.1.pep
GNKSRIRTKSKKEKDAKFTKSVTTATMKIKSCYSEYTQSSPATLLINTRTRINHPRARIEALICREHDSIDPEHKMQIGISDNTKKLNLFIIKKQKEKKQEEEIEEAVLNQVGTRVIPQIKKKLYPVILFYFSILSDTNRICTLGDNSNPFMFF

SEQ ID NO: 254737 - protein, 114 aa, Glycine max
  unsure (1)..(114): unsure at all Xaa locations
  Clone ID: PAT_MRT3847_7204C.1.pep
ACFLPIXFSVAVHVDGTIKXCDHSYCMNVKDHGREERSHRGLRMGCCDVHLKGETRGSWGSPRATQQFWGSHIRKSRFLECVFIQSLFTQVWVCTVVTVADGSVFSLLLEAFWA

SEQ ID NO: 254738 - protein, 124 aa, Glycine max
  Clone ID: PAT_MRT3847_72050C.1.pep
HSIHPHRVTIESLFLFRFVPNFTTNFVPKGVQQIKNFQPLLENPLKSNGIYQYIHPISRKRGLRKQIQDKGQIKKRKKKGAKFTKSVASPTMKMKFLLFRTNTIFSSYIPFQHMKQNQSLRSTD

SEQ ID NO: 254739 - protein, 59 aa, Glycine max
  Clone ID: PAT_MRT3847_72051C.1.pep
KIACKFHPFFYFVLLLYNSTPTQIGMVYTVYFIIVVCYTGVCKNSFYHYFSNHVASVGS

SEQ ID NO: 254740 - protein, 171 aa, Glycine max
  Clone ID: PAT_MRT3847_72052C.1.pep
EAEKSRQQEAECMRRLAFFGVALSTVATLITVLSVPMVYNYVQHVNSQMVSELDFCKSRSGNIWREVTRTQALHSNKQRVARQADYGYGGGACCGCGVSARGPQGPPGQPGVPGDDGAQGNNGAPGIPATPRPRPSYPTTGCQICEPATNGNPGEQGPAGSPGEPGKPGAP

SEQ ID NO: 254741 - protein, 60 aa, Glycine max
  Clone ID: PAT_MRT3847_72053C.1.pep
CILFQATPKLSEDKVRQCVDTRLGGEYPPKAVAKYKVSLAPGSGCIEVNLQLCLCSERAF

SEQ ID NO: 254742 - protein, 73 aa, Glycine max
  Clone ID: PAT_MRT3847_72054C.1.pep
RFHSFCRTAADIKKDSLPALRDIRERCINQLEQMRSDHMRRLNPTPYKVSVSAKLYDFIHFLWLNEAPVGELQ

SEQ ID NO: 254743 - protein, 70 aa, Glycine max
  Clone ID: PAT_MRT3847_72055C.1.pep
MAVFFFFHGGRFFCAETLVLCPPSLPSWVKKPRFLGFFKKNKKKKKKKKKKKKKKTKKKKKKKKKKKKKK

SEQ ID NO: 254744 - protein, 50 aa, Glycine max
  Clone ID: PAT_MRT3847_72056C.1.pep
KTTVSISVRLQCECSENEKRVNSLEGSENKETARSFQHSLRQILWKINTA

SEQ ID NO: 254745 - protein, 84 aa, Glycine max
  unsure (1)..(84): unsure at all Xaa locations
  Clone ID: PAT_MRT3847_72057C.1.pep
DEKTIFHLNPFGRFVIGAPHGDSFLTGGNIIIDTYCGWCAHGGGAFSGKDPTKVDRIGAYIVRHAAXSVLANGLAIMCIVQIFY

SEQ ID NO: 254746 - protein, 129 aa, Glycine max
  unsure (1)..(129): unsure at all Xaa locations
  Clone ID: PAT_MRT3847_72058C.1.pep
HAYALAYGDGEEMTLITRTSVEEAYNKLIFELKRSAPTLIGIEXSNDEKLPRCKIFDKPKTRXLTIIPMEFNVAVPKKFLNFVRIIMKKRDKLSCKVGIYPYYMEWTVLTNTLLSKGNYILRCDYASLD

SEQ ID NO: 254747 - protein, 54 aa, Glycine max
  Clone ID: PAT_MRT3847_72059C.1.pep
RLLMLSFGGWITLISRFMQLQLFICLGVYGDDLQVTVYALSCASLRTDGTLLSS

SEQ ID NO: 254748 - protein, 75 aa, Glycine max
  unsure (1)..(75): unsure at all Xaa locations
  Clone ID: PAT_MRT3847_7205C.1.pep
AAAGALVAWPCPEAGYQKXPLSEQKAGSGERSSEENDTFXLAVEVHNIRAFITIPDECAXPTEVYISGAQCRSDS

SEQ ID NO: 254749 - protein, 49 aa, Glycine max
  Clone ID: PAT_MRT3847_72060C.1.pep
AEQWPCHKFKFLAVRFTNPISITTHDKLYLHIKSVFYSFIINLIVNLSQ

SEQ ID NO: 254750 - protein, 164 aa, Glycine max
  Clone ID: PAT_MRT3847_72061C.1.pep
MGGLGKTTTAKAIYNRIHRRFTGRCFIEDIREVCETDRRGHVHLQEQLLSNVLKTKVNIKSVGIGRAMMESKLSGRKALIVLDDVNEFGQLKVLCGNRKWFGQGSIVIITTRDVRLLHKLKVDFVYKMEEMDENKSLELFSWHAFGEAKPTEEFDELARNVVAY

SEQ ID NO: 254751 - protein, 104 aa, Glycine max
  Clone ID: PAT_MRT3847_72062C.1.pep
LELYPFFFSFPPLIFSFFNQILEERCAHFCLLKSQTQNRIFDNNFKIFPPTHTSKAPGRFKDFIFSSWGGVSTVFPFHHWHLQHHSIAQTEWSTLYGLFVWFEL

SEQ ID NO: 254752 - protein, 58 aa, Glycine max
  Clone ID: PAT_MRT3847_72063C.1.pep
LDVYVKVDHPKNYNKFIYLSIYLFEKKILIEKKEEYTSTSNHYNKIYFLQHSKNVVKT

SEQ ID NO: 254753 - protein, 55 aa, Glycine max
  Clone ID: PAT_MRT3847_72064C.1.pep
GVNTPPRKKPYVKISLTRRYSSGSVERICLHDAPNAFLRELFYANEHQYDSCCKI

SEQ ID NO: 254754 - protein, 85 aa, Glycine max
  unsure (1)..(85): unsure at all Xaa locations
  Clone ID: PAT_MRT3847_72065C.1.pep
KGPGPRQHSKQKQQPPKXKQPRKARPRKQPQTPRRPQQNNQQRRNQQQNNQPPRHXPQNQPPEHQREKPPRHQQKQQKKQPQKEA

SEQ ID NO: 254755 - protein, 76 aa, Glycine max
  Clone ID: PAT_MRT3847_72066C.1.pep
KPEQGPPFWPKLGKKTSPFFFPPKKTFPPGFFKSPPKKLKNPGKKTPPKFFPPGPGGFVPPGAKPMGLPLPGPSHF

SEQ ID NO: 254756 - protein, 106 aa, Glycine max
  unsure (1)..(106): unsure at all Xaa locations
  Clone ID: PAT_MRT3847_72067C.1.pep
LSKHKNCPNPKAFVEGKEESFTFWGXPKGDLVHPAECMKQLLEKVRRHKVNVDGNVCTVLVATLVLEGWQRKLDPGYDVMNTLQTLLLRADWAKSLSYTIDGLMAP

SEQ ID NO: 254757 - protein, 87 aa, Glycine max
  Clone ID: PAT_MRT3847_72068C.1.pep
AFTFWGTPKGDLVHPAECMEQLLEKVRRHKVNVDGNVCTVLVTTLVLEGWQRKLDPGYDVMNTLQTLLLRADWAKSLSYTIDGLMAP

SEQ ID NO: 254758 - protein, 101 aa, Glycine max
  Clone ID: PAT_MRT3847_72069C.1.pep
MVLKCPYTIPAKRVRHENRFCIKKKKKIKKKKKKKKKKKKKKKKKKKKKKKKKKKKKKKKKKKKKKKKGGGLFKEPNFTSGGWEGFIFFLGPPKLISWPGV

SEQ ID NO: 254759 - protein, 195 aa, Glycine max
  Clone ID: PAT_MRT3847_7206C.1.pep
GRGNDAGYGGRGSDSNYGGRGTAASGRGGGRGFDHDSQRNDRGRSPDKGSSWSDRFKSVNRDRSRSPDRAALPQHSQGGSFHKAMMERGGGGGGDRNKSFNRDRSRSPSPHRQEKCPAVRDRSPVYSFHQSMMGRGQSSPSSQRQRARSPHRNSPPSQGDGRYAGSHSSYNGEVEEGMIPEEEGMIGQDDPVNVN

SEQ ID NO: 254760 - protein, 278 aa, Glycine max
  Clone ID: PAT_MRT3847_72070C.1.pep
TNNITERRERANPLKFKMNSRGSWGFSGANEGNPQISAKFVAPCYMMNKIQIVTKLPVVGDQKWVVWICSFNVPMAPGKTRSIVCSARNFFQFSVPGPAWWQVVPRWYEHWTSNKVYDGDMIVLQGQEKIFLSETKEGGDINKQYTNITFTPTQADRFVLAFRNWLRRHGNGQPEWFGNSSDQPLPSTVLSKRQMLDRFEQHTLKCSSCKAAYEGFQTWQKVLIGATVVFCATSGIPSDFQLRVLLAGLAVVSAAIAFALNQLQKNFEFVDYVHAEID

SEQ ID NO: 254761 - protein, 154 aa, Glycine max
  unsure (1)..(154): unsure at all Xaa locations
  Clone ID: PAT_MRT3847_72071C.1.pep
MCPWGGLPPKGGVXFXLCRXNPMLXRGGVKXPTFLKTGTTIVGVXFXDGVILXAXTXGTEGPIVGXKNCEKIHYXAPKGGGXGAXASSXTXAGTXMGSSQLRLHRYHTGRESRVWTGRTLLXKHLFNYQGRXSXALVLGGGXITGPHXHTIYPH

SEQ ID NO: 254762 - protein, 79 aa, Glycine max
  Clone ID: PAT_MRT3847_72072C.1.pep
TFSPIQKLARDDLTAILTPRAIWHCPCPFAITLFSSRPLMSHHRTNHAALTVATRDANPDACHQPVEAPLSVSEQIRVR

SEQ ID NO: 254763 - protein, 76 aa, Glycine max
  Clone ID: PAT_MRT3847_72073C.1.pep
LILFFFSLFLIFSGKAHSPLFSNPKGFISKCVLWLSRKSSYTPLAQFPGRYLPGPFGKTPGGFLDFEGGIYQHNLF

SEQ ID NO: 254764 - protein, 114 aa, Glycine max
  unsure (1)..(114): unsure at all Xaa locations
  Clone ID: PAT_MRT3847_72074C.1.pep
SDFFPPLLLNDKCNNNCGAGAVVKLECNNTKYKLVQTSKTDKNGYFYIGAPKSITTYGAHXNVVLVSAPYGLKASNLHGGVTGALLRPEKPFLSKKLPFVLYTVGPLAFEPNCH

SEQ ID NO: 254765 - protein, 93 aa, Glycine max
  Clone ID: PAT_MRT3847_72075C.1.pep
LTRAIWGTLVKKSAKVPPPSVPLMRIFFGQYDKSIPLRHNNGHQGISSPFITAQMSGKALSVHILGSTKHFQETQYRSIFCKAASKVKKGHFL

SEQ ID NO: 254766 - protein, 325 aa, Glycine max
  Clone ID: PAT_MRT3847_72076C.1.pep
MAISVKCLGPRPRVRSLSLSLSLSLLHLLEAMAKALASVLLFLLVAVSNVFAVELELETLPPSYPHPHPVHSPTPAPLHPPANAPHPHHHHHHHHPPAPAPAPAPVPSPSHHNYPPTPAPAKPPTHHHHHHPPAPVNPPPVPVHPPVKPPVPVHPPVKPPVPVHPPVKPPVPAHPPVKPPVVPVHPPVKPPVVPVHPFPRSFVAVQGVVYVKSCKYAGVDTLLGATPLLGAVVKLQCNNTKYKLVQTSKSDKNGYFYIEAPKSITTYGAHKCNVVLVSAPYGLKASNLHGGVTGALLRPEKPFLSKRLPFVLYTVGPLAFEPNCH

SEQ ID NO: 254767 - protein, 76 aa, Glycine max
  Clone ID: PAT_MRT3847_72077C.1.pep
REFGFVVNHLVARWQCNIEFTNIALVCSECIFTWRSIWVNCIIFFKSFLKMLTKKHLILKISYIETFSITIYCMID

SEQ ID NO: 254768 - protein, 54 aa, Glycine max
  Clone ID: PAT_MRT3847_72078C.1.pep
NSRVDPLVRTRVRTRLIPLFSTNVRPRHSGQLYLISNLIINFNYIKRLYFKSLH

SEQ ID NO: 254769 - protein, 127 aa, Glycine max
  unsure (1)..(127): unsure at all Xaa locations
  Clone ID: PAT_MRT3847_72079C.1.pep
KGLSTTQTHSYIMGHNGKHWAQTTNXTQFKDADITAIMTDFNKPGSLAPTENVSLLCTTNMVIHSHPVAAILGTMGAGGNTANKTDADLIVVMNHQPVAADQRLLVVQRLRDYLIERHDSPVYMCSL

SEQ ID NO: 254770 - protein, 48 aa, Glycine max
  Clone ID: PAT_MRT3847_7207C.1.pep
VGWNERGQPIDPNSDMFMSYIGAISRQVVSITCDNRKSPTLKVVKENI

SEQ ID NO: 254771 - protein, 46 aa, Glycine max
  Clone ID: PAT_MRT3847_72080C.1.pep
KNLFLFDLNCNTFWGVVTLPLLMALTKLVQLSINNVNKLVFSQEKL

SEQ ID NO: 254772 - protein, 202 aa, Glycine max
  Clone ID: PAT_MRT3847_72081C.1.pep
MLVIFSAANYQANTQLALAPWLMDGGDPTKLLKVHLVTCTDSAEFALLSSALTRTSVVGLDAEWKPVRRLFPRVAVLQIACGDSAVFLLDLLSLPLSSLWAPLRELLLSPDILKLGFGFKQDLVYLSSTFASHGGFDKVEPYLDIKSVYNHLQHNKKHVPKQSKSLSTICAEVLGFSLSKELQCSDWSHRPLTEEQITYAAM

SEQ ID NO: 254773 - protein, 77 aa, Glycine max
  unsure (1)..(77): unsure at all Xaa locations
  Clone ID: PAT_MRT3847_72082C.1.pep
TLNGMTINLXVESSDTIDNAIAXIHDKEGIPPDQQILIXAGKQLEDARILADYTVLEASTLLLELRLFRGIFFRCQD

SEQ ID NO: 254774 - protein, 83 aa, Glycine max
  Clone ID: PAT_MRT3847_72083C.1.pep
KPLNKHSPTLTHGMRSSPPSSVMTTLMHVQSCKLSNFSQICSPCKFICFTFPCVHVYIVSWRLFLNFLLAICIVLCLKKMTRN

SEQ ID NO: 254775 - protein, 50 aa, Glycine max
  Clone ID: PAT_MRT3847_72084C.1.pep
YVAAARTLLKGDLMSCDATRCVYATCLTRTLQPPRPLYRIQIYVPFHTKK

SEQ ID NO: 254776 - protein, 52 aa, Glycine max
  Clone ID: PAT_MRT3847_72085C.1.pep
DGPHGKAGWLALCSPRLTTVPAALDRDSAFLPPWEVPSHVAPGSPAKRMRQR

SEQ ID NO: 254777 - protein, 66 aa, Glycine max
  Clone ID: PAT_MRT3847_72086C.1.pep
WRLGLTASPTSTRHELKTILQNKPLPVLIVNQSVISCQQPYPFIKSYSLYICRRDHKCFIIGHIMN

SEQ ID NO: 254778 - protein, 144 aa, Glycine max
  Clone ID: PAT_MRT3847_72087C.1.pep
WISPMRIGQNAMVNNEFLGKRWTHFLPISTEALSVEILKSRGFFTQSYWYWIGVGALIGYTLLFNFGYILARTYLNTLGKHQAVISEEPQINDQSGDSKKGTNVLKNIQRSFSQHSNRVRNGKSLSGSTSPETNHNRTRGMILP

SEQ ID NO: 254779 - protein, 76 aa, Glycine max
  Clone ID: PAT_MRT3847_72088C.1.pep
CLVSRHVQHKICRVPSCNLMPQPSARRWPVCPSHPRLQQESFHRCRIGRVATASMLNSSSKITLNGSDAGSTGFPD

SEQ ID NO: 254780 - protein, 69 aa, Glycine max
  Clone ID: PAT_MRT3847_72089C.1.pep
GNSRGRPTRPLDSHGSTLRSRPSLSLSLKRYRGLPKQQMVDNPRFKLVFSERLRDAKNRDREEGSYRRS

SEQ ID NO: 254781 - protein, 163 aa, Glycine max
  Clone ID: PAT_MRT3847_7208C.1.pep
MAMAIRVFLILLLSLSSTHLSYSLYEDQVGLMDWHQQYIGKVKHALFHTQKSGRKRVLVSTEENVVASLDLRHGEIFWRHVLGTNDIVDGLDIALGKYVITLSSDGSILRAWNLPDGQMVWESFLQGSVASKSILYIPKNLKADKDEFDPLFLVKGCLHAVSS

SEQ ID NO: 254782 - protein, 74 aa, Glycine max
  Clone ID: PAT_MRT3847_72090C.1.pep
PVKADQFIFCHGNHPQESLWSAHRAHVSQLRLSPRRQRLQCCASMPTHVIHAVARHDITGRTSPERGGRDRMAE

SEQ ID NO: 254783 - protein, 88 aa, Glycine max
  Clone ID: PAT_MRT3847_72091C.1.pep
GRGGKGVGTSKGGQLVSVGEPAGTPGREMLAANTARECIFESHVSGPPFWIFFRSGVCLGLVFFLVLLGGVHCASLRSFFSGSRAMIF

SEQ ID NO: 254784 - protein, 66 aa, Glycine max
  Clone ID: PAT_MRT3847_72092C.1.pep
TPGRRDKCIPRGEGIKPHQGIKKLPQKKGGKPERGGKPPSKKGTAEQTKGKKAASSNGRGGGNIRT

SEQ ID NO: 254785 - protein, 313 aa, Glycine max
  Clone ID: PAT_MRT3847_72093C.1.pep
GAVGQAEGDEVAEGLGGVAEGGIVEGGLASTLRKLSGVWLSNLLNLTDLAVSDVNVKASGPFVILARMTKLKTLTISNANLTGSLPGHLHSNLTHIDFSNNRLKGSIPPSITMLDSLQFLNLSSNSLAGEMPPSIGDLISLKNLSLSSNSFSGSIPDSVSALPSLIHMDLSSNQLNGTIPKFISQMKSLKHLNLANNNLHGVVPFNLSFIKRLEVFKVGGNSNLCYNHSMVSSKLKLGISPCDKFGMPVTPPSKDSSADDSSDDDYDEGDEEGSRHKKEHHHGPNKFVLGVAIALSSIVFLIVFLILCSKCCR

SEQ ID NO: 254786 - protein, 91 aa, Glycine max
  Clone ID: PAT_MRT3847_72094C.1.pep
MASQDLLKNIEQGKELKHVDQVVDKSAPVIENVEIKKVDRQGFLSEITSEHQLKHADTVDKSVPVIDASVHVKESNRPNLLAEIKQKGHAE

SEQ ID NO: 254787 - protein, 93 aa, Glycine max
  Clone ID: PAT_MRT3847_72095C.1.pep
NSNLCYNHSVVSSKLKLGISPCDKFGMPVTPPSKDSSADDSSDDDYDEGDGEGSRHKKEHHHGPNKFVLGVAIALSSIVFLIVFLILCSKCCR

SEQ ID NO: 254788 - protein, 402 aa, Glycine max
  unsure (1)..(402): unsure at all Xaa locations
  Clone ID: PAT_MRT3847_72096C.1.pep
HPDCSVTIKRPSFLISDARSPSMSTCVKSRDVCIVGVARTPIGGLLGTLSSLSATELGSIAIKTALKRANVDPSLVQEVFFXNVLSVCXGMIAPMLAALTIQFGLNDVVVAGGMERMSSATKYIAEARKVHLYRHDTIIDGMVKDGLWDVYNNFGMGVCAELCADQHVITRDEQDSYAIRSFERGISAQNAGHFAWEIVPVEVSTGRGRASKIVDKDEGLGKFDAAKLRKLRPSFKEVGGSVTAGNASSISDGAAALVLVSEEKARELGLHVIAKIKGYGDAAKAPELFTTAPSLAIPKAISNAGLDASQIDYYEINEAFSVVALANQKLLGLDPEKVNAHGGAVSLGHPLGCSGARILVTLLGVLRQKRGKYGVAAICNGGGGASALVLELMPVAVGRSLL

SEQ ID NO: 254789 - protein, 429 aa, Glycine max
  unsure (1)..(429): unsure at all Xaa locations
  Clone ID: PAT_MRT3847_72098C.1.pep
MSKGRFSSFRTHAPHPSMSTCVKSRDVCIVGVARTPIGGLLGTLSSLSATELGSIAIKTALKRANVDPSLVQEVFFGNVLSANLGQAPARQAALGAGIPTSVICTTINKVCASGMKATMLAALTIQFGLNDVVVAGGMESMSNAPKYIAEAKKNYSSFSNIFLGNTVDPSPMNVFFLTPFKHXLNLGFIILFCSAMYVVFQDSYAIRSFERGISAQNAGHFAWEIVPVEVSTGRGRASTIVDKDEGLGKFDAAKLRKLRPSFKEVGGSVTAGNASSISDGAAALVLVSEEKARELGLHVIAKIKGYGDAAKAPELFTTAPSLAIPKAISNAGLDASQIDYYEINEAFSVVALANQKLLALNPEKVNVYGGAVSLGHPLGCSGARILVTLLGVLRQKRGKYGVAAICNGGGGASALVLELMPVAVGRSLL

SEQ ID NO: 254790 - protein, 237 aa, Glycine max
  Clone ID: PAT_MRT3847_72099C.1.pep
TPVRSLQTNIQIALLLSTRPKRPSFLISDARSPSMSTCVKSRDVCIVGVARTPIGGLLGTLSSLSATELGSIAIKTALKRANVDPSLVQEVFFGNVLSANLGQAPARQAALGAGIPTSVICTTINKVCASGMKATMLAALTIQFGLNDVVVAGGMESMSNAPKYIAEARKGSRYGHDTIIDGMVKDGLWDVYNNFGMGVCAELCADQHVITRDEQDSYAIRSSERGISAQNAGHSAW

SEQ ID NO: 254791 - protein, 98 aa, Glycine max
  Clone ID: PAT_MRT3847_7209C.1.pep
KPGKFPPRKNKTKVGLQGQKRGKKGKLPIPPKNNPPTPLFMGGEVKKPKGEPLEKNQFCNKKFPPGLKKIFWNSPQKSPPGRAQKKSKSRFCPGTLSC

SEQ ID NO: 254792 - protein, 101 aa, Glycine max
  unsure (1)..(101): unsure at all Xaa locations
  Clone ID: PAT_MRT3847_720C.1.pep
HTXMPPPKPVSPTGMLIKPRGFILRHLLPFYPTFGTYSFAYAKTMCLIALFAGPLPDCITSFLKKSTKNPLRLGIYMTTPISYTTLAPTAPIVENLLSFFF

SEQ ID NO: 254793 - protein, 59 aa, Glycine max
  Clone ID: PAT_MRT3847_72100C.1.pep
GVRTPQRGLHRGDDEYGDGYLNASEVSHFYYVYDSEAAAQDASQSRAVETLNRSESTHS

SEQ ID NO: 254794 - protein, 53 aa, Glycine max
  unsure (1)..(53): unsure at all Xaa locations
  Clone ID: PAT_MRT3847_72101C.1.pep
AFVVVAVIQGFRRVVVVAVRLXRSRRIFLFPCRLPHENCLYDVMVWLFLPYNY

SEQ ID NO: 254795 - protein, 57 aa, Glycine max
  Clone ID: PAT_MRT3847_72102C.1.pep
SATLFRPFYLNVGMELVLQRSLSFPYMFPLSVFVPCLASSVETEMILLGKKHSSRNP

SEQ ID NO: 254796 - protein, 58 aa, Glycine max
  unsure (1)..(58): unsure at all Xaa locations
  Clone ID: PAT_MRT3847_72103C.1.pep
KVNSCGYXFDQNSFTXSNHXFEPCSNWILSIXLSKIXLRSXSNLXIFTNLRYLXLINE

SEQ ID NO: 254797 - protein, 219 aa, Glycine max
  Clone ID: PAT_MRT3847_72104C.1.pep
MVPQPILHLTLLSLIISLTTLSLVDAADPTFGFTPLGLSSSSNLQIQKPYDVAVNERYSFSNGVHRFWVYSTDKPHMQGSNTKPRTEIRIAGYDYTSGVWQFQGFFYVPSGTSGVCIQQVFGGVTSATTSQTRVYGGSLTHYQSPTLEPNIYNRWIRFNVIHDVGANNVKIFLNGEDNPRYNGPGRGASTHYFKFGVYAQDGASNYMESRWRDIQIFKK

SEQ ID NO: 254798 - protein, 42 aa, Glycine max
  Clone ID: PAT_MRT3847_72105C.1.pep
ILADIHSVMHYSGLSYNLLAEETGFTNVDVAQLLRRHAHHNP

SEQ ID NO: 254799 - protein, 194 aa, Glycine max
  unsure (1)..(194): unsure at all Xaa locations
  Clone ID: PAT_MRT3847_72106C.1.pep
CRQAEQXTQRWKAVSEGKHERQSLKSMLVNLSSRMDVFPGNRGVQHSSTGSSHIANEPDQLSPFPDHYLQQRNGDLSIPANAKRLEDWVRAEAERYATLIEQRHHLELDAFAEQMRLKDEKLEAFRWQLLRTELEMKQMRAHVEGQVKDVTQLKHDXMRLETLLLEREDDWFPERAICIKIEALKKYSNLPSQL

SEQ ID NO: 254800 - protein, 64 aa, Glycine max
  unsure (1)..(64): unsure at all Xaa locations
  Clone ID: PAT_MRT3847_72107C.1.pep
EAENVNNEWDDTYRKPHEHIVAHAQCGXPDGANDEKNSLTRLNGIAEDGWATYSLLLLTLDLLA

SEQ ID NO: 254801 - protein, 257 aa, Glycine max
  Clone ID: PAT_MRT3847_72108C.1.pep
MAEIEGSPGSSMHGVTGREQTFVASIASPIVPTDTTAKFALPVDSEHKAKIFKLFSMANPHMRTFHLSWISFFTCFVSTFAAAPLVPIIRDNLNLTKSDIGNAGVASVSGSIFSRLAMGAVCDLLGIPFISRGSLGIISGLTGAGGNFGSGLTQLIFFSTSRFSTSTGLSLMGVMIVCCTLPVTLVHFPQWGSMFLPPSKDVNKSTEEYYYTAEWNEEEKQKGLHQNSLKFAENSRSERGKRVASAPTPPNTTPTHA

SEQ ID NO: 254802 - protein, 44 aa, Glycine max
  Clone ID: PAT_MRT3847_72109C.1.pep
VRSGIFRDVSALLVSVFRAAIQVSVSKVELAPHLYDSEKYQFCI

SEQ ID NO: 254803 - protein, 42 aa, Glycine max
  Clone ID: PAT_MRT3847_7210C.1.pep
LIYSKQQGGFLISGNLSLLRTRTSQCLTIPDSTVIYEAFYMF

SEQ ID NO: 254804 - protein, 530 aa, Glycine max
  unsure (1)..(530): unsure at all Xaa locations
  Clone ID: PAT_MRT3847_72110C.1.pep
MAEIEGSPGSSMHGVTGREQTFVASVASPIVPTDTTAKFALPVDSEHKAKVFKLFSLANPHMRTFHLSWISFFTCFVSTFAAAPLVPIIRDNLNLTKSDIGNAGVASVSGSIFSRLAMGAVCDMLGPRYGCAFLIMLSAPTVFCMSFVKDAAGYIAVRFLIGFSMATFVSGLSFMSTMFNCCTIPVTLVPAPQWGNMFLPPSKDVNKSTEEYYYTAEWNEEEKQKGLHLNSLKFAENSGXLVLTLGQDLPDGNLGALRKKGDVAKDKFSKVLWYAITNYRTWIFALLYGYSMGVELTTDNVIAEYFYDRFNLKLHTAGIIAASFGMANLVARPFGGYASDVAARLFGMRGRLWTLWILQTLGGVFCIWLDRANSLPIAVLAMILFSIGAQAACGAAFGIIPFISRSSLGIISGLTGAGGNFGSGLTQLVFFSTSKFSTSTGLSLMGVMIVACTLPVSVVHFPQWGSMFLPPSKDVSKSTEEFYYTSEWNEEEKQKGLHQQSLKFAENSRSERGKRVASAPTPPNTTPTHV

SEQ ID NO: 254805 - protein, 93 aa, Glycine max
  Clone ID: PAT_MRT3847_72111C.1.pep
RFHFFIVSLLLHLKGKRSFRRFFFLWTTSRLFHLGFRCGAGAIIKVRMLKYLRRIGMLSWKKKAKNSKIGNHHHQVWTREKPERLGFTLHRCI

SEQ ID NO: 254806 - protein, 85 aa, Glycine max
  Clone ID: PAT_MRT3847_72112C.1.pep
GYILFSRWIVGLHPNQFEGQTLEPTKKKKQWEPQLTTCNTWTSKKHETNPYFPFQQRARKLRDGDPRGKNKVPPLFERVVPLSKP

SEQ ID NO: 254807 - protein, 264 aa, Glycine max
  unsure (1)..(264): unsure at all Xaa locations
  Clone ID: PAT_MRT3847_72113C.1.pep
MAEIEGSPGSSMHGVTGREQTFVASIASPIVPTDTTAKFALPVDSEHKAKIFKLFSMANPHMRTFHLSWISFFTCFVSTFAAAPLVPIIRDNLNLTKSDIGNAGVASVSGSIFSRLAMGAVCDLLGPRYGCAFLIMLSAPTVFCMSFVKDAAGYIXVRFLIGFSLATFVSCQYWMSTMFNSKIIGLANGTAAGWGNMGGGPTQLIMPLVYELIKKAGATPFTAWRIAFFVPEHPSNMNPLMHHVFLFSCTFNVRLIIIIMPLAP

SEQ ID NO: 254808 - protein, 54 aa, Glycine max
  Clone ID: PAT_MRT3847_72114C.1.pep
DFSKLLSSFSLPLKWPDFQINCIYFYMKKKCMQGAHGCWDTIRQQPCKPAKTGE

SEQ ID NO: 254809 - protein, 33 aa, Glycine max
  Clone ID: PAT_MRT3847_72115C.1.pep
SSQIVALVQDYGQIMGFGVLGIKWPFLAIPIKK

SEQ ID NO: 254810 - protein, 34 aa, Glycine max
  Clone ID: PAT_MRT3847_72116C.1.pep
VQISYLCVFKKLPQALIYKCSPWHQSQQRQFSFH

SEQ ID NO: 254811 - protein, 159 aa, Glycine max
  unsure (1)..(159): unsure at all Xaa locations
  Clone ID: PAT_MRT3847_72117C.1.pep
XXTWQDYXXMSFTQCVIDETLRLXGMXIWLMREAKEDVQYQDFVIPKGCFVVPFLSXVHLDENVYSGALNFNPWRWMEPENEEKRNWRTSPFYAPFGGGARFCPGTELARLHIAFFLHYFVTTYRWTQIKEDRMSFFPSARLVNGFEIRLTRRHDNETD

SEQ ID NO: 254812 - protein, 44 aa, Glycine max
  Clone ID: PAT_MRT3847_72118C.1.pep
AARRRQKGDIHDQMAGLLERVEIELTSNTNIEMLSRNPLHLVNL

SEQ ID NO: 254813 - protein, 82 aa, Glycine max
  unsure (1)..(82): unsure at all Xaa locations
  Clone ID: PAT_MRT3847_72119C.1.pep
HCVLGKKIHGLWGTVPTFFNGCQRPGTKKAGGNGPPSAATNTNRPACXGIAVGLDKKGGQKNLLGFDPRGGTFAVKIFANCK

SEQ ID NO: 254814 - protein, 104 aa, Glycine max
  Clone ID: PAT_MRT3847_7211C.1.pep
MAATVKQMSLIVSLLGVVSFILGVVAENKKPVAGTPVPGSDGISVTCKYPADPTVALGYLSTAFLVASTVIGYMSLFYPYKGKSIPQGILFKHTTFTVFFNISL

SEQ ID NO: 254815 - protein, 70 aa, Glycine max
  unsure (1)..(70): unsure at all Xaa locations
  Clone ID: PAT_MRT3847_72120C.1.pep
HSFADAWADAWGDSQILMVPGRKPIAHGHSVKNLTEKVXDQIVTFEKSYWHVXDPDKFHMFDKNEIGFYF

SEQ ID NO: 254816 - protein, 59 aa, Glycine max
  Clone ID: PAT_MRT3847_72121C.1.pep
LMPIAPLGVSQDYLTLGTSSSIQGSFFNFGLPPPTYRNFPPNFYSLFPPPLKGIISPFT

SEQ ID NO: 254817 - protein, 86 aa, Glycine max
  Clone ID: PAT_MRT3847_72122C.1.pep
GEKNIDEHVQCPIIHITFIRHFCDLFFFVSNFEQTNMKLFFDLQLFFLHISNFKNLATIFPDKVVAILACQFHVVKPCPSPIRIDV

SEQ ID NO: 254818 - protein, 35 aa, Glycine max
  Clone ID: PAT_MRT3847_72123C.1.pep
TQAHPLVEGDQRMVGGSLIPILRCQDHESVPIIPT

SEQ ID NO: 254819 - protein, 59 aa, Glycine max
  Clone ID: PAT_MRT3847_72124C.1.pep
SMQHDTHPTHVILLTPILWPIETRFQVGRCLSFHDLFTSHDDYDPITIYIHLINPFAIV

SEQ ID NO: 254820 - protein, 112 aa, Glycine max
  Clone ID: PAT_MRT3847_72125C.1.pep
GIAATLPYNGTAAIRQYKGSAAKLQLTGTAAIFLLMGLAPKLPHLVIAAITRHLVTAATSLLKVTAAKSLTYGYCCKQFDIGLHANSMDVFYLPSFHNCKITTFFILKKISP

SEQ ID NO: 254821 - protein, 72 aa, Glycine max
  Clone ID: PAT_MRT3847_72126C.1.pep
SCYLRLTTHLVAQQYAMITMGEDNGLDVQRTITMVGTIAESMCSMMRLSEIPAKQLDSDTPEKMNMAIMTRP

SEQ ID NO: 254822 - protein, 52 aa, Glycine max
  Clone ID: PAT_MRT3847_72127C.1.pep
HMTSIHTLLHPRSAHSVSLCSTVRIHLRTLQIRGISVPVVILPICNIITLDG

SEQ ID NO: 254823 - protein, 41 aa, Glycine max
  Clone ID: PAT_MRT3847_72128C.1.pep
SPKISAWINRCFQRESVAKVLPDLEKVYQFVLHFRKMLGLE

SEQ ID NO: 254824 - protein, 94 aa, Glycine max
  Clone ID: PAT_MRT3847_72129C.1.pep
KVFYAMKYNLFRYLYCWIKYEKKCYIKFNKDNLHFRLFVSTILCCSSGKQLSVISLFLMVLINMVLCHIAIQHITVHQCLLAFLLEYWYNPDSF

SEQ ID NO: 254825 - protein, 176 aa, Glycine max
  Clone ID: PAT_MRT3847_7212C.1.pep
STHASGYAKALELIQELQHNKLQMDGVIYGTIMAVCASNTKWEEAEYYFNQMKDEGHTPNVYHYSSLINAYSACGNYKKADMLIQDMKSEGLVPNKVILTTLLKVYVKGGLFEKSRELLAELKSLGYAEDEMPYCIYMDGLAKARQIHEAKLIFDEMMKNHVRSDGYAHSIMISAL

SEQ ID NO: 254826 - protein, 114 aa, Glycine max
  unsure (1)..(114): unsure at all Xaa locations
  Clone ID: PAT_MRT3847_72130C.1.pep
LELLFLYVTLLSIIGYKRQTDTAVCGTDCYGVGILGIDWAFGGMILNLDHCTVGITGGHINPAETFELFLGRKVPXIRALLYMVEQCXAAICGTGXAKGYQKAYYNWYGGGVNF

SEQ ID NO: 254827 - protein, 100 aa, Glycine max
  Clone ID: PAT_MRT3847_72131C.1.pep
FRTWALVSCYICAIANPKTFPKVYISNYKGINRLMFNTQGLTYPIRYILRLIARVRDLRMTSEEREYEVLDLNLTNIVIKINLYQLLNNYFRIILITICN

SEQ ID NO: 254828 - protein, 688 aa, Glycine max
  unsure (1)..(688): unsure at all Xaa locations
  Clone ID: PAT_MRT3847_72132C.1.pep
MLFLSFHPSLSTNSYSYSRFHISSSLPPNSNNGHNHQHTSTSPSDVPIKAPIPPWMKKGPLLLQPHELFHLSNPKSKKFKPEKHELSDKALMGKEVRGKRAMKKIVERVEKLHKTQNSYETRVGSLNVENFGGYLKNLKENDEVRTXGRMPWEKDEKFGFVKVKREKVVTAAELTLDKVLLRKLRNEAERMRTWIKVKKARVTQDVVDQIKRTWRRNELAMTKFDIPLCRNMDRAREIVETGGLVVLSKKDFLVVYRGCNHHQDVNCQLVNGSLXERETNRLLDGLRPRFIDWWMHKPLPVDADLLPVEVPRFQPPFRLCPPHSSAKQTAYELTYFRKLAQPLPTHFVLGRNKGLKGLAAAILKLWEKSLIAKIAIKYGIPNIDNEMMATELKCLTGGVLLLRNKFYILLYRGNDFLPRRVASLVEKRELELKSCQHHEEVARMKAIQAFSPIGEVTQDTSTSGTLTKFRKIQTKLEETKNVNKDLNIQLEAEICRVERELKEEQRRAFILNKKIERSERELSKLNAAWTPSEQDIDLEIMTDEERECFRKIGLKMKSSLLLGRRGIFAGVLEGLHQHWKHREVVKVITMQKLFSQVINTAKLLETESGGILVSVDKLKEGHAVIVYRGKNYKRPSRKLAKNLLTKREALRRSLEMQRIGSLKFFARQREQAISKLEVKQVNPYILCL

SEQ ID NO: 254829 - protein, 52 aa, Glycine max
  Clone ID: PAT_MRT3847_72133C.1.pep
RNFLLQEVIVKLKLSDKRIKDQPQRVKSHMAIVYTLLSSCLRTRPPKRDSRR

SEQ ID NO: 254830 - protein, 48 aa, Glycine max
  Clone ID: PAT_MRT3847_72134C.1.pep
HILHFPPLRIKKCAIQFAKYPNIAFTGEMCIEFVLNCLKKSDARPFCR

SEQ ID NO: 254831 - protein, 123 aa, Glycine max
  Clone ID: PAT_MRT3847_72135C.1.pep
MASTLQKLLRKPSPLPPFRFITALNPPQPQNQNQNPILTLTRDPPQQCNAQPFDDAPTVIFPSFPFGFFPRPVSESGFRGGDDAGEEEEDSGTLWADSVKKKRKKKMNKHKYQKLRKRMRRQT

SEQ ID NO: 254832 - protein, 55 aa, Glycine max
  Clone ID: PAT_MRT3847_72136C.1.pep
LDPSNYLHALSQSPQNLPSSLRLPMLSVNHGSPRSLNMNSSRQIYISFSSSDLGS

SEQ ID NO: 254833 - protein, 304 aa, Glycine max
  Clone ID: PAT_MRT3847_72137C.1.pep
ADLSCIHLFFLCCLFLKFIPQGNASMFHTAFCDNKEGNYTANSTYNTNLNTLLSSLSSHTEINYGFYNFSYGQNPDKVNAIGLCRGDVEPHECRSCLNDSRVTIKQFCPNQKKALLWLNTSKCMLRYSPRSIFGIMEIEPSQSLMNINNVTEPDKFSQALANLMRNLKGVAASGDSRRKYATDNVTASSFQTIYGMAECTPDLSEKDCNDCLDGAISKIPTCCQDKIGGRVLRPSCNIRFESASFYENTPILNPDVPPPSPAVAIPPSINSTSPKESSNTIRIVIAIVVPTVVVVPLICLCIYS

SEQ ID NO: 254834 - protein, 103 aa, Glycine max
  unsure (1)..(103): unsure at all Xaa locations
  Clone ID: PAT_MRT3847_72138C.1.pep
GSSNTIPIFRFNTLTXTDVVYPCWLWYNPLDWGSASPDKMRAFRTLDITNGSLPMLTVIGAWSQLICTVTGSIDSLLAHLAYAVHATMVSCCHYQVIQVDTTL

SEQ ID NO: 254835 - protein, 72 aa, Glycine max
  Clone ID: PAT_MRT3847_72139C.1.pep
KKKNVDFPVFPVRATSNQPCADPPPPPNHHKRPDLIRNASDRHHRKRRHHYLSDIKTIRTITPSQPHPSPTM

SEQ ID NO: 254836 - protein, 53 aa, Glycine max
  unsure (1)..(53): unsure at all Xaa locations
  Clone ID: PAT_MRT3847_7213C.1.pep
HFLQQHFNSTIEILYSVIISSLSLILPKGHRNYKVAVESNXCVPVPFIQQLRK

SEQ ID NO: 254837 - protein, 114 aa, Glycine max
  unsure (1)..(114): unsure at all Xaa locations
  Clone ID: PAT_MRT3847_72140C.1.pep
SASLTGGRPIRVGTFANTIVHIGPDMNSRFQFLXSTTTNGDLGEGKRLAMIKANVACAAVGLTXRNTSTPLLESGLXKDRWLDGEYSGRMSYVANYVDQPQEKDLLEGNWCLDI

SEQ ID NO: 254838 - protein, 99 aa, Glycine max
  unsure (1)..(99): unsure at all Xaa locations
  Clone ID: PAT_MRT3847_72141C.1.pep
RPFELDPKGDIVKQILAKAIHLADQVTKDDDXASCFKHECSELKANTENLAGLLLQAARASYDLYERTTRSMIDETKHVLDKALGLALKXRGNGLMKRV

SEQ ID NO: 254839 - protein, 60 aa, Glycine max
  Clone ID: PAT_MRT3847_72142C.1.pep
VLKPLLYPPHIIVQLCVRHSSYQSTPTGELYSKLALSERAHQTQQTVAFKHIPVFQSTQR

SEQ ID NO: 254840 - protein, 63 aa, Glycine max
  Clone ID: PAT_MRT3847_72143C.1.pep
KAGRGGKGNLPLQGPPPLVKPNPWEGKKGEIFGGGEFFLKKQMGENASTKDELWPIYKEFIPN

SEQ ID NO: 254841 - protein, 72 aa, Glycine max
  Clone ID: PAT_MRT3847_72144C.1.pep
LCKNCINRIEGGERGHLVSLLERGWVEDRLSNIPIRFFLFFFSTSKELTVPLEDSSIKSHSKDCYQRTRFRE

SEQ ID NO: 254842 - protein, 96 aa, Glycine max
  unsure (1)..(96): unsure at all Xaa locations
  Clone ID: PAT_MRT3847_72145C.1.pep
RIRLTGKTIFTCRDLDLLGGYYTLATQFTKYLPHYIRWHLNTXGIYILPSFITGETKYTRNXCNTHIAGSCYDGGYKLWTKHEKELALTEEEKRWG

SEQ ID NO: 254843 - protein, 62 aa, Glycine max
  Clone ID: PAT_MRT3847_72146C.1.pep
WFSLKPFLTLSIFYFSLGVHPLMGGLGIQLIQMALTVGNHKAKFRFLFWGGIVLGATDPSWG

SEQ ID NO: 254844 - protein, 43 aa, Glycine max
  Clone ID: PAT_MRT3847_72147C.1.pep
SMKLSKLNHQVETIPQSLTTWQNQRGLTIKSRSKTTFQYLTIH

SEQ ID NO: 254845 - protein, 73 aa, Glycine max
  Clone ID: PAT_MRT3847_72148C.1.pep
GEVKPGPRRKKKVTQIKYQRDLTSGFEENDGDAGEKQQRDTLDDMIVQTEKKSYELNMHVKICVMRKVLCVKN

SEQ ID NO: 254846 - protein, 49 aa, Glycine max
  Clone ID: PAT_MRT3847_72149C.1.pep
YACVIFQAKAIHQNGSVHQVSHLIERIHSVASLSYTLMMALIHSDAWVD

SEQ ID NO: 254847 - protein, 69 aa, Glycine max
  Clone ID: PAT_MRT3847_7214C.1.pep
FCVGSQRIMKATCRSIRGPGSLERGAYSGISQKRDGVQRCRHCTRYLSYGTKVATRCSLYSHLVTVPHL

SEQ ID NO: 254848 - protein, 54 aa, Glycine max
  Clone ID: PAT_MRT3847_72150C.1.pep
VGFYILFLILEILNLGYFWINFFVNTCRKRKKIINFFQYAKIDSFTLAFEVYYR

SEQ ID NO: 254849 - protein, 36 aa, Glycine max
  unsure (1)..(36): unsure at all Xaa locations
  Clone ID: PAT_MRT3847_72151C.1.pep
GEDNVLLNLLCLLYDXGYVNHTMRGLGLKRPNQRED

SEQ ID NO: 254850 - protein, 140 aa, Glycine max
  unsure (1)..(140): unsure at all Xaa locations
  Clone ID: PAT_MRT3847_72152C.1.pep
KRXAKEXKXXQKDXXXXSSAXPEAEDRXHRQATXRGXPXSPXTGGENQETKHTPPEEPHKPPKAAPRTKAPHPNXNSNGSTRXDXXKEQRSPAQTKXKDPQTTRTRKTXPNPDDPQAPETAHKHKXDRAKNEATARSRTQ

SEQ ID NO: 254851 - protein, 43 aa, Glycine max
  Clone ID: PAT_MRT3847_72153C.1.pep
GVRMVSLAIKLGYKAPVKTSAMNNVGRPIHQVSWALNKRMSRT

SEQ ID NO: 254852 - protein, 84 aa, Glycine max
  Clone ID: PAT_MRT3847_72154C.1.pep
SLNHSDGCHERSSCNDGVSCCLISNTLDHINSSNEGCIQAASEDNHTPLENMLIDMSGLDSKSDPFESKQGKKVKRRQRQRKLY

SEQ ID NO: 254853 - protein, 43 aa, Glycine max
  Clone ID: PAT_MRT3847_72155C.1.pep
KEYESTVPSHRCVQMLENRLKKGRDHSRLLISDSFLSAMCVRY

SEQ ID NO: 254854 - protein, 73 aa, Glycine max
  unsure (1)..(73): unsure at all Xaa locations
  Clone ID: PAT_MRT3847_72156C.1.pep
EXVRMTYFVLDPQNPFVGNRCXXNLTFPQCTSXRSVNSLPLSICXGAGAKIASLMSMANAVLSVWSYLVVDLG

SEQ ID NO: 254855 - protein, 109 aa, Glycine max
  unsure (1)..(109): unsure at all Xaa locations
  Clone ID: PAT_MRT3847_72157C.1.pep
VPVFXSRXXXLVIRLELXXXKPCNRXXLSXXXELXVRGLXXVAXSRAXXTGLAGXGXHGLASLXXREIFXNXSXXXGXEGHXDGXXXXVGXVXSXVXXLXXXXWLXXDX

SEQ ID NO: 254856 - protein, 177 aa, Glycine max
  unsure (1)..(177): unsure at all Xaa locations
  Clone ID: PAT_MRT3847_72158C.1.pep
MVENTGQGGGIWFQLFHPKTAPFASHKTLFVFLWVATLASVLVWQRTTISGFLVLGGRPXRTPPKLRPVVFCLTEFGGVGDGVTLNTEAFERGVGAISKLGDKGGGQLNVPPGRWLTAPFNLTSHMTLFLARDAVILAVQDEKYWPLMPALPSYGYGREHPGPRYSSLIHGQNLVDV

SEQ ID NO: 254857 - protein, 97 aa, Glycine max
  unsure (1)..(97): unsure at all Xaa locations
  Clone ID: PAT_MRT3847_72159C.1.pep
SXXXXXSXXGXXXSSXFXFXPLXIYXHXGFLGXXXCGKKFGXXXLXGYXXXXRXRSTGLVXEXGXXXFNXLDXCXXXRXXWRKVRXPCXXMXXPXTK

SEQ ID NO: 254858 - protein, 155 aa, Glycine max
  unsure (1)..(155): unsure at all Xaa locations
  Clone ID: PAT_MRT3847_7215C.1.pep
XXSCXSFXCXXLFFXTXYLXLCSXLSXXXTPCTIXTXIXXSXLSCXFXSXLXYSXSGXXYXXXFSXLYXSXLXYXCXSSYGXHXXLSLLXSLXCXLXXRXCALVYXLXFXXNIXLXLXCXXXSXXXXPIXFLFXXSXFXXFXXXPVXXXXFXFXX

SEQ ID NO: 254859 - protein, 148 aa, Glycine max
  Clone ID: PAT_MRT3847_72160C.1.pep
KAMGSISSHVTDRSNAIKDPPRARFKRVQLNQGSRKAKAFIIHNARNPDNLVIAISGIKAEGNAGIVVARVVVGCREPDISSNTWIANDNGEASFTVGNANETITEGKDGELEIGEGGKAEEGVGEGEGGIVVVAAVGEEELVAEAKE

SEQ ID NO: 254860 - protein, 96 aa, Glycine max
  Clone ID: PAT_MRT3847_72161C.1.pep
KGFFLGKKQGNPKIHFIYSFINPLPSLKSKKIPIPSEKPTQTWEPFSNIGFLKKTGYFLPRFLKISKHPNKLFNFEPTLPQEMGKGKMVPNETYKC

SEQ ID NO: 254861 - protein, 551 aa, Glycine max
  Clone ID: PAT_MRT3847_72162C.1.pep
MKANGVTWWLCSILVCIVLVCVQFEGCVASKTKKTDEAYVTLLYGDEFLLGVRVLGKSIRNTGSNKDMVVLVSDGVSDYAKSLLRADGWIVEMISLLANPNRVRPKRFWGVYTKLKIFNMTDYKKVVYLDADTIVVRNIDDLFKCGKFCANLKHSERLNSGVMVVEPSATLFNDMMSKIKTTASYTGGDQGFLNSYYSGFPNAHVFEPNLSSEVLSSRPIPEMERLSTLYNADVGLYMLANKWMVDENELRVIHYTLGPLKPWDWWTSWLLKPVDVWQDVREQLDESLPGTGGGQNPKDSFLVKFLFLLPFCALLFCCYHSFTKNQGYFSTLCRSSLCDQVRHLYYRIRSNGPLAYTSISASTTNSVHQLLNGAQNKVPAYLGGISVCVCFMVAVVSLGLALLIVPQQVMPWTGLLLMYEWTFTIFFILFGGYIHLIYQWGKIVGSRAASSLSQPGSDYDSEKFHQRQISSCDSATWYYGLGMALLAIAAPSLPCLFGITALFLRLGLMVVGGIILASFMTYASEHLAIRSFLKGIDERDNARNSSSCFLC

SEQ ID NO: 254862 - protein, 51 aa, Glycine max
  Clone ID: PAT_MRT3847_72163C.1.pep
RIITVFFFNILFRCFSAPTESIQVQLFTKLHCLHECLGPILLLQSKKAGNL

SEQ ID NO: 254863 - protein, 62 aa, Glycine max
  Clone ID: PAT_MRT3847_72164C.1.pep
ATALVLEIVMTFGLVYTVYATAGDPKKGDGGMIAPIAIGSIGGADMGVGEGVSGATMNPAGT

SEQ ID NO: 254864 - protein, 78 aa, Glycine max
  Clone ID: PAT_MRT3847_72165C.1.pep
TRPVVSMKYKGKGTIRVYTNEMFNLASKLKSLELEVGKVLLVHMVLISRPAHLEGQMVPQRAYLSLCAREGEAAKRSD

SEQ ID NO: 254865 - protein, 63 aa, Glycine max
  unsure (1)..(63): unsure at all Xaa locations
  Clone ID: PAT_MRT3847_72166C.1.pep
TLVNNNYRYSDNLEFGDALPVPAGTTYYVGNPDSHDNHXMIRRAILCNKPCRFESLLLFFTKD

SEQ ID NO: 254866 - protein, 37 aa, Glycine max
  Clone ID: PAT_MRT3847_72167C.1.pep
QRPAPYIDGIVRGDTLWVYHYGHLKGSNYTIKLVDVI

SEQ ID NO: 254867 - protein, 63 aa, Glycine max
  Clone ID: PAT_MRT3847_72168C.1.pep
CEVIQYCFRIHTKESSFRHRVSKYVNNFCLLLNLKYASFELKNSIFPIPKSSCTTSTNLQLNK

SEQ ID NO: 254868 - protein, 71 aa, Glycine max
  Clone ID: PAT_MRT3847_72169C.1.pep
TPSSWPPKSVGVAWAHLPPLLDGVSQGLFAPQDHQEPFLCFHQHFACGQASVVSNDIYEACSAEKSTPPVC

SEQ ID NO: 254869 - protein, 166 aa, Glycine max
  Clone ID: PAT_MRT3847_7216C.1.pep
MMYGHKNHRYAENDSATDNTSSESSSSLQDRLLCQGQDPYDMEPSSHVTPNGSLLPPNTKGANNMGHKPSGYLKVKGEIEHAAITAVKKQLGKHYREDGPLLTVEFDTIPPEAFECQIADLANEAYYAANPALPNSPEVSAVKKQSSLSSRYDSYFTKVSCQDSHM

SEQ ID NO: 254870 - protein, 35 aa, Glycine max
  Clone ID: PAT_MRT3847_72170C.1.pep
TRPNLLFCLYISTSNLRTLIVVKYKHQCICTHEIL

SEQ ID NO: 254871 - protein, 71 aa, Glycine max
  Clone ID: PAT_MRT3847_72171C.1.pep
MAQKLWGGNLQGGGGHIIPHLVADNHLYQLQYLLIQESRSFYLDKAYDSYACRITRIFQSRYTRLFLQPAP

SEQ ID NO: 254872 - protein, 153 aa, Glycine max
  Clone ID: PAT_MRT3847_72172C.1.pep
ALFSKHGLTQTDMIALSGAHTVGFSHCDQFANRLYSFSSSNTVDPTLDPSYAQDLMAGCPRNPDATVAVALDPQSPAAFDNLYYQNLLSGKGLLTSDQVLFEDATSQPTVVRFANNVADFNDAFVAAIRKLARVGVKTGNDGEIRTDCTTFNS

SEQ ID NO: 254873 - protein, 41 aa, Glycine max
  Clone ID: PAT_MRT3847_72173C.1.pep
YGCKRPPKGGVECVKTLQLYAPSRNIGSMSTHACYQRYRWS

SEQ ID NO: 254874 - protein, 86 aa, Glycine max
  Clone ID: PAT_MRT3847_72174C.1.pep
VPFQMDRQIYSIAAPARVFRNFKVQSVPSHSDMGYRPPYLYKTHELQRMLRPQQGPGSSQDPSICSKRVVYSQQVTRSLKITSLCL

SEQ ID NO: 254875 - protein, 61 aa, Glycine max
  Clone ID: PAT_MRT3847_72175C.1.pep
KKGYFLKPKRGLKKGRKVFHRVFGGRVKGHLPFEKKTRGLGKTHSFREGGLSPLKGVPHLV

SEQ ID NO: 254876 - protein, 69 aa, Glycine max
  Clone ID: PAT_MRT3847_72176C.1.pep
RGLQYKQGAATYEDVKLLGLAGRPLVSNARTSLINQAYDNSLSTIPCDFVIDVYLTTINNENADAFIPD

SEQ ID NO: 254877 - protein, 58 aa, Glycine max
  Clone ID: PAT_MRT3847_72177C.1.pep
IRQEIDEMEPFQLHNSTQHSSVLALLRNPNPIHQIPTFASNANTLYPTVIYSMIPISL

SEQ ID NO: 254878 - protein, 124 aa, Glycine max
  unsure (1)..(124): unsure at all Xaa locations
  Clone ID: PAT_MRT3847_72178C.1.pep
VRVRTPFFGLLVVAYDDTLVSDTHVALNNLIDLTRVRCSSDQRFKRDGDGYIWVPTATDGYNXLRGGRTSTPEKPLVGKMKCGWSKLTHQCEISLWMWRPDKSIDAKGCNVYEARPLNRGTQAP

SEQ ID NO: 254879 - protein, 76 aa, Glycine max
  Clone ID: PAT_MRT3847_72179C.1.pep
FFSPPYLKKKSSFSFSPKWVIFINLYVRKLAPIFKGAVYFYFHQKCKCQVKLMCPLSGLNSSEKRVSSKIKNPFFF

SEQ ID NO: 254880 - protein, 57 aa, Glycine max
  Clone ID: PAT_MRT3847_7217C.1.pep
VIFFFFGQRKHDHLHKNEITMHKQTHLQTKGNWEDDPLSVSLLAPLATLDYRYINGF

SEQ ID NO: 254881 - protein, 50 aa, Glycine max
  Clone ID: PAT_MRT3847_72180C.1.pep
RVLLRFSLSFFFHSNSVREWFFSPTHNFLVYVDWSHEDSYYFLKKKKENT

SEQ ID NO: 254882 - protein, 62 aa, Glycine max
  Clone ID: PAT_MRT3847_72181C.1.pep
LEALKPSKPPAKTKWGGTGEPTTWLPFKKQKSNVRTTEGGGPPRLWALKRNRGPGQKPLHKG

SEQ ID NO: 254883 - protein, 72 aa, Glycine max
  unsure (1)..(72): unsure at all Xaa locations
  Clone ID: PAT_MRT3847_72182C.1.pep
NEGSLXGSXFHXXMXIXFXTXTSNSXKXXXXXXAFTXXSRXNVRXXEXXXLXPRLEAXSELTTRXYVLXLXG

SEQ ID NO: 254884 - protein, 38 aa, Glycine max
  Clone ID: PAT_MRT3847_72183C.1.pep
EFNTWCDPSPFSKEMFLLGNEKPDVTQSNQQRKSSYEK

SEQ ID NO: 254885 - protein, 225 aa, Glycine max
  Clone ID: PAT_MRT3847_72184C.1.pep
MKKPPIFEPLQIFLLLLIFYGSNTKAEKQTTHDHANKKTYIIHMDKSTMPLTFTDHLSWFDSSLKSASPSAEILYTYKHVAHGFSTRLTPEDADTLSKQPGILSVIPELKYKLHTTRTPSFLGLDKATTLLPASEQQSQVIIGVLDTGVWPELKSLDDTGLGPVPSTWKGQCEIGNNMNSSNCNRKLVGARFFSKGYEAALGPIDTTTESKSARDDDGHGSHTLT

SEQ ID NO: 254886 - protein, 63 aa, Glycine max
  unsure (1)..(63): unsure at all Xaa locations
  Clone ID: PAT_MRT3847_72185C.1.pep
VYPLGSACICGDGGRVRDIYPCGGSSSLGYSQWSSSFPKQYKRFSYRGSLSGSWILSSLMXML

SEQ ID NO: 254887 - protein, 101 aa, Glycine max
  unsure (1)..(101): unsure at all Xaa locations
  Clone ID: PAT_MRT3847_72186C.1.pep
SFLAPRXXGASSGXXXAVALPAGXXGVVXXLAXXXXXXASSSXGXFPLXVPXXXPXXGXVXGVFXXVXPSAPXLGXXAPGPVPLPGVWFAXLXSLGVSPPL

SEQ ID NO: 254888 - protein, 77 aa, Glycine max
  unsure (1)..(77): unsure at all Xaa locations
  Clone ID: PAT_MRT3847_72187C.1.pep
ATAPSVSASQIAPEVVTNEGLVEEAWEIVNDTFLATDDTWQXKKEAILSNSIRTRSXTRMLSSLADPYTRVLSPREV

SEQ ID NO: 254889 - protein, 58 aa, Glycine max
  Clone ID: PAT_MRT3847_72188C.1.pep
EEHVGTTFWVNMLMSSMQTDYSGFNFSFSDLIYGNFTIQMDYMLLICLLFFSLRFCST

SEQ ID NO: 254890 - protein, 65 aa, Glycine max
  Clone ID: PAT_MRT3847_72189C.1.pep
GTGPLTVYNRTSQPIRVLGTGAAGQTGYSLGLPMATGDVYGRDHPMDLALVDIPPLTEELTGAHY

SEQ ID NO: 254891 - protein, 407 aa, Glycine max
  unsure (1)..(407): unsure at all Xaa locations
  Clone ID: PAT_MRT3847_7218C.1.pep
TRPGKGEVKIDMMSVTNSNGYGGVPSELQSQGSERSDVHVFEGGNATISIQVLRQVTDNFSEKNILGRGGFGVVYKGELHDGTQIAVKRMESVATGSKGLNEFQAEIAVLSKVRHRHLVALLGYCINGNERLLVYXYMPQGTLTQHLFDWGENGCAPLTWKQRVAIALDVARGVEYLHSLAQQSFIHRDLKPSNILLGDDMRAKVADFGLVKNAPDGKYSVETRLAGTFGYLAPEYAATGRVTTKVDVYAFGVVLMELITGRRALDDTVPDERSHLVSWFRRVLINKENIPKAIDQTLDPDEETMESIYKVAELAGHCTAREPYQRPDMGHAVNVLGPLVEQWKPTTHEEEEGYGIDLHMSLPQALRRWQANEGTSTMFDMSISQTQSSIPAKPSGFTDSFDSMDCR

SEQ ID NO: 254892 - protein, 318 aa, Glycine max
  unsure (1)..(318): unsure at all Xaa locations
  Clone ID: PAT_MRT3847_72190C.1.pep
MGFRISGSSSSSCFCLQRTLLPPLTAIATSTRGFKRRSNCIPSCSVSYRKFVEFALDETTLHTHLIPSPLQEKYNFMNSKDGKGTLSMLSFEGAKIRLLRRLIIETETMQVLDFTVFHXAEYDIPIYCEYFETSFKKNIRLLHLNPXFGWKSCVSQITRMLKGGLVSYYNQVRNISLEGSSIIKPXNYFSPIVFWPIXSSNLEKCFILCSALTEYYNVXCNLIYYADKELNKSQNVNNIEKHLGYRPWSAGGDPIRGVLKKLIGDTLAKDMLRSFLFNGVDELGSKTFNDYFPRYCCREGTLNRRGHVVGVSYENMPL

SEQ ID NO: 254893 - protein, 62 aa, Glycine max
  Clone ID: PAT_MRT3847_72191C.1.pep
RPRHWRELTTDELGLEQNRGLKNNGHEGLFAALSTPLVSCIGESVKYLFVSIPPVRSSRIPS

SEQ ID NO: 254894 - protein, 32 aa, Glycine max
  Clone ID: PAT_MRT3847_72192C.1.pep
ALFGVLSDTLNYTENSIVGPAYGQQYRPQKTH

SEQ ID NO: 254895 - protein, 132 aa, Glycine max
  unsure (1)..(132): unsure at all Xaa locations
  Clone ID: PAT_MRT3847_72193C.1.pep
GSRAIVAPLGGPKGEISYAREQEAVWFKGKRFTPNLWAGSPGEEQIKQLRHALDSKGRKVGEEWFTTPKVEAALTRYHEANAKAKERVLEILRGLAAELQYSINILVFSSMLLXIAKALFAHASEGRRRRWV

SEQ ID NO: 254896 - protein, 81 aa, Glycine max
  Clone ID: PAT_MRT3847_72194C.1.pep
QLYMITILMFNLIKKTLLIERNPLIPFATIYGVHKVMACLDATLSFLVYMDLCCEGGWSYSYFRSWNSSRDTKQRCLWRIS

SEQ ID NO: 254897 - protein, 199 aa, Glycine max
  unsure (1)..(199): unsure at all Xaa locations
  Clone ID: PAT_MRT3847_72195C.1.pep
QNELAKLGNXCLAAVQAYDAATESVEKLQAAELKFQDIINSPSLDAACRKIDNLAEKKELDSTLVLMITKAWSASKESNMMKDEVKDILYHLYKTAVGNLQRLVPKEIRIVKYLIRIEDPEEQLSALKDAFTPGEELEGTDVDNLYTTPEKLHTWIKSVLDAYHLSGEGTLIREARDLLNPEVIQKLEVLKKVVEKNFM

SEQ ID NO: 254898 - protein, 140 aa, Glycine max
  Clone ID: PAT_MRT3847_72196C.1.pep
MSFDLSDYKIIKEGEAEILMHAKNEVFYNKTQVNNRDISIAVLRTFISKRKQEHEAYLSKRTKGAQKASENGDSSELVKEEVPDTTAQEYHKSNGECEVEEEISPEERCSTVEEVSVKVTEECSTAEGHTNLSEGKGKRN

SEQ ID NO: 254899 - protein, 94 aa, Glycine max
  Clone ID: PAT_MRT3847_72197C.1.pep
KKGASEAKPGFKKKTQKTKTQGLTNENKTGATTGVSIPKKPEKTSQVRGDPKGKRPAYGQTYSRTKKFKQGMGALKGEKQGAFTNSIKQGGGGS

SEQ ID NO: 254900 - protein, 150 aa, Glycine max
  unsure (1)..(150): unsure at all Xaa locations
  Clone ID: PAT_MRT3847_72198C.1.pep
SNYFRSAVINAGYRISGTHVNPLGLKSDAXPMDVIWDIMRCWVKNHPVKPQPADQPGSIILAKEPVLQANFARAVASLSKAQAKKVARFLPNPERHWGPKLRAGRQITSKHVSLLGPEAINGALNQEDDEEPKKWRVKVENVLVSQLTTR

SEQ ID NO: 254901 - protein, 69 aa, Glycine max
  Clone ID: PAT_MRT3847_72199C.1.pep
SLKQAIQNKIRLPYGKVVKHIHYRYPISFASDCFYNRACKLQDDEDITTMFSLFVKLSQPHMCRVISCH

SEQ ID NO: 254902 - protein, 52 aa, Glycine max
  Clone ID: PAT_MRT3847_7219C.1.pep
VGALTFHLILLTPIGMSLNQFVRFQLTLICDVFLELPLQISLMTCTVRVLPC

SEQ ID NO: 254903 - protein, 88 aa, Glycine max
  unsure (1)..(88): unsure at all Xaa locations
  Clone ID: PAT_MRT3847_721C.1.pep
XRAIXRLTXCFKXTVFXGSHITMVFAASASCNKHVEGLAXGSDCLEDTGLNSVGXPCHSLSHGPHLXPXEXXATTTTAHIAXXIIILX

SEQ ID NO: 254904 - protein, 554 aa, Glycine max
  unsure (1)..(554): unsure at all Xaa locations
  Clone ID: PAT_MRT3847_72200C.1.pep
MSSDLSDYKIIKEGEAEILMHAKNEVFYNKTQVNNRDISIAVLRTFISKRKQEHEAYLSKRTEGAQKSSENDYSSELNMLNXLTQLSYNIIYLVGNREGCTISSKSXERHWGPKLRAGRQITSKHVSLLGPCYAINGXQSIRKTPKNLKVRSQAGKIVSHLSSXEISKLILFINLEVMEFYAYGSLHQITFLDPAVQSVVDGGMLMCTATDMAVLCGGNGEVCYSKYGSYPLRGKYCHEMALRIVLACIESHANRYKRYIVPVLSVQMDFYLRVFVRIYTSASAMKNTPLKLSYVYQCTGCDSFHLQPIGRTISKNTSVRYLPGFGPVVPQECRDCGKKFNMGGPIWSAPIHDQEWVAAILADVKSMKDRYPAYDRISAVLTTISEELPDVPLFLSLHNLCATLKCTSPSAIIFRSAVINAGYRISGTHVNPLGLKSDAPMDVIWDIMRCWVKNHPVKPQPADQPGSIILAKEPVLQANFARAVASLSKAQAKKVARFLPNPERHWGPKLRAGRQITSKHVSLLGPEAINGALNQEDDEEPKSKKPKTEDSVTS

SEQ ID NO: 254905 - protein, 77 aa, Glycine max
  unsure (1)..(77): unsure at all Xaa locations
  Clone ID: PAT_MRT3847_72201C.1.pep
MLLLAVHASGKDHKGAPVDGTNVPDKRLTPRYEHGLAEFHTEFVMXSKLFHCDPVFLIAHCDERANMIIAHQYMANG

SEQ ID NO: 254906 - protein, 70 aa, Glycine max
  Clone ID: PAT_MRT3847_72202C.1.pep
NILLFKVQPVLYKSENLIKISTVTGKRKMKEKVQNMHNVSIVLPLLYNHVRDQQLRQFNFVSLFYFNHAP

SEQ ID NO: 254907 - protein, 58 aa, Glycine max
  Clone ID: PAT_MRT3847_72203C.1.pep
TRSFFFCFTLVIYLLPGYKINWHQLACLQVATSTLSNSIVNSHPCLSRRYNNTRQTLK

SEQ ID NO: 254908 - protein, 126 aa, Glycine max
  unsure (1)..(126): unsure at all Xaa locations
  Clone ID: PAT_MRT3847_72204C.1.pep
MASDTLFFASVMIDRCRGVFKGVRALVDVGGGTGTMAKAITKSFPQLKCIVFDLPHVVDGLYGTENIKYVXGYMFEAIPSAESIMLKWILHNLERXECLKILKKCIEAITCIEKRNCVDHILCYKE

SEQ ID NO: 254909 - protein, 86 aa, Glycine max
  unsure (1)..(86): unsure at all Xaa locations
  Clone ID: PAT_MRT3847_72205C.1.pep
MATHAALASTRIPXXTRFPSKXSHSFPSXCXLKXLEVTXFXGLRSTSCVTYXNSXREXXXXDLVXXQLXPKXNGSIXXXGXTVAKX

SEQ ID NO: 254910 - protein, 65 aa, Glycine max
  unsure (1)..(65): unsure at all Xaa locations
  Clone ID: PAT_MRT3847_72206C.1.pep
FFFFFFFFFFFFFFFFFFFFFFFFFFXKNGKSGKIWGINIKNYFLTGPFFNPWGGVAKNGSLTPK

SEQ ID NO: 254911 - protein, 54 aa, Glycine max
  Clone ID: PAT_MRT3847_72207C.1.pep
HIEMQFHKCNNQLYTPPFFDYGGNLFESIPKQVILHLHYYVVVKYSSSKASCLA

SEQ ID NO: 254912 - protein, 70 aa, Glycine max
  Clone ID: PAT_MRT3847_72208C.1.pep
AKGDEILILNPYVWSNSHYPRIFMFSHAGLEGFRCSHFHLPMQKLEWVFDFVTYMSCLSDWFIIVELALM

SEQ ID NO: 254913 - protein, 66 aa, Glycine max
  unsure (1)..(66): unsure at all Xaa locations
  Clone ID: PAT_MRT3847_72209C.1.pep
MKDFNSDLLNPGTVMNSSSSDYSRSVSSSDANFGYSNFSNRILRIEIMGXPVEARPDSDGCTTIVD

SEQ ID NO: 254914 - protein, 64 aa, Glycine max
  Clone ID: PAT_MRT3847_7220C.1.pep
RRETGVSSPLQPVATVNRLPYSRSNRSHQFQKAFQKSNFYAASYLLSHLLNYSSLNRDGGGKAL

SEQ ID NO: 254915 - protein, 38 aa, Glycine max
  Clone ID: PAT_MRT3847_72210C.1.pep
NKDLPSGLFQLFKKRKNLIFIRLTKFNIEITDKKNFHF

SEQ ID NO: 254916 - protein, 832 aa, Glycine max
  unsure (1)..(832): unsure at all Xaa locations
  Clone ID: PAT_MRT3847_72211C.1.pep
RHRATRAEKLRFQSLNADVQEAYMRMVKESNNERLTLLLEETTXLLVNLGVADQAYXQIKTMLXMELYEDSESNFPESAGLKNVISKESPLEEDVDLIDSDRNGGDTSDLLEGQRQYNSAIHSIQEKVSEQPSILQGGELRPYQLEGLQWMLSLFNNNLNGILADEMGLGKTIQTISLIAYLMEHKGVTGPHLIVAPKAVLPNWINEFSTWAPSITTILYDGRLDERKAMKEELSGEGKFNVLITHYDLIMRDKAFLKKIHWLYLIVDEGHRLKNHECALARTLDSGYHIQRRLLLTGTPIQNSLQELWSLLNFLLPNIFNSVQNFEDWFNAPFADRVDVSLTDEEQLLIIRRLHQVIRPFILRRKKDEVEKFLPSKSQVILKCDLSAWQKVYYQQVTDVGRVGLDNGSGKSKSLQNLTMQLRKCCNHPYLFVGDYDIHKHKEEIFRASGKFELLDRLLPKLRRAGHRVLLFSQMTRLMDILEIYLRLNDFKFLRLDGSTKTEERGSLLRKFNAPDSAYFMFLLSTRAGGLGLNLQTADTVIIFDSDWNPQMDQQAEDRAHRIGQKKEVRVFVLVSVGSIEEVILERAKQKMGIDAKVIQAGLFNTTSTAQDRREMLQEIMRRGTSSLGTDVPSEREINRLAARSDEEFWLFEKMDEERRQKENYRSRLMEEHELPDWVYSPLNKDDKVKIFDSGSVTGKRKRNEVVYADTLSDLQWMKAVENGQDISKLSVKGKRRDHLPVDNHAQASDDMGTEERLFRSEDTFDVTPASKRLKPEEINSQKHENEDVSVGGLNEHIFSWNTRRKKRSGYLGQGSFSDSRGQNSNGRANWN

SEQ ID NO: 254917 - protein, 121 aa, Glycine max
  unsure (1)..(121): unsure at all Xaa locations
  Clone ID: PAT_MRT3847_72212C.1.pep
MGVKGYLMEETLVLFRAELMAGLLSRRVXTLAXAARLIHRQMLSHLTRKEFITSRKATIHIQKIWRANLATTLYENMTREAASIRIQKHVRAHRARMNYTTFQASAIVIQSRLRALAARNE

SEQ ID NO: 254918 - protein, 68 aa, Glycine max
  Clone ID: PAT_MRT3847_72213C.1.pep
PPSLRIVWRFILVNQLARCRSRDVKGHSLSICLRLFLYLNPLRQPMVIGEKASVFILTAIKNSPCSVL

SEQ ID NO: 254919 - protein, 234 aa, Glycine max
  Clone ID: PAT_MRT3847_72214C.1.pep
QGFVVSSCAWFPNSKQFVCGSSDPEKGVCMWDCDGNVIKSWRGMRMPKVVDLAVTPDGEYLISIFMDKEIRILHMGTYAERVISEEHPITSLSVSGDSKFFIVNLNSQEIHMWDVAGKWDKPLRFMGHKQHKYVIRSCFGGLNNTFIASGSENSQVYIWNCRNSRPVEVLFGHSMTVNCVSWNPKIPQMLASASDDYTIRIWGPSLQKKKKANLSRLDTLHIKISSLVYSLYTF

SEQ ID NO: 254920 - protein, 51 aa, Glycine max
  Clone ID: PAT_MRT3847_72215C.1.pep
SMPYYKRNAYDVLITFLKYKHSNTHLPHPISLNSVIQISLLFFQKKLKAFP

SEQ ID NO: 254921 - protein, 71 aa, Glycine max
  Clone ID: PAT_MRT3847_72216C.1.pep
YFRHALLYGGNGHSSFDGMHILILKVLPIILSCHFFSSFVLHTFNLQVICIITFLELVCTTYILKYEDLSC

SEQ ID NO: 254922 - protein, 111 aa, Glycine max
  unsure (1)..(111): unsure at all Xaa locations
  Clone ID: PAT_MRT3847_72217C.1.pep
LELDRGVEQKDFNSYGRGPCREEWMARGTLANIRVSYHLLDVNNNPNTGHIPTGENTVVTDAWPEYXCKGNDTKVLAEAKHGLSISRDXAGKTPTVSDGKSYRGKTFEKRH

SEQ ID NO: 254923 - protein, 167 aa, Glycine max
  unsure (1)..(167): unsure at all Xaa locations
  Clone ID: PAT_MRT3847_72218C.1.pep
FGSRALEEGKAFERMGSRQLAGLLVSLWVRKNLRTHVGDIDAGAVPCGFGRAIGNKGGVGLRIRVYDRIICFVNCHLAAHLEAVNRRNADFDHIYRNMVFTRTSSLLNTAAAGVSTAVHVLRGANATGVSSEEHXADLSEAEYXWISFGDLNYRLFGVLYDASHDFV

SEQ ID NO: 254924 - protein, 64 aa, Glycine max
  unsure (1)..(64): unsure at all Xaa locations
  Clone ID: PAT_MRT3847_72219C.1.pep
SGLHDQIPTAFDPFADADADDLAAGPKDYVLIHVQQQNGRKSLITRHGLIKEFSFTXIRKDVKK

SEQ ID NO: 254925 - protein, 42 aa, Glycine max
  unsure (1)..(42): unsure at all Xaa locations
  Clone ID: PAT_MRT3847_7221C.1.pep
LLXNXAXSLLLRIYSVLXAWVDSRLSXHXVXXXNRXXXAXXM

SEQ ID NO: 254926 - protein, 104 aa, Glycine max
  unsure (1)..(104): unsure at all Xaa locations
  Clone ID: PAT_MRT3847_72220C.1.pep
ITEKSDVYSFGVVLIEVLTGMEPIDSRIPEGSHVVPWVIREIREKKTXCASILDQKLTLQCGTQVPEMLQVLGVALLCVNPSAEYRPTMKDVASMLIEIRHESV

SEQ ID NO: 254927 - protein, 87 aa, Glycine max
  Clone ID: PAT_MRT3847_72221C.1.pep
ADRLNRLKGEMTQASSKYTHLDLSTLRSLSIIGSLLEYFVQFFILQIDPINTLWLKNLNLPYDSYDFNMTNSNLELHSSNQLLYLMW

SEQ ID NO: 254928 - protein, 117 aa, Glycine max
  unsure (1)..(117): unsure at all Xaa locations
  Clone ID: PAT_MRT3847_72222C.1.pep
MARTKQTARKSTGGKAPRKQLATKAARKSAPTTGGVKKPHRYRPGTVALREIRKYQKSTELLIRKLPFQRLVREIAQDFKTDLRFQSHAVLALQEAAEAYLXVGLFEDTNLCAIHAK

SEQ ID NO: 254929 - protein, 70 aa, Glycine max
  Clone ID: PAT_MRT3847_72223C.1.pep
SLSLNEGKSIANIFLSMDLTGLLLYSRSMSSMLFLGQLGELALAGGSLAIGFANITGYSVLYGLGMGMEP

SEQ ID NO: 254930 - protein, 136 aa, Glycine max; identical to SEQ ID NO: 150528
  Clone ID: PAT_MRT3847_72224C.1.pep

SEQ ID NO: 254931 - protein, 136 aa, Glycine max; identical to SEQ ID NO: 150528
  Clone ID: PAT_MRT3847_72225C.1.pep

SEQ ID NO: 254932 - protein, 35 aa, Glycine max
  Clone ID: PAT_MRT3847_72226C.1.pep
HVVITNMVSSNYFHACKWTKVRTTSPGKLIFPIES

SEQ ID NO: 254933 - protein, 71 aa, Glycine max
  Clone ID: PAT_MRT3847_72227C.1.pep
KKLGYNWFSCSKNWEKMTRPSFLKLSGRKTGGIQLSFLQKWGGKKNPPLFFFFFHNFLGKGGAPIRGFLPP

SEQ ID NO: 254934 - protein, 90 aa, Glycine max
  Clone ID: PAT_MRT3847_72228C.1.pep
FLTGSEPHTALLANPSIHIYVMQWLTASQSLPKILRSIMLLLKPLVQFCMLLWFLCVKIPSPDIFIVQVSLLGFLPIFLPQHLSLHFWFT

SEQ ID NO: 254935 - protein, 83 aa, Glycine max
  Clone ID: PAT_MRT3847_72229C.1.pep
AGQVFMFSLGNRQILCVSQSDILRDITTCISLDFGKPSYQQKQLGPLLGQGVLTSNGTTWVHQRKILAPKLLRYCAFHFSTYN

SEQ ID NO: 254936 - protein, 101 aa, Glycine max
  Clone ID: PAT_MRT3847_7222C.1.pep
LYNPAAHYSQSHVENCTIINVKHQIHGNSALKFPSIVVRIRAVTAKITYALSPTQIGYTFTLRTQPMLCRVNRAAMGMLGRSTENATTHYSTCATKLRCLS

SEQ ID NO: 254937 - protein, 124 aa, Glycine max
  Clone ID: PAT_MRT3847_72230C.1.pep
MTTPRGNHHPQPNGERRRQWPPAHPAAAAEAAPEAAETATATAAGGHSYNGYRQYHPRTPGRSSSSSASFKGCWCCLFLLFSFLALLVLAVVLVIILAVKPKKPQFDLEQVGVQYMGNTPNPPS

SEQ ID NO: 254938 - protein, 138 aa, Glycine max
  unsure (1)..(138): unsure at all Xaa locations
  Clone ID: PAT_MRT3847_72231C.1.pep
PRVCITGAQHDPYWRLARIMCLMELFSAQRXEEYEYITKRELCGLLNELFNSANKTYXLKDHLCNLSLSVISRMVLGKKYLEECENAEFWPDEFKNMLDELLLLNGAYNMRDFIPWMDXLDLQGYIKRMKAFSNKLDR

SEQ ID NO: 254939 - protein, 414 aa, Glycine max
  Clone ID: PAT_MRT3847_72232C.1.pep
MSLRSIVRELKEMRDGIGSTSKRGAESKHWLSRTKSHVAPDILATPFEPIQQGQWANLPSELLLDIIQRIEESETSWPARAVVVFCASVCKSWRSITREIVKTPEQCGRITFPISLKQPGPRDSPIQCFIRRNKETSTYLLYFGLVPSENDGNKLLLAAKRIRRATGTDFIISLAADDFSRASNKYVGKLRSNFLGTKFTIYDSQAPNDAAIQSNCQSSRRFHSKQVSPRLPACNYLVSTVSYELNVLCTRGPRRMYCVMNSIPVSAIQEGGNAPTPASYPQIFDEHFSPSPALKEKVPVTDLNSASLSEPPVSSQCSAEQLALKNRAPRWHEQLQCWCLNFKGRVSVASVKNFQLVAAVDPSHNISAEEQEKVILQFGKIGKDIFPMDYCYPLSTFQAFAICLSSFDTKPACE

SEQ ID NO: 254940 - protein, 64 aa, Glycine max
  unsure (1)..(64): unsure at all Xaa locations
  Clone ID: PAT_MRT3847_72233C.1.pep
SSSSSSSSSFPQEINSGAFNQCGEGHEPFVSYEGLEQLHRVLFVLGITHVLYXCLAVGLAMSKI

SEQ ID NO: 254941 - protein, 68 aa, Glycine max
  Clone ID: PAT_MRT3847_72234C.1.pep
SHSLYFIFAFPLFHSKTKKGTLDTGEISFRKKSLPSLSSFLSSELSSPEIWCDVASKLNRIEICCRGC

SEQ ID NO: 254942 - protein, 139 aa, Glycine max
  unsure (1)..(139): unsure at all Xaa locations
  Clone ID: PAT_MRT3847_72235C.1.pep
SGIPGHPACGTQKQLNPGNCGRXVTXLXLXPIGRGGPNVQNLXLPKSAFLGDKGLXSFARGAPSXXSLRLGGCHXITQIGLFGVFFNCGAKXKVLTXIXCYGIKDLNMGLPAISPSXSIXALRXADXPXFXNANLALLG

SEQ ID NO: 254943 - protein, 90 aa, Glycine max
  Clone ID: PAT_MRT3847_72236C.1.pep
NSPPPPKKTPNFFLPKFSLNPPPTNLTWGKTPLHLVQNSKIPIFDTNLSGVHQKKFVPKHPTGKVFILSKNCAKSRAQKNHSQQQSSVHT

SEQ ID NO: 254944 - protein, 53 aa, Glycine max
  Clone ID: PAT_MRT3847_72237C.1.pep
PIGVYNGKAFNPVEIQPEMIGPYLGEFFISYQPVQPGRPGIGSPPFFRFLPFQ

SEQ ID NO: 254945 - protein, 85 aa, Glycine max
  Clone ID: PAT_MRT3847_72238C.1.pep
HNPLFLSLILNPVTTSYGLGSFSLYPNRTTIVKEGEQSTFILSLSYFLYCDAFDSLAYNIFLRWRSLTGRRLFRIDRRRRRVHSL

SEQ ID NO: 254946 - protein, 160 aa, Glycine max
  Clone ID: PAT_MRT3847_72239C.1.pep
HASAHASVRLREDDRRIRLREDDRRVRLREDDRRGRQQTEPEPILFFSLVLNTLCGYPFVKANCFLRFEDKEVVGEEIIQGEKHNREKNKSTNVRLLLKHTIRYTSCQFVISEISQVVFVCRRIVGSAASLYFGSHILSLSLSLLWLITLPFYPHGVVKK

SEQ ID NO: 254947 - protein, 258 aa, Glycine max
  Clone ID: PAT_MRT3847_7223C.1.pep
MMFVAACGTKQSYIPSLPPLTRCNRDSKLIKLWKKASPCGANISELEHIHEGHNPRPSTSRGTQRLYVRLNTLHYLLSNINTLEKSLSHTPGVVPSSSRKHSGPYLEIVNSSIPAACQHVSEVAAYRLIFLDSNSVFYGSLYVGDVANSRIRPALRILKQNITLMTTLVADRAQALAMKEVMKASFDAFLMVLLAGGSSRVFNRSDHVMIQEDFESLNRVFCTCGEGLIAENLVEREAAVVEGVIALMGQYTEQLVED

SEQ ID NO: 254948 - protein, 30 aa, Glycine max
  Clone ID: PAT_MRT3847_72240C.1.pep
DYLKWLSDLHTVTMTMTMRWSYTTLLLVLV

SEQ ID NO: 254949 - protein, 104 aa, Glycine max
  unsure (1)..(104): unsure at all Xaa locations
  Clone ID: PAT_MRT3847_72241C.1.pep
XXFFFFFFFFXXFFFFKIFLMGFLVFSQKKNFKMVKFPGPFFLYKKSFLGAPPFLGVPFGGQLFFQRRELFFFFGYPIFVGFFLATEKGSLSKFPMFSGGPFLL

SEQ ID NO: 254950 - protein, 89 aa, Glycine max
  unsure (1)..(89): unsure at all Xaa locations
  Clone ID: PAT_MRT3847_72242C.1.pep
GSNMXSXKIXVHTPXNYINRQREXYXNXISIPXIKXXXVMINHXVGSISTHLELQRWGVIEKXXLHILWNSKQRIKRFQLGAQCRKPFP

SEQ ID NO: 254951 - protein, 68 aa, Glycine max
  Clone ID: PAT_MRT3847_72243C.1.pep
RGIGPNLNFFLKKENPQRPVSNHTRSVISRPMIKYYHRWMMRAFFKLTLRLECHTALPINFGRSFLIG

SEQ ID NO: 254952 - protein, 89 aa, Glycine max
  Clone ID: PAT_MRT3847_72244C.1.pep
SPYASDSPYLEPEPYASACYTANHLHGRLDVSPVTQHRPALYVMFSSYSPILSRVMYSSIISFHHPGFHMGAICLQLQVLLRQISLEPN

SEQ ID NO: 254953 - protein, 60 aa, Glycine max
  Clone ID: PAT_MRT3847_72245C.1.pep
VLSPPYLLNGFPALRKFEQCFWQHISGILRYQTLYTFSANAEQLVCACRSQNTHDFFYPR

SEQ ID NO: 254954 - protein, 89 aa, Glycine max
  Clone ID: PAT_MRT3847_72246C.1.pep
QFSRFLRNPTLYAFLIDNMHYSDSRNPSFFQIHFTTIAISLHFVLSFLSRSFYFSRSTPRRPQSLHLCSPLLLLRSPLRCCNCEAKAKL

SEQ ID NO: 254955 - protein, 88 aa, Glycine max
  Clone ID: PAT_MRT3847_72247C.1.pep
NPPTKIFGGTDPRMSRTKKTPFHYMGVKKRFYKFPGFHLQIRSLTKEISNEIAIENVKPPFSGAEGQKRRRFPYRNRRLPRKCRPKPC

SEQ ID NO: 254956 - protein, 172 aa, Glycine max
  unsure (1)..(172): unsure at all Xaa locations
  Clone ID: PAT_MRT3847_72248C.1.pep
PPPNPNAKAGTAEAPPHSAHKKPQRHAPPPAPRPAGRDRAPPXRPRXGHAPHRSPRERQEPQARPRATDRXARHRAKTPEPEQPPTXRKRGREEKRXRRTRGDQPRGSRGPAKQKPHPKERRPXKGREKXTPXAXKGXTGPTKXXNRPTNTKKPGQEPQKKKKKKKKEKRAA

SEQ ID NO: 254957 - protein, 84 aa, Glycine max
  Clone ID: PAT_MRT3847_72249C.1.pep
HQEVLLAMAEEFQGAICGESWWNIINPTRSVFPLMPSTCSVAAADAGNYNTWQSFLDAGKPHQSGTGSIFIDFTLQMMGFGMSS

SEQ ID NO: 254958 - protein, 41 aa, Glycine max
  Clone ID: PAT_MRT3847_7224C.1.pep
LFFWVYDSYFSFHFLVTIAMRIYFKFFSAHVSDSTPLCSRK

SEQ ID NO: 254959 - protein, 154 aa, Glycine max
  Clone ID: PAT_MRT3847_72250C.1.pep
MAEDFQAAICGENWWNNINPTRSVFPLMPSTCSVAAADHAGNYSTWQSTTDFVDLKGTRSCAELETDNNLSFLDAEKPQQSESGSILINSTLQMMGFGKSSSTSSNWNQSLLGSGFDSVLQEETGIGGGSQVSTVDALKPMNQEFSLDQQSLNS

SEQ ID NO: 254960 - protein, 48 aa, Glycine max
  Clone ID: PAT_MRT3847_72251C.1.pep
MPFKNHFNLNKKPKREEAKGGRIEEGETLYTEVTGHCRIARLRLLCKG

SEQ ID NO: 254961 - protein, 238 aa, Glycine max
  Clone ID: PAT_MRT3847_72252C.1.pep
MAEEFQAAICGESWWNIINPTRSVFPLMPSTCSVAAADAGNYSTWQSTTDFVDLKGTRSCAEETDINLVSSDTSLSFLDAEKPHQSGTGSILIDSTLQMMGFGMSSSTSPNWSQSLLGSSFDSVLQEETGIGGGGSSNDSQIQKDWSPKNFSSDGGSEQVSTVDAFKPMNQEFSLNQQSLNSVVTSTDGSLSGGNFPVVSASYGYPSTLIQSLYEHQPQPQNSLFTNPSMSYGTCSNE

SEQ ID NO: 254962 - protein, 47 aa, Glycine max
  Clone ID: PAT_MRT3847_72253C.1.pep
PPLPLTVHSSTATSSMESHQVVFLLWSKHSKTLIVALFSSLFSFSIP

SEQ ID NO: 254963 - protein, 89 aa, Glycine max
  Clone ID: PAT_MRT3847_72254C.1.pep
GHSSLPSSTLAMRKRKGSPAHTHSQSSYFQTMPSCASRLQLIGVVQALKSHECTCRPHPQEAAVWPPGDRLATGPAGTLVTPATGVPRA

SEQ ID NO: 254964 - protein, 83 aa, Glycine max
  Clone ID: PAT_MRT3847_72255C.1.pep
PSRFCCILVLSNWANVSCICQFGVLLGSMSSHSPPSPSLEVGRFSISAFVSATEYHSRVASSDMVTLRCGHKSTKELFQLPRA

SEQ ID NO: 254965 - protein, 48 aa, Glycine max
  Clone ID: PAT_MRT3847_72256C.1.pep
GFQLTNMFQSSWMFLIRQKHFFVGDACIQENVLVLRRTYTIDAIPNLR

SEQ ID NO: 254966 - protein, 71 aa, Glycine max
  Clone ID: PAT_MRT3847_72257C.1.pep
AWFVLDGDSCFQMLIELGGILFVGFDAYLNQVFSLLNSSRIKLCLLFFFAVVCCSFFFVKKCNIWTYYDKV

SEQ ID NO: 254967 - protein, 95 aa, Glycine max
  Clone ID: PAT_MRT3847_72258C.1.pep
KQRGGINLRKPPPFFFAMGGGFWGKTPPSSRGAFNRNNHSPWWSPKGPSAPPPIKNFWWGLGSALVQKNNLMKNPWVFPHLRGPPKKKKCFIKSF

SEQ ID NO: 254968 - protein, 101 aa, Glycine max
  unsure (1)..(101): unsure at all Xaa locations
  Clone ID: PAT_MRT3847_72259C.1.pep
ADNGNFSCGPNNYRQKGXRVAPVVRPINCRVXPLAFAVALSGLSLCGRFAISPKACNSRVRCKNVFRSYSPTYYIPEILGARPGGPLGGAYSNKFVRVPFL

SEQ ID NO: 254969 - protein, 91 aa, Glycine max
  Clone ID: PAT_MRT3847_7225C.1.pep
GNRKKFPCLLCLKHFPAEKSVDSDGVNTGKFQIPIGSIVIGLLSKRGFVVKLLFCLIASLFYPVFLNGQQLCADVLIDALCMCARLWVALR

SEQ ID NO: 254970 - protein, 72 aa, Glycine max
  unsure (1)..(72): unsure at all Xaa locations
  Clone ID: PAT_MRT3847_72260C.1.pep
VTASXMXTSHLALSAAIEVEVLAXXSSXPNTRSHHXXAAXRLXCRSXHQXPXXXXMXXHXGFXXRVXSFXGX

SEQ ID NO: 254971 - protein, 76 aa, Glycine max
  unsure (1)..(76): unsure at all Xaa locations
  Clone ID: PAT_MRT3847_72261C.1.pep
KLIIPNLDIPILEKTLSGKTITLEVECSDPLHNLKAKIQLPWKAVAXDQSVVISAGKQXEDRRTLRRYHIQNEYTL

SEQ ID NO: 254972 - protein, 145 aa, Glycine max
  Clone ID: PAT_MRT3847_72262C.1.pep
SIQRHISVHRFLPSSSIRINFLKVAPTFLRIIIRKKLVSMVRAPNPEHRESTTPFVVQGEGLTNDGFIPQIFSSMPALNDAASYLAQTTSYITGCFSDYSVEHSPRLFGASDTRAPELVDFPSSETNATSSTENEHIASNRTHLT

SEQ ID NO: 254973 - protein, 59 aa, Glycine max
  Clone ID: PAT_MRT3847_72263C.1.pep
LIRGLGGWLNSRPANHLSGNGWFFLGFFVSQKPPIVFFQNRFLFLINQRGFIWLPRAFV

SEQ ID NO: 254974 - protein, 89 aa, Glycine max
  Clone ID: PAT_MRT3847_72264C.1.pep
YLGNVIMSVCFCYFLIISLSSSSLSLFLFLFLIKFVFAKYDLESSMFFLSPNLDLLFPFLSRFVFVSNSWKLVFNTLSLFVTVFVCLLL

SEQ ID NO: 254975 - protein, 50 aa, Glycine max
  Clone ID: PAT_MRT3847_72265C.1.pep
PRVRTAARRRQKGDIILTIVSLIRKIIFRCLIKVIVFRNLIKIFIYNTLN

SEQ ID NO: 254976 - protein, 61 aa, Glycine max
  unsure (1)..(61): unsure at all Xaa locations
  Clone ID: PAT_MRT3847_72266C.1.pep
MGGGSAPIVHSAITCRKVTSTLANCIGYLQNGXTPSSGCCNGLNSLNACGKTTDDRQTECN

SEQ ID NO: 254977 - protein, 78 aa, Glycine max
  Clone ID: PAT_MRT3847_72267C.1.pep
CYIWKDLHNRSYKDQFSIANLENNKFTPTTSQEISHYLNNLQSSYQFSRNYKNLNHYHRAHARHQREYVLFKIHLISN

SEQ ID NO: 254978 - protein, 144 aa, Glycine max
  unsure (1)..(144): unsure at all Xaa locations
  Clone ID: PAT_MRT3847_72268C.1.pep
MGALDYLSNFCTVTSTRTKQKAMQTAEKKIXRERQCCERRVRNAVSSIKGVKSVEVNKKGSRGVVRGNGDPNKVLKRVRSTGKVRARKGPNVEQHVVYHPXAPGVNDRRAPTGXVKNVFQPSSHAQDNFFSFFSDDNEKACSIM

SEQ ID NO: 254979 - protein, 35 aa, Glycine max
  Clone ID: PAT_MRT3847_72269C.1.pep
TTYSDLFNQAHLSCLHIVPTLSNETVKDIHIAKPS

SEQ ID NO: 254980 - protein, 477 aa, Glycine max
  Clone ID: PAT_MRT3847_7226C.1.pep
MAWAKKPGDSNNVGFMRWLALVLVLVLLSGFWCVSGVKEGKRNAYATMMYVGTPRDYEFYIAIRVLLKSLATLDAQADLVVIASLDVPPRWIRALEKEDGAKVVRVENLDNPYKHQDNFDKRFKLSLNKLYAWSLVDYDRVVMLDADNLFLQNTDELFQCGQFCAVFINPSLFHTGLFVLKPSMAVFKDMVHELRNGRENPDGADQGFIASYFPELLDKPMFHPPPNATKLDGTYRLPLGYQMDASYYYLKLRWSIPCGPNSVITFPGAPWLKPWYWWSWPVLPLGLQWHEKRRQTLGYGAEMAVILIQSAIYVGIIAMTRFARPSLSKLCYRRSDKSINLVQNILKFVALWSILAAYTTPFFIIPPTVHPLLGWPLYLLGVFALCSITVNAFLLPMLPVLMPWLGIAGALIVMAFPWYSDGVVRALCVFGYAFCAAPFVWASMTRIMAGLHQSLEREAFLPRLGESSPPSWFNKLY

SEQ ID NO: 254981 - protein, 307 aa, Glycine max
  unsure (1)..(307): unsure at all Xaa locations
  Clone ID: PAT_MRT3847_72270C.1.pep
SGQKDVARIDGSHPRSLTFTSVVEKDAESEGQSGGWEIGRKWLKLGEKIASGSSGDLYRGVCLGDGVAVKVLRSEQLNDALEDEFAHEVPFLRQVHHKNVARFSGACTYCPHLCMIPEYMPGGSLDDYVHRNHNVVVLSQSLKFAIDVCKGMEYLHQSKIIHRDLKTANLLMDTHNVVKVADFGVARFAXQGGVMTAETGTYRWMAPEVINHQPYDQKADVFSFSIALWELVSATGPDDSMSPPPAALGVRQGLRPELPNDGHPRLLELMQRCWEAIPSHRPSFNEITAELENLLQEMEKDSEANGA

SEQ ID NO: 254982 - protein, 92 aa, Glycine max
  Clone ID: PAT_MRT3847_72271C.1.pep
TYYEADRSTVGFKGLINTGIRTIKPFFVHADEDLVDITLRTITQICARDTHQRVLQNVHLTVSTAGIMQMDNHSIRVELVLRTLLEVNVFND

SEQ ID NO: 254983 - protein, 47 aa, Glycine max
  Clone ID: PAT_MRT3847_72272C.1.pep
LYLYLANKKQMLTRIIKKISIFIQHNKLTWPIPKISMLDLCSYANVV

SEQ ID NO: 254984 - protein, 168 aa, Glycine max
  Clone ID: PAT_MRT3847_72273C.1.pep
QELEDDILPAEAERRYQEYKSEYISTQKRAYFNAHKDEEWLKDKYHPTNLVTVIERRNENARQLAKDFLLDLQSGTLELNPGLNASISKSGQASEPNSEEEADTGGKRRRQGRGSNKENDFSAAPKAHPISTEPRRIQADVQQAQALVRKLDTEKGIEDNILCISDHN

SEQ ID NO: 254985 - protein, 45 aa, Glycine max
  unsure (1)..(45): unsure at all Xaa locations
  Clone ID: PAT_MRT3847_72274C.1.pep
TIGXXWLXXQVTGPEXNPGYTKLTSXAXALEXPSSEYRANVXXXX

SEQ ID NO: 254986 - protein, 74 aa, Glycine max
  Clone ID: PAT_MRT3847_72275C.1.pep
TRGRGRNFRKHILDCTGSSHHAIFQVGGDSYRRLSSLFSLSASCMLVLANSASGITATLPLALTLRPYMALRRS

SEQ ID NO: 254987 - protein, 72 aa, Glycine max
  Clone ID: PAT_MRT3847_72276C.1.pep
HKLVIRDFYNTKLMKIVWTLLYEWLMMIKSLSFSSDNNFFYTIFFLNALFYIFVFFFSRVGNSCVYSCWIIA

SEQ ID NO: 254988 - protein, 376 aa, Glycine max
  Clone ID: PAT_MRT3847_72277C.1.pep
MVGEHGTMSLASDDQKTPLLPVHEPMEGTRTSVSFSIKTILTLENLYVILGPMLSLFICLFVKLDAPPTSQKMLGVIAWVFAWWVTQAVPLPVTSMCPLFLFPIFGIASADSVAHSYMDDVITLVLGSFILALAVERYNVHRRLALNVTLLFCGDPVNPALLLLGLCATIFFVSMWLHNVATAVMMMPVATGIVQRLPPAHEQSEAVNKFCRAVILTVVYATPIGGISTLTGTGVNLIIIGMWKSLFPEAKPISFNTWFFYGFPVAVLILICFWCIICLLYVPKGSGRALSAYLDRSHLKRDLEALGPMAFAEKMVLSVFGLLIILWMTRRITDDIPGWGSLFHDLVGDGSVSVMVAVLLFIIPNMKQEGEKLMSW

SEQ ID NO: 254989 - protein, 60 aa, Glycine max
  Clone ID: PAT_MRT3847_72278C.1.pep
EGFGGNARPNVKRRVTDVARVTSNALYMINRLGQSRTGKPKYKPRPRTQPGSASSTEKLN

SEQ ID NO: 254990 - protein, 53 aa, Glycine max
  Clone ID: PAT_MRT3847_72279C.1.pep
NCLLFPRRVTRLNGMVKLKSSSSEFDLHIEDDLPSGSSVQQERLGKLRLCDSP

SEQ ID NO: 254991 - protein, 174 aa, Glycine max
  Clone ID: PAT_MRT3847_7227C.1.pep
MAWANKRGDSKNAGFMRTLVVVLLVLLSGFWCVSGVKEGKRNAYATMMYVGTPRDYEFYIAIRVLLKSLATLDAQADLVVIASLDVPPRWIRALEKEDGAKVVRVENLDNPYKHQDNFDKRFKLSLNKLYAWSLVDYDRVVMLDADNLFLQNTDELFQCGQFCAGFINPWVFHT

SEQ ID NO: 254992 - protein, 399 aa, Glycine max
  Clone ID: PAT_MRT3847_72280C.1.pep
RVDPRVRAHLLPFLVLTLLAATASAHNITDILAANPDYSDFNDFLSQTGLAGDINTRQTITVLSLHILLDYFDNTKLHQITNGTTLSTTLYQTTGNANGNVGSVNITDLKGGKVGFGSAAPGSKLDSSYIKSVKSIPYNISVIEISAPIMAPGILAAPPPSADVNITALIEKAGCKTFASLISSNGLIKTFQSTADKGLTIFAPNDEAFKAKGVPDLSKLTNAEVVSLLQYHAAAKYLPVGSLKTTKDSINTFASNGAGKFDLTVSVAGDSLTLHTGVDSSRIADTILDSSPLSIYSVDSVLLPQELFAKSPSPAPAPESVSSPTPAPSPVAEAPSPFPASPPAPAGESPAGAPAEAPSSEAERSSSAGKNDGVHVKASAALTVAVSALSAFVISATFM

SEQ ID NO: 254993 - protein, 161 aa, Glycine max
  unsure (1)..(161): unsure at all Xaa locations
  Clone ID: PAT_MRT3847_72281C.1.pep
AREPIPKPVPVYKPIPKPVPIYKPIPIFKPIPKPVPIYKPIPIFKPIPKPVPIYKPIPIFKPVPKPVPIYKPIPIFKPVPTPIPFFKPIPKPVPIVKPIPIPVFKPIPKPFPIVKPIPXPKSFFKPETFFRKPIPKLHPNLIKHGFLHFPIPNTIPTISTP

SEQ ID NO: 254994 - protein, 488 aa, Glycine max
  Clone ID: PAT_MRT3847_72282C.1.pep
RWQHVYIPLLFFSGVDYIDAPTPYMMGLYSGVDTSALAIDGVVVVALEYNRITTSEEIPPIPEPEFSLLRGEIMKLLYPNVIGIDEMNTGIYSVSEHYPKLRAKQWGEEHDLQLRMIFLKFFATVLSGYRNFLENSATQVFNSQAFLKKRSRSTNQPPEPMIAQFLDSHGFLDYLERGVGSDENNNNLLDKLQDAIGRGQNPMSILPSSSVEPEILTVSDSDIGISGSGAKYTYDRFPANIRTEEQEEKRKQILAAVSNAFEYSGRHTPSKDPLADSLSPDERAAERDRMVLDIQVKLQGLWLRLLKLGATDDPLSSFEYGTILALIESDAEGIGGSGFVECIREHIHSGWDCHLTEEQFIAVKELLKTAINRATSRNDLLTIRDALEVPSDMYKKDNNNVLDYVQRHLISLSIWEELRFWEGYFDYLMEQSSNKSANYASLVTAQLVVLASHMVLFGLLMCLNFIEVKLYLFVLLILCLHEGWAGTS

SEQ ID NO: 254995 - protein, 152 aa, Glycine max
  Clone ID: PAT_MRT3847_72283C.1.pep
LSIMAHLLPFLVLTLLAATASAHNITNGTTLSTTLYQTTGNANGNVGSVNITDLKGGKVGFGSAAPGSKLDSSYIKSVKSIPYNISVIEISAPIMAPGILAAPPPSADVNITALIEKAGCKTFASLISSNGLIKTFQATADKGLTIFAPNDE

SEQ ID NO: 254996 - protein, 81 aa, Glycine max
  Clone ID: PAT_MRT3847_72284C.1.pep
FSAPTIGGRQYIVHPGRHLTAQRLKGANANDNIALNKDILAGTDTTSHIGKTIETNAVTYANLLKAGSKPKKNGLQYKNKN

SEQ ID NO: 254997 - protein, 186 aa, Glycine max
  Clone ID: PAT_MRT3847_72285C.1.pep
QRQCQRAGIYQSRPTRPPRRLSRLDGSNSTRHSQVDYDALKKAFCNFAKLISENASQKRTYLEDGKQGRLHCLVCGTGTGRSAKDFPDMHALIMHTYNPDNADSRIDHLGLHKALCVLMRWNYSKPPDNSKAYQFLPADEAAANQDDLIMWPPLVIIHNTNTGKNRDGRMEGLGNKMMDNKIRGIM

SEQ ID NO: 254998 - protein, 415 aa, Glycine max
  unsure (1)..(415): unsure at all Xaa locations
  Clone ID: PAT_MRT3847_72286C.1.pep
MAHILPFLLLTLLAATASAHNITDILAANPDYSDFNGFLSQTGLAGEINTRQTITVLVLNNAALSAVAAKHPLSVVKNLLSLHILLDYFDNTKLHQIPNGTTLSTTLYQTTGNANGNVGSVNITDLKGGKVGFGSAAPGSKLDSSYTKSVKQIPYNISVMEISAPIISPGILAAPPPSADVNITALIEKAGCKTFASLISSNGLIKTFQSTADKGLTIFAPNDEAFKAKGVPDLSKLTNAEVVSLLQYHAAKYLPSGSLKTTKDSINTLASNGAGKXDLGDVSRMACLLLYVVVPGGRIAETILDSTPLSIYSVDSVLLPPELFAKSPSPAPAPGPVTAPSPSPVSTPSEAPSPLPASPPAPAGETPAGAPADAPSSEAERSTSGKSDGVHVKASATLTVAVIALSAFVISATFM

SEQ ID NO: 254999 - protein, 35 aa, Glycine max
  Clone ID: PAT_MRT3847_72287C.1.pep
VHQFHMMYQELSPLTQTQEQFPLLNHSLDHKDQVL

SEQ ID NO: 255000 - protein, 63 aa, Glycine max
  Clone ID: PAT_MRT3847_72288C.1.pep
ENCSPSIGLTVIAIVLNLEKQTAGAFYTCACAHSILFLSVCSWFFWSPKLCTAPDMCTSTRIN

SEQ ID NO: 255001 - protein, 158 aa, Glycine max
  Clone ID: PAT_MRT3847_72289C.1.pep
MVPSQLSKYGLLFISCTFFLINFLTIPISSLNIGVETTGITVSVSKECSRTCESSFCSVPPLLRYGKYCGLLYSGCPGEKPCDGLDACCMYHDKCVQAKNNDYLSQECSQTFINCMQKFKNSRAPTFKGNACQVDDVIEVINVVMEAALLAGRVLHKP

SEQ ID NO: 255002 - protein, 94 aa, Glycine max
  Clone ID: PAT_MRT3847_7228C.1.pep
ALCSIAVNAFLLPMLPVLMPWLGITGALIVMAFPWYSDGVVRALCVFGYAFCAAPCVWASMTRIMAGLHQSLEREAFLPRLGESSPPSWFNKLY

SEQ ID NO: 255003 - protein, 117 aa, Glycine max
  unsure (1)..(117): unsure at all Xaa locations
  Clone ID: PAT_MRT3847_72290C.1.pep
MVFERKDRVDEEGTYEEXSLRAPLNGGXGTDYMERXPFAPSNGSPNTLXRTNGETGKRXTFTGDGEQMTLIRTTTAEEAYNKLIVELANRDPTXIDIARPKDDKLSRRKILDKPKTR

SEQ ID NO: 255004 - protein, 66 aa, Glycine max
  Clone ID: PAT_MRT3847_72291C.1.pep
RVLELLAKRQEPVVAPPPAAPAPKPVVSGDVWSGPRITDEQLETYKQAVAHASELDAQLQAERVKG

SEQ ID NO: 255005 - protein, 78 aa, Glycine max
  Clone ID: PAT_MRT3847_72292C.1.pep
EHVLVYICSCFRVCYCSCWASNMRINQVSDSSELLSAQSLILEDKSELKPRSVEESPTDFHHQEIVFSDSSHPESAAS

SEQ ID NO: 255006 - protein, 61 aa, Glycine max
  Clone ID: PAT_MRT3847_72293C.1.pep
KYGPKRFFKQWECNFQVVLQQNFIGLGPGQWPLILPHFWGAKKIKRKKKKKKKKKKKKKEK

SEQ ID NO: 255007 - protein, 141 aa, Glycine max
  Clone ID: PAT_MRT3847_72294C.1.pep
TSTEITQSEAANIVMEYVKQHNLFHKTKKKRIECDEKLHLLFGRKTISRLKINDLLESHFAENCEESSDGIFFDSEDDESALTACETPRTAPSERKSQPKKPAFEKPRSCFAAIVPAYIKLVYLKRSLVEDLLKDPETFET

SEQ ID NO: 255008 - protein, 61 aa, Glycine max
  unsure (1)..(61): unsure at all Xaa locations
  Clone ID: PAT_MRT3847_72295C.1.pep
NTKVCVWNLLGECLXPQAKFGDFFFFMSKAEFDETXLGNILTTPPTKKKKKKKNGRVGRPG

SEQ ID NO: 255009 - protein, 76 aa, Glycine max
  Clone ID: PAT_MRT3847_72296C.1.pep
WRYAHDVRAVPVQTSRRVLTQPPKTNSSLSSTAVASISADCFNISSQPRFIYSLYTSFSMIGQQAKAKPQGSDVSV

SEQ ID NO: 255010 - protein, 88 aa, Glycine max
  Clone ID: PAT_MRT3847_72297C.1.pep
MLTIFFMNQIFFSPWGLFLRCGRYFNNPFLHIYFMNQIIIFSSSILFFGVTSILIILYTHILFRFKLSAHEFPLYIARIFKPTSSNLL

SEQ ID NO: 255011 - protein, 52 aa, Glycine max
  unsure (1)..(52): unsure at all Xaa locations
  Clone ID: PAT_MRT3847_72298C.1.pep
PKLKTDSIKTGPMNSDQEPSTGGYFYSSVRTSHPEYQAFXSIVCKSNNYDPR

SEQ ID NO: 255012 - protein, 96 aa, Glycine max
  Clone ID: PAT_MRT3847_72299C.1.pep
FQYASVLCWMPLVPEAGLGAAVDDADVLPLGVEFFLSLSCACYLVAAHPFVMASGCAGCGRLELCLESGLLLSCAPLSLSVAMAWALVVLVLLRFP

SEQ ID NO: 255013 - protein, 86 aa, Glycine max
  Clone ID: PAT_MRT3847_7229C.1.pep
IIICYNINRTIPRHWKKNSRTPLHSPPSHLNVCALEHLGPMRSKLFVNYNWTHVMLLSLQSNLPKQRRNEEALYILCYTNISLRYS

SEQ ID NO: 255014 - protein, 78 aa, Glycine max
  Clone ID: PAT_MRT3847_722C.1.pep
QQNGNAKLLKPTNKASYLVCNHTKVSFELDHLFDNPGYTDSDTIIDFDRRRLCFDSIRDKSVILVITRLCVINATITD

SEQ ID NO: 255015 - protein, 69 aa, Glycine max
  Clone ID: PAT_MRT3847_72300C.1.pep
MILSIPSKDKEEEKKRERVSQYNTKIRVQLNFLLLSLPTHMQANIIFFAINGSKCKRQQLFQPKYGKRH

SEQ ID NO: 255016 - protein, 33 aa, Glycine max
  Clone ID: PAT_MRT3847_72301C.1.pep
IVHLFHLHITHPCLTFSKSVMNSCTTCKITYSQ

SEQ ID NO: 255017 - protein, 56 aa, Glycine max
  Clone ID: PAT_MRT3847_72302C.1.pep
QHSRRIDLCLERFVPSPSWILKAWETSEDEILAIGGLDAVVFVRILVFRLFNPSKI

SEQ ID NO: 255018 - protein, 34 aa, Glycine max
  Clone ID: PAT_MRT3847_72303C.1.pep
FIVKNIDYSLINWIVTSLSIFYLLVMIAIMCINS

SEQ ID NO: 255019 - protein, 45 aa, Glycine max
  Clone ID: PAT_MRT3847_72304C.1.pep
IYIYIYIYMPKNKLKKFKCYQPNAQKQPTGHNFKNHNFMKENSLR

SEQ ID NO: 255020 - protein, 41 aa, Glycine max
  Clone ID: PAT_MRT3847_72305C.1.pep
FSHKGAGCSSSPLKIYREVLSNQHDIHGLKLGKICAGHHLI

SEQ ID NO: 255021 - protein, 75 aa, Glycine max
  Clone ID: PAT_MRT3847_72306C.1.pep
GFRGVGPPVVYSFMQVGGLPIAPFISCFKFEECKPPPKGKEKNGLMANHVDQKKSETLMESDLFIPKEALSFPFE

SEQ ID NO: 255022 - protein, 69 aa, Glycine max
  unsure (1)..(69): unsure at all Xaa locations
  Clone ID: PAT_MRT3847_72307C.1.pep
YFFISNKFISFYSYLVGQNLKYDGGVVYSFFSLIXTNNXFLLIKYLYMYIIIXXIKRIILKKTIDKRYK

SEQ ID NO: 255023 - protein, 91 aa, Glycine max
  Clone ID: PAT_MRT3847_72308C.1.pep
CGLAGLSVRCGWRFCLPVRPVSGGVVFWLFGSAWLCLWFSVSVARAAGGCLSLGWSSPWVGRAFSGFLWAGSACFCFRCPRAASCGWVFIK

SEQ ID NO: 255024 - protein, 50 aa, Glycine max
  Clone ID: PAT_MRT3847_72309C.1.pep
TTKHKYLIKGIFITSCAPHISHSISSLQPYPILTKTPLFKTSPETLNSNT

SEQ ID NO: 255025 - protein, 73 aa, Glycine max
  Clone ID: PAT_MRT3847_7230C.1.pep
IQDIYSIFTQLSPITFAHYNIYLLMSLHEHLYRLNNMALAFQNAQTVYHSIVSALEGTTLKTYSEMHGPHEDN

SEQ ID NO: 255026 - protein, 185 aa, Glycine max
  unsure (1)..(185): unsure at all Xaa locations
  Clone ID: PAT_MRT3847_72310C.1.pep
TXELISSLSVIMGMQKHVLLGLHKESLQALRVNYYPPCSTPEQVLGLSPHSDASTITLLMQDDDVTGLEIQHQGGWVPVTPIPDALVVNVGDVIEIWSNGKYKSVEHRAVTSKKKRRISYALFLCPRDDVEIEPLDHMIDAQKPKLYQKVRYGDYLRQSMKRKMEGKTHMDVARIEDSHLTKKDD

SEQ ID NO: 255027 - protein, 56 aa, Glycine max
  Clone ID: PAT_MRT3847_72311C.1.pep
SKSKTSDFYANITMSTITLVQTFLLHLHYAHTFDSPPRHIYPKEKRKKKKMFDNFT

SEQ ID NO: 255028 - protein, 57 aa, Glycine max
  Clone ID: PAT_MRT3847_72312C.1.pep
FKKFGTKLKEIGVKISGRSKISTLRTRNGPGKMPNPGFFPTSGEGLTFRGIPTSISF

SEQ ID NO: 255029 - protein, 153 aa, Glycine max
  Clone ID: PAT_MRT3847_72313C.1.pep
MSQPDSLVAEIEVKTSADHFYDTLKGKKQHRIHDVAPHHIHKVEVHEGEWDKSGNIKVLTFADGDTVETLKERVDFDDENKKITYTILEGVMLKYYKSYKVIVHVLPKGDEHSLVKWTFLYEKVDHTAPEPTKYKDLVVKLTKNVEAHLVEAR

SEQ ID NO: 255030 - protein, 84 aa, Glycine max
  Clone ID: PAT_MRT3847_72314C.1.pep
GKSSMSASIASTTGSGSDNKSRTSSSFIEFGEYNSTQAALFGDAAPSHSSGHRKGMVIPHSPIASLEQWLGRQSDITAVESMVF

SEQ ID NO: 255031 - protein, 141 aa, Glycine max
  Clone ID: PAT_MRT3847_72315C.1.pep
MVKHNNVIPNGHFHKYWESRIKTWFDQASKKKTRRLRRKAKAAAIAPRPAAGLLRPAVHCPTIKYGSKVRAGKGFTLEELKEAGINRKQALSIGIAVDFRRTNKSVESLQANVHRLKAYKAKLVVFPRKSNKPKNGDSAAE

SEQ ID NO: 255032 - protein, 158 aa, Glycine max
  Clone ID: PAT_MRT3847_72316C.1.pep
YTLYEILAQSLDIKMLSPIVNLDKDSSTFDSNIIIKGEEKELHGTSESSGSSELLLELHGKRSDNPEKIEELSEKSLVRSPDLGAIIHAPDHSVETKLSETFDNDVTGNEEVRISQTHFYRYRLSVGFVFCQRPSKHSKWSQKGNDLSKKRCLPHDLD

SEQ ID NO: 255033 - protein, 452 aa, Glycine max
  Clone ID: PAT_MRT3847_72317C.1.pep
PSRITIRGFDQPYVLKSLNEVDAINLFRHSASLNQSSSDIPENIVKKIARGCSGSPLALIVTGKSLSREPPWAWNNRAKKLSKGQPILAFSADVLTCLQKSFDDLDPKVAECFRDLSLFPEAQRIPAAALVDIWAELRDEDDDSAMENIYELVKRNMADIVVTRNISSGTIDYNYHYVTQHGLLRDLAILQTNKELMKKRNRLIIDVSGNNLPDWWTTQNEYHIAAHSLSISTDDTFTSEWCNLQASEVEVLVLNLREKKRSLPMFMEKMNKLKVLIVTNYEFYRADLENFELLDNLSSLKRIRLEKVSIPFLSNTGVQLKNLHKFSFFMCNVNEAFKNSTIQVSKVFPNLEEMNIDYCDMVELPIGLSDIDSLKKLSITNCHKLSALPEGIGKLVNLESLRLTSCTKLEELPESITSLSKLNFLDISDCVSLSKLPENMGELRSLENLNCR

SEQ ID NO: 255034 - protein, 52 aa, Glycine max
  Clone ID: PAT_MRT3847_72318C.1.pep
HYLPRKKSQKHIQSVIASLNITPYFFLLTKITPYNSSINRFGEFLTKPLPTF

SEQ ID NO: 255035 - protein, 282 aa, Glycine max
  unsure (1)..(282): unsure at all Xaa locations
  Clone ID: PAT_MRT3847_72319C.1.pep
MPSQAELSMMDYKPYSYSTLLKSFLDQTETDQTYKLEEFLSRLEEERVKIDAFKRELPLCMQLLTNAVEASRQQLQAFRSNQGTRPVLEEFMPILKHPNSQESAEKTSNISDKANWMTSAQLWSQASEGTKPQSTITSLPKEGADIGFSVSPKLALDNKHRNGGAFLPFSKERNSCQGLRGLPELALASPEKEIEENKCELEAEKCSKRENPGKGGSCEGVNVDQGKSASVASEAQTANTTTTTTNTSGQTHXKARRCWXSPDLHRRFVNALXMLGGSQVAT

SEQ ID NO: 255036 - protein, 51 aa, Glycine max
  Clone ID: PAT_MRT3847_7231C.1.pep
CDAIIFKKTKHCKDYHSNYIFFFLDFRIFFLKNILNCIINFIYIYKIKNAN

SEQ ID NO: 255037 - protein, 22 aa, Glycine max
  Clone ID: PAT_MRT3847_72320C.1.pep
VVFIILKTRLESCNSHVGSQLC

SEQ ID NO: 255038 - protein, 285 aa, Glycine max
  Clone ID: PAT_MRT3847_72321C.1.pep
KKKTRTLYKCIFSLSLSSNCACDCLCITKTIRFDSLFSMDTFFNSQSSSSSRSRWSYDTLKNFREISPLVQNHIKRVYFTLCCAVVAAAVGAFLHVLWNIGGFLTTLASIGSMVWLLSTPPVEEQKRLSLLMASALFQGASIGPLIDLAIAIDPSLIVSAFVATSLAFACFSAAALVARRREYLYLGGLLSSGLSILMWLHFASSLFGGSIALFKFELYFGLLVFVGYVIVDTQEIIERAHFGDLDYVKHALTLFTDLAAIFVRILIIMLKNSSERNEKKKKRRD

SEQ ID NO: 255039 - protein, 81 aa, Glycine max
  Clone ID: PAT_MRT3847_72322C.1.pep
LVPISEEISLVSRLINAIANNACKEQLTTGLQKLDHSFPSKTTSNMEPETPSEWWGKSLNVLSLDFFQRVLSAVKSKGLKQ

SEQ ID NO: 255040 - protein, 81 aa, Glycine max
  Clone ID: PAT_MRT3847_72323C.1.pep
HASARREATNDAGVIRGLNVMRIINEPNGADIAYALDARATSSGETNVLTCDLHGGTPEVYVLTMHESIFEVNATAGDTHL

SEQ ID NO: 255041 - protein, 128 aa, Glycine max
  Clone ID: PAT_MRT3847_72324C.1.pep
MVMEKKMKVRSEREKTKVVIRHLPPSLSQSDLSQHIDSHFASRYNWFSFRPGNNSHTRQRHSRAYIDFKCPDDVFEFAEFFDGHVFVNERGAQHKVIVEYAPSQRVPKPSAKKDGREGTIYKDPDYLE

SEQ ID NO: 255042 - protein, 53 aa, Glycine max
  Clone ID: PAT_MRT3847_72325C.1.pep
NQKMSLQSNLLSLLVALAAVFASLNLINPIPQFLNNFTYFSLTTLSPSSAYLA

SEQ ID NO: 255043 - protein, 65 aa, Glycine max
  Clone ID: PAT_MRT3847_72326C.1.pep
RPASSSRSARIRTLSRSTTPSAVRDSESDRPQEYYTGGVETGMHIQDPSLGNHVHELRDQARQLG

SEQ ID NO: 255044 - protein, 69 aa, Glycine max
  Clone ID: PAT_MRT3847_72327C.1.pep
VRSAEPVTLLSYGHLRWLLLSTAPPIWSRISPSCYSIINKKVSEFLSSYFNNSEIYRAGGQSTVGRRSA

SEQ ID NO: 255045 - protein, 54 aa, Glycine max
  Clone ID: PAT_MRT3847_72328C.1.pep
QHPHLNPPQRSYCSSDSTPSGINMFLSSSLLPKRLFFGGMFLVSANERSWLLDR

SEQ ID NO: 255046 - protein, 103 aa, Glycine max
  Clone ID: PAT_MRT3847_72329C.1.pep
TSDGSGQIPYELIRDTLQINDDEVELWVVRAITAKLIDCKMDQMHQSVVVSHPTDRVFGQHQWQALRTKLATWRGNIANVISTIQANKITEDGSQAAQGLVVR

SEQ ID NO: 255047 - protein, 52 aa, Glycine max
  unsure (1)..(52): unsure at all Xaa locations
  Clone ID: PAT_MRT3847_7232C.1.pep
MSRRHTKELGSSSSEWTVCLSLGSLASAALCAIAHKPLDVEFGXNYLPTWAV

SEQ ID NO: 255048 - protein, 51 aa, Glycine max
  Clone ID: PAT_MRT3847_72330C.1.pep
DVLVWRCCVSHITQTAGQWLVPSRAHTSRVQAIALSEVVMQSPLFITGENC

SEQ ID NO: 255049 - protein, 50 aa, Glycine max
  Clone ID: PAT_MRT3847_72331C.1.pep
LESGLGYLHASLGRSANACSCFLDGLTSCLSSLHLGRGFRSGLSSCRMPN

SEQ ID NO: 255050 - protein, 218 aa, Glycine max
  unsure (1)..(218): unsure at all Xaa locations
  Clone ID: PAT_MRT3847_72332C.1.pep
VRIPGSTTSDLLYINDLEKLSSLQISHPELQPSLLSLASLFQNPQILTCRQGTLTNQHFILLPLSTPVNVRPYXYPHYQKHEIELQVESMLQKGLIQPSTSPFSSPVLLVKXDYRALNALTVXDRFPIPTIDELLDELGGARCFSKLDLLQGYHQIRMXFSDIPKTAFKTHHGHYEFKVMPFGFVXAPSSFQATTKNDLFXXYLLHFIIVFFDDILIY

SEQ ID NO: 255051 - protein, 62 aa, Glycine max
  Clone ID: PAT_MRT3847_72333C.1.pep
NTAKEGTKWRRRSPKGSKGIVEALFSHTEIPKPLRFQPQQHSVKSRSLNVRRRDSRILERLE

SEQ ID NO: 255052 - protein, 51 aa, Glycine max
  Clone ID: PAT_MRT3847_72334C.1.pep
LWCEPENRNSQTPFSNLRCMHFSPALNSLIKPIRNGFFPLYPFLFVTITLN

SEQ ID NO: 255053 - protein, 266 aa, Glycine max
  unsure (1)..(266): unsure at all Xaa locations
  Clone ID: PAT_MRT3847_72335C.1.pep
HASGNHEGSLFSILMLFWSHAECNHLLHPLDPLTPSELNLVRTIVQNFYPTSQNLTFHYVGLDEPNKPEILKWLSSNNSKIKPKPRPPRRAFAVVRFQKQSHEITVDLSTHSIVSTKDCEGNGNPMLTFGEQAVASQLPFSYEPFKESLKKRGLNTSQVVCACFTIGWFGEGKTKRNVKVKCYYANDTANLYARPLEGVAAVVDLDDMKIVGYNDRYVVPVPKAEGTEYRASKLKPPFGPKHKGIAVTQDGGPGFTXDGHSVSWAN

SEQ ID NO: 255054 - protein, 70 aa, Glycine max
  Clone ID: PAT_MRT3847_72336C.1.pep
MMMKSAMCALVLVALVVVVVLSMADAAVTCIPSQLTPCLARVNSGSAPSSACCLKLKEQKPCFRGYLKNP

SEQ ID NO: 255055 - protein, 58 aa, Glycine max
  Clone ID: PAT_MRT3847_72337C.1.pep
SFLFFFSHLYYYCRCFLGSNNVLMVLAFECSRGLLNFVLSAIVAIQQFFFFFFYFLTI

SEQ ID NO: 255056 - protein, 44 aa, Glycine max
  Clone ID: PAT_MRT3847_72338C.1.pep
YKYELGKGENLNISYWSCSNSEIRNEKCPSMDPRKGIMIAPLPM

SEQ ID NO: 255057 - protein, 143 aa, Glycine max
  Clone ID: PAT_MRT3847_72339C.1.pep
GSSAYQTFVLFGSTFGLIPDIHSYNGLMYAFGKLKKTHEATRVFEHLVSLGLKSNAKSYSLLVDAHLINRDVKSALAVIDDMRAAGYEPSKEMLKKVRRRCTREMDNESDARVQSLANSLNYQLGSENRRDILFNLNYSMGYA

SEQ ID NO: 255058 - protein, 98 aa, Glycine max
  Clone ID: PAT_MRT3847_7233C.1.pep
PHPKKVFLLPKVVTLDLSQAPPKRFRSGRGNYIARGARYPKVESRHEYRKPGQSAFLSRMDVSSFSELIRAHNVGVCKQKNEECASSILCRKVGGGDV

SEQ ID NO: 255059 - protein, 95 aa, Glycine max
  Clone ID: PAT_MRT3847_72340C.1.pep
RSTPTYLIFSSTFQTAKMTGVKTAHAEQLDRVYTLDHEMPVAARQTSIYDEDILMQKKEGGDYSGAKAKTDPVEIALVKKLDLWIMPMLWLMHWT

SEQ ID NO: 255060 - protein, 134 aa, Glycine max
  Clone ID: PAT_MRT3847_72341C.1.pep
IYLATLHPCIRAALTFLIILPTRLREGAVDVPLALIVTVISLSREPPWARPSRGNNLAKGQPTLAPSADVLTCVQTSFHDLDPNVAACVRDLSLFPESQRIPAAAPADILAELRAEHDDRAEDNIYELVYRHMA

SEQ ID NO: 255061 - protein, 105 aa, Glycine max
  Clone ID: PAT_MRT3847_72342C.1.pep
KDYAGKCESVVTTAKGQRVQGTCKYGTRVDYILSSSNSPYKFVPGSYLVLSSKGTSDHHIVKVDVVKANNNPEENNVTKNPQQRRQRVVRITESNPSKGVWKPYN

SEQ ID NO: 255062 - protein, 193 aa, Glycine max
  Clone ID: PAT_MRT3847_72343C.1.pep
MSSEVEEEERRPLIGHDLGSSILIVHQNEDTISICPLPQSNPTDTSSLSLPNQRLSSLDVFRGLTVALMILVDNVGRAFPSLNHSPWFGVTLADFVMPFFLFVVGVSIGLVFKKVSSKPNATKKVISRTLKLFLLGLLLQGGYFHGHGKLTYGVDLSKIRWLGVLQDVFYLTLLSVPLFALRSVCSELEIQAF

SEQ ID NO: 255063 - protein, 142 aa, Glycine max
  Clone ID: PAT_MRT3847_72344C.1.pep
MGSFSQNIWRWDLKWRRHLFEHEEGVAVAFMEDITAYTLQNHLKDKLLWKADPSGLYSTRSAYRLLSSQNSTALDGINFQLVWKLKIPPKAAIFTWRLIKDRLPTRANLHRRNVELQDLTCPLCHSEQEEARHLFFHCRYTG

SEQ ID NO: 255064 - protein, 77 aa, Glycine max
  Clone ID: PAT_MRT3847_72345C.1.pep
TSIDSHGARVQCIQVCPPVGNKKSESMSYLPDVDDARLAKQVEYRLSKACIPYVILQLKHGFVCCERNRSPVYHDER

SEQ ID NO: 255065 - protein, 144 aa, Glycine max
  Clone ID: PAT_MRT3847_72346C.1.pep
NPQHYFELLFYRNYYRCSSCKGCVARKQVERSTTEPNTFIVTYTGDHKHAKPVHRNSLAGSTRTKPSTTRLSEPNESVSCPKKENACSSNSELSPMLSVSDTLENEETVSASEPDCPDMEIEPSDNDDVLIPNTGAMFDAVLLG

SEQ ID NO: 255066 - protein, 50 aa, Glycine max
  Clone ID: PAT_MRT3847_72347C.1.pep
LLNGEGCVVYDYGGPCPQRYLQARARNCSMYALYIHGTNDTESHHLLRCV

SEQ ID NO: 255067 - protein, 261 aa, Glycine max
  Clone ID: PAT_MRT3847_72348C.1.pep
MRRKKKLSTFPIIHPTPSQNRKEQASPSPFSLLMSNNKNTTFFPTPHGQIRTSEFVNSQNPPQATNQGIDDIRKKHYRGVRQRPWGKWAAEIRDPKKAARVWLGTFDTAEAAAMAYDAAALRFKGNKAKLNFPERVVMPIQPQTNNNNSTSSSAPTTQSSSSLPPPQSLHNNSSLSAEGFPNLEEYARLLSCSDDDDFQRVALGLYQHHNNEDFICGSSQPPPVPFFVSSSSSSSAMTSSYSDFLGQGGSTGFDEGNKRGS

SEQ ID NO: 255068 - protein, 532 aa, Glycine max
  Clone ID: PAT_MRT3847_72349C.1.pep
VSLYAGPMAHPVRPHSYIKMDNFYTVTVYEKGAEVVRMYKTLLGSQGFRKGMDLYFKRHDGQAVTCEDFFAAMRDANDADFANFLLWYSQAGTPVVIVNTSYNPEAHTFSLKFSQDIPPTPGQSVKEPTFIPVAVGLLDSMGKDIPLSTVYHNGTMQSVSSNDQSVCTTVLRVTKKEEEFVFTDIFERPVPSLLRGYSAPIRLESDLTDSDLFFLLANDSDEFNRWEAGQVLARKLMLNLVDDLQRNKPLVLNSNFVQGFKRILCDSSLDKEFVAKAITLPGEGEIMDMMGVADPDAVHTVRTFIRKQLASELRSEFLSTVENNRSSEEYVFNHSNLARRALKNVALAYLGCLEEKEFTDLVLHEYKTATNMTEQFAALAAIAQNPGKTRDDVLDDFYGKWQHDFLVVNKWFALQAMSDIPGNVENVRKLLSHPAFDLRNPNKVYSLIGGFCGSPVNFHAKDGSGYKFLGEIVLQLDKLNPQVASRMVSAFSRWRRYDEDRQKLAKAQLERIMSTNGLSENVFEIASKSLAA

SEQ ID NO: 255069 - protein, 61 aa, Glycine max
  Clone ID: PAT_MRT3847_7234C.1.pep
YIHVIKMNVLTFKDVPDMINDVRRPVLYYYKVTCINSAVDITDIYKAANAFLFIKMLSNID

SEQ ID NO: 255070 - protein, 161 aa, Glycine max
  Clone ID: PAT_MRT3847_72350C.1.pep
VTCEDFFAAMRDANDADFANFLLWYSQAGTPVVIVNTSYNPEAHTFSLKFSQDIPPTPGQSVKEPTFIPVAVGLLDSMGKDIPLSTVYHNGTMQSVSSNDQSVCTTVLRVTKKEEEFVFTDIFERPVPSLLRGYSAPIRLESDLTDSDLFFLLANDSDEFN

SEQ ID NO: 255071 - protein, 56 aa, Glycine max
  Clone ID: PAT_MRT3847_72351C.1.pep
LGSVVCRGGYHRRYLHLAVVSTGVSLVAVFPSSSTPASRRGNLGFALITASIAACI

SEQ ID NO: 255072 - protein, 71 aa, Glycine max
  unsure (1)..(71): unsure at all Xaa locations
  Clone ID: PAT_MRT3847_72352C.1.pep
THTSDQNFLNYYYCLYYHISPXTSLFFYKIPRPQFLKPHHSSLPLITITTLFLYQTSQIYLPIFIIHTIFS

SEQ ID NO: 255073 - protein, 162 aa, Glycine max
  Clone ID: PAT_MRT3847_72353C.1.pep
MLPTMSTLSMANNKMQNPKPPSRSTSYGPLGLENDDNFFEGVLAVDQSMQNGSDSHIFSPNSKGDNNNNNNNNASNFPIKRALITSQLWNETGSPGSSSSCKRFHGDLNCGCSNAEDNNDSFISLLSQFPQNATFQPNAIHGSVEDDGAPRQQFHLHGINWN

SEQ ID NO: 255074 - protein, 304 aa, Glycine max
  Clone ID: PAT_MRT3847_72354C.1.pep
MEDNDYIRRWEDLDIDILVKIFQLLDIFELTSGISRVCSAWRLACCDPLLWKTLDLSMLRSNFIKIPLEPFVYVDGRSDRTLTRILKISLSLSQQSIMTLIFHFNLYVSDEQLTYTAERCPQLRRLVLPAWNRIKKPGMCKAIRGWKELESLTMPSIANPPYILEEISTHCKNFSELKIMGPCDIFFASSLAAFLPKLRVLSLRCSMLYKDVLILILDSLQHLEVLNISHCVLMEALPAPQQKRIIKEIDVTIRQKASRLREFLTCMEDSCVMCQRTRTDEGLIRWYKYEEGLWKTDEVRSLSL

SEQ ID NO: 255075 - protein, 63 aa, Glycine max
  Clone ID: PAT_MRT3847_72355C.1.pep
SLGSLISSQFSDMWTNGMPKVVEWGSMEQKHMDDDQEEGNGGYIEKASDFIHDIAENIVGAFG

SEQ ID NO: 255076 - protein, 36 aa, Glycine max
  unsure (1)..(36): unsure at all Xaa locations
  Clone ID: PAT_MRT3847_72356C.1.pep
SIXFYXIFLTFLVPSLTQFKLTTIHNNPQLNLHFYH

SEQ ID NO: 255077 - protein, 98 aa, Glycine max
  unsure (1)..(98): unsure at all Xaa locations
  Clone ID: PAT_MRT3847_72357C.1.pep
NWPGLSWIGQLWNTRIFDIXLLHFCNTYLFLSLSFTRPRFDYFFPQFPTSHLPLFYSQTTTTNTQHTPTHTHKHNTNLVSQFLALEPTQVKLKTRAKT

SEQ ID NO: 255078 - protein, 137 aa, Glycine max
  unsure (1)..(137): unsure at all Xaa locations
  Clone ID: PAT_MRT3847_72358C.1.pep
TPTRKHGFLKAPLVLLPCSSNGCPLKVLGKLSRIPPVYKAFHLRKPPXYKAPQLRKPXPVYKPFSLKTPPIYXPPVEKPPVYKPPVEKPPVYKPPVEKPPVYKPPVEKPPVYKPPVEKPPGYKPPVDKPPVYKPPVE

SEQ ID NO: 255079 - protein, 148 aa, Glycine max
  unsure (1)..(148): unsure at all Xaa locations
  Clone ID: PAT_MRT3847_72359C.1.pep
MEETSGEQRVQXLTHMLTSPTTTPSLHSQFFIATQIPCYLNWDYPPFLCSSNPQLLKTWLRSFFLKRVLGNAPPQTSWRSKCPFHQPPPLILTEGVEEAQWEPQQRRAYVRKRMARKLRRNVNPFLPVLLPNLLLLSFMFWNPLDSQD

SEQ ID NO: 255080 - protein, 40 aa, Glycine max
  unsure (1)..(40): unsure at all Xaa locations
  Clone ID: PAT_MRT3847_7235C.1.pep
ARXLXXKSKGXMSXAXSELPAEHIFFQXQXLXASXXRXIX

SEQ ID NO: 255081 - protein, 62 aa, Glycine max
  Clone ID: PAT_MRT3847_72360C.1.pep
DFALLGYTLNTVLFDIRLTVRFKHIVLLSELICSIASSSLVKFWISAPTHLSGIGLLRVDFS

SEQ ID NO: 255082 - protein, 116 aa, Glycine max
  Clone ID: PAT_MRT3847_72361C.1.pep
SRGHLYLQGSTSKSINVQPEISLSYLGLLLFTSLNQQQFFCSIFHLQKLLRCVQSVYILTITYPFPDFFSYLEHALGKSNKCMNYIIWLYTLFYLFIKVLLKIVKQQCRDKLRRAK

SEQ ID NO: 255083 - protein, 63 aa, Glycine max
  Clone ID: PAT_MRT3847_72362C.1.pep
GSETPRSRARTCDSASQGSGVGSPNNKDQRRSFFKLLEKGSEMPFQTFHPLKNGPKLTRKKRK

SEQ ID NO: 255084 - protein, 53 aa, Glycine max
  unsure (1)..(53): unsure at all Xaa locations
  Clone ID: PAT_MRT3847_72363C.1.pep
KYLFHLLLINFPLFIIPTHIPYSHLTFKXYNIYPFNHTLIPPLSPLYIPLQFP

SEQ ID NO: 255085 - protein, 79 aa, Glycine max
  unsure (1)..(79): unsure at all Xaa locations
  Clone ID: PAT_MRT3847_72364C.1.pep
NKFPGSPRCRAGYQYYMRLPQLTKLCYSTDIATWNNKPMLKPIKHAIKITXRFDSIGRSEPRPYYNHREVARQIASLMM

SEQ ID NO: 255086 - protein, 69 aa, Glycine max
  Clone ID: PAT_MRT3847_72365C.1.pep
SRNISCWHYIGPIILLQLFLANFLQMGTNFSEWFFSFFSNILLGQFIGGQKLCTCGHIKVFPRWAFLNL

SEQ ID NO: 255087 - protein, 114 aa, Glycine max
  Clone ID: PAT_MRT3847_72366C.1.pep
TSSRSRAGALFFVVFFLFFFFFFFYVFFFLEPNFLLIYGVRGWANWFFSLNLVKKLLIFTGNKSEGFLLYKHNSGTGGFDYATYNSGFPSKDKPMNFSPSTVFFSIKSLSSFGR

SEQ ID NO: 255088 - protein, 56 aa, Glycine max
  unsure (1)..(56): unsure at all Xaa locations
  Clone ID: PAT_MRT3847_72367C.1.pep
TSWHLSFLIDIPELDRVQAILLXSFXDYGMAGNTLMLTFSVPQANATSFENAEYSA

SEQ ID NO: 255089 - protein, 85 aa, Glycine max
  unsure (1)..(85): unsure at all Xaa locations
  Clone ID: PAT_MRT3847_72368C.1.pep
TEDQPEAPPSKTAAMDETLDPTGYEIEDETPDKISEQIPGTQKGCQTCKEPYGGVXAWIAESMASMGAHMAAHNKRVDGIQLSIH

SEQ ID NO: 255090 - protein, 62 aa, Glycine max
  Clone ID: PAT_MRT3847_72369C.1.pep
PPPLGNYKSCPTTYKYPSPPPTPYNYPSPPPTFYKYNSSGTPLHSPTRTIYMYTCPPTPYHY

SEQ ID NO: 255091 - protein, 265 aa, Glycine max
  unsure (1)..(265): unsure at all Xaa locations
  Clone ID: PAT_MRT3847_7236C.1.pep
MTLLSSHLLVFSAVHHRAPPTTTTRNSPTTNHTVRFLCSPGVPPAVRLDQRLPRFVVPGAGAEDLLYNAGATVGVLGGGYALVRAFDELTRRNILQQGLGXKAGXILSGLLLLVAWPIFSNAPKARYFAAFVPLVNCLRLLVNGLSLASDEGLIKSVTREGDPLGXISYLFCRRXGSMKFPYSEHKCLAGSVSMLVFGFLVSIGMLYYYSVLGHVQLDWASTLPRVAFISFVATLVESLPITKVVDDNISVPLATMAVAFFTFHH

SEQ ID NO: 255092 - protein, 100 aa, Glycine max
  Clone ID: PAT_MRT3847_72370C.1.pep
KLVIGTHSVKTRSESEGKDWDQVFAFDKEGLNSTSLEISVWSEEVKEGDEKSESSLGTVSFDLQEVPKRVPPDSPLAPQWYTLESETSPANDIMLARWIG

SEQ ID NO: 255093 - protein, 149 aa, Glycine max
  unsure (1)..(149): unsure at all Xaa locations
  Clone ID: PAT_MRT3847_72371C.1.pep
GVGSIGRLGYASLIPYVEPVVQAQSAEVYYDFLPEEGDSQEGVAHIGELKSGVYVPLPTKTKLLETPKEWQLDLPCXKIPSVLTTTVDRLVGTEHGGXYDSLVGGIQTYATRMVPLDEERLSMVAQHIGDERFDCVDEEDCFEVVSLSA

SEQ ID NO: 255094 - protein, 260 aa, Glycine max
  Clone ID: PAT_MRT3847_72372C.1.pep
MHPINTGDDSTLSSPIPQYGQISNSCLIETQDPSLQPLNQGGNGRKRHYRGVRQRPWGKWAAEIRDPKKAARVWLGTFDTAEAAAAAYDAAALKFKGSKAKLNFPEHVLLPPPPISSSSPPCNNNNNHHSYYYGSSALAPLAPPPQHVYDQTPPPQQQPLLSSSAQEEGFPNLMQYAQLLWSRDDDDLQRIASGLHQHHHHNEAFYDSSSSTLFSSTSTTYSMTVSDQQQNIGDDTSTPMGAEYNYGGCFFRGSDFHDKN

SEQ ID NO: 255095 - protein, 76 aa, Glycine max
  Clone ID: PAT_MRT3847_72373C.1.pep
MGSRSRTVNVNTKDTDKVLNGMPSYAPPLPSSSNSMAMEATNAHPSRISEFGTLEQSLGFRVEDTINLSRSMLLMF

SEQ ID NO: 255096 - protein, 282 aa, Glycine max
  unsure (1)..(282): unsure at all Xaa locations
  Clone ID: PAT_MRT3847_72374C.1.pep
NREAARKSRLRKKAYVQQLESSRLKLTQLEQELQRSRQQGIFISSTGDQAQSMSGNGAMAFDVEYARWLEEHNRQTNELRAAINSHAGDIELRTIVDNFMTQFDDIFRLKGIAAKADVFHILSGMWKTPAERCFMWIGGFRSSELLPREKFLLSIQLEPLAEQQLMGIYNLQQSSQQTEDALSQGMDALQQSLSETLANGSPSSSGXSGNVANYMGQMAMAMGKLGTLEGFLHQADNLRQQTLQQMLRILTTRQSARALLAISDYFSRLRALSSLWLARPRE

SEQ ID NO: 255097 - protein, 259 aa, Glycine max
  unsure (1)..(259): unsure at all Xaa locations
  Clone ID: PAT_MRT3847_72375C.1.pep
YNLAYVQQLESSRLKLXRQQGIFISSTGDQAQSMSGNGAMAFDVEYARWLEEHNRQTNELRTAINSHAGDIELRTIVDNFMTQFDDILRLKGIAAKADVFHILSGMWKTPAERCFMWIGGFRSSELLKLLESQLEPLTEQQLMGIYNLQQSSQQAEDALSQGMDALQQSLSETLANGSPSTSGSSGNVASYMGQMAMAMGKLGTLDGFLRQADNLRQQTLQQMLRILTTRQSARALLAISDYFSRLRALSSLWLARPRE

SEQ ID NO: 255098 - protein, 450 aa, Glycine max
  unsure (1)..(450): unsure at all Xaa locations
  Clone ID: PAT_MRT3847_72376C.1.pep
MQERMNGIGFSPAGYSPVIPSSSCFPKKLRVQPQRALSSDPYVLELAETLEDSFPSSPSTPLPLQNLRLSSSQSLLSTPWPSRRDEPFRFTDLSFIRQSRILPVSPTISLLTPTSHLPNDVYVGSLSSSSPSLLQRVSHFICPFPIGDLFFSINGIAAPDLTLVYVPEGCHVDIPIHLDYLLPRTXPSQGQPVFDGNIKVNRYAQQTDAGQLTRTLLLEPRATVNVKPNLQIVADDVKCSHGAAISDLEESQLLYFQARGIDIETARRVLVFAFGSEVIDXSFLILPLETECVVRLRICWIHHRIDHHFRGVLNLPDTMXTEITMKIVSPKTHSQGQAVFDGNIKVNRYAQQTDAGQLTRTLLLEPRATVNVKPNLQIVADDVKCSHGAAIGDLGESQLLYFQARGIDIETARRVLVFAFGSEVIDKFPYSSIRDRVRSQIKNLLDPSSN

SEQ ID NO: 255099 - protein, 270 aa, Glycine max
  unsure (1)..(270): unsure at all Xaa locations
  Clone ID: PAT_MRT3847_72377C.1.pep
IFLNFFFKSLFLFIQAYVQQLESSRLKLXRQQGIFISSTGDQAQSMNGNGAMAFDVEYARWLEEHNRQTNELRTAINSHAGDIELRTIVDNFMTQFNDIFRLKAIAAKADACQILSGMWKTPAERCFMWIGGFRPSELFKLLLSQLEPLVEQQMDIYSFQQSCQQAEEALSQGMDALQQSVSETLANGSPSSSGSPGNVANNMGQITMAMGKLGTLEGFLLQADNLRQRTLEVMLQILTTRQSARALLAISDYFSRLRELGSLWPSRPRE

SEQ ID NO: 255100 - protein, 315 aa, Glycine max
  Clone ID: PAT_MRT3847_72378C.1.pep
SPSASPTSPSSANGIAAPDLTLVYVPEGCHVDIPIHLDYMLPPTPSTDDSDAAMHLSNPRVLVVVEKGAHVNIIEDFPASPENQNDSYWSNAAFEAVIGQGAKLTHSYIQTQSFRAAHIKWTSIRQEASSTYELTEVSTGGKLGRHNLHIQQLGPDTVTELSTLHLSVADQTQDLHSTLVLDHPRGYSRQLHKCIVTHSQGQAVFDGNIKVNRYAQQTDAGQLTRTLLLEPRATVNVKPNLQIVADDVKCSHGAAISDLEESQLLYFQARGIDIETARRVLVFAFGSEVIDKFPYSSIRDRVRSQIKNLLDPSSN

SEQ ID NO: 255101 - protein, 460 aa, Glycine max
  unsure (1)..(460): unsure at all Xaa locations
  Clone ID: PAT_MRT3847_72379C.1.pep
MGSRSRTVNVXTTKDTDKVLNGMPSYAPPLPSSNSIAMEATNAHPSRISEFGTLEQSLGFRVEDTINLSRNPMFNQMKSNSQALGADIQFGALNKSIATSDINLSAAIAASQALVFQKDSQPTLASTSAGRENWGETNLADASPRTDTSTDDTEDKNQRPERGESSGSKDKSDQKTLRRLAQNREAARKSRLRKKAYVQQLESSRLKLTQLEQELQRARQQGIFISSTGDQAQSMSGNGAMAFDVEYARWLEEHNRQTNELRAAINSHAGDIELRTIVDNFMTQFDDIFRLKGIAAKADVFHILSGMWKTPAERCFMWIGGFRSSELLKLLESQLEPLTEQQLMGIYNLQQSSQQAEDALSQGMDALQQSLSETLANGSPSTSGSSGNVANYMGQMAMAMGKLGTLDGFLHQADNLRQQTLQQMLRILTTRQSARALLAISDYFSRLRALSSLWLARPRE

SEQ ID NO: 255102 - protein, 39 aa, Glycine max
  Clone ID: PAT_MRT3847_7237C.1.pep
YLNEEISYTLKDSYLLHFIGLLKELGNTQLISQKYITYR

SEQ ID NO: 255103 - protein, 41 aa, Glycine max
  Clone ID: PAT_MRT3847_72380C.1.pep
EKNIFIYFLYIGMEGDSIFSKNSTLDVHYLTDYLLNYKSFY

SEQ ID NO: 255104 - protein, 147 aa, Glycine max
  unsure (1)..(147): unsure at all Xaa locations
  Clone ID: PAT_MRT3847_72381C.1.pep
EKPKKIDARLRQRIDPQYSEGQAEMETPLFKLSLDDVETPKGSWPDLKISQSKIALCKNTGGGTILRSDLLANFXTEGNFRAQRXIRRATHCIKGMIKMVATVGIPESFRYSIALAMNRCHRGRASSDIYTICSQDXELWNPDCTKQ

SEQ ID NO: 255105 - protein, 45 aa, Glycine max
  Clone ID: PAT_MRT3847_72382C.1.pep
MPFALTMAQRVEHCMKLKSYTIVRGVSPVECCNFNVNFKRIFYYD

SEQ ID NO: 255106 - protein, 128 aa, Glycine max
  Clone ID: PAT_MRT3847_72383C.1.pep
MGLCFSSTKVSGSSSNNNNNNNASSNRNRKCSAAPAAAAPPEPVTPQKKQPSQAQRRRVPEESRKNPRAKDKAGARRQGTRVPCGKRTDFGYEKDFENRFSLGKLLGHGQFGYTYVGIDKKNGDRVAG

SEQ ID NO: 255107 - protein, 46 aa, Glycine max
  Clone ID: PAT_MRT3847_72384C.1.pep
SIPITMKFQRLPGLVGHGYGLVVTSVCAVRPRTCNASSDLLLPGRV

SEQ ID NO: 255108 - protein, 48 aa, Glycine max
  Clone ID: PAT_MRT3847_72385C.1.pep
SLSSITVHLLNIYNTKPIHYLKLKILSHYLHSKELPITIIQPYHLCFI

SEQ ID NO: 255109 - protein, 64 aa, Glycine max
  unsure (1)..(64): unsure at all Xaa locations
  Clone ID: PAT_MRT3847_72386C.1.pep
MASSQXEVSHLGTTATTIMCTVHTALRLLGGQLTYIAARFMPLMALLHTSNLFHATIPMLIHNM

SEQ ID NO: 255110 - protein, 55 aa, Glycine max
  Clone ID: PAT_MRT3847_72387C.1.pep
KYFYLFTLIGKEVLGMDKNYVNAWGEVSYSINNIIKPFETVFCCDNLNFCGQVKF

SEQ ID NO: 255111 - protein, 59 aa, Glycine max
  Clone ID: PAT_MRT3847_72388C.1.pep
ILKNLNLSFWGFGHHKPFCWGIIVKREKWKKMMKMKNISSSNNNNKTNGLSSIMNGRSS

SEQ ID NO: 255112 - protein, 128 aa, Glycine max
  Clone ID: PAT_MRT3847_72389C.1.pep
FPGKQLEDGRTLSGFNIQKESTLPLVVGLRGGKQIFVKTFSGKTITLEVERFGPLGNVKAQIQGKEGIPPGQQRVIFSGQQLEDGRALPDFNIQKGLTLSLVLRFRGGFLARCVMLDVFPKHLKNFDV

SEQ ID NO: 255113 - protein, 152 aa, Glycine max
  Clone ID: PAT_MRT3847_7238C.1.pep
SLPLQRLDLSRNRFEGNIPSQIGNLSELRHLYLSWNTLEGNIPSQIGNLSKLQHLDLSYNYFEGSIPSQLGNLSNLQKLYLGGSVPSRLGNLSNLLKLYLGGGSVPSRLGNLSNLLKLYLGGGSVPSRLGNLPNLLKLYLGGRSYYGGCSQN

SEQ ID NO: 255114 - protein, 90 aa, Glycine max
  Clone ID: PAT_MRT3847_72390C.1.pep
SGRPLESFFFFFFFFFFFFFFFFFFFFPGGGNGSLFQKGGPRPISPRINIRGSLPKNGGKPREIPVPKTDPIGRGPKPTPFSPFFPGPLS

SEQ ID NO: 255115 - protein, 48 aa, Glycine max
  Clone ID: PAT_MRT3847_72391C.1.pep
TQAHTNMITLFIEADVVNMLTDHIINSCLLWTQIPTSAYDVEICRLSL

SEQ ID NO: 255116 - protein, 45 aa, Glycine max
  Clone ID: PAT_MRT3847_72392C.1.pep
CDRIPSQWQNIRGHHMFQGGRVVLKICHPPTQIRVCNKFPNALLT

SEQ ID NO: 255117 - protein, 328 aa, Glycine max
  Clone ID: PAT_MRT3847_72393C.1.pep
MGSLGAILKHPDDFYPLLKLKMAARNAEKQIPPEPHWAFCYTMLHKVSRSFALVIQQLGIELRNAVCIFYLVLRALDTVEDDTSIETDVKVPILIAFHRHIYDRDWHFSCGTKEYKVLMDQFHHVSTAFLELGKNYQEAIEDITKRMGAGMAKFICKEVETIDDYDEYCHYVAGLVGLGLSKLFHASGSEDLAPDDLSNSMGLFLQKTNIIRDYLEDINEIPKSRMFWPRQIWSKYVNKLEDLKYEENSVKAVQCLNDMVTNALMHAEDCLTYMAALRDPPIFRFCAIPQIMAIGTLALCYNNIEVFRGVVKMRRGKSKYFDTNFLVI

SEQ ID NO: 255118 - protein, 142 aa, Glycine max
  Clone ID: PAT_MRT3847_72394C.1.pep
FFGGGVGGGAGGGFGKGGGIGKGGGGGFGGGVGGGIGKGGGLGGGGGFGKGGGVGGGIGKGGGIGGGIGKGGGFGGGVGGGSGGGIGGGIGKGGGIGGGIGKGGGFGGGVGGGSSGGIVGGIEKRSGIEGGIGKGGGFCWGV

SEQ ID NO: 255119 - protein, 108 aa, Glycine max
  Clone ID: PAT_MRT3847_72395C.1.pep
SSISSICVSTALALPTACLTHLIAALLIRWLAPTHAAPPGTPTTSAACSTRSPSSFSILRSFNSITRTYTAVLYTSKPRAPEVVTAPRKTRPPCAAPHSVGTLLTFKC

SEQ ID NO: 255120 - protein, 79 aa, Glycine max
  Clone ID: PAT_MRT3847_72396C.1.pep
RRFKGGKGPGSDHFEAIGWLWCERLVLRLWPFKHSGIQIILLLRFATMDFVLVGLLTLISISNRKIIFNNSSSSYQNSI

SEQ ID NO: 255121 - protein, 58 aa, Glycine max
  Clone ID: PAT_MRT3847_72397C.1.pep
LPRRISAIAPCPTKGASRYSDYIILPCFILFVCDRGHLSTFYFYLCQISFRHPPALLL

SEQ ID NO: 255122 - protein, 166 aa, Glycine max
  Clone ID: PAT_MRT3847_72398C.1.pep
SLRPAQQTSGGLRFDAGGIPPLAYSGRVQLKALLDRPESVVGRHVIVGGWVKSAKEVKKKAAAPPSFATATEETTDAGEGGKGKDVSCVEILQSRIPLLRSLLDVFGGGGYVQRKKRENVIVPNHKVLPPKASTAYLLLTDGSCVPSLQVVVDSSVATPSRLLPTG

SEQ ID NO: 255123 - protein, 485 aa, Glycine max
  Clone ID: PAT_MRT3847_72399C.1.pep
MKNLCQNFDVRATIPVKIGKKSTWDVLFPRRLWLPTWTCDQRKEGKLNLKVQCGTRKEGWVESAGKSAFGFGVSAAVLFSAFCYSPAALAESLTVAFPVSRAPEIRAQTMVEMFPLNSADAAYTKLRGMLSTLGDPFTRIISPKEYQGFKIGSDGNVQGVGLFINVEPRTGHLVVLSCVDGSPAARAGIHQGDELIEINGERLDGIDSETAAQRLRGNAGTTVTVKVKDSGTRSFIREVKLPREYIKLSPISSAIIPHRSPDGHFTKTGYVKLSAFSQTAAEDMRNAIQELENQGVHSYILDLRNNMKIFFYFSRGGLVKAGLDVAQMWLDGNETLVNTIDRDGNMLPINMVDGHAITHDPLVVIVNEGSASASEILAGALHDNGRAILVGHKTFGKGKIQSVTQLHDGSALFVTVAKYLSPALHDIDQVGITPDVQCTTEMLNSTKDISNSTKDKASVSSLEADSCIMVAEHELDLEESMGTAS

SEQ ID NO: 255124 - protein, 87 aa, Glycine max
  unsure (1)..(87): unsure at all Xaa locations
  Clone ID: PAT_MRT3847_7239C.1.pep
YELDDQQMGVVMNGFMVWCIDNGTSPDANGVWVMMDGEEHIEYSLKPIGXNAELTLRPIMHHYSDAAETYIEMINSESPNMPRYGLL

SEQ ID NO: 255125 - protein, 393 aa, Glycine max
  Clone ID: PAT_MRT3847_723C.1.pep
MPSTENQGFSLSFSSFGRSIFGVGQEQVHSVEASNESDSCNLELGSFQKRVTDRFQDLSVASDEQFLSIDWIQKLLGAFICCQEEFRAILLNNKEQVTKPPLDRMISEFFERSVKALDICNASRDGIEKIRTWQKHLEIVFCALGSSKRALTEGHFRRARKALMDLALAMLDEKESGSVFSQRNRSFGRHNSGKDHHSSSGHSRSHSWSVSRSWSAAKQLQSIANNLVPPLHSEFAGLSGGLVTPVYTINCILLIVLWTLVAAIPCQDRGLSIHFSVPRQLSWSTPVTALHERITEESKKRERRNSNGLLKEIYQVEVSSRRLTDLIDSAQFPLADDQKTEVERNVMELMRVCEAFRNGSDPLERQVREVFQKIMACRTEGLDYLGTPSHTEQ

SEQ ID NO: 255126 - protein, 61 aa, Glycine max
  Clone ID: PAT_MRT3847_72400C.1.pep
AQENPNIVQLIFIFSFSRAYYLLKTKSLLLYLLLFKGGKKRKEKKTKRCLLFGKEINQIIK

SEQ ID NO: 255127 - protein, 32 aa, Glycine max
  Clone ID: PAT_MRT3847_72401C.1.pep
RKLVDCDFLRSHPRDIRQVLASSMEKTLGSII

SEQ ID NO: 255128 - protein, 166 aa, Glycine max
  Clone ID: PAT_MRT3847_72402C.1.pep
LELEPNSARDYLLQRTALDALRVIEVELNFIYQAFYTKASVITNKVGFFFRLGSFASLVAALVVFVYDQKRGSNPFDVKVTYTLLYGAVALDLVSAFMLIFSDHSFALIYPHISKKISDSDGGKETSKLASILSCFLKLKRPKWREQKLKEPKWLHNKSYKILRRF

SEQ ID NO: 255129 - protein, 78 aa, Glycine max
  Clone ID: PAT_MRT3847_72403C.1.pep
YDSDAIFFFLMCICYICSVSLSFFIEGHFIPWFDLFSTFHLILQVVMISSLAMVMSFVINELMYIDILSSNLKPLEHS

SEQ ID NO: 255130 - protein, 77 aa, Glycine max
  Clone ID: PAT_MRT3847_72404C.1.pep
VQVSPTGKDDEVSKPELLSSPWWLHKTVGRRCTVRVSRSAAYKSWVSTVAEAMVQRIVMFIRASHQRSFISYDNVIS

SEQ ID NO: 255131 - protein, 100 aa, Glycine max
  Clone ID: PAT_MRT3847_72405C.1.pep
AALFLIHDLFFFFFYFSSLGSRVFLILFNITILLKKQKTKTKKRPREPAQQGTPERTNDDRKIKKTQKKKKKKRETKKKANKKRTGTDQNGQGKSPSGRE

SEQ ID NO: 255132 - protein, 127 aa, Glycine max
  unsure (1)..(127): unsure at all Xaa locations
  Clone ID: PAT_MRT3847_72406C.1.pep
LPENYPPTVPREIDLVSYKAGYPRVHPKTELRWGLDAVWHGLSRAEGSLRXVLVELMXSSDNRWLDAGIKYVPFDTISDYDHILAVPATLSDLHHQGSRWTGGMTGDVPTSYMCTGEATAADMDVTF

SEQ ID NO: 255133 - protein, 67 aa, Glycine max
  Clone ID: PAT_MRT3847_72407C.1.pep
PELPGRPTRPIISPPTRPTPVRRLLLGSHHCSTCPVDRDFACALESRTCSCIYPNNVVWSSVELEWA

SEQ ID NO: 255134 - protein, 97 aa, Glycine max
  unsure (1)..(97): unsure at all Xaa locations
  Clone ID: PAT_MRT3847_72408C.1.pep
GSIPRGHWLXSGSHHCGIYLXWHVHKNSKTPPPLKGHSNPVFDLLWTTHGTQIVSVRPSKAVRAWDVQTGKPLKKMVDLSPSAPPVVLRRETGTAWV

SEQ ID NO: 255135 - protein, 74 aa, Glycine max
  unsure (1)..(74): unsure at all Xaa locations
  Clone ID: PAT_MRT3847_72409C.1.pep
QTSHDKNRRPLYKPSKEGRRPPATRFRKKXNQRLGPTRQQHYQYHGVPPPRIARRHYKMGMSVWWRPYWSMTNR

SEQ ID NO: 255136 - protein, 185 aa, Glycine max
  Clone ID: PAT_MRT3847_7240C.1.pep
LVLDDDGNLRIYSFYPEQKNQWVEVWKGIWEMCRIKGKCGPNAICVPKEDLSTSTYCVCPSGFTPAIQNDPEKGCRRKIPLSQNTQFLRLDYVNCSSDGHLNEIKADNFAMCEANCSREKTCLGFGFKYDGSGYCMLVNGTNLQYGFWSPGTEAALFVKVDKSESSVSNFIGMTEVMQTTCPVNI

SEQ ID NO: 255137 - protein, 46 aa, Glycine max
  Clone ID: PAT_MRT3847_72410C.1.pep
AFFKTRLGLHKSLAWSTSLFKSLLKDVFDQLIILKPSEILTKKKNL

SEQ ID NO: 255138 - protein, 80 aa, Glycine max
  unsure (1)..(80): unsure at all Xaa locations
  Clone ID: PAT_MRT3847_72411C.1.pep
DQARGLTSILTPLMYDKFDLAYHATIGVDCVXKLSITNTHTVRLQMXDTDSQGRLXSVIPSYIRDSPLPVIDMKTRPPTF

SEQ ID NO: 255139 - protein, 73 aa, Glycine max
  Clone ID: PAT_MRT3847_72412C.1.pep
KPLLSLAPFKRNLFFPKKRGGKSPPPKVFIEATLFNFPFPPDYPFKPPRGAFRTKGFPPNINSRGGICFDFLW

SEQ ID NO: 255140 - protein, 127 aa, Glycine max
  unsure (1)..(127): unsure at all Xaa locations
  Clone ID: PAT_MRT3847_72413C.1.pep
KNKEAXXGKXEXXTGGNQXGEAQAHKGGKGKXESPFFPQENTFSGERKIFFFYRXXXXXXRGGGGXPQPPPXEXXKXXXXXAXXHPPEKKRKTEXSRRRKAENXRPGAPPQEGPXKPQGXGDPPPPG

SEQ ID NO: 255141 - protein, 88 aa, Glycine max
  Clone ID: PAT_MRT3847_72414C.1.pep
KAPLCNNNVNKALNQYVVDIHNPNSKEVGRPALDLQPFLLVLIIKPRVVVVVVVFDHKHVVVVVQEVQELQNHNNNYDDYYYYCKVVM

SEQ ID NO: 255142 - protein, 54 aa, Glycine max
  Clone ID: PAT_MRT3847_72415C.1.pep
PSRSLDRRPDSGPWCVAITMQSGALHTNKQVAVHQHIYASALVANTDHGDYVGH

SEQ ID NO: 255143 - protein, 101 aa, Glycine max
  Clone ID: PAT_MRT3847_72416C.1.pep
QESVSVPPPDALLLLRCTSAPANSWVREIHKDTGDKKGHSLQSLMEKVNVVVMRYASDFSASSSEVGGTSVLLFRMSKLEIMRMRSSSLIFSYEFSFTIHT

SEQ ID NO: 255144 - protein, 115 aa, Glycine max
  Clone ID: PAT_MRT3847_72417C.1.pep
ENQTRSVLFFFISEKERKDGNDTENSSFDALFRLRQFGFRGSAHAPLRRRLAPHGHHGWVRKSLTLLLCLCYWLCPHSSYCHYFQIEWVFKLHFSSFPFCCFVKLMLSVCKDNGF

SEQ ID NO: 255145 - protein, 204 aa, Glycine max
  Clone ID: PAT_MRT3847_72418C.1.pep
MGAYKYIQELWRKEACAGTRARQRARGWQYRQLSALHRAPRPTRPDKARRLGYKAKQGYVIYRIRVRRGGRKRPVPKGATYGKPVHHGVNQLKFARSLQSVAEERAGRHCGALRVLNSYWVGEDSTYKFFEVILIDPFHKAIRRNPDTQWITKPVPKHREMRGLTSAGRKNRGLGKGPKFPPPIGGSRRAAWRRRNTFQLPRYR

SEQ ID NO: 255146 - protein, 56 aa, Glycine max
  Clone ID: PAT_MRT3847_72419C.1.pep
MGMTPKIAPSMLSSDFANLASEAQRMLHFGADWLHMDIMVFFLFFFYCMLTILFLC

SEQ ID NO: 255147 - protein, 60 aa, Glycine max
  Clone ID: PAT_MRT3847_7241C.1.pep
GDFLGPEFKAKINRGVDIGHLDPTGGSPPPGAFLAPGWGPGRIKVGHGIFEKNLTGAIAD

SEQ ID NO: 255148 - protein, 115 aa, Glycine max
  unsure (1)..(115): unsure at all Xaa locations
  Clone ID: PAT_MRT3847_72420C.1.pep
IAHVSGDTSLCFLFLSHSVFPSFFLXTLSFFGIHFNMSQWNDDLRLVNCCTDVKFEREVRHLFPHIHCWHFRDNVYGGSNFSRGEFSLFSHTLEFVPVNLLSPLLSSSRSELEPN

SEQ ID NO: 255149 - protein, 57 aa, Glycine max
  unsure (1)..(57): unsure at all Xaa locations
  Clone ID: PAT_MRT3847_72421C.1.pep
IHVSIRLSCDQFPVSVTTMMWSQLSNNSTHFMCVLLFIXVYCSMKLNPESNGRFAIL

SEQ ID NO: 255150 - protein, 131 aa, Glycine max
  Clone ID: PAT_MRT3847_72422C.1.pep
LGRKPPKPGPLGEGVVQSLFSHNQKARKGFPLETSIAPKQKYLKALAKKGGGEFGQNFHPLGALKPFSPGFLVGILTFHFFSRRGYPGGPFFCWAQKPPPLPRVCPPPFSLAKGPLETGGTSLLKTVCPVS

SEQ ID NO: 255151 - protein, 85 aa, Glycine max
  Clone ID: PAT_MRT3847_72423C.1.pep
STLTQRTRQYPRPAKILKSGTANGLNQRTWQWIEGKCCISSQRTWQWIESKPMKQVKMPTVILLAPTLFSLSMSPPFHLAIRLGQ

SEQ ID NO: 255152 - protein, 674 aa, Glycine max
  unsure (1)..(674): unsure at all Xaa locations
  Clone ID: PAT_MRT3847_72424C.1.pep
MLPGMVDGHGSQLLQRRQLYAGPMSKLRMLMICRMAKPEEVLIVEDENGNIVRETLKDNDVLVQYKIMRETLIYLSHLDHDDTEKQMLRKLSKQLSGEDWTWNNLNTLCWAIGSISGSMMEEQENRFLVMVIRDLLNLCEITKGKDNKAVIASNIMYVVGQYPRFLRAHWKFLKTVVNKLFEFMHETHPGVQDMACDTFLKIVQKCKRKFVITQVGENEPFVSELLTGLPITIADLEPHQIHSFYESVGHMIQAESDAQKRDEYLQRLMELPNQKWMEIIGKAHQNADFLKDQDVIRNVLNILQTNTSVASSLGTYFLPQITLIFLDMLNVYRMYSELISKSITEGGPFASRTSYVKLLRSVKRETLKLIETFLDKAEDQPQIGKQFVPPMMDPVLGDYSRNVPDARESEVLSLFATIVNKYKAAMIEDVPRIFEAVFQFLRLKIEGKHKNVRVSKLLKVCFPXLICLSSQQLKLVMDSIIWAFRHTSRNIAETGLNLLLEMLKKFQGSEFCNQFYRTYFLTIEQEIFAVLTDTFHKPGFKLHVLVLQHLFCLLETGALTEPLWDVATSQYSYSSNAVFVREFTIKLLSTSFPNMTSAEVTQFVNGLFESTNDLSTFKNHIRDFLIQSKEFSAQDNKDLYAEEAAAQRERERQRMLSIPGLIAPSELQDEMVDS

SEQ ID NO: 255153 - protein, 89 aa, Glycine max
  Clone ID: PAT_MRT3847_72425C.1.pep
WSPSGVVFAGGASGLAIWAVPPLGVLAGGALLVSGTCVLAPYALQIDVLRSPLVHVSFSECSFVLGVLCVSVFPLFPCVGVPFGVFKAA

SEQ ID NO: 255154 - protein, 392 aa, Glycine max
  Clone ID: PAT_MRT3847_72426C.1.pep
MAAAAAATTLSSSLSKPSSLTFQTHSFPITLPTPPRAAAKPPLLVFSKNPISDIVSSTFSRAEEGAWDDEKPREECGVVGIYGDPEASRLCYLALHALQHRGQEGAGIVTVNNNVLQSITGVGLVSEVFNQSKLDQLPGSLSIGHVRYSTAGQSMLKNVQPFVAGYRFGSVGVAHNGNLVNYKTLRTNLEDNGSIFNTTSDTEVVLHLIATSKHRPFILRIVDACEKLEGAYSSRFVTEDKLVAVRDPFGFRPLVMGRRSNGSVVFASETCALDLIEATYEREVYPGEVLVVDKNGIQSLCLMSHPQPKQCIFEHIYFALPNSVVFGRSVYESRRQFGEILATESPVDCDVVIAVPDSGVVAALGYAAKAGVPFQQGLIRSHYVGRTFIEPS

SEQ ID NO: 255155 - protein, 90 aa, Glycine max
  Clone ID: PAT_MRT3847_72427C.1.pep
NSSSVRVRRLVTLYTSTKRCDLVDIQEASLFNIRVYDSFKYGNGRMCQDHSSIDHRYCCTTPTMILAPLFLWQNFYLQNKTNYKSRGMRC

SEQ ID NO: 255156 - protein, 83 aa, Glycine max
  unsure (1)..(83): unsure at all Xaa locations
  Clone ID: PAT_MRT3847_72428C.1.pep
QNSTLLNFGLVLGALQSXVVESRDLPQKFYYCFWWGLRNLSSLGQSLATSTCVWTICYAICISIAGFVLFAFLIGNIQTYLYS

SEQ ID NO: 255157 - protein, 143 aa, Glycine max
  unsure (1)..(143): unsure at all Xaa locations
  Clone ID: PAT_MRT3847_72429C.1.pep
IYIQGYYQASARELIRINGTTKAPVMNFAAETSLGVVTVRAFNTVNRFFNNYLKLVDMDATLFFHSIVTMEWSILRFEVLQXNLTVFTAALLLILLPKGYVPSGLVGLSLAYALTLKEAQVFWSRMCNMSSNHIISVERIMQF

SEQ ID NO: 255158 - protein, 155 aa, Glycine max
  Clone ID: PAT_MRT3847_7242C.1.pep
RVRLREDDRRATGATPFSLVYGMEAVLPVEVEIPSMRVLMEAQLSEAEWCQSRYDQLNLIEEKRMKALCHGQLYQQRMKQAFDKKVRPRAFQEGDLVLKKVLSFQPDSRGKWTPNYEGPYVVKRTFSGGALTLTTMDGDELPRPVNADAVKRYFV

SEQ ID NO: 255159 - protein, 61 aa, Glycine max
  unsure (1)..(61): unsure at all Xaa locations
  Clone ID: PAT_MRT3847_72430C.1.pep
PTKADVGASCSVEXNIAIMDTRLGKSAAASFNAHYADVTGTSGNKVANCKFDPGNYQRTNS

SEQ ID NO: 255160 - protein, 95 aa, Glycine max
  Clone ID: PAT_MRT3847_72431C.1.pep
MVDLQTVCCMCGDVGFPDKLFRCNKCRHRFQHSYCSNYYGELSEIELCDWCQSEGRNYSRSHSSNSKKLAVAGNDAGTTTRSEYSREKIKHHDRD

SEQ ID NO: 255161 - protein, 52 aa, Glycine max
  Clone ID: PAT_MRT3847_72432C.1.pep
KYPLQERAHLDGQPGTALNNIVSFTQSSGPIESYLVRGDTPLGTTQEERRTF

SEQ ID NO: 255162 - protein, 76 aa, Glycine max
  Clone ID: PAT_MRT3847_72433C.1.pep
LKARQDTDLCHRLSYNNQLSQSTNYYSNRHFFKEALPYYWSIDNHNYHLTYWLLSFGLFGFEPTQALINLLAAYRC

SEQ ID NO: 255163 - protein, 254 aa, Glycine max
  Clone ID: PAT_MRT3847_72434C.1.pep
TTYMGHSKAARDICFSNDGTKFLSAGYDKNIKYCDTETGHVISTFATGKIPYVVKLNPDDDKQNVLLAGMSDKKIVQWDMNTGQITQEYDQHLGAVNTITFVDNNRRFVTSSDDKSLRVWEFGIPVVIKYISEPHMHSMPSISLHPNANWLAAQSLDNQILIYSTREKFQLNKRKRFGGHIVAGYACQVNFSPDGRFVMSGDGEGKCWFWDWKTCKVYRTLKCHEGVCIGCEWHPLEQSKVATCGWDGMIKYWD

SEQ ID NO: 255164 - protein, 223 aa, Glycine max
  Clone ID: PAT_MRT3847_72435C.1.pep
MYVVKRDGRQETVHFDKITARLKKLSYGLSTEHCDPVLVSQKVCAGVYKGVTTSQLDELAAETAAAMTANHPDYASLAARIAVSNLHKNTKKSFSETIKVMYYHFNERSAMKAPLIADDVYEIIIKNAARLDSEIIYDRDFDYDYFGFKTLERSYLLKVQGKVVERPQHMLMRVAVGIHKDDIDSAVRTYHMMSQRWFTHASPTLFNAGTPRPQLSSCFLVCM

SEQ ID NO: 255165 - protein, 75 aa, Glycine max
  Clone ID: PAT_MRT3847_72436C.1.pep
RAPMLAKWVMLIAPSGRVVLTPVIGKVGPDGGVVIEVLITLEIHLIVLQFNESLIKRGQGVLPMMEPSRSRISLA

SEQ ID NO: 255166 - protein, 89 aa, Glycine max
  Clone ID: PAT_MRT3847_72437C.1.pep
NSAPASPLKDFLESQNRKQMQKSEMLHHFDNLHRPIMCFSSRVSLADDISGHCSVASTTSSASGLRFLRSKCSRSEFELNETNPCAGRK

SEQ ID NO: 255167 - protein, 82 aa, Glycine max
  unsure (1)..(82): unsure at all Xaa locations
  Clone ID: PAT_MRT3847_72438C.1.pep
SAVRLDLGPGVVIPLQTHAVALELLGVLHGRILVGFISLGNXVYQMVLKKGELMVFPQRLVHFQIAVGKRKALACTVFRITF

SEQ ID NO: 255168 - protein, 70 aa, Glycine max
  Clone ID: PAT_MRT3847_72439C.1.pep
CVLQVRLVLVIRDRLLLMPRIYHFYITRKRLAALVTEVCRIAFVCRNGCRSWRVAPCLTFTVIPTNRELG

SEQ ID NO: 255169 - protein, 105 aa, Glycine max
  Clone ID: PAT_MRT3847_7243C.1.pep
MDAASGAAPAAVAAPQSEGSPAAPSRYKSHKRRDWNTFLQYLRNHKPPLTLARCIGTHVIEFLKYLDQFGKTKVHILGCPYFGHPNPPAPCACPVIQAWGRGDAL

SEQ ID NO: 255170 - protein, 44 aa, Glycine max
  Clone ID: PAT_MRT3847_72440C.1.pep
MRLRDKYGSEGENGDVYVNNFYVMWDIIKNLKVHPRTKMTYDSM

SEQ ID NO: 255171 - protein, 78 aa, Glycine max
  Clone ID: PAT_MRT3847_72441C.1.pep
LGDFAPARGEEACECHTEPFRNSRGVGGAWARPGYLVLSLLSLQCPDSACKQDLLAYLQRIDLYCHQLNICSKVKAEV

SEQ ID NO: 255172 - protein, 207 aa, Glycine max
  Clone ID: PAT_MRT3847_72442C.1.pep
KVFWVPCQEHISCSCHLFEFSGILCRHVLRVMSTNNCFHIPDQYLPARWRGNNSSSVNHYRGTTSRDQPERIQFLESMVSTFLVESIETEERLDVACDQISMVLSRIKTFPRSPHGVNDIAYSYPSDSLILPEVEDTDGMIPGFTITNPHDSITTGKLKERRARDVVDLTRKRRQFSMPLCAQYGHDASDCSIMASDNMSGDALGYL

SEQ ID NO: 255173 - protein, 51 aa, Glycine max
  Clone ID: PAT_MRT3847_72443C.1.pep
IEATHYIRRYIIIHSQTIVYNNNFYIRQNMILIPGLNFLFKFALQVLKNNI

SEQ ID NO: 255174 - protein, 72 aa, Glycine max
  Clone ID: PAT_MRT3847_72444C.1.pep
PTRPRTRGLKIVNPEENGDTEMAAPDNVLYCGPLKSLQKSNSTFSAASTLGHSLNLFSLLLGLFAIILFLAR

SEQ ID NO: 255175 - protein, 88 aa, Glycine max
  unsure (1)..(88): unsure at all Xaa locations
  Clone ID: PAT_MRT3847_72445C.1.pep
AHPYTVACLVDGCNSDLSNXRDYXHRRHKVCELHSXTPEVTIGGFKQRFCQQCSRFHSLEQFDERKRSCRKRLDGHNRRRRXPQPEPL

SEQ ID NO: 255176 - protein, 62 aa, Glycine max
  unsure (1)..(62): unsure at all Xaa locations
  Clone ID: PAT_MRT3847_72446C.1.pep
AKASFCEQVGISAQSSFEGEKQGIXILLIPLPLFYATCSREFFFFLGRSIARIFGAHGPGLN

SEQ ID NO: 255177 - protein, 140 aa, Glycine max
  unsure (1)..(140): unsure at all Xaa locations
  Clone ID: PAT_MRT3847_72447C.1.pep
MEGANWRITDEEAGPSSSSGIASTKQQNPPETFHHRKEAEEEEETEEEEEEDVCQHKNITFVPGPLLSLKDQIEKDKEDESLRRWKEKLLGCMESDLDGQIHPEVKFHSIGIISEDFGEVITSLSVDEXQNGHILVTLRE

SEQ ID NO: 255178 - protein, 81 aa, Glycine max
  Clone ID: PAT_MRT3847_72448C.1.pep
GRYGVGDWSFLKCREHMANERDKRKAFQEVCNNFRPVMHYFFLERFLQPAEWFEKRLAYTRSVAASSMVGYIVGLGDRHAM

SEQ ID NO: 255179 - protein, 269 aa, Glycine max
  Clone ID: PAT_MRT3847_72449C.1.pep
HCLSPAGEYNLRLGIIKELHPDMVATYSGSAQVFEGHPFIVEAGVSVGGKNVKQGLNIFRFANRIPLLFEQGADVVTRTAHKRINWSSYKINQMQDKIGVFVSIVSTKIPFKGTGKEYIGDDITEIASAVKYAIQQCCVQLKSKIVKKMHAREQQERKRNLSRYIPDASGAVYNVLKEMTQLHASKKIRYGDDDAELLSKVSENLITKETLCEKLSKHVEQVDYEMALEYATQSGVSEEPRETIYIQSLEAENKMIDLQTPFIVFRVFQ

SEQ ID NO: 255180 - protein, 102 aa, Glycine max
  Clone ID: PAT_MRT3847_7244C.1.pep
LKKPPPLLCFWGRPEPPPRCFLVEVFLSKKKSPQPGVSWFGGYLFSEPGLSLKFFSLMPIISQGPIFFFFLLPKLKIWPLGKKKKKKKKKKKKKKKKKKKKK

SEQ ID NO: 255181 - protein, 232 aa, Glycine max
  Clone ID: PAT_MRT3847_72450C.1.pep
MDFALNPCPLRSSTFVNFVERVKQLGTLAVSAVIGNIFSAILTFCFALVGTLLGALTGALIGQETESGFIRGAAVGAISGAVFSIEVFESSLVLWQSDESGIGCVLYLIDVIASLLSGRLVRERIGPAMFSAVQSQMGAVETSFDEVQNIFDTGGSKGLSGDLVDKIPKIKITTDNNVDASGDRVSCSVCLQDFMLGETVRSLPHCHHMFHLPCIDKWLFRHGSCPLCRRDL

SEQ ID NO: 255182 - protein, 179 aa, Glycine max
  Clone ID: PAT_MRT3847_72451C.1.pep
MIDISTLNAAQITVLGSAFCVMLSMHFTTQLMSQHLFYWKNPKEQKAIIIIILMAPIYAAVSFVGLLDIRGSKEFFTFLESVKECYEALVIAKFLALMYSYLNISISRNIVPDEIKGRELHQPQDTLSLAPRLCHHPLTNTTTSMNLTAPPPHSLVIVLMSLRGVGVPSSLVAPPWTLK

SEQ ID NO: 255183 - protein, 44 aa, Glycine max
  Clone ID: PAT_MRT3847_72452C.1.pep
SAITPHIGFSEFTDPMVKLGPGKHLEPKHNLIIILILTCVMNRC

SEQ ID NO: 255184 - protein, 86 aa, Glycine max
  unsure (1)..(86): unsure at all Xaa locations
  Clone ID: PAT_MRT3847_72453C.1.pep
AVVVRQMLKAAAECHLHGLVHRDMKXQVSFLLKSPIDDSPLKATDFRLSDLIQPGKRFQDIVRSAYYVSPQVLKRESGPESDVWSD

SEQ ID NO: 255185 - protein, 90 aa, Glycine max
  unsure (1)..(90): unsure at all Xaa locations
  Clone ID: PAT_MRT3847_72454C.1.pep
KELHWQTKYKQESIDTVSWYHPHRLSIPRDXSFHKGSIFKCNSQAICNQKSTVIMLIGPQQVEWKTNIILTDVTQEVRLCNIARLIYLLR

SEQ ID NO: 255186 - protein, 91 aa, Glycine max
  Clone ID: PAT_MRT3847_72455C.1.pep
AIRALTERLHSGLGSSARLSLARTAKLLVEQGAVNGTEALLPAGAQDWNPVLEQTSWGPAQRLLSPLKVGAVPLQWAFAATKLGAHPPQWW

SEQ ID NO: 255187 - protein, 73 aa, Glycine max
  unsure (1)..(73): unsure at all Xaa locations
  Clone ID: PAT_MRT3847_72456C.1.pep
SQGNFSFVXLLLLQNLQKESWVSKASRASQMLRRRSVASSSSSSSACGEGPLAVALWMQLLIFNRSSVALANS

SEQ ID NO: 255188 - protein, 169 aa, Glycine max
  Clone ID: PAT_MRT3847_72457C.1.pep
LSNVKDAAHVFDEISDKNTVCANALLSGYGEAGLWVQELELVRKMPVLKLKHDHFTLSAALRACTGLSAVEMGRQVHGYLLRTTPDIESDVFLQSALVEMYGKCGLVKKAWQVFKLVGMEIRKEVRSRDVVLWTSMFGVYGRNGHYKEVLDLYDEMLVEGIRPDGIAFL

SEQ ID NO: 255189 - protein, 574 aa, Glycine max
  unsure (1)..(574): unsure at all Xaa locations
  Clone ID: PAT_MRT3847_72458C.1.pep
IILSVVQATYVLFFLYLCKSYLCTIFPLLLHKPPLFCRYMGTITGISDLDPVRWPNSHWRSVKVGWDESTAGERQPRVSLWEIEPLTTFPMYPSLFPLRLKRPWHPGTSSFHDGRDEATNGLMWLRGGPGDQALNSLNFQGSGLLPWMQQRMDPTLLANDHNQHYQAMFASGLQNLGSGDLMRQQIMNFQQPXNYLQQSGNPNPPLQLQQPQAIQQSVSSNNILQPQAQVMAENLSQHLLQKSHNNREDQTQQQQQQRHTYQDTVLLQSDQLHQRQHSGLPSPSYSKPDFLDSSMKFPASVSPGQNILGSLCPEGSGNLLNLSRSSQSMLTEQLPQQSWAPKFTPLQINAFGNSMQHVQYSGKDTAMVPPHCNPDSQNPILFGVNIDSSGLLLPTTVPRYTTASAEIDASAMPLGESGFQSPLYPCVQDSSELVQSAGQVDPQNQTRTFVKVYKSGSVGRSLDISRFSSYHELREELAQMFGIEGKLEDPLRSGWQLVFVDRENDVLLLGDDXPWESFVNNVWYIKILSPEDIHKMGEQALESLGPSPGQRLNSTGADSHEIVSGLPSIGSLEY

SEQ ID NO: 255190 - protein, 64 aa, Glycine max
  Clone ID: PAT_MRT3847_72459C.1.pep
ESAPVLFSLCPGLGPRDSRACSPILWISSGESILIYHTLLTNDLQKGYAGNPRTKKKQTNVSKT

SEQ ID NO: 255191 - protein, 114 aa, Glycine max
  unsure (1)..(114): unsure at all Xaa locations
  Clone ID: PAT_MRT3847_7245C.1.pep
PPPAPRPPGPPPPPPPRPPPPCPPPPPTLPLPPPGLAPPCPSGPRPXPPPGVSSLPGDLGRNFPRDPKPYFSPKPPPGFPXPAPFAKKNLPPVPPPFFWGPPGESAPVFLGGGF

SEQ ID NO: 255192 - protein, 107 aa, Glycine max
  unsure (1)..(107): unsure at all Xaa locations
  Clone ID: PAT_MRT3847_72460C.1.pep
MPIRNIAVGRPEXATHPDTFNAALSEFISTFIFVFSCSGSFICYYKLTDYCASTPAVLISASIAHAFALFVAVFVGSNISGGHVNPAVTFGAFVLCNITFLLGIVYV

SEQ ID NO: 255193 - protein, 189 aa, Glycine max
  unsure (1)..(189): unsure at all Xaa locations
  Clone ID: PAT_MRT3847_72461C.1.pep
ELXXXKGSEQYKFIENCLASVDRQKQPWLIFLAHRVLGYSSAGFYAAEGSFEEPMGREDLQYLWQKYKVDIAMYGHVHNYERTCPVYQNICTNKEKNNYKGSLDGTIHVVVGGGGASLAEFAPINTTWSIFKDHDFGFVKLTAFDHSNFLFEYKKSSDGQVYDSFRISRQYRDILACTVDSCPPTTLAS

SEQ ID NO: 255194 - protein, 128 aa, Glycine max
  Clone ID: PAT_MRT3847_72462C.1.pep
FSTMFFSHRENTVSGLGRLVLIIWLFVVLIINSSYTASLTSILTVQQLSSQIEGIDSLISGTQPIGIQEGSFARKYLTDELNIQPSRIVTLRNMEAYIDALEKRTKDGRVVAVVDELPYIEILMSSTN

SEQ ID NO: 255195 - protein, 36 aa, Glycine max
  Clone ID: PAT_MRT3847_72463C.1.pep
FEYYLSKEDIKQVYNYIVGNQYVSSSMVMYHTLGLL

SEQ ID NO: 255196 - protein, 134 aa, Glycine max
  unsure (1)..(134): unsure at all Xaa locations
  Clone ID: PAT_MRT3847_72464C.1.pep
WYAVVAVLFISRNATAIAWSSGPINWLVPNEIFPLEIRPKAQSNNVSVHMSLSFLIAQVFLSMMPHNKMDGGLKVASFVLIITVSKDFVVPETKGSPTKXMNQVWEAHPFWTIFCVELPHYGNGVDTGRGYPIQ

SEQ ID NO: 255197 - protein, 78 aa, Glycine max
  Clone ID: PAT_MRT3847_72465C.1.pep
LEKGKPCFPLKGPQPSTVVFRGRGGAKEMGKFKWCLRRIRRLHMRIRVILINPKKRRPKIVRVRKGPKNLGEGRSMGG

SEQ ID NO: 255198 - protein, 72 aa, Glycine max
  Clone ID: PAT_MRT3847_72466C.1.pep
LTNITLKPTPRLPQLLHQLKIHIMMWLNLLGQEQILLFYPLTNNRPVIAHEFFSKTAAYKTQARILTLLMTQ

SEQ ID NO: 255199 - protein, 63 aa, Glycine max
  unsure (1)..(63): unsure at all Xaa locations
  Clone ID: PAT_MRT3847_72467C.1.pep
NLDDFXSRLLFLDLAPDASDNDDTHSNPFLRHSTLFXRKQNKRIXXXPFCCASLHXLGSTTSN

SEQ ID NO: 255200 - protein, 44 aa, Glycine max
  Clone ID: PAT_MRT3847_72468C.1.pep
SASVSDLFLEYVGSLTHIVVLSCLPPLREWFGLLLPIILLLVCG

SEQ ID NO: 255201 - protein, 106 aa, Glycine max
  Clone ID: PAT_MRT3847_72469C.1.pep
MSFKDVLLTADEDAISVGEFLLVDWVQEEDTTETQSQAQISLHALSSHMAPKTLRVLGRVANQQVLTLIDGGSIHNFIQELLATTLGLPTQPTPPLWVLVGNEHEI

SEQ ID NO: 255202 - protein, 52 aa, Glycine max
  Clone ID: PAT_MRT3847_7246C.1.pep
SQIYICRIMMHAHINNNPNMFFHFDFVFCSLKTNIMNISLQIHNILKSQSQK

SEQ ID NO: 255203 - protein, 62 aa, Glycine max
  unsure (1)..(62): unsure at all Xaa locations
  Clone ID: PAT_MRT3847_72470C.1.pep
PKPFSLLKDLKAALNLTLLILVSCNFVPQILPMQLLIDMRPNYQAXYPMLSISQSLITDSTL

SEQ ID NO: 255204 - protein, 42 aa, Glycine max
  Clone ID: PAT_MRT3847_72471C.1.pep
VHIRFKHRHSKILSYGTVDTMGRVKIVSLDCFSLSRLQVGGL

SEQ ID NO: 255205 - protein, 80 aa, Glycine max
  Clone ID: PAT_MRT3847_72472C.1.pep
EVSKNKRRTPAWCDRILWHGGGIQQLSYVRREFKFSDHRPVCATFNVEVEVMFRGQKKKVSTCNFQNIHDLVSTRSPYYS

SEQ ID NO: 255206 - protein, 247 aa, Glycine max
  unsure (1)..(247): unsure at all Xaa locations
  Clone ID: PAT_MRT3847_72473C.1.pep
LANLTPFSDSNQSPRNMYQCQMAKQTMGTPSTSLRHRTDNKLYRLQTGQSPIVRSKLYDTLGFDGFVSGTNAIVAVISYTGYDMEDAMIINKSAHERGFAYGTIYKSEVIDLNDERVRGEPIKHHFSLGEDASPALREKLSSDGLPLIGVKLTDGDPLCAYYDDTTKVTKIKKYKGTEDAYXXEVRLIGDDAGKKEVQKVHIKLRVPRPSVIGEXFASRHGQKGVLSQLYPQVDMPFTESGMQPDII

SEQ ID NO: 255207 - protein, 58 aa, Glycine max
  Clone ID: PAT_MRT3847_72474C.1.pep
VAININFRRFNCFHNRRKVKEPLQSYLVKENIIYNYIQIKQTGLHDIIEFIFDTFSLN

SEQ ID NO: 255208 - protein, 77 aa, Glycine max
  Clone ID: PAT_MRT3847_72475C.1.pep
CGCEAMFCAHVHTVTGQWYVTTLNFDHKHEMLDAKRPLLLPARRKMTTTDIIKIQNFQKVRIRPSHMYGAFANTNGY

SEQ ID NO: 255209 - protein, 41 aa, Glycine max
  Clone ID: PAT_MRT3847_72476C.1.pep
RPESTIIFNHSVLSTMVTHIKKKHYASHPMELYHFFFKTLL

SEQ ID NO: 255210 - protein, 103 aa, Glycine max
  Clone ID: PAT_MRT3847_72477C.1.pep
EKFVLLTKITKTIVIKIKVLVSTVAAILEQGQSHDYKMSLPQITMGNGARNPEVKCANWRLAVKANNIFGFKTIPENCVKATKEYIQGDHYRSDSKTFNQQAY

SEQ ID NO: 255211 - protein, 63 aa, Glycine max
  unsure (1)..(63): unsure at all Xaa locations
  Clone ID: PAT_MRT3847_72478C.1.pep
TGETXNRKAYREDDAQLAQTRRDRVQQADNYKQLKKGAHEASNTRNRGRQESDETAKDTEPSE

SEQ ID NO: 255212 - protein, 53 aa, Glycine max
  Clone ID: PAT_MRT3847_72479C.1.pep
LVYLYPVEIGKLEFNAPEATNQCLLLGKRVYRTFPIHLVAVLISTNLSAKQTL

SEQ ID NO: 255213 - protein, 159 aa, Glycine max
  Clone ID: PAT_MRT3847_7247C.1.pep
MGCVSSKQAVSVTPAIDHSGAFRSNAGGLGEPEKKRSKKRTESGGASLSEVGESGRTSSNCDSLSFRLGNLHKYVQGEHVAAGWPAWLSAVAGEAIHGWVPLRADAFEKLEKIGQGTYSSVFRARELETGKIVALKKVRFDNFEPESVRFMAREILILR

SEQ ID NO: 255214 - protein, 62 aa, Glycine max
  Clone ID: PAT_MRT3847_72480C.1.pep
QQRFVFFITSFPTLANGQSLPGGTVAPDAVSVRTSVSASSTVAYGSESSAFGHSRSYTWMIH

SEQ ID NO: 255215 - protein, 318 aa, Glycine max
  Clone ID: PAT_MRT3847_72481C.1.pep
AKAHASADAWAEVLKSEIKRIELMLAVVTEERNKLRNVANLKNDEALDASKNANPVQEPESSLMKKDDCIKDLESTLHEQRMVNNRQLDEMKLLNEKLLGEAGRVKSVERESDRLRSEISLLEAKLGHGDFSAANTKVLRMVNTLTVDNEAKQTIEALQTKLQKTKEKLKAFEELKSQSGEAGKLVDSYISDKMLQLKEQIATLEKREERYKTVFADRISVFRRACCELFGYKIVMDEHQRSNGIPVTRFTLQSIYAQSDDEKLEFEYESGNTNILANHYTSQPEVSRQVEIFIRKMNSIPAFTANITVESFNRRTLS

SEQ ID NO: 255216 - protein, 412 aa, Glycine max
  Clone ID: PAT_MRT3847_72482C.1.pep
MDRTLVMSSPNVCSNTNGGNLMRRKHSTMANNIYYPTSCVSKASQCHRKTQIECNLLRSQQSILNHHYKCIEGRPTFQECNRKYVVKAAHAIPSFDSESHASSPKNILDPVKKFLVALYWFCNPHSMIGRTLSATSGCLLAVEKLSDISPLFFIGLLQVLVPNFFMDIYVNGVNQLFDLEIDKINKPFLPLVSGNLSITNAVFIVASSAILSFWLSLIIGSWSLIGNVALCFVLWTAYSVNVPLLRWKRSPVLTAMIMFSSWTLIFPITYFLRMRSFVFRTPVGFPTSCFGSRVCVTAARRRQKGSKDIPDIEGDTKFGIRSFATRLGKKKVFWICVSLFEVAFGVVLLAGASSSSPLWIKIITGLGSIIPATILWYQTKYVDLSSPDSTRSFYMLNWKLLNVAFLFLPLIR

SEQ ID NO: 255217 - protein, 143 aa, Glycine max
  Clone ID: PAT_MRT3847_72483C.1.pep
LLNEKLHGEARRVKSLERESDRLRSEISLLEAKFDYLHALGHGDFSAANTKVLRMVNTLTVDNEAKQTIEALQTELQKTKEKLKAVEELKSQSGEAGKLVDSYISDKMLQLKEQIATLEKREERYKTVFADRISVFRRACCEL

SEQ ID NO: 255218 - protein, 260 aa, Glycine max
  unsure (1)..(260): unsure at all Xaa locations
  Clone ID: PAT_MRT3847_72484C.1.pep
PDSKKLFPCPCPPLDDVEGGHGHGKNSYSTIPNICLLGHYLMELSIGTPPFKIYGIADTGSDLTWTSCVPCNNCYKQRNPMFDPQKSTTYRNISCDSKLCHKLDTGVCSPQKRCNYTYAYASAAITRGVLAQETITLSSTKGKSVPLKGIVFGCGHNNTGGFNDHEMGIIGLGGGPVSLISQMGSSFGGKRFSQCLVPFHTDVSVSSKMSFGKGSKVSGKXXVFLHPLVAKQDKTPYFVTLLGISVENTYLHFNRFFTKC

SEQ ID NO: 255219 - protein, 62 aa, Glycine max
  Clone ID: PAT_MRT3847_72485C.1.pep
TNRRETMLWNPTGIIQWQEEKRWLPWPCVPPQLREDSRKHLNHSRECANPDLIIGMTINNIA

SEQ ID NO: 255220 - protein, 34 aa, Glycine max
  Clone ID: PAT_MRT3847_72486C.1.pep
AYAPWDLPAGYTCTYIRYRSSIVVYVSCVLYRSL

SEQ ID NO: 255221 - protein, 89 aa, Glycine max
  unsure (1)..(89): unsure at all Xaa locations
  Clone ID: PAT_MRT3847_72487C.1.pep
ALPPPRTGILLCQYWQLQFNILVIPTDSISHGPSSSYLQVLSRSSDGGAILVPLHCGLSSRPXTQTVSGRGTRCRNKRIRGELGRHDRS

SEQ ID NO: 255222 - protein, 58 aa, Glycine max
  Clone ID: PAT_MRT3847_72488C.1.pep
VGVRPWVTGPVLTSVHRRCLHMKSLKSSRGQQHPATTVKWPAVMAESYEVFSCLESSK

SEQ ID NO: 255223 - protein, 67 aa, Glycine max
  Clone ID: PAT_MRT3847_72489C.1.pep
RLIYINFSLLKIILLYLVSELLLFKNFLLSLIFNFINFSVKYKLSSPIVDNIIETQTVTLNTPDRTR

SEQ ID NO: 255224 - protein, 127 aa, Glycine max
  unsure (1)..(127): unsure at all Xaa locations
  Clone ID: PAT_MRT3847_7248C.1.pep
ASCSQDAKPCSSLIRIRDTVDKESSGDRVLNSTERQNEGHRVLMDFVWNYFSHKDTVQFGQRRVLISDKTPLYFQHDGHSRTIVGIQVKYQQSGIPQYSLLVMDPGHRTAALEXILXEKVGWQKFIK

SEQ ID NO: 255225 - protein, 58 aa, Glycine max
  unsure (1)..(58): unsure at all Xaa locations
  Clone ID: PAT_MRT3847_72490C.1.pep
EQHGHNFSDFTYAVDLLHYVQTDELLXNTTHQNMPHQPAYFVPESMPVGTPLRKCTIR

SEQ ID NO: 255226 - protein, 244 aa, Glycine max
  Clone ID: PAT_MRT3847_72491C.1.pep
MSVSANCHLIERLFFESSKTGRDDSLKAQTCFELVNNCPHLTSLSLRGFKLHDCKVRVLVKGFRKLKYVDFSTSYSITGNFLRNLGSCNGGNLLEVLILRDCMHLKEMEVARLLTAILAGDFKLLVHLDISNREGLASEADWYHRCYNSSIMPTKQVLEARPDMCLVAEYPSAEGSYIETFDADMNSEISLPSQLSSHTSDGSIFMSTSESSYNSDQGSGNEDGQDANYVIYEESSDEIDFLSL

SEQ ID NO: 255227 - protein, 78 aa, Glycine max
  unsure (1)..(78): unsure at all Xaa locations
  Clone ID: PAT_MRT3847_72492C.1.pep
KMSPSVILAMSXSATLIASLIQCIDXQVLGHQGQIMKGDNDKVSMEERYGRTVPRAHSLVCGPLQRIGVAFMVVSYVV

SEQ ID NO: 255228 - protein, 58 aa, Glycine max
  Clone ID: PAT_MRT3847_72493C.1.pep
KKIFFHGYLKIIFFFLVYGFHVFFLFFKFSVLLSIGISLIFVVFVQPSKHNKWFLTST

SEQ ID NO: 255229 - protein, 61 aa, Glycine max
  Clone ID: PAT_MRT3847_72494C.1.pep
VNEERTLEVEIEPGVRDGMEYPFIGEGEPHVDGEPGDLRFRIKVVKHPIFERRGDDLYTNV

SEQ ID NO: 255230 - protein, 53 aa, Glycine max
  Clone ID: PAT_MRT3847_72495C.1.pep
DHECIELIGKSAQDLNNMMFVVCVYMFHLLLSFFYLYYYDCFPNMLTVLFMSI

SEQ ID NO: 255231 - protein, 98 aa, Glycine max
  Clone ID: PAT_MRT3847_72496C.1.pep
DLQIWGRPPLLDLDHEKIWQFMQGLNLVLRLAWLQTVLHSSFENVDYRVTSLFLASLEVIRRGLWNFFRLENEHLNNAGKFRAVKIVPLPFHEVDEED

SEQ ID NO: 255232 - protein, 164 aa, Glycine max
  unsure (1)..(164): unsure at all Xaa locations
  Clone ID: PAT_MRT3847_72497C.1.pep
SPRLDFWVKFGGKGKTHGKGFXLYEKXXKPKPGPSILPILGEFKXXCNFRPNGKPFFVAGQKVXEMXXFPVVNEAXXVLKDGVVIGASGLALAFVFGXXFPNFRGGLVFWAALVGAHHILPRLKKWAQLIGNFFKPSRVLEKKAFKGLPLRAPVSFTPKSMAGF

SEQ ID NO: 255233 - protein, 71 aa, Glycine max
  Clone ID: PAT_MRT3847_72498C.1.pep
QVNKCYCGLLLADTVPDSANNAADNTIGRLEVLQTYHMRYIRATFEIQFMLFMPDHCKSISYRIVQGVNAR

SEQ ID NO: 255234 - protein, 105 aa, Glycine max
  Clone ID: PAT_MRT3847_72499C.1.pep
RFQQPKRVRRNKHQVDVSHGSPITSKGKFLGFQITMTTLNLPIPDSCVGLFTIKLLLYFLCAYIIWFFQLFSSKKKIILRWHTRCVHQTNFFQYFFQCILQLFLL

SEQ ID NO: 255235 - protein, 127 aa, Glycine max
  Clone ID: PAT_MRT3847_7249C.1.pep
MEQYEILEQIGRGSFASALLVRHRHENKRYVLKKIRLARQTDRTRRSAHQEMELISKVRNPFIVEYKDSWVEKGCFVCIVIGYCEGGDMAEAIKKANGVYFPEERLCKWLVQLLMALDYLQCNHILH

SEQ ID NO: 255236 - protein, 81 aa, Glycine max
  unsure (1)..(81): unsure at all Xaa locations
  Clone ID: PAT_MRT3847_724C.1.pep
IYLLSTFTRHITPHTIAEPQKAKIYHYYVPVFLCCEQHITEHHCHFIHXQYIPSLVIGYTAPQSXHKTTLVFALDYHFETI

SEQ ID NO: 255237 - protein, 40 aa, Glycine max
  Clone ID: PAT_MRT3847_72500C.1.pep
LTNGDINQTIHFKASKGISTCPIDGLGSPFMEIKSTHGLI

SEQ ID NO: 255238 - protein, 130 aa, Glycine max
  unsure (1)..(130): unsure at all Xaa locations
  Clone ID: PAT_MRT3847_72501C.1.pep
PLYFCVNRGKTRWKIWWLNSMLGNRKLEYRRELSQXMDCLGPIENTRLREDPHIFTDVDNKIHRDLDYLEMWRFFSSDLNPGFKNYDDLYMYETQFXFYNNTTCFNAHGIDSSNLWGFDEYKGIFLFTFL

SEQ ID NO: 255239 - protein, 136 aa, Glycine max
  Clone ID: PAT_MRT3847_72502C.1.pep
SAASSSAGTCLTQGNYDLRRIATNMIYSHKSTPTPMHVIFGVIRAIPWHISLIYGCLPLQTQAALTCSATPPLRHRHAIACELFRAAGGDISIWHGSMPLLIDDDRIRHRIVAFHDLKGEGSWNVACDALQVPWLH

SEQ ID NO: 255240 - protein, 108 aa, Glycine max
  Clone ID: PAT_MRT3847_72503C.1.pep
KRVLAYRGIDGSIQKVLPIRKTYKADKGRRYRGKLYKPGLQAIRLLVVTLRVKGWRVVNGGLQLTVLLSHQLAGVRGGAAKIAKTVGMCLRVRYVATGPLHRHWVAPA

SEQ ID NO: 255241 - protein, 78 aa, Glycine max
  Clone ID: PAT_MRT3847_72504C.1.pep
LLEDQDAVHAHRIALFRVVAVSVLAGLFMLRPFVWSPSPVIALATVFGRSRVAAGGATAASPSASCVPAPAGAAGGCL

SEQ ID NO: 255242 - protein, 143 aa, Glycine max
  Clone ID: PAT_MRT3847_72505C.1.pep
FRTAFSEFDAATNSRVRATRMVGCEKRQKGDISRVRGVVDNANRILAINKDFGSFDKYIWDFVNHKPISTQYKFGHKIPVKTSKSESISKDMIRRGFRCVGPTVLHSFMQAAGLTNDHLITCHRHLQCTLLASTPHCTTEHFL

SEQ ID NO: 255243 - protein, 592 aa, Glycine max
  Clone ID: PAT_MRT3847_72506C.1.pep
LVTTFHILEPIVILFHILEISKYVQIASKTDKQDTTVVNAFRLLSAQSSQTNEGDPCVPTPWEWVNCSTTTPPRITKIILSRRNVKGEIPSELSNMEALTELWLDGNLLTGQLPDMSKLINLKIVHLENNKLTGRLPSDMGSLPSLQALFIQNNSFSGEIPAGLISKKIIFNYDGNAELHRGKKKHFKMVLGISIGVLVILLILFLVSLVLLLNTRRKASKKKREEKGISGRTNSKPGYSFLRGGNLMDENTTCYITLSELKEATDNFSKKIGKGSFGSVYYGKMRDGKEIAVKSMNESSCHGNQQFVNEVALLSRIHHRNLVPLIGYCEEECQHILVYEYMHNGTLRDHIHESFKKQKLDWLARLRIAEDAAKGLEYLHTGCNPSIIHRDIKTGNILLDINMRAKVSDFGLSRLAEEDLTHISSIARGTVGYLDPEYYASQQLTEKSDVYSFGVVLLELIAGKKPVSSEDYSDEMNIVHWARSLTHKGDAMSIIDPSLEGNAKTESIWRVVEIAMQCVEQHGASRPRMQEIILAIQDAIKIEKGTENKLKSSSSFSGSSSSKPHSSRKTLLTSFLEIESPDVSNGCLPSAR

SEQ ID NO: 255244 - protein, 71 aa, Glycine max
  Clone ID: PAT_MRT3847_72507C.1.pep
SPSSGAANTAAVTGVAYEALGLESAATTSGDFFADLISSQRDDIRKVRDISGSFRWVTFLALDRSHFISDA

SEQ ID NO: 255245 - protein, 148 aa, Glycine max
  unsure (1)..(148): unsure at all Xaa locations
  Clone ID: PAT_MRT3847_72508C.1.pep
IVLKTDKQDTTVVNAFRLLSAQSSQTNEGDPCVPTPWEWVNCSTTTPPRITKIILSRRNVKGEIPSELSNMEALTELWLDGNLLTGQLPDMSKLINLKIVHLENNKLTGRLPSDMGSLPSLQALFIQNNSFSXEIPAGLISKKIIXKL

SEQ ID NO: 255246 - protein, 90 aa, Glycine max
  unsure (1)..(90): unsure at all Xaa locations
  Clone ID: PAT_MRT3847_72509C.1.pep
GSQGAGKGKGPQNSTPLPPGGGRAKKAAGPPGFPPGKGPGSPPQSMGGSPPKGPPGLPPXGPRPEGGGERGPETNSPQEPARARIAPGAQ

SEQ ID NO: 255247 - protein, 48 aa, Glycine max
  unsure (1)..(48): unsure at all Xaa locations
  Clone ID: PAT_MRT3847_7250C.1.pep
XRKESAEXVDVRGXRQXLEPXHRENRXSHGSXAXXSGXYPAXDSXCLC

SEQ ID NO: 255248 - protein, 84 aa, Glycine max
  unsure (1)..(84): unsure at all Xaa locations
  Clone ID: PAT_MRT3847_72510C.1.pep
GGQALFDLENTIQELKGDLKDLXALKLAVHVDXSGNRKGGVIHVPYRLRRGFRRIHVLLDTELXNKFSGKDVSLGSTRRLLTPP

SEQ ID NO: 255249 - protein, 232 aa, Glycine max
  Clone ID: PAT_MRT3847_72511C.1.pep
SPDSRVDPRVRGVRPVPGRHPCVGTPEDIVATHSLAFLDHCSDKNGVSSGAGDTDRSKSPRKVFGGGVGEKEKKERVRSNVGGGSGKEDVQSSKASAVFGRSKSQPQQPQPIKPALKIQVKKESLTRLKSTNSRSIPSSPSSCYSLPSSFEKFANGVRQHQAKVGAKVGVAETEKSVRGASSSVGKKIVVGNPIRNLVQGIELGTKALRKSWEGSMEVKTKESSKTRVAFQV

SEQ ID NO: 255250 - protein, 312 aa, Glycine max
  unsure (1)..(312): unsure at all Xaa locations
  Clone ID: PAT_MRT3847_72512C.1.pep
MTLSTAPSPPPALEEEPLPHDGDDYDGIVSLDDEGFPSQFPESGTASEKSSFAADFYRSGTDWSSLLLSLEDSKQSDLAQDSGKKMKQANLFQIWGFKRNDAIGSVESGPSKSGCCDDGGGSSERKIVKPENRCSIFPDTGKEFENAKSSRKRKGSCGENRVTRSCPFYKKMPGTMFTVDAFRYGCVEGCSAYFLTHFHCDHYGGLSKKWSHGPIYCSPLTGRLVQMCLSVNPLYIHPLVFNKEHVIDGVKVTLLDANHCPGAAVIHFYLPNGQRYLHTGDLRTCELMPAHHLLXNRRVXVLYVDTXYCNRR

SEQ ID NO: 255251 - protein, 106 aa, Glycine max
  unsure (1)..(106): unsure at all Xaa locations
  Clone ID: PAT_MRT3847_72513C.1.pep
PFATAGSEGAFNFWDKTSKQKPKAIQRCSQPTPCRTFKKKGSKFAXPVCYDWSKGAKNPHPAPAKNSKYLPFPPEFXVKGHPPAGAPGKKRNFVLKTPFVLGPKDF

SEQ ID NO: 255252 - protein, 33 aa, Glycine max
  Clone ID: PAT_MRT3847_72514C.1.pep
GSRLCNLLAYIVRCYRKHGLEGDRCCEDLQSSS

SEQ ID NO: 255253 - protein, 124 aa, Glycine max
  Clone ID: PAT_MRT3847_72515C.1.pep
MDMDRRSWPWRRKSSEKSPGETESSGSMSSHSERFFDDQVYPTQTTPPPEGMFEAAPNDEEANDVKTLTERLSAALLNSRAKEDLAKQHAKVAEEAVSGWEKAENELLILKQHTHRWKTAKLSS

SEQ ID NO: 255254 - protein, 70 aa, Glycine max
  Clone ID: PAT_MRT3847_72516C.1.pep
CKNSGPPPNDIAQELAPDLYSTQSRPALFRDARNSAKLFHNVKLFLTLCGVAAVGLQVGRHVYWSLGRLK

SEQ ID NO: 255255 - protein, 228 aa, Glycine max
  unsure (1)..(228): unsure at all Xaa locations
  Clone ID: PAT_MRT3847_72517C.1.pep
SRARGQEFMPNGSLDKFIFPKDGSIHLRYDGICNIAIGVARGIAYLHHGCEMQILHFDIKPHNILLDETFTPVAPGFALAKLXPIDNSIVSKTAARGTIGYEALTLLVNDFGGISYKALDYILDIILMEMAGKRKNLNPHAERSSQLFFPFWIYNHIRDGEDIEMEDVTEEEKKMVKKMIIVALWCIQLKPNDRPSMNEVVEMLEGDIENLEIPPKPTLYPSETITKN

SEQ ID NO: 255256 - protein, 61 aa, Glycine max
  Clone ID: PAT_MRT3847_72518C.1.pep
MARKGEGPAIGIDVGTTYSCVGVLQHDRVEIIVIDHGNRTTPSYVAYSDAERLISDAANNR

SEQ ID NO: 255257 - protein, 99 aa, Glycine max
  unsure (1)..(99): unsure at all Xaa locations
  Clone ID: PAT_MRT3847_72519C.1.pep
STRSVNCQGEINPYCMXWTGLTNRXLSYGQQFFCGATMLSLDGLITKQVLSKMAEMINRLXGGIEKWMRERTHLLXAWWSRMDIGKKXVRRVERGIPSG

SEQ ID NO: 255258 - protein, 67 aa, Glycine max
  Clone ID: PAT_MRT3847_7251C.1.pep
MGCANSKPKGCQHCHCNTPYYSSSMARSFSVHVHHPPQTKGDSYHVAALTSTTLGSLDQDVPHNNNY

SEQ ID NO: 255259 - protein, 98 aa, Glycine max
  Clone ID: PAT_MRT3847_72520C.1.pep
FEKRKKGWEKILPFSNPFGAPKFKKDWVWSFFQVGNFFALPKGAQGFSPPLLLKKSFPLKKNFFPFSKPPQKVFFFSKKFFLGKLCEPRVFPFWGIPV

SEQ ID NO: 255260 - protein, 133 aa, Glycine max
  Clone ID: PAT_MRT3847_72521C.1.pep
LERKEREKGVVEYCFSECKTWRQCDFHPQGTFPRFQMMTTVTATPSSAASPCFKLMILVDEGGSGAHDVFFLLPRLFYVRYFTFIDLICMEMWDGERVLRLRGAIKFCIFLGLAVCISRRIGSSSSPQPDVFR

SEQ ID NO: 255261 - protein, 48 aa, Glycine max
  Clone ID: PAT_MRT3847_72522C.1.pep
AQAETGLHFFFLYTDLTTILVRLRGGGGTTNIPAYKTYIKPDNIFGER

SEQ ID NO: 255262 - protein, 94 aa, Glycine max
  Clone ID: PAT_MRT3847_72523C.1.pep
AEGEKSANLRSRRGRSCSILPHASAKMACDQTHRLISTNLDEVSQGESTHNRGVANDSPRILNVHDVYEVPQTSENHEVSEHGGKRFEKWSSDA

SEQ ID NO: 255263 - protein, 193 aa, Glycine max
  unsure (1)..(193): unsure at all Xaa locations
  Clone ID: PAT_MRT3847_72524C.1.pep
RFRVGFSSWKFNDVNICVFVGVECWQHGENKVLNLNLTNMGLKGEFPRGLRGCSSLVGLDLSHNELTGPIPSDISTLLPYATSIDLSNNKFNGEIPPSLANCSYLNSLRLDNNMLSGHIPQELXQLQRIRNISFANNNLSGPLPLFRDGVTSAEAYANNTQLLWTAFCHPAQAMISLNHSGMPLCGYAFSLTS

SEQ ID NO: 255264 - protein, 471 aa, Glycine max
  Clone ID: PAT_MRT3847_72525C.1.pep
MDIEAGKDIPVRDPALLDDDGRIKRTGNVFTATTHIVTVVVGAGVLALAWAMAQLGWIAGIAVMILFACISVYTYNLVADCYRFPDPVSGKRNYTYMQAVDAYLGGKMHVFCGSVLYGKLAGVTVGYTITSSVSLVAIKKAICFHKKGHDAYCKFSNNPYMIGFGICQILLSQIPNFHKLTWLSTIAAATSFGYAFIGSGLSLSVVVSGKGEATSIFGSKVGPDLSEADKVWKVFSALGNIALACSFATVIYDIMDTLKSYPPENKQMKKANMLGITTMTILFLLCGGLGYAAFGDDTPGNILTGFGFYEPFWLVALGNVFIVVHMVGAYQVMAQPLFRVIEMGANMAWPRSDFINKSYPIKMGSLTCNINLFRIIWRSMYVAVATVIAMAMPFFNEFLALLGAIGFWPLIVFFPVQMHIAQKRVKRLSLKWCCLQILSFACFLVTVSAAVGSVRGISKNIKKYKLFQYKQ

SEQ ID NO: 255265 - protein, 225 aa, Glycine max
  unsure (1)..(225): unsure at all Xaa locations
  Clone ID: PAT_MRT3847_72526C.1.pep
MAKLKTSIDSSFWDFNVASPQLHEGWVKSVPGDPFPLDGSVASRVLRPRQLSVIGNGLPLPVIVPSLSPTSPKDLGSFCLQSLLLKLANPRWWLTMTGQFRPRKLIADVKNEISNAEEFDLSTVKDVAKHFINKSLYSFGLTSQFAFPPSTSLLLAIEGHGEKERLRSKVMVFHKLPDHDLTLEAAWPQLFVDHKGKYXDVPESLSXDLSSLVSESGLRYHIXMH

SEQ ID NO: 255266 - protein, 230 aa, Glycine max
  unsure (1)..(230): unsure at all Xaa locations
  Clone ID: PAT_MRT3847_72527C.1.pep
SDGKTFYCLEMAKYFNPGEAEAMNQSVAYLLSKLSYIPSTLFLSEVSYVEFLDRVHVSEKKLRAQGLWEVPHPWLNLLIPRSEIHNFAEEVFGNILKDTNNGPILIYPVNQTRWNSKTSLITPEEDIFYLVAFLSLALPNSTGADSLEHILAQNKRVIDFYTGAKMRVKQYLXHYSTQEEWQVHFGSRWETFVERKRAYDXTSTASPGHKIFQRLSPLRVSFLVCCKVVN

SEQ ID NO: 255267 - protein, 47 aa, Glycine max
  Clone ID: PAT_MRT3847_72528C.1.pep
PYSKLTMIVRLRWNIMYFAYMIGKRSDPLVLELPKPSIQLHYVYYQL

SEQ ID NO: 255268 - protein, 581 aa, Glycine max
  Clone ID: PAT_MRT3847_72529C.1.pep
MVVAEFTSGGLRGMKAFSYHVLTGRWFMLFASLLIMSVAGATYMFGIYSNEVKTSLGYDQSTLNLLSFFKDLGANVGVISGLVNEVTPPFVVLSIGVIMNFFGYFMIFLAVSGRIDKPQVWQMCLYICIGANSQTFANTGALVTCVKNFPGSRGSILGLLKGYVGLSGAIITQLYHAFYGNHDSQALILLIAWLPAAVSSLFLPTIRIMNTVLHQPKEGNRVFYHLLYISLGLAAFLMVLILVQNKLSFSRIEYIVDGLVVFFFLLLPLVVVFREEINQLKANTQCLTDSPPQLKVVTEAIPPPNVEQEEVPPTTTSSHEKSSCLRNIFNPPKRGEDYTILQALFSIDMLILFIATTFGAGGTLTAIDNLGQIGHSLGYPNKSTTTFVSLVSIWNYLGRVASGYASEIFLTKYKIPRPYMLTLVLLVSCVGHVLIALGVPNSLYFASVIIGFCFGAQWPLMFAIISEVFGLKYYSTLYNFGAAASPLGSYILNVKVAGVLYDKEALKQLKAKGLTREEGKDLTCVGVQCYKMAFIIITASTLVGCLASVILALRTRKFYKGDIYRKFRMEHEAMEITKTAN

SEQ ID NO: 255269 - protein, 270 aa, Glycine max
  Clone ID: PAT_MRT3847_7252C.1.pep
MASSCASSAIAAVAISTPSSQKNGSLLGSTKASFLSGRKLKVNNFTAPVGARSSTTVCAVAEPDRPLWFPGSTPPPWLDGSLPGDFGFDPLGLASDPESLRWNVQAELVHCRWAMLGAAGIFIPEFLTKIGILNTPSWYTAGELEYFTDTTTLFIVELFFIGWAEGRRWADIIKPGCVNTDPIFPNNKLTGTDVGYPGGLWFDPLGWGSGSPEKIKELRTKEIKNGRLAMLAVMGAWFQHIYTGTGPIDNLFAHLADPGHATIFAAFTPK

SEQ ID NO: 255270 - protein, 315 aa, Glycine max
  unsure (1)..(315): unsure at all Xaa locations
  Clone ID: PAT_MRT3847_72530C.1.pep
MATTTQWSSLSLSLLLLSIALFQTLTPNSSPSPPPPNYIVAFSHYAAADRHRAYLESALRPGGWRWIPRQNPAAQFPTDFGLVAIDDSAVVDEIRKLGSDKYVSLDMSYKRGLMAKKDQRRNDKKVGAFEDGKKKRPGKIFTAMSFCEAEEGXEKKNMPVIAAVLSSWGGELVMDANSTTSIFSVKGPWALTHTGAKVKMAIFDTGIRADHPHFRNIXDTLNDNLGHGTFVAGVIAGVDAECLGFAPDTEIYAFRVFTDAQPIXVSYTSWFLDAFNYAIATNMDVLNXSIGGPDYLDLPFVEKIWEITAXNIIMV

SEQ ID NO: 255271 - protein, 663 aa, Glycine max
  unsure (1)..(663): unsure at all Xaa locations
  Clone ID: PAT_MRT3847_72531C.1.pep
MATTTTQWSSISFSLLLLSIALFQTLTPNSHPPPPPPNYIVAFRHYAAADSHRAYLESALRPGGWRWIPRRNPAAQFPTDFGLVAIEDLGVVDEIRKLGSVKYVSLDMSYKRGLMTKKDQRRNDNKVGAFEDGKKKRPGKIFTAMSFSEAEEEDASNRSSSVKWGRELLMQRSQVTSMFGAGDLWAKGYTGAKVKMAIFDTGIRADHPHFRNIKERTNWTNEDTLNDNLGHGTFVAGVIAGVDAECLGFAPDTEIYAFRVFTDAQPIXVSYTSWFLDAFNYAIATNMDVLNLSIGGPDYLDLPFVEKIWEITANNIIMVSAIGNDGPLYGTLNNPADQSDVIGVGGIDYSDHIASFSSRGMSTWELPHGYGRVKPDIVAYGRDIMGSKISAGCKSLSGTSVASPVVAGVVCLLVSVIPEPDRKNILNPASMKQALVEGAAKLSGPNMYDQGAGRVDLLKSYEILKSYKPRASIFPSVLDYTVCPYTWPFCRQPLYAGAMPVIFNATILNGMGVVGYVDSPPTWHPSDEEGNLLSIHFTYSEIIWPWTGYLALHMQIKEEGAQFSGKIEGNVTLRVSSPPAHGEKDPRISICVLQLKLNVVPTPPRSKRILWDQFHNIKYPPGYIPRDSLDVRNDILDWHGDHLHTNFHIMFNMLRDAGYYVET

SEQ ID NO: 255272 - protein, 79 aa, Glycine max
  Clone ID: PAT_MRT3847_72532C.1.pep
VLPAFNGLLTGMVFPVPSAGLVRRRPLGVVGPPSLYDEIKHAIKEVSQGPKSVILGYTGHDVFSTNSVVDHTSTIFDAK

SEQ ID NO: 255273 - protein, 36 aa, Glycine max
  Clone ID: PAT_MRT3847_72533C.1.pep
TYTNDASSILLDQRMLAYNTLHTQSNDCTPTTCPSF

SEQ ID NO: 255274 - protein, 169 aa, Glycine max
  Clone ID: PAT_MRT3847_72534C.1.pep
MANVEILVLLVAAALLMPLRHTTEAAEHVVGGSAGWIIPSQGDTSLYTSFAANNTFRLNDILVFNFATGFHNVVTLSKKHYDSCNVSEVMQSFDTAPARITLNRTGEFYFACAFSSHCSLGQKLSIHVTAGSSSLAPLSPPPPASRAAMPLVAVTIPVLFIAVATNVLF

SEQ ID NO: 255275 - protein, 34 aa, Glycine max
  Clone ID: PAT_MRT3847_72535C.1.pep
KIIIAYIEKGDLHYVRTLNGLLNILVIAKFAKFN

SEQ ID NO: 255276 - protein, 46 aa, Glycine max
  Clone ID: PAT_MRT3847_72536C.1.pep
MASKRISKELKDLPKDPATSCSAGPDHEDMYHWQAATMGPSDRPYA

SEQ ID NO: 255277 - protein, 58 aa, Glycine max
  Clone ID: PAT_MRT3847_72537C.1.pep
NEGIYDCPLLANLDDAHRQPYCEKLEIISGGIPSACKSTDLANSLLDQIQLTITFAIN

SEQ ID NO: 255278 - protein, 75 aa, Glycine max
  Clone ID: PAT_MRT3847_72538C.1.pep
ITSCEATQPMPIVTEKEKQSNPNINRQPIKVQWNRIPTGQLQSNTVAFLELVSKQQRLLLPALPNYFLYSFLECF

SEQ ID NO: 255279 - protein, 104 aa, Glycine max
  Clone ID: PAT_MRT3847_72539C.1.pep
GGFIIWAGTWRVGGVLAVSRAFGDKFLKPYVVADPEIQEEEINGVDFIIIASDGLWNVISNKEAVSLVQNITDAEVASRELIKEAYARGSSDNITCVVVRFDLS

SEQ ID NO: 255280 - protein, 259 aa, Glycine max
  Clone ID: PAT_MRT3847_7253C.1.pep
KNDEIAFSSQKNGSLLGSTKASFLSGRKLKVNNFTAPVGARSSTTVCAVAEPDRPLWFPGSTPPPWLDGSLPGDFGFDPLGLASDPESLRWNVQAELVHCRWAMLGAAGIFIPEFLTKIGILNTPSWYTAGELEYFTDTTTLFIVELFFIGWAEGRRWADIIKPGCVNTDPIFPNNKLTGTDVGYPGGLWFDPLGWGSGSPEKIKELRTKEIKNGRLAMLAVMGAWFQHIYTGTGPIDNLFAHLADPGHATIFAAFTPK

SEQ ID NO: 255281 - protein, 69 aa, Glycine max
  Clone ID: PAT_MRT3847_72540C.1.pep
IYNMYFILYTFIANLLSGRNKYNSNQFANIHPITREIVSTDSKLSYRKMNAFFSFSFFFFFSELEIRNM

SEQ ID NO: 255282 - protein, 44 aa, Glycine max
  Clone ID: PAT_MRT3847_72541C.1.pep
RACIRLGILCFRVTEMEVNYSELTPANICSGGSRTVPLYRVGLT

SEQ ID NO: 255283 - protein, 214 aa, Glycine max
  Clone ID: PAT_MRT3847_72542C.1.pep
QERRKTISNITFGYLSVTIGIGLMVCRQFHVSMPLPYTRSITTSRISPTIGTITYACLQIVITGLGAALIDKAGRKPLILLSGSGLVAGCTFVAVAFYLKVHEVGVEAVPALAVTGILVYIGSFSIGMGAIPWVVMCEIFPVNIKGLAGSVATLVNWFGAWLCSYTFNFFMSWSSYGTFILYAAINALAILFIIVAVPETKGKSLEQLQADINS

SEQ ID NO: 255284 - protein, 73 aa, Glycine max
  Clone ID: PAT_MRT3847_72543C.1.pep
FLAAILGALLFSGIFLLFSLQLNVHHSASGHCNYAWFLSFLQFFFWFFCFFLYFCSHRLRYRNNRARLLFFWF

SEQ ID NO: 255285 - protein, 62 aa, Glycine max
  Clone ID: PAT_MRT3847_72544C.1.pep
PSSLLLIEKRIPHIFIFATSFLLHDPSFSSCITPIPLRIHLSKTFLLLLLSELSRTCLQLQQ

SEQ ID NO: 255286 - protein, 104 aa, Glycine max
  Clone ID: PAT_MRT3847_72545C.1.pep
AGEERPSVVPLLFGEKSPLCGPQGASLFSPGVGFFINAATTIFLPAKKGALGAPLFFFVRFLIRPRRLYIFFPRIVCCVPLSQNNFFPQKAMMVVFPASFKYFS

SEQ ID NO: 255287 - protein, 120 aa, Glycine max
  unsure (1)..(120): unsure at all Xaa locations
  Clone ID: PAT_MRT3847_72546C.1.pep
XIXYXLXSSXSRCXXGXSDXXRXXASXXXXPDXPXLXXAPNPXQLXPXVGXNCXXCPLSSGLPXPXCSXXXXXXXAXQSLXXXSSLRSXXTXXXXLXSXXXNPLLXRAXXPSXRTRXCXS

SEQ ID NO: 255288 - protein, 80 aa, Glycine max
  unsure (1)..(80): unsure at all Xaa locations
  Clone ID: PAT_MRT3847_72547C.1.pep
DHIPLLGRSIPRNVVKIVMSGNAAIKRSDWASLVQVFLTNSNSTEHDEACKWKKSEPQTWELIXPIEVCGANNGCEMWSA

SEQ ID NO: 255289 - protein, 55 aa, Glycine max
  Clone ID: PAT_MRT3847_72548C.1.pep
YAPIPLPLQGDFPPPSSIWNNGRKSRAMGRNKLGPSCSCKGLPACIINSENPPCG

SEQ ID NO: 255290 - protein, 53 aa, Glycine max
  Clone ID: PAT_MRT3847_72549C.1.pep
RCHSQHMARLFGSLISILYCAGGSEWSKSNSIVMAQVQLSRGLWIAHPIGCVS

SEQ ID NO: 255291 - protein, 270 aa, Glycine max
  Clone ID: PAT_MRT3847_7254C.1.pep
MASSCASSAIAAVAISTPSSQKNGSLLGSTKASFLSGRKLKVNSFTAPVGARSSTTVCAVAEPDRPLWFPGSTPPPWLDGSLPGDFGFDPLGLGSDPESLRWNVQAELVHCRWAMLGAAGIFIPEFLTKIGILNTPSWYTAGELEYFTDTTTLFVVELFFIGWAEGRRWADIIKPGCVNTDPIFPNNKLTGTDVGYPGGLWFDPLGWGSGSPEKIKELRTKEIKNGRLAMLAVMGAWFQHIYTGTGPIDNLFAHLADPGHATIFAAFTPK

SEQ ID NO: 255292 - protein, 144 aa, Glycine max
  unsure (1)..(144): unsure at all Xaa locations
  Clone ID: PAT_MRT3847_72550C.1.pep
YTAGLALCSLLMSLSEPCTLGVARECHAXNQDARHALRPNTPMTSSLIDRIKPGPACEEIQDHPTHIEEAHVPXTYFYKEDLNPGPSAKVHFKQPLYTQPWSVGTCLNEIRDTTKXGCEFGELCIKKEAFEGEKKFCAYSLGTE

SEQ ID NO: 255293 - protein, 174 aa, Glycine max
  unsure (1)..(174): unsure at all Xaa locations
  Clone ID: PAT_MRT3847_72551C.1.pep
FVQEFKRKNKKDLTTNARALRRLRTACERAKRTLSSAAQTTIEIDSLFEGIDFYTSITRARFEELCGDLFSHTIEPVEKVLRDSKIDKGSVHEIVLVGGSTRIPKVQKLLTDFFNGRELNRSINPDEAVAYGAVVQAVILSGDTSERTQDLLXLDVAPLSXGIENRRGVFTPLI

SEQ ID NO: 255294 - protein, 287 aa, Glycine max
  unsure (1)..(287): unsure at all Xaa locations
  Clone ID: PAT_MRT3847_72552C.1.pep
MAAKSPHDSSFSFSRRYFHWKKKALDESDNEEEILNFSSSSSYFPEEVDDNQDDHNHNHPHHLTLQMPXRCNAKKKTHFSKKSKFKSALTVFTVTRVPRLGLNHNKNSSSLGTRVVGTLFGHRRGHVHFAFQEDPKLGPAFLVKLATRTSALVREMASGLVRIALECEKKKNDINYNATXSKVRLLEEPLWRTYCNGRKCGYANRRECGPHEWKILKAVEPISMGAGVLPVVCGNEAAGSEEEASGEVMYMRAKYERVVGSRDSEAFYMMNPDASGGPELSIYLIRV

SEQ ID NO: 255295 - protein, 56 aa, Glycine max
  Clone ID: PAT_MRT3847_72553C.1.pep
IRLEYGCERRQKGEAALRCVFILFVSAYFCICIFGFVIDVYIITFSAIYFLINCYS

SEQ ID NO: 255296 - protein, 153 aa, Glycine max
  unsure (1)..(153): unsure at all Xaa locations
  Clone ID: PAT_MRT3847_72554C.1.pep
RAGHQRAAKPGGTGRADTRNPRATGGGTHRAGQGAIGNMCRGGRMLAPTKIWRLRTKKNNVNHKRNAGASAIAASAIPTLVGASGHRIESVPELPHDDSDTAESGEKTKEATKXLKQIGALTDAEKAKKSXGFGPGKGKMRKRRYIARRGTIL

SEQ ID NO: 255297 - protein, 320 aa, Glycine max
  Clone ID: PAT_MRT3847_72555C.1.pep
MAMVKSPKKQVNLFYSLDCEDLAQNVALQSPHIVLQNIKWRSFADGFPNIYINNAEELRGQHVAFLASFSSPAHVFEQLSVIYALPRLFVASFTLVLPFFPTGSFERMEEEGDVATAFTLARMLSNIPISRGGPTSLVIYDIHALQERFYFGDEVLPLFETGIPLLKQRLSQLPDADNVVIAFPDDGAWKRFHKLFDNFSLVVCSKVREGDKRIVRLKEGNVSGHHVLIVDDLVQSGGTLIDVYSGLRANGAAKVSAYVTHGVFPNQSWERFTHKKDALENAFAYFWITDSCPLTVKAVANTAPFEVLSLAGSIANALQI

SEQ ID NO: 255298 - protein, 141 aa, Glycine max
  Clone ID: PAT_MRT3847_72556C.1.pep
VIAFPDDGAWKRFHKLFDNFSLVVCTKVREGDKRIVRLKEGNVSGHHVVIVDDLVQSGGTLIECQKVLAANGAAKVSAYVTHGVFPNQSWERFTHKKDALENAFAYFWITDSCPLTVKAVANTAPFEVLSLAGSIANALQI

SEQ ID NO: 255299 - protein, 55 aa, Glycine max
  Clone ID: PAT_MRT3847_72557C.1.pep
VWVQTSDLAPSQYPEYVRPHATIYLFYSATEIQLTGLRATTFTTGKPGKLPNLIA

SEQ ID NO: 255300 - protein, 68 aa, Glycine max
  Clone ID: PAT_MRT3847_72558C.1.pep
LHPHNPFYTLHFIPNFIALWRPFLLTRLLPGLPTLIIVVAPLYTSGVEVLIIAFYTAIALSIIRSLAW

SEQ ID NO: 255301 - protein, 263 aa, Glycine max
  Clone ID: PAT_MRT3847_72559C.1.pep
MAGSSSSSSTSNTPPQKHEVFISFRSEDTRKTFTSHLNAALERLDIKTYLDNNNLDRGEEIPTTLVRAIEEAKLSVIVFSKNYADSKWCLDELLKILEFGRAKTLIIMPVFYDIDPSDVRNQRGTYAEAFDKHERYFQEKKKLQEWRKGLVEAANYSGWDCDVNRTESEIVEEIAKDVLEKLNRANVSDLDRQITKYEQLAQLQHQYFMCIPSLENCQNHRATVQRITELKMERSMRLLRLTPDMLSHMKNSRADEYNIFSPF

SEQ ID NO: 255302 - protein, 76 aa, Glycine max
  Clone ID: PAT_MRT3847_7255C.1.pep
LICYVSGGFEFKTIDHQHYLITPMIGVSMYMKCLGKSHDANSNINVFKLIPQLKKDTSWVVVKVDMRWRMGTGSSI

SEQ ID NO: 255303 - protein, 96 aa, Glycine max
  unsure (1)..(96): unsure at all Xaa locations
  Clone ID: PAT_MRT3847_72560C.1.pep
MCSHTANGPYPWDGEATCDATTHHPVQIYPGXVNVKYYLHHLGYIPSAEHFDYYFDDALVCAYKAYHLTDTLVGTVMHYIITVQRIMTPRCDVPDY

SEQ ID NO: 255304 - protein, 49 aa, Glycine max
  Clone ID: PAT_MRT3847_72561C.1.pep
VKIISISQLSLAAIMEYTFFMTQYRYRRALDLDLGASPSRPICRVLTTG

SEQ ID NO: 255305 - protein, 73 aa, Glycine max
  Clone ID: PAT_MRT3847_72562C.1.pep
KQKKQNNNRKKIEDLKNTTINKKKKNNQKSNRNDGKDKKGENNPIEEHPDIRTLKNQILSSRNRSSQKRKPKG

SEQ ID NO: 255306 - protein, 43 aa, Glycine max
  Clone ID: PAT_MRT3847_72563C.1.pep
KRPGEKSKVISDEEKAALKAREAARKRVQEREKPLLGLYNKPY

SEQ ID NO: 255307 - protein, 223 aa, Glycine max
  Clone ID: PAT_MRT3847_72564C.1.pep
GSRENQADPAMRLVSEMMILCGEAVATFGSRNEIPLPYRGQPQSDMNVSEFSHLPEGPVRSFALVRVMRAAEIDFRKPARHGVLGIPGYVQFTSPIRRYLDLLAHYQVKAFLRGKPPPFTAGKLEGIAAVVNENVRTVRKLCSSSLRYWILEYLRRQPKERTYRALVLRFLKDRIAALLLLEVGFQASAWIPVGMQIGDEVEVKVEEAHPRDDILFLKEVVKE

SEQ ID NO: 255308 - protein, 152 aa, Glycine max
  Clone ID: PAT_MRT3847_72565C.1.pep
GPGNPKGLILEKKPPGGSNKSFSPCQKKKERRGQNLLFRGVNPLGGASPGVSRATALSGLSGIKSWGGNSPLGRGPPGGPRVGAKTLISQNLGGPRGPIKTPALSMAFGPRQSPGEANKYGGFGPQLFEPPPTIKAFLKGGGGLKNPLIGRG

SEQ ID NO: 255309 - protein, 71 aa, Glycine max
  Clone ID: PAT_MRT3847_72566C.1.pep
ISGSSSGSSSPFDSHSSCRSRACSPSCSKSSSPSYSSSSRSSRSLSCPPELKIIHISITSSTLFMFFSVKT

SEQ ID NO: 255310 - protein, 65 aa, Glycine max
  unsure (1)..(65): unsure at all Xaa locations
  Clone ID: PAT_MRT3847_72567C.1.pep
MRLSLAAAISHGRVYRRLGLGPESRIHLLRNLLTGLVRHERIEATWARVDEMXGYAEKLIDYGKL

SEQ ID NO: 255311 - protein, 62 aa, Glycine max
  unsure (1)..(62): unsure at all Xaa locations
  Clone ID: PAT_MRT3847_72568C.1.pep
IREEKVVGLCYVYIEPETRKKSSLVFNAYKLDAVNVTRHHLQTRTPHXHTHTKQLKFGCRFA

SEQ ID NO: 255312 - protein, 194 aa, Glycine max
  Clone ID: PAT_MRT3847_72569C.1.pep
MDFLSCGSGPCCQAVDMKWKLVGKCLNSRQARFPSVGNRSGSVRFHDNKELQRDFGSLSALEGSKRTNCKAYSESYDGYVIGGEEDVADISGVEEPATNNVVIPGLPDGSNGAPISSCFWEWKPKLNVHYEKAGCENVDSPHVLFLPGFGVGSFHYEKQLKDLGRDTRVWALDFLGQGLSLPFEDPAPYYNKEG

SEQ ID NO: 255313 - protein, 52 aa, Glycine max
  Clone ID: PAT_MRT3847_7256C.1.pep
AIKAAEEGITVEEYDCLPYLYSRSLDLSWQFYGVNVVYSVLFVDNNPASSKS

SEQ ID NO: 255314 - protein, 40 aa, Glycine max
  Clone ID: PAT_MRT3847_72570C.1.pep
QQYGGLGSEYGFPDQKENTALSALDPFSYVTAEGDHDFFR

SEQ ID NO: 255315 - protein, 120 aa, Glycine max
  Clone ID: PAT_MRT3847_72571C.1.pep
KEKPKGLFSEVPVGVFKIWPPGSFVPPQLEQVRCCKPPPHGVSSPLWAGGVPEFWGLRGKIGFSQVEKYLGFITPRAPSPIIVFGPNYLPHGTGFYFVKKKKTSVFRKNKKLKPKKKKKK

SEQ ID NO: 255316 - protein, 67 aa, Glycine max
  Clone ID: PAT_MRT3847_72572C.1.pep
NLWADLCACMVVRDDRRGRKSRGRSRSKSQHPGLLTRPLLIRGLNFFRNRLLLPRPPYPPLSSSSLK

SEQ ID NO: 255317 - protein, 75 aa, Glycine max
  Clone ID: PAT_MRT3847_72573C.1.pep
FLSIRGLFLMQAHPTCGSLEPIFHATITYNSPYVLLCSHYLDFQNKSYIVQYLCKQGIISSLHVHQRDYLQNNLL

SEQ ID NO: 255318 - protein, 122 aa, Glycine max
  Clone ID: PAT_MRT3847_72574C.1.pep
ELAASKNSPLNVRTSGTVQNGRRESHVRVRRNDQGASNANIKRELALSKERELSYEAALLEKDQKEAELQRKIEESKQREAYLENELANMWVLVAKLKKSQGAETDVSVSTKESLQLDGFDV

SEQ ID NO: 255319 - protein, 32 aa, Glycine max
  Clone ID: PAT_MRT3847_72575C.1.pep
YQALGFPPLNGTGLIYKNQNIFLDQSTVRRYL

SEQ ID NO: 255320 - protein, 87 aa, Glycine max
  Clone ID: PAT_MRT3847_72576C.1.pep
KLQEINAQAKKQIQICPERHPCGNTSGSTHKSGQGEGINFCEQTVYTALTKIGKRGQRGHLKLRPMPLLYARGEKRRRGAKKNKERK

SEQ ID NO: 255321 - protein, 95 aa, Glycine max
  Clone ID: PAT_MRT3847_72577C.1.pep
MALTSQLRNLLAALEAEEAAQKSKGKVNTYTNHGDGFQNITGTKTNSGAYSGDGNTHHATNNYGGGPAINNSGNFQGHGNGGFIGGNFDASTRNY

SEQ ID NO: 255322 - protein, 228 aa, Glycine max
  unsure (1)..(228): unsure at all Xaa locations
  Clone ID: PAT_MRT3847_72578C.1.pep
MGLLSFVFGGLGFILIGAHEALLHSSPSSQNKKTKTLFSISLVLFSSFFILNSTLSLFDAHSSNDAVGAALQLQVLSIAFVFLFYSLLPLLSLSFTLPSPLLNLVGAFAFAEEFLLFYLQRKDPSGVENRYYDLLLVPIAVCVFCTVLELGSPRSGVVAKLGRGVGLVLQGTWLIQIGLSLFSGWVAQGCDLHHVSRGNYTLRCKGHSEYHRARAIATLXFNCHLALL

SEQ ID NO: 255323 - protein, 43 aa, Glycine max
  Clone ID: PAT_MRT3847_72579C.1.pep
LKKPRKARKSARSEDAEFVNVHHGQIESQSQTPVDELNSELRA

SEQ ID NO: 255324 - protein, 121 aa, Glycine max
  Clone ID: PAT_MRT3847_7257C.1.pep
ARGFFPCFIAMCKSGCHTKGTGPEKFVVKLLPPLLGSHYVLMGHSMNSTIQKMKCSKAARANVAIFCLNSEPASDELAMEHTCRLLVLKKLNNLNVFYFIARHIGCIASCQKNGFIPGQLK

SEQ ID NO: 255325 - protein, 91 aa, Glycine max
  Clone ID: PAT_MRT3847_72580C.1.pep
PSWIMVPLALLLFFSSYYKLVGFMFFSSLLFTSLALLLSTFLLFMWKRKAEAIGFSFEEKKTPHHGRESVVAIAPTPMHKDVETIVTQAKG

SEQ ID NO: 255326 - protein, 43 aa, Glycine max
  Clone ID: PAT_MRT3847_72581C.1.pep
ELNHLFSTAQRAQTASKGTRTVICSANMLVTFYSIVMISMRVE

SEQ ID NO: 255327 - protein, 43 aa, Glycine max
  Clone ID: PAT_MRT3847_72582C.1.pep
CFAWRDTCQQWRSRVSACGPCCQPPLFKDPRLRGTRDYLRWLR

SEQ ID NO: 255328 - protein, 70 aa, Glycine max
  unsure (1)..(70): unsure at all Xaa locations
  Clone ID: PAT_MRT3847_72583C.1.pep
SXXTTYSXYHYFXXPFLLEXLAXQHLTCKCRVAGXVSXHICSLSFSAGTXXXSTLELSXNWCHSXDXXXG

SEQ ID NO: 255329 - protein, 104 aa, Glycine max
  unsure (1)..(104): unsure at all Xaa locations
  Clone ID: PAT_MRT3847_72584C.1.pep
TVVTPFCFLLGWSILDAVVWSGPWLLGCLLSQGLAGPVSLIWVVLLRGGFLGCLFFFFLWLGFYVRPGFSGPPGAFLVRVLFGRSFNMNPPLFFXLGRPQXSVL

SEQ ID NO: 255330 - protein, 51 aa, Glycine max
  Clone ID: PAT_MRT3847_72585C.1.pep
IFIFYYFIQKIYFYKELYLNRSYLIFIFNLYFILFYYFYVFFYFLVCKTTV

SEQ ID NO: 255331 - protein, 151 aa, Glycine max
  unsure (1)..(151): unsure at all Xaa locations
  Clone ID: PAT_MRT3847_72586C.1.pep
IFEGNGKRQGCHDPPQGIVRGKMDHLRQCFQVQFAACRDLRXCSKLGSMIQTLFNWLSTSENLLVXIQEKIKWADAMSEIDKKHRKDVEEKVEEVKKSIFKADIDFRGHEEICSESGGVMDYEEDRSRPKRRRHPILEDLVDKGAHWRWVL

SEQ ID NO: 255332 - protein, 241 aa, Glycine max
  unsure (1)..(241): unsure at all Xaa locations
  Clone ID: PAT_MRT3847_72587C.1.pep
VAFPPKGLVNTLSFTVSRGVRDKLQVDCRIYLWKWNARIVISDVDGTITRSDVLGQFMPLVGIDWSQTGVAHLFSAIKENGYQLLFLSARSISQAYITRQFLLNLKQDGKVLPDGPVVISPDGLFPSLYREVIRRVPHEFKIACLEDIKALFPSDSSPFYAGFGNRDTDEISYLKVGIPLGKIFIINPRGEVVVNRRVDTKSYTSLHALVNRXCFPPTSSSEQEDFNSWNFWKLPPPAMDI

SEQ ID NO: 255333 - protein, 85 aa, Glycine max
  unsure (1)..(85): unsure at all Xaa locations
  Clone ID: PAT_MRT3847_72588C.1.pep
FGSRLVSIQEKIKWADAMSEIDKKHRKDVEEKVEEVKKSIFKKLHTVSXADIDFRGHEEICSESGGVMDYEEDRSRPKRRRHPIS

SEQ ID NO: 255334 - protein, 76 aa, Glycine max
  unsure (1)..(76): unsure at all Xaa locations
  Clone ID: PAT_MRT3847_72589C.1.pep
MARTKQTXRKSTXGKXPRKQXATKAARKSAPTTGXVKKPXRYRPGXTVALXEIRXYQKSTELLIRKXPFQRLVXEX

SEQ ID NO: 255335 - protein, 36 aa, Glycine max
  Clone ID: PAT_MRT3847_7258C.1.pep
MCQTNIVLPSTFPFRQYQLTFFYLQIHNFCSYFYLY

SEQ ID NO: 255336 - protein, 58 aa, Glycine max
  Clone ID: PAT_MRT3847_72590C.1.pep
TTTTSHRFRSGVGPGWVIGCSLSRCLGFSWCLVISRLSVLGFSSGLGLSLRLGLWVGA

SEQ ID NO: 255337 - protein, 83 aa, Glycine max
  Clone ID: PAT_MRT3847_72591C.1.pep
TVTSAAVAIPSFTGLKATSGKVSAANNIPFPQFTMMGIKASHKDFTVSVVAPASRALMANHALAIDLFSRGAEMYLVFPLTKF

SEQ ID NO: 255338 - protein, 189 aa, Glycine max
  unsure (1)..(189): unsure at all Xaa locations
  Clone ID: PAT_MRT3847_72592C.1.pep
DEWKAHDFELWTTSXFDIHQPNLVYTGSDDCKFSCWDLRDKPXNVVFQSSKVHKMGVCCIEKSPHDPNTLLTGSYDEYLRVWDLRSMSKPLNKTSINLGGGVWRVKHHPFIPGLVLAACMHNGFAIVAIKGNNAEVSETYKKHDSLAYGADWQKREANHIGGNTKPLVATCSFYDKLVRVWRPGNDIVL

SEQ ID NO: 255339 - protein, 113 aa, Glycine max
  Clone ID: PAT_MRT3847_72593C.1.pep
WSVRPSHCWCFALVSLGPVVVCVVLVLGRCMLLPLLQLCRRGSFPFFVLFPCLFAFLVFQLLVGPPSPPWPSCPVGRWRVPGPGLRSPPWSCPSSLRVPRTMARGSPGFPAGP

SEQ ID NO: 255340 - protein, 43 aa, Glycine max
  Clone ID: PAT_MRT3847_72594C.1.pep
YLILTNKKNNYPFSLNKVPIISRKNQSIRLNYQKRKSQLCNNH

SEQ ID NO: 255341 - protein, 62 aa, Glycine max
  Clone ID: PAT_MRT3847_72595C.1.pep
FPDYSTSYNEVVTIELTLSSAVTYNILDISYKFLLRSCRAAIYHNTKIHLDSFLHAICTKIP

SEQ ID NO: 255342 - protein, 256 aa, Glycine max
  Clone ID: PAT_MRT3847_72596C.1.pep
IEAPPTSSATFVFSFQTLMGILIVLLILLIIHIHGNGHHKEARGNINPKRGCDLFQGNWVVDDSYPLYNTSECPFILKEFDCQKNGRPDKLYVKYRWQPKDCNLPRFNGEDFLRRLRGKNILFVGDSLSLNQWQSLTCMLHTAVPLAKYTSVRTGGLSTFIFPFSSYDVKVMFSRNAFLVDIASESIGRVLKLDSIEAGKIWKGNHILIFDSWHWWLHIGRKQPWDFIQEGNRTFKDMNRLVAYEKGLKTWAKWVE

SEQ ID NO: 255343 - protein, 62 aa, Glycine max
  Clone ID: PAT_MRT3847_72597C.1.pep
ATDGRVVHHPPLRCHRFLPRKKKKSFIVAKKLLLIIQYDPATLDQMKRNKSSSTNPGSSFWQ

SEQ ID NO: 255344 - protein, 105 aa, Glycine max
  unsure (1)..(105): unsure at all Xaa locations
  Clone ID: PAT_MRT3847_72598C.1.pep
SMWGKRGRSWSPVLVGGARIGVESLRCLLESGVEGARSFEDRSLASALSSRRRSSSLVYFYLFSCRSPPSDACSIPAHVISRLRLGFRRIKRPSQSXGVFVGVNN

SEQ ID NO: 255345 - protein, 42 aa, Glycine max
  Clone ID: PAT_MRT3847_72599C.1.pep
QLRLPPNVSSTPYWLTLPRTRIFQHGIADSKGEMQHLCTNSI

SEQ ID NO: 255346 - protein, 180 aa, Glycine max
  Clone ID: PAT_MRT3847_7259C.1.pep
MQNIPYQFSMAHLPNCKIKIILHNLKGEHWTVNSVPTTRVHTSHTLCGGWMAFVRGNNIKVGDICIFELVHECELRVRIAEVAKDGSDCQVGNLAITRPSAGHAVTSRCMPMNPKVNSKCIRKVDLSDKKWSKIGQETILSIDLKKSSRASNTSKKMGLCPQSKAAHKKLGKVFRYLLNR

SEQ ID NO: 255347 - protein, 120 aa, Glycine max
  Clone ID: PAT_MRT3847_725C.1.pep
EHCTTVRARYRDSCGCEKTKPGETGAAGGTGGGTGPQTRQLGFLLPHSNVRRCVNAPGPRRRLLAHTNNSPSIAHPSTIPCPSSCLSTCISMLASKQNTNSTSIAGPTLMSAWNVRVSSS

SEQ ID NO: 255348 - protein, 67 aa, Glycine max
  Clone ID: PAT_MRT3847_72600C.1.pep
VIIFPVLYHQFPPPIRSIAFCLKLCSLNAKANSVRCVAQSFPSVFLYNARRHCALQPRTFNPPIKPI

SEQ ID NO: 255349 - protein, 85 aa, Glycine max
  Clone ID: PAT_MRT3847_72601C.1.pep
KLAIYPRNFAQGLNWVTNQTNLPALHLGDFSGLRELTNIFTIPGFNGELKIYRDVCGYILGALLWLAPPPPPPPPPPPPPPPPPQ

SEQ ID NO: 255350 - protein, 50 aa, Glycine max
  Clone ID: PAT_MRT3847_72602C.1.pep
IKYKFPIMGFVPFYFSIWCTVLRFNVPTGEGGYACSHCIYLQPRNCECFG

SEQ ID NO: 255351 - protein, 149 aa, Glycine max
  Clone ID: PAT_MRT3847_72603C.1.pep
FPYGGKPVEELMEKPLSWVAEKVHEFLEIGLTEEHFLGLVDWVEVHRPAPGLSRIYCGHGKEEGPSFVVSSGQRFPESKVDFGWGKPVFASYHFPWGGDSGYVMPMPSSTGNGDWLVYMHLLEAHLNFMEVRAPQIFWPFSRDYHFNRH

SEQ ID NO: 255352 - protein, 58 aa, Glycine max
  Clone ID: PAT_MRT3847_72604C.1.pep
SLWMSRLLGGKKVQPQERKKVILIVVVVQDKQKLLGQIREMPPYSGWGEEFDLLWTGT

SEQ ID NO: 255353 - protein, 45 aa, Glycine max
  unsure (1)..(45): unsure at all Xaa locations
  Clone ID: PAT_MRT3847_72605C.1.pep
CLCVFDVVGGPTQSLMRVVFRIXXSPXXSVTFXNTKKRYCLTFSL

SEQ ID NO: 255354 - protein, 152 aa, Glycine max
  Clone ID: PAT_MRT3847_72606C.1.pep
MLCRRSSKNGVGSGSVPVHLNVYDLTPINGYAYWFGLGVYHSGVQVHDVEFAFGAHEYPSTGIFEGEPKRCEGFAFRKTILIGKTDMGPCEVRAVMEELAAEYRGNAYNLITKNCNHFCNDACLRLTGNPIPSWVNRLARIGFMCNCVLPVT

SEQ ID NO: 255355 - protein, 102 aa, Glycine max
  unsure (1)..(102): unsure at all Xaa locations
  Clone ID: PAT_MRT3847_72607C.1.pep
MVDHGGVPVEVGGEAGYAVRNARKTELVEAPWKEAPTMAHLFEQSCDKYSHNPFLGTRKLIRKEFVTSSDGRKFEKLHLXNYEWETYGEVFSRVSNFASGLL

SEQ ID NO: 255356 - protein, 103 aa, Glycine max
  unsure (1)..(103): unsure at all Xaa locations
  Clone ID: PAT_MRT3847_72608C.1.pep
RPPXIKFPTFFISIFTLSXQSIPNSPFLTQLGLASXFQNLILLPNLXKSSLTNITTNFSNLFIYLTNIYKKFYIFLIQNIYSHFILFPLILPLYFKTSLHYLH

SEQ ID NO: 255357 - protein, 117 aa, Glycine max
  Clone ID: PAT_MRT3847_72609C.1.pep
IWILKASACQRRFVFQSPREMYKRNGELLEALCINSTNQREAAVAGNRKGIMFFHWEDEIPFSGKSDDLLWATADWPQNGWAGSESTPAPTCVSPGVGLGSKKGAHLGLGGATIGWT

SEQ ID NO: 255358 - protein, 227 aa, Glycine max
  Clone ID: PAT_MRT3847_7260C.1.pep
YHNYWELETLREEDDLVIAESLANELSKWNYEVHVVDNFEKIMEDFRRVEPQLVLLDINLPTLNGFHWCQEMRKVSHVPIMFISSRTDNMDQILAIQMGGDDFIEKPFNLSLTVAKIQALLRRTYDLSIARDEIAVKGCKLIVDEAKLSKDNEHVQLSLTELQILKLLFQNENKYVSRTALIEKCWESENFIDDNTLAVNMTRLRKKLLSIGVDDLIETKKNVGYRV

SEQ ID NO: 255359 - protein, 85 aa, Glycine max
  unsure (1)..(85): unsure at all Xaa locations
  Clone ID: PAT_MRT3847_72610C.1.pep
LGPLCGLWSCCQCAAWLCLWPNVPSEGCAPCLSGSVWCFEGCFFSVVALRVFFVPFWLCLXLVVFFXVLSCFFLPGGGLSFVFLV

SEQ ID NO: 255360 - protein, 482 aa, Glycine max
  Clone ID: PAT_MRT3847_72611C.1.pep
VRIPGSTHASGKYKRNGELLEALCINSTDQREAAVAGNRKGIMFFHLEDEIPFSAKSDDLLWATADWPQNGWAGSESTPAPTCVSPGVGLGSKKGAHLGLDGATIGVDSSAWPSNDLTGGKVLGRLGYTGIGASGLGWEVQQDFEDFVDPLATLENISTRALSSHPMRPFFLVGSSNTHIYLWEFNKDKATATYGVLPAANVPPPYALASISALQFDHFGHRFASAALDGTVCTWQLEVGGRSNVRPTESSLCFNGHASDVTYFSSSGSIIAVAGYSSNGVNVVIWDTLAPPTTSRASILCHEGGAHTVSVFDNHVGSGSVSPLIVTGGKGGDVGLHDFRYIATGKAKRHKRADNIGQSSVSSLTRDKDQNVDGMLWYIPKAHSGSVTKVVTIPNTSLFLTGSTDGDVKLWDAQSTKLIHHWSKIHEKHTFLQPSSRGFGGVVRAAVTDIQVVPHGFLSCGGDGIVKLVRLDNHLRAHGIEL

SEQ ID NO: 255361 - protein, 50 aa, Glycine max
  Clone ID: PAT_MRT3847_72612C.1.pep
NNLASSRKTLVSGRAIIVSSYEIPLEAGNIFERKLVFVLGRKNDSNQNEP

SEQ ID NO: 255362 - protein, 169 aa, Glycine max
  Clone ID: PAT_MRT3847_72613C.1.pep
MKKLSFSIPTAKPQSVDTSTTRKDDDSDGTKQYITEFDPSKPANPKITIPPIQNQWNPQQDNEHSTTRWRRTPEETELLRKLKLEEDLQRLPEDQGLEEFKDVPVEVFGEALLAGYGWTEGMGIGKKAKEDVKVVQVKGRTSREGLGFVANASGNNLNHCDHHLCNLQF

SEQ ID NO: 255363 - protein, 835 aa, Glycine max
  unsure (1)..(835): unsure at all Xaa locations
  Clone ID: PAT_MRT3847_72614C.1.pep
ITCPPTRPPTRAANFRIQLSSICKDLVKTHLDILDLYEYYLHFSLAWLQKNSEALLYMLEPFLVAQSNDRNPYNIDIVNLKKLIPKIGQLLAQTSFMSNIQNLQLSERAEDKLVADIKHSIPDDERWKIIGTCLWQHMSRFMIFNLNLVLAKLEDGKLSGPFHRKYTYGESYLINMDSESISLPEKIRLVLFSLCDLLMTTVTHISSYHVKQQAEFLWQKVGNDLNVMTLQWLKQKSEFSQNQNLDILELGNMKDNYSVNQLLWDRCADPKLISDCFAQEKLNWPNDLDQMNTKGWNDLSIIMTGLHKTDDTCGDGCKLSTRSSNHEVGTPVKGTSLSGNASARSNQKDITYTNFAVFQSPREMYKRNGELLEALCINLVTLPRSCSLLTGSTGRDVXFIGWTKIPFSRKLDDLLXATADWPQNGWGVSXCSSASKCVSPGFGLGSKKMAHLGMGRATIGVNSSAWPRNDLTVGGVLVVLVYTWIGLPVLGYKIQQEFEVFAVXIATFINKSTRALYSPPVRTFFSIGIINTHVYLSKFHKDXASATYRVQNNNNVLKPFAPAXIXAWQHYHFGHPFSSAALDGNVRTWKLKVGXRSNVRPTKSFLCYKGLVSDFTNFSSFVLIIAMVCSCTKSLVSVRSIIVVTHENFSRLALFLRQNLTVFLFYNTWLNCLMYVSIVNSGKRSDVGLHDFRYIATGKAKRHKRADNIGQSSVSSLTRDKDQNVDGMLWYIPKAHSGSVTKVVTIPNTSLFLTGSTDGDVKLWDAQSTKLIHHWSKIHEKHTFLQPSSRGFGGVVRAAVTDIQVVPHGFLSCGGDGIVKLVRLDNHLRAHGIEL

SEQ ID NO: 255364 - protein, 377 aa, Glycine max
  unsure (1)..(377): unsure at all Xaa locations
  Clone ID: PAT_MRT3847_72615C.1.pep
DLTHDCCVESLPSSNSISRSALQTENAFEKQKGDNSFRLCEEYNGCQSGAIEKCEQQSPYTHSRSESFSSSISSTDCAHAVSKEVSGISNKLQNVKVLSGEITKVCPPSPGNKQSGISPWLSGTQFQSPGSNVGVLENGNNNNSHSRFDSHPVFNSGSDELTTSSHVIRLIEDLHSQSIETQTAAAEELRLLTKHNKENRIIVGQYGAVAPLLSLLYSDLQVTQEHAVTALLNLSINEDNKALIMEAGAIEPLIHVLSTGNDSAKENSAATIFSLSIIENNKARIGRSGAVKALVDLLASXTLRGKKDAATALFNLSIFHENKARIVQAGAVKVLVWLMDHAEXMVDKXAVALLSNLSTIXRGRLEIARERGIPLLV

SEQ ID NO: 255365 - protein, 39 aa, Glycine max
  Clone ID: PAT_MRT3847_72616C.1.pep
FALFENVFRFYPCLCDFLFFFFFFFFFFFFFFFFFFFFF

SEQ ID NO: 255366 - protein, 63 aa, Glycine max
  Clone ID: PAT_MRT3847_72617C.1.pep
SSVWGLSLYTHPQKNRPEPPHKHCFSKADRATAFLNKIGNLLKNAAATHIIQDFSGGSGLHFF

SEQ ID NO: 255367 - protein, 44 aa, Glycine max
  Clone ID: PAT_MRT3847_72618C.1.pep
PSSNYITGDVITPKTLAFLSDVTPQKALLRERMDALLGYEGEKL

SEQ ID NO: 255368 - protein, 54 aa, Glycine max
  unsure (1)..(54): unsure at all Xaa locations
  Clone ID: PAT_MRT3847_72619C.1.pep
ISLLQVGFFHLAWGHNLXTFKTLSLPNLIXFQHIPLFPTFLISKKPSPISLPNN

SEQ ID NO: 255369 - protein, 219 aa, Glycine max
  Clone ID: PAT_MRT3847_7261C.1.pep
MRIVGLTGGIASGKSTVSNLFKSHDVPIVDADVVAREVLMKGSGGWKKVVAAFGDEILLENGEVNRPRLGQIVFSDPDKRQFLNRLLAPYISRGIFWKVLKLWMKGYKVIVLDVPLLFEAKMDKFTKPIIVVWVDPETQIQRLLARDKSSEEDARNRINAQMSLDVKRGKADIVIDNTHSLDDLNRLFEPGREFWPHLLSYSSGFFLFMKTFNNHIPIS

SEQ ID NO: 255370 - protein, 59 aa, Glycine max
  Clone ID: PAT_MRT3847_72620C.1.pep
SGLIFYTEGYFIKGGRILFCVLSLVISAIVHTLIINVLSSKSTYFNFVLPQTHILIIIV

SEQ ID NO: 255371 - protein, 84 aa, Glycine max
  Clone ID: PAT_MRT3847_72621C.1.pep
PTRTNDAGDLSLGQGVPQARAIRYKNSDMLAKTYISNRADAHRKGKRTYSDVATYENRSAKAQTSHTKTASDLQAEEDRPKAIN

SEQ ID NO: 255372 - protein, 64 aa, Glycine max
  unsure (1)..(64): unsure at all Xaa locations
  Clone ID: PAT_MRT3847_72622C.1.pep
QKSSEIYGTQVFVTVRAIQESKISHHYEEGILKSLFHNYARLVDQXMFKEYIRPISFVGVLRKK

SEQ ID NO: 255373 - protein, 47 aa, Glycine max
  Clone ID: PAT_MRT3847_72623C.1.pep
VSCTPSPLQLALVHIYAYMPDMNAQSIESFRPPFNLQRLGLWEQSSI

SEQ ID NO: 255374 - protein, 35 aa, Glycine max
  Clone ID: PAT_MRT3847_72624C.1.pep
SKLLELTPLILLFQKPQLLGITNNKSENGVQLHPV

SEQ ID NO: 255375 - protein, 199 aa, Glycine max
  unsure (1)..(199): unsure at all Xaa locations
  Clone ID: PAT_MRT3847_72625C.1.pep
MDLLCNAYSNASDDEEEEQPKRQRVSLSSPNPLKRHLPLSSPPSFNNQTQAPMPGRYISKRXARIDGPTPAPLPEPVPVPSPFTLSGSILDADIHHNILSLLKSKAKGHQSPNLISEKLSATLYGHTKAVNAIHWSSTHAHLLASAGMDHAACIWNVWSRNQKKACVLNFHNAAVKDVKWSHQGHFLLSCGYDCTSRFI

SEQ ID NO: 255376 - protein, 89 aa, Glycine max
  unsure (1)..(89): unsure at all Xaa locations
  Clone ID: PAT_MRT3847_72626C.1.pep
VILFFFFFSRTRREYSKQRFIMQISRPLYIFEQWRSVIRKRRRRPGASPSRDGFKTXELAVGQNKTTFFWGWGPTIFLRXPENHHGLIT

SEQ ID NO: 255377 - protein, 66 aa, Glycine max
  unsure (1)..(66): unsure at all Xaa locations
  Clone ID: PAT_MRT3847_72627C.1.pep
LFFLRRLKLSLGTKXLQYLQKIIFIGLXXXNXXXXXGKDXXIXXNFFRLLGDFRHYIEKQHYCITS

SEQ ID NO: 255378 - protein, 207 aa, Glycine max
  Clone ID: PAT_MRT3847_72628C.1.pep
RHTFVLSHDHVEKLKKWVTIKCKNHGLEIPHLTTFVVRCSLIWVCKVKSEEAEVGTILPNNDESYILAFMADCRNRPECSIPLEYFGNCLVCGNAEVKRGKLVGENGVVEAALAIGSEGTLVPPAASAGPPSLTPIFAHVATVGVLWSGLAGAPRRELVRADGGGGAPMASGGVLGHLQRETSQGAETLMSNLTEFAHMTILAGSPK

SEQ ID NO: 255379 - protein, 34 aa, Glycine max
  Clone ID: PAT_MRT3847_72629C.1.pep
MCCNDTSTIGLQFPTIIDKRWFFFRHRSSLRLGH

SEQ ID NO: 255380 - protein, 74 aa, Glycine max
  Clone ID: PAT_MRT3847_7262C.1.pep
ATDEGLRDLSSNHTHLHHQHYSFASARTYTTLALFKSKTKAVSVKTTVTKPKLNDEDGFFGTSGRSCVAQQNEL

SEQ ID NO: 255381 - protein, 39 aa, Glycine max
  Clone ID: PAT_MRT3847_72630C.1.pep
KTQSGTRHNEIHNPTHTRQSKLFKKQRNLTSGVKKAKPH

SEQ ID NO: 255382 - protein, 79 aa, Glycine max
  unsure (1)..(79): unsure at all Xaa locations
  Clone ID: PAT_MRT3847_72631C.1.pep
SSEFGSSLSVKVLXXXAAXTXXXXGQCHAXDMFPXRMNTXGXGARXPEVKCASXRLAVEAXXXFXFETIPEEXVXXTKA

SEQ ID NO: 255383 - protein, 164 aa, Glycine max
  unsure (1)..(164): unsure at all Xaa locations
  Clone ID: PAT_MRT3847_72632C.1.pep
MKPELYEISDDEWENHSFKPSRVLKRPRTSSPPSPPPVESFAYTSTSKVDVSSENDDDSDCVEIAPEAANFRQNLDDLEDADVDDEPVPASRGRRFIIDEEEEEDGEEENGGRDGHVAEAGGAEXDRGGGGGGRKLRNGVXRDVGGRAVLRGARISAELKGELF

SEQ ID NO: 255384 - protein, 53 aa, Glycine max
  Clone ID: PAT_MRT3847_72633C.1.pep
YPTEHNLKRPTLHKGTGSPTCCSLKQRGLAQDSYSTHLKDNHNVEGCSSCTLL

SEQ ID NO: 255385 - protein, 81 aa, Glycine max
  Clone ID: PAT_MRT3847_72634C.1.pep
SLFRSNGVCQALVFRSIGASCCMFPHTIYLCVGALFFDHNSLYLIVIEFLMHSYKILCNITRSLEGSDWSQLASCPIGLFN

SEQ ID NO: 255386 - protein, 93 aa, Glycine max
  Clone ID: PAT_MRT3847_72635C.1.pep
SIVYKTGSTYLPCVHFSYDQGDCPDDVETGDKLAVAEIFYLLCMPTSVRHSTGVVSSLSPYSSPGLVWNCKCRLSLIGCSSLCAASHTASSLS

SEQ ID NO: 255387 - protein, 245 aa, Glycine max
  Clone ID: PAT_MRT3847_72636C.1.pep
GTYRCPWKKDVSGNKITGIQFSQKNSHRIMITSEDSKICIFDGTELVQKYKGLPKSGSQMSGSFTSSGKNIISVGEDSHVYIWNFDDMGNASSKQTKSERSCEYFFSKGVTVAIPWSGMKADQRDSSGNYSHYMQQYGSSNDLAHHSSSNHQLEAASGARDSKRFSLGNWFSIDGTCRGSMTWPEEKLPSWDLPIAEVEFGHQQLCNKDTSHEKHVSETWGLSIVAAGCDGTIKTFHNFGFPVRL

SEQ ID NO: 255388 - protein, 214 aa, Glycine max
  Clone ID: PAT_MRT3847_72637C.1.pep
PPPYYYKSPPPPDPSPPPPYYYKSPPPPSPSPPPPYYYKSPPPPSPSPPPPYYYKSPPPPDPSPPPSYYYKSPPPPDPSPPPPYYYKSPPPPSPSPPPPYYYKSPPPPSPSPPPHYYYKSPPPPDPSPPPPYYYRSPPPPSPSPPPPYYYKSPPPPSPSPPPPYYYKSPPPPSPVSHPPYYYKSPPPSTPSPPPPYQYVSPPPPTKSPPPPIYK

SEQ ID NO: 255389 - protein, 467 aa, Glycine max
  unsure (1)..(467): unsure at all Xaa locations
  Clone ID: PAT_MRT3847_72638C.1.pep
RVFLFGGTVNRKNHNEAIPTERVFKIPNVDKVIKEGKKAPTKLRDIKLNSIGYNLNVDMYTPSGWPXVSGDVLKVLAGKVSAEYDFYEACNMDLDDEDGNPSQSEFLPXKSTYGTAFSCFPTEEEGRDACHAIAALCEVCSIESLISNFILPLQGHNISGKDHRVHCSININTETGRLSARRPNLQNQPALEKDRYKIRQAFIAAPGNSLIVADYGQLELRILAHLANCKSMLEAFEAGGDFHSRTAMNMYPHIREAVEKKEVLLEWHPQPGEDKPPVPLLKDAFASERRKAKMLNFSIAYGKTPVGLSKDWKVSVKEAKKTVDLWYNDRKEVLQWQEERKKEARVLHCVYTLLGRARRFPLMAQANTYQKGHIERAAINTPVQGSAADVAMCAMLQISKNKRLKELGWKLLSQVHDEVLLEGPTESAEVAKSIVVECMSKPFNGKNILKVDLSVDAKCAQNWYSGK

SEQ ID NO: 255390 - protein, 53 aa, Glycine max
  Clone ID: PAT_MRT3847_72639C.1.pep
VHDEVILEGPTESSEVAKSIVIECMSKPFNGKNILKVDLSVDAKCAQNWYSGK

SEQ ID NO: 255391 - protein, 103 aa, Glycine max
  unsure (1)..(103): unsure at all Xaa locations
  Clone ID: PAT_MRT3847_7263C.1.pep
MRIVGLTGGIASGKSTVSNLFKSHDVPIVDADVVAREVLMKGSGGWKKVVAAFGDEILLENGEVNRPRLGQIVFSDPDKRQFLNRXLKLWMKGYKVIVLDVPL

SEQ ID NO: 255392 - protein, 69 aa, Glycine max
  Clone ID: PAT_MRT3847_72640C.1.pep
ALPIFLNSLVHRAAAILILVILIFMFGEILPQAICTRYGLTVGATLAPLVCVLLIVFFLFSYPIRKVCL

SEQ ID NO: 255393 - protein, 90 aa, Glycine max
  Clone ID: PAT_MRT3847_72641C.1.pep
MASKQEPKLSLTLLVDKERNCVVVAEASGDLIDILFSFLTLPLGTIIRLVSKKQGHDEADEIGCINNLYQSLENSGDEVFWNHICKRMLL

SEQ ID NO: 255394 - protein, 137 aa, Glycine max
  unsure (1)..(137): unsure at all Xaa locations
  Clone ID: PAT_MRT3847_72642C.1.pep
AYFPPVVLDATPXLGVNFGDVCADVPRNSTFKSGDMVTASFWSACPRNDLMTEGTFALVEFLQEKDAWIPAYDDDFXLRYKWSRPSKLSFRSKGPLEWMIPQGVTPGVYRLSHFGAAKGLFGSIHPFTGSSPAFVVA

SEQ ID NO: 255395 - protein, 96 aa, Glycine max
  unsure (1)..(96): unsure at all Xaa locations
  Clone ID: PAT_MRT3847_72643C.1.pep
GSDHDGTGHEQCVPVRVXRYRSWRWSXXEXDARETEDAMHVRVDMXGLGKEYVKISVKLITLIIKGQGVKEVDEQESDGRSTSRSVFPSKLYNIEH

SEQ ID NO: 255396 - protein, 90 aa, Glycine max
  Clone ID: PAT_MRT3847_72644C.1.pep
PVTTIHVILPKKTKRNTQEFKSGKSDKNMIVSVYTGLSLNISHINTTTMNPFIFHSSETSIKNLTFETINEPYSMQYTITTLTITKVLSN

SEQ ID NO: 255397 - protein, 164 aa, Glycine max
  unsure (1)..(164): unsure at all Xaa locations
  Clone ID: PAT_MRT3847_72645C.1.pep
MGTRVVYEEKLRTGNLHHDPTINPGLGSARCPRCLSLLNPNFVCLSLLNPNFERGEWTITPVLHDATAVAGSGIGGMLGFVHGFNTGLPLLQNGLKGPKWLPFVVGIPPLLIFSGLSAAFGGYVLPKFTQLTVTSYYAXSSASHYGISLLTRHIGEYSSKLGST

SEQ ID NO: 255398 - protein, 186 aa, Glycine max
  Clone ID: PAT_MRT3847_72646C.1.pep
ALASDPLDALDVMGTREVYEEKLRTGNLHHDPTINPGLGSARCPRCLFSPQPYMLTSASRSITPFLHETDAIGPSLLGVVRRPTAVSGSGIGGMLGFVHGFNTGLSLLQNGLKGPKWLPFVVGIPPLLIFSGLSAAFGGYVLPKFTQLTVTSYYASSSASHYGISLLTRHIEENYSSKTRQHLKRL

SEQ ID NO: 255399 - protein, 162 aa, Glycine max
  unsure (1)..(162): unsure at all Xaa locations
  Clone ID: PAT_MRT3847_72647C.1.pep
QTFFFIKGSGVCLSLGVFLGVADCLPFYDKDLVSVVCLSDLYDTWLSHHTVTQSLGDKHXRNNLPKANVMHIHSTIRLDKPSLLKLGTYADVPSHPVRTAYADSEDESYLMMKAMPPVPWASLVQNVRRGSAVHHWLNNSAETDVKNHSLCESDDACSAVES

SEQ ID NO: 255400 - protein, 45 aa, Glycine max
  unsure (1)..(45): unsure at all Xaa locations
  Clone ID: PAT_MRT3847_72648C.1.pep
YIXPPXKKKMWEIVWARAPQNHLLSSFRYSLQCTSYRCFLTSFHF

SEQ ID NO: 255401 - protein, 118 aa, Glycine max
  Clone ID: PAT_MRT3847_72649C.1.pep
MLNTLCGLCGSMAHNLMHMTKADLLYQLHDQNAEHCLNPFANERVCAIIMIRMIYVERRIRAKTKAKVFEQLLASIQYPVMKENAFDAVYESQNTQEQIQAYAYDVTRAIAARMNLDE

SEQ ID NO: 255402 - protein, 236 aa, Glycine max
  Clone ID: PAT_MRT3847_7264C.1.pep
MRIVGLTGGIASGKSTVSNLFKSHDVPVVDADIVAREVLRKGSGGWKKVVAAFGDEILLENGEVNRPSLGQIVFSDPDKRQFLNRLLAPYISRGIFWEILKLWMKGYKVIVLDVPLLFEAKMDRFTKPVIVVWVDPETQIQRLLARDKSGEEDARNRINAQMSLDVKRGKANIVIDNTGSLDDLNQQFQKVLVEVTRPLTWTEFSCSRQGVFAILASFTSGVVLFMKTFNNHTHIS

SEQ ID NO: 255403 - protein, 69 aa, Glycine max
  Clone ID: PAT_MRT3847_72650C.1.pep
TAKGDSLLEGQKGTSCPIQLAQGVKGKKGIFTPGKLCWYPLGRKLPTGHCRLAGAHPNHGFHPTRPPGT

SEQ ID NO: 255404 - protein, 184 aa, Glycine max
  unsure (1)..(184): unsure at all Xaa locations
  Clone ID: PAT_MRT3847_72651C.1.pep
TDKHLSIVAFRRKSVCWSNDSFHREKRVLAIGERDTSSSESKVVTQLQTHIKLLLRRHVATLDVGLHSKAIHHFSKILESHCDALXGFLMECYMYKASAHCYASXNHQLQSNPHPKPLLETMCCLFFQIHXCFPVCVHYLEHLKLLYNTILYDHKLLHYFDTRSGCFDSGSAMSNEGFYLPQRE

SEQ ID NO: 255405 - protein, 48 aa, Glycine max
  Clone ID: PAT_MRT3847_72652C.1.pep
LLHGPILFTGPPVSAPNCFRIGQLSHAFFPSGDPCPAHKRNPCLVMLV

SEQ ID NO: 255406 - protein, 52 aa, Glycine max
  Clone ID: PAT_MRT3847_72653C.1.pep
VLKSKARSLQLQLRDRYRVHVYLTLEPWAHPPHLYSIRRWVVLVDPRLLAQA

SEQ ID NO: 255407 - protein, 80 aa, Glycine max
  Clone ID: PAT_MRT3847_72654C.1.pep
KLKELIGIMKDKASQGKAAILSKRATLSLLRATSHDSFAPPTRDHLSTLLSSGDGSRATASDAVDLLTGRLQTTQSSAWR

SEQ ID NO: 255408 - protein, 170 aa, Glycine max
  Clone ID: PAT_MRT3847_72655C.1.pep
SISMRPSYTCTRCLSAVKSSRTQLRPTQTFRPFAQNVLSQRNHSTKSPTQPKLASPRRALSTTPNRSFEKAFEPFEYIDPEGNKRTLVLTEDNLFNSFTKSPIPQIRKRAAFMRQHAYCPHPDHKPTRAAKNEMDLEARKSSETGSPPAHVDFECPDCGIPVYCCEEHWA

SEQ ID NO: 255409 - protein, 76 aa, Glycine max
  Clone ID: PAT_MRT3847_72656C.1.pep
PLQLKEHCLIHDPSCLIISQCLAHPFQPTKFALYLDNQTLPIHIPAPNLEYAKPKTMIQALTDPYWHLASSLAIRV

SEQ ID NO: 255410 - protein, 119 aa, Glycine max
  unsure (1)..(119): unsure at all Xaa locations
  Clone ID: PAT_MRT3847_72657C.1.pep
LILFAGQPPPHSLFSAPRKGAPQSPQDNFRKKKPGPTSPIPSPMDPCFXSPPGLGPVGGNFSISTPGGFPPGGXPAHPGARETQPPVIVGDXPPAPGPAASFSAPGPHPMDQPAGKGDR

SEQ ID NO: 255411 - protein, 84 aa, Glycine max
  Clone ID: PAT_MRT3847_72658C.1.pep
RFHLETLFHLLGSSRLRHHTNRFMIAVVFIVFNGPHLCIRRHKVLCCSWCSVKCKCYGLVKQIGLNSCKTFLCMYSVTFYRRST

SEQ ID NO: 255412 - protein, 84 aa, Glycine max
  Clone ID: PAT_MRT3847_72659C.1.pep
INIAIEGNSPGEKPLEVSPTQASATGSPHAHRRGRGSVSENLGMTFKRVTERMRTPAVGPSAPNLHQSTALSGLLTRVFLSSLS

SEQ ID NO: 255413 - protein, 176 aa, Glycine max
  Clone ID: PAT_MRT3847_7265C.1.pep
RIPEWFDHCSSERSITFWGRERFPRICVCVSFGMLENSLHHHFQVTFCIVINGHKRILSNRCYDWSVQTDHVWLFDLTALVSYEDLRGTLVKSDWNHVEIEMEWNCCIQGDHGPTRMAIVKWYGIHVYRQESKMEDISFTNPKNLQENSTSKRVGTEVLDSSEKSQKKLKAISQWD

SEQ ID NO: 255414 - protein, 57 aa, Glycine max
  Clone ID: PAT_MRT3847_72660C.1.pep
SGQHIESSKPYPSSGKSSSSISERYAIVPDETASGSQPTTSEEGNRHDTSVPESDVN

SEQ ID NO: 255415 - protein, 46 aa, Glycine max
  Clone ID: PAT_MRT3847_72661C.1.pep
MVRKLLSRVPHLYSFYCFNKFKCLPYSFFSAKCAMNLALTFLNILF

SEQ ID NO: 255416 - protein, 167 aa, Glycine max
  Clone ID: PAT_MRT3847_72662C.1.pep
GQSCPLSFKGSPYWMAPEVIKNSNGCNLAVDIWSLGCTVLEMATTKPPWSQYEGVAAMFKIGNSKELPTIPDHLSCEGKDFVRKCLQRNPHNRPSASELLDHPFVKYAAPLERPILGPESPSDPAVSGITQGATTSGIGQGRNPSKLDSDRLSLHSSKGLKTNPHAS

SEQ ID NO: 255417 - protein, 94 aa, Glycine max
  unsure (1)..(94): unsure at all Xaa locations
  Clone ID: PAT_MRT3847_72663C.1.pep
CIISSLSVSKNLNLLAKSYPTVSXDYQKAVEKAKNKLIGFIAEKRCAPLMLLLARHSAGTYDVSLKTVGPFLTIKHPSDLAHVAYIILDFYDSA

SEQ ID NO: 255418 - protein, 278 aa, Glycine max
  unsure (1)..(278): unsure at all Xaa locations
  Clone ID: PAT_MRT3847_72664C.1.pep
MKPCLRTKPLLLLLSLLLLHNITFVLSDDSSRKNTFREREASDDSLGYPEIDEDALVNSKCPKNLELRWQTEVSSSIYANPLIADINSDGKLEIVVPSFVHYLEVLEGADGDKMPGWPAFHQSTVHSSPLLYDIDKDGVREIALATYNGEVLFFRVSGYMMSDKLEVPRRRVLKKWFVGLDPDPVDRSHPDVHDDQLIQDATIKNSMSQMNGSRHEAKSSAATSTENHXTQKNLSNPEPEKKINGSQVDESIKVPNPEPEKKIYGSQIDEIIWEDSCS

SEQ ID NO: 255419 - protein, 86 aa, Glycine max
  Clone ID: PAT_MRT3847_72665C.1.pep
GRLRNDNLRSICWAHRDVALVTGDALYRRQLRNALHRWMKGLRRFGKRLHDIGASIHRVISSFMCHRWLFHRRENHLRLVDLSSQV

SEQ ID NO: 255420 - protein, 451 aa, Glycine max
  unsure (1)..(451): unsure at all Xaa locations
  Clone ID: PAT_MRT3847_72666C.1.pep
MGSLRFRLFTTLLLNKMPAFDIDIGKYVAGGIVVFNLDTKQVKWTAELDLSTDTSNFRAYIYSSPTVVDLDGDGNLDILVGTSYGLFYVLDHHGKVRQKFPLEMAEIQGAVVAADVNDDGKIELVTADTHGNVAVWTPKGDLIWEKHLKSLIPQXPTVGDVDGDGHTELVVPTLSGKIHVLDGRDGSSIGRYPYQTHGRIMNQVLLVDLSKDKEKKKGLTIVTTSFDGYLYLIDGPTGCADAVDIGETSYSMVLADNVDGGDDLDLITTMNGNVFCFSTPSPPLLKAWRLPSQGRNNVANRYNREGIYVTHPSRAFHDEEGKSFWVEIEIXDNYSELSGHQGPYKVTTSLLVPGNYQAERTIKLYNTYDQQGKSRXKLPTVSARTLXTVLLEIVDRNGLYFSDDFSLTFHMHNYKLLKWLLVLPMLGMFGVLVILHLQGSMRLPSFSRNID

SEQ ID NO: 255421 - protein, 129 aa, Glycine max
  Clone ID: PAT_MRT3847_72667C.1.pep
MSSAGVSTLSVVPTEPLLSPKAFPFPIPSHLSLEDKSIFIYLSFSGSLTPIRVMEWDTIESVKFKIQRCESLPFLTNKQKLVYAGRELARSDTPLKDYGVTDGNVLHLVIKLSELQVINVKTSCGKEFT

SEQ ID NO: 255422 - protein, 126 aa, Glycine max
  unsure (1)..(126): unsure at all Xaa locations
  Clone ID: PAT_MRT3847_72668C.1.pep
SINSFNKNLYSLYVSTQVKGTMGYLDPDYYTSQKLTEKSDVYSFGVLILELITARKPIERGKYIVKVVRSTIDKTKALYGFPQIIDPAICSGSTLEGFEKFVAPPMECVXDSGADRPPMSDVVKEI

SEQ ID NO: 255423 - protein, 397 aa, Glycine max
  unsure (1)..(397): unsure at all Xaa locations
  Clone ID: PAT_MRT3847_72669C.1.pep
ARKKINGSQVDESIKVPTVVDNSSVNAGSLETVHADNKTSTGRRLLEDNNSKGAVQGSSESKVKEGIHAATVENDEGLDADADSSFELFRNSEDLADEYSYDYDDYVDETMWGDEEWTEVKHEKLEDYVNVDSHILCTPVIADIDNDGVSEMIVAVSYFFDHEYYDNQEHRKELGDIDIGKYVAGGIVVFNLDTKQVKWTAELDLSTDTSNFRAYIYSSPTVVDLDGDGNLDILVGTSYGLFYVLDHHGKVRQKFPLEMAEIQGAVVAADVNDDGKIELVTADTHGNVAVWTPKGDLIWEKHLKSLIPQGPTVGDVDGDGHTELVVPTLSGKIHVLDGRDGSSIXRYPYXTHGRIMNQVLLVDLSKDKEKKKGLTIGTTSFDGYLYLIDGPTGCADA

SEQ ID NO: 255424 - protein, 75 aa, Glycine max
  Clone ID: PAT_MRT3847_7266C.1.pep
KTQKKGFFPFNHRHPFPSPSSNTRPTLILYKIISLPYLEDKLFFFYPPPEFLWKPPSGFNTFGPPPWLFFSPLNI

SEQ ID NO: 255425 - protein, 94 aa, Glycine max
  Clone ID: PAT_MRT3847_72670C.1.pep
ESFIRTHYVQSECSVQTTASCFLLSAYIRCVPRFRRRRRTIHLIVYHCIGSADMGFVVPDLHTRWLQSCRKGRPEHPKQHNRNPDGELTTTCNC

SEQ ID NO: 255426 - protein, 45 aa, Glycine max
  Clone ID: PAT_MRT3847_72671C.1.pep
IGDATPHPYTHSNISKQGGYELYRLQSTGYRSLSLKIEHLTQLVD

SEQ ID NO: 255427 - protein, 73 aa, Glycine max
  Clone ID: PAT_MRT3847_72672C.1.pep
SRFIGFYARNSAFASELGCVLFPIVCFSIVSSRACLNKLIGWFCDFDAWGPQWNLISAIAVEQMMVFLLPINV

SEQ ID NO: 255428 - protein, 156 aa, Glycine max
  unsure (1)..(156): unsure at all Xaa locations
  Clone ID: PAT_MRT3847_72673C.1.pep
LEGKCEAVPDTLIRFFNGNIVGAQQFAHAAITDGSFNPSIDYASPIHGDGHGSDPDSIAARNNGLPVRMNGLEFSRASGMASRARIADYXASYSLVGGFIADVVAAFDQAVSDGVDILNLSAGPDCPTAGTITALSNPIDATLFGAEQTGVCVAQA

SEQ ID NO: 255429 - protein, 283 aa, Glycine max
  unsure (1)..(283): unsure at all Xaa locations
  Clone ID: PAT_MRT3847_72674C.1.pep
MDHTPAAQRRLKAIHAHLTATADESPSHLRSNPTAGEFXLRFDLYFWAEQGYSVVLPEKLQTGKWNVYRSVRSPLQLVTKFPNHPEIGTLHDNFVRSVDTFRDYKYLGTRVRVDGTVGEYKWMTYGEAGTARSAIGSGLIYHGIEKGSSIGLYFINRPEWLIVDHACSAYSFVSVPLYDTLGPDAVKYIVSHAAVQVIFCVPETLNLLLSYLSDIPTVRLIVVVGGMDDQIPFIPSSTGVQGITYSKLLNQGPSNLQPFCPTKTGDFAPFATQLYTGTPKVLS

SEQ ID NO: 255430 - protein, 47 aa, Glycine max
  Clone ID: PAT_MRT3847_72675C.1.pep
HVELELFFFREKVMAEQHQVIHVPAIDKKADILTKARTPSNLTTYRS

SEQ ID NO: 255431 - protein, 85 aa, Glycine max
  unsure (1)..(85): unsure at all Xaa locations
  Clone ID: PAT_MRT3847_72676C.1.pep
MQSDVMRFLHQMRRWEYWQXPSIARLTRFTHIYXARHLGLMANLAYAIYHVLVRRCGRXGHVSKGIVYGKPTNHGVTXLKFQRIK

SEQ ID NO: 255432 - protein, 108 aa, Glycine max
  unsure (1)..(108): unsure at all Xaa locations
  Clone ID: PAT_MRT3847_72677C.1.pep
MTTRFKMIMTTRGHVCSCHGXRIVKHRKHPDSRDNVSGMHHHRVLLDKYHPGFFGKVAMRYFHMLHIKFYXAIVYIDMLWSLLLYEALDMATADNAPLLDVTQLCCFK

SEQ ID NO: 255433 - protein, 195 aa, Glycine max
  Clone ID: PAT_MRT3847_72678C.1.pep
QASGTFMPALGTVFKRLGFPPIELDNPHVPLPRRHVDRRPPLGVHRIHFQLLAVVAVALQLKLHRVDSVHCRGLVKNRFVDFAAGGFQKLHRLEAPNPNCERHEGFRRRAANPRRRRRCRIPWRRGGRRGRRGGRVWRIVGGGVRRWPFGWGAWWLGRLWRREGRREGVDQRAERVVVCKKQKRVGELWRRVCGG

SEQ ID NO: 255434 - protein, 77 aa, Glycine max
  Clone ID: PAT_MRT3847_72679C.1.pep
PAELSLSSLVCLSGALQASVVAIVATRHSGLVAWALGWDFRLYGPLYTVSTPFQYFLFPGPQNLFLFHLQNLIFKAR

SEQ ID NO: 255435 - protein, 74 aa, Glycine max
  Clone ID: PAT_MRT3847_7267C.1.pep
TTIMTSCKTPTTWQELHHPHLSPSKTRPKQDSPRTSNRHCHATITSCLLIPIHLSFSFPFWPPSVYSILNKPTK

SEQ ID NO: 255436 - protein, 63 aa, Glycine max
  Clone ID: PAT_MRT3847_72680C.1.pep
NRYIEVKTTFLYYTEKFKLVTQLANVNELLNCIMVLGSLYKEQAQHVLVRKLAIFHQQMYYKE

SEQ ID NO: 255437 - protein, 102 aa, Glycine max
  unsure (1)..(102): unsure at all Xaa locations
  Clone ID: PAT_MRT3847_72681C.1.pep
XXXXAXXXXXXXSXIFFLFITLLFLSLTLPSSIPSLFPSLRXQPLLLGEPSLSXSPNSLPXRFFLHXLFPPSGGLFCLFNPXSSNLLVYNLFVKSFRKIESP

SEQ ID NO: 255438 - protein, 193 aa, Glycine max
  Clone ID: PAT_MRT3847_72682C.1.pep
VLTSRSGRLSYIDWESSLVAMEQEIGSEGAKFADAAHFVVNNSWENFNPLSVTTGSSVVHLPDVPEDRPLEEMIKVNKSDESISIGKDCELEHDSSVKLKNDDMEKIDDLDESKKNQNGDITNLSVLQKDEKHTVVSVTVQKNERISNLAQPAVFLLSAISETGLVSLPSLLTAVLLQANNRSSSEQASYILP

SEQ ID NO: 255439 - protein, 42 aa, Glycine max
  Clone ID: PAT_MRT3847_72683C.1.pep
VLSSMHCKPLCIDAIAGIMLLHHLVSHVTCLARTHQPAIAMV

SEQ ID NO: 255440 - protein, 65 aa, Glycine max
  Clone ID: PAT_MRT3847_72684C.1.pep
PRYLWPGWLPLPCSSLSVGAAEPLPPAGGCDAYMDRVMKNQKIIGMVTLILLLEQFSLKRMQNKI

SEQ ID NO: 255441 - protein, 87 aa, Glycine max
  Clone ID: PAT_MRT3847_72685C.1.pep
GFPPKSFLAPLYHFLQGEKSWDQTCFFFLQKKPSGMICPILKFQKESSFFHGAKLNTQIVIADRAPPNCQRFLAFVPLNLPWDPFYF

SEQ ID NO: 255442 - protein, 108 aa, Glycine max
  unsure (1)..(108): unsure at all Xaa locations
  Clone ID: PAT_MRT3847_72686C.1.pep
MQVYSTVNSTGKELDVWLAAALSYIAMARGSAHAVASSSIDASHLKLCRAALTGQNPPPCDEKCCTVTRQATLRCLCSYSSILPSFGIXNASSTLNVPAKCRLRLPHR

SEQ ID NO: 255443 - protein, 54 aa, Glycine max
  Clone ID: PAT_MRT3847_72687C.1.pep
FVPYALYAIMYYMSQILLVVTNNTLYIVFFRKALGKLILFIFLVGFYQYASYKE

SEQ ID NO: 255444 - protein, 63 aa, Glycine max
  Clone ID: PAT_MRT3847_72688C.1.pep
LFITCTIATLMLWQPTCINSHQFLFLHHSWKHNSMIRPLQWLGIVYDDHVVSQPEILNFKWVS

SEQ ID NO: 255445 - protein, 37 aa, Glycine max
  Clone ID: PAT_MRT3847_72689C.1.pep
VVCAVPTSYLKDAGFSFMRFGLVCVWTLELYVAVKIV

SEQ ID NO: 255446 - protein, 87 aa, Glycine max
  Clone ID: PAT_MRT3847_7268C.1.pep
GGPPPVRFWTPKMGPRLTLMGSTGGSFFRGGGAPFSIFGVGQKGLIIFFFVRAKIFFFFFFNPFFGVFFLGFWGELGIFLRELNFFL

SEQ ID NO: 255447 - protein, 138 aa, Glycine max
  Clone ID: PAT_MRT3847_72690C.1.pep
VAAAQCVGLAPRSKLRSREPCPSPPRPAQMPPYLYLSTFVLYPPRHATGLVFAAPCARLGPMSKFKFKFSLARSFPPPPTLPSKPPYLYLIPSCSSPPCPVAPVLVLPLTIPPSPPADLPRLLQTSYPTNTTLTSSNK

SEQ ID NO: 255448 - protein, 73 aa, Glycine max
  Clone ID: PAT_MRT3847_72691C.1.pep
MSRSRRHLLRHINKIAPSSSSSIISSSPIVIHMILIVTSCREGYRIAGGPLGEVTDPIYPGGSFDPLGLADDP

SEQ ID NO: 255449 - protein, 139 aa, Glycine max
  unsure (1)..(139): unsure at all Xaa locations
  Clone ID: PAT_MRT3847_72692C.1.pep
TTPEYKLRLLMIYASVYPEKXFEGDKASKLMQLAKLSPDDMKVISNMQQLAGSSNKKSSAAGGFSLKFSNQKTKQAARKDRTEEEETWQLFRFYPMLEELIENLSKGELAKNEYSCINEPNPSNARGSVRISKQTQTPS

SEQ ID NO: 255450 - protein, 122 aa, Glycine max
  Clone ID: PAT_MRT3847_72693C.1.pep
MEEKEELKKSKVIKIDSQKSWEHHISYATNQKYPIVVHFSAFWCVPSLVMNPFFQELASTYEDVLFLTLDVDEVKEIASKMEIKAMPTFLLLSGGTPVDKIVGANPDEIRKRIDHFVHSTRS

SEQ ID NO: 255451 - protein, 126 aa, Glycine max
  Clone ID: PAT_MRT3847_72694C.1.pep
MEEKKELKKSKVIKIDSQKSWEHHISHATNKKYPVVVHFSAFWCVPSIVMNPFFQELASAYEDVLFLTLDVDEVKEIASKMEIKAMPTFLLLSGGTPMDKIVGANPDEIRKRIDHFVNSTHSYKSV

SEQ ID NO: 255452 - protein, 74 aa, Glycine max
  Clone ID: PAT_MRT3847_72695C.1.pep
QKTTGITGTWLKQHRTVYNGATIHSVIISMPEGTIYTGILQTWLAQDYMFARALVPIESRMLMQTWKESACRGD

SEQ ID NO: 255453 - protein, 291 aa, Glycine max
  Clone ID: PAT_MRT3847_72696C.1.pep
MFGSKKTPLRDAKPTSVDHAHNPFDSDEDTKDNKYNSSKKTLTNTNPFDDDHVNATGHSSSSSYGLSSTHRNRYKNDFRDSGGLESQSVQELENYAVYKAEETTNSVNSCLKIAEEMREDATKTLVMLHQQGEQITRSHHVAADIDHDLSRGEKLLGSLGGMFSKTWKPKKTGTITGPVVFGEDPVRKKGNHLEQREKLGLTSAPKGQSKSRTTLSEPSNVLEKVEVEKGKQDDALSDLSDLLGELKGMAIDMGSEIGSQNQALDGFDNDMEKLIVRVNGANQRGRRLLGK

SEQ ID NO: 255454 - protein, 86 aa, Glycine max
  Clone ID: PAT_MRT3847_72697C.1.pep
GNRKPTLVYAYNTIPFPGVLGADTTYQFAKPCILTQKTFHHILCIHPRDFHTLLIHVLEDQKRMFLCRQRKPADLLEGKPAGTNVP

SEQ ID NO: 255455 - protein, 164 aa, Glycine max
  Clone ID: PAT_MRT3847_72698C.1.pep
MFGSKKTPLRDAKPSSVGHAHNPFDSDEETNDKKYNSSKKTLTNTNPFDDEVDVDATGHSSSSSYGLSSSHRNRYKSDFRDSGGLESQSVQELENYAVYKAEETTNSVNSCLKIAEEMREDATKTLVMLHHQGEQITRSHHVAADIDHDLSRGEKLLGSLGGMF

SEQ ID NO: 255456 - protein, 429 aa, Glycine max
  Clone ID: PAT_MRT3847_72699C.1.pep
MTNDSEEQSNNNANDDDDNDVAVAVDENVMIPENTGGANVVADNSVPLRVRERPRNSNARERGSGYGRNDYMERFHDIARENASRFAFFAPEGEDHDRSPPVEPERDEIEDWPGPFSTAMKIIRDRGSKLQNAEASSQASLCESIKWVPNAKRGNAGVNVSVPSLQEMCLKILVKNVDAIASLESVPDALMHRLSQLLCDSRRINGHFLELLVRGTPTEIRLRDCSWFPRERFTESFRTCDTENLVVLQLDQCGRCLPDYVVVSTLAQSPRHLSSLSTLSLSGACRLSDGGLRALVSSAPALRSINLSQCSLLTSSSVYILAESLKSLLKELYLDDCQGIDAALIVPALIELEHLEVLSVAGIQTVCDEFVKNYIVARGQNMKELVLKDCINLTDASIKAIVEHCPRLCVLGSMNLHILTDLSIGHLAN

SEQ ID NO: 255457 - protein, 190 aa, Glycine max
  Clone ID: PAT_MRT3847_7269C.1.pep
GPDSGSTHASVIGQPVAVAEQAGLVAVWLIPLHLSFPFQFTLQRFLQCQLKTGIIAWVSGVALAVHVLVSWVFVYRMRIGIVGTALSIGFSWWLSVLGMLGYTLFGGCPRSWTGFSVEAFVGLWEFFKLSLASGVMLALENFYYRLLLIVSGYMHNTEIAIDALSVCVTIYGWESMIPLAFLGATGLGVW

SEQ ID NO: 255458 - protein, 70 aa, Glycine max
  unsure (1)..(70): unsure at all Xaa locations
  Clone ID: PAT_MRT3847_726C.1.pep
GFEVIWXINPXKHLMQXEGLSEDVEEXTFECDSDSXCLVXRTXEKSAXPNGGXTQXXXGXQAQKSRXMKK

SEQ ID NO: 255459 - protein, 194 aa, Glycine max
  Clone ID: PAT_MRT3847_72700C.1.pep
NSARAEEDIRPLFEEHGNVIEVALIKDKKTGQHQGCCFIKYATSEEADQAIRALHNQHTLPGGVGPIQVRYADGERERLGAVEYKLFVGSLNKQATVKEVEEIFSKYGRVEDVYLMRDEKKQSRGCGFVKYSHRDMALAAINALNGIYTMRGCEQPLIVRLLILKGLVKEISGVLHLRPRIGSRFDAQAQEIIH

SEQ ID NO: 255460 - protein, 104 aa, Glycine max
  Clone ID: PAT_MRT3847_72701C.1.pep
EFPGRPTRPAPSLLPPEQQPRTFSLFPFKPASTHQHDLFGFHDDGGASSASHAGGFNSHLAAVFSPSPAVDHAFSHAPMQSLTLPHHQHLMRSPMQPKPQTDPA

SEQ ID NO: 255461 - protein, 64 aa, Glycine max
  Clone ID: PAT_MRT3847_72702C.1.pep
GALYAKLRTRKTDIKQIWGGLLLGALNMVMVMDVFQLQTLVSGILALLVGALLYKLKETHGPNA

SEQ ID NO: 255462 - protein, 87 aa, Glycine max
  Clone ID: PAT_MRT3847_72703C.1.pep
AHVDVETCSLRRMPMVASSRLPDLDTGTSAIPLQGALWPTSLTCTPGSSTVIPVQGRHTSSGNVTTRVLLRLPNLTSKLAPRNSTSS

SEQ ID NO: 255463 - protein, 595 aa, Glycine max
  Clone ID: PAT_MRT3847_72704C.1.pep
KIHQGCYVCYGAPQRATCSSTLKDSKFPAYLMLSSGGTQSEGTSAMKVCPYTYCSLNGHHHADLPPLKSFVSARRFLLKMQKRAKLEALSPRRLKVPLETQKEDSDAEQNVFDAKPSCDEIGIDIFIEIYANEKDAKPTAAEEMGRIDFLKEIEDHEDNKSTLEDNGIEASEGVMQITTSRSIGNCIPSPSISEIDLEEDLKKSLDNVAIEVDATKGSSLLEQNEGGADEDYQSIVWSHEEMSMGSYCSDGEQDMGDVDMDDSDSKTFDMEWEEERLHGFDHEEDADSSVYSEEDNDSKVESSSESSHDVSVTWLDDILGGYYEHFLVDETHKEANSEESTYFEEQPSGINSVLEDTNGSTETQEIGYDQPSFTEEIFEYLTNAQNNGEGDEKHKDDDAASCNTKARDEETIDNTQCQKMSETSKIEATDENGYSISLENNDESNKGESQIELEDVSEKESNIASQDQDLLDKDQGKAIGFQQNTSCISAKEESTSKIWKDGIRRKKGVEDDDDEMRKFNPKEPNFLPLVPEPGQEKVDLRHQMMDERKNSEDWMLDCALRQVVTQLAPARKKKVALLVEAFEMVLPQERSSTKM

SEQ ID NO: 255464 - protein, 127 aa, Glycine max
  Clone ID: PAT_MRT3847_72705C.1.pep
AHSSFLRATVYGALLIRPRLGHSYPFPKVYQEIPILVGEWWNANVVEVEQNATETQQPPIESDAYTINGLPSDLYNCSQDGTYQVKVKQGKTYLLRIINSALNNQHFFEVANHTLTVVAIDATYTNH

SEQ ID NO: 255465 - protein, 107 aa, Glycine max
  Clone ID: PAT_MRT3847_72706C.1.pep
RARARARARARAPARPPPPRAPSGLALLFACFRVRSHFHISTLLPRSPHHISIYIYIYIYIYIYIYIYIYIYIYIINHLGCTCFVYFIFNMYIFTLQPFLNPKRKQN

SEQ ID NO: 255466 - protein, 71 aa, Glycine max
  Clone ID: PAT_MRT3847_72707C.1.pep
AHLTRAWAGSIQGVMGQTMSARLMRADYTLSALNRTPFKAPTTTEPRSPFRLLLPRRRSPLRRSILHRRLP

SEQ ID NO: 255467 - protein, 131 aa, Glycine max
  unsure (1)..(131): unsure at all Xaa locations
  Clone ID: PAT_MRT3847_72708C.1.pep
MPRMEGILNLPVQDPLCPEFSAAHINWVKLEGGRQCGDNIALIPFARVDDFVKGESSNXPQCPASFRVESRRKRPVGSIAKPRVDGYLEYTLYWCSYGPKDYRESDSGVXRRHMMRGCLCHFTVKRLYTRP

SEQ ID NO: 255468 - protein, 101 aa, Glycine max
  Clone ID: PAT_MRT3847_72709C.1.pep
METMKPKSALSNRSKKLAKTFQKVMSLRSATKLASNNGICMLNSHLKVKEDLFTDQNKKPHQGNNKNRAIMEALIARLFAGVTTIKAAYAELQMAQHPYNN

SEQ ID NO: 255469 - protein, 176 aa, Glycine max
  unsure (1)..(176): unsure at all Xaa locations
  Clone ID: PAT_MRT3847_7270C.1.pep
DVDGFHPLNIGNLAIRGRKPFFVPCAPKGCIELLLRHGVEIKGKRAVIIGRSKIVGLPTSLLLQXRHHATVSVLHAYTKNPEHITSEADIVVVDVGVPNIVRGNWLKKGAVVIDMGTNQVKDPSGHGFCVSGDVCFEEAVKVASAITPVPGGVGPVTISMLLSNTLDSAKRAFGMV

SEQ ID NO: 255470 - protein, 198 aa, Glycine max
  unsure (1)..(198): unsure at all Xaa locations
  Clone ID: PAT_MRT3847_72710C.1.pep
MPRMEDILNLPVQDPLYPEFSAAHINWVKLEGGRQGGDDIALIPXARVDDFVKGESSNPECPASFRIESRRKRPVGSIAKPRVDGYLEYTLYWCSYGPEDYRESDSGVGDGTSTKPASGKGSRPGRRHMMRGCLCHFTVKRXYTRPLLALIIYNQRRHVDKSGAPCHGLLDRDAVGTRAMYAPRISDELRQKVMSMLY

SEQ ID NO: 255471 - protein, 78 aa, Glycine max
  Clone ID: PAT_MRT3847_72711C.1.pep
SLFILPAALHDITQPAFAYENRQLGLVDPPTFNKRDFCFLLSCMARCSRRYHNTFFFIASCLGAFFGPVSQKRTLSSF

SEQ ID NO: 255472 - protein, 77 aa, Glycine max
  unsure (1)..(77): unsure at all Xaa locations
  Clone ID: PAT_MRT3847_72712C.1.pep
NSKGDIFVRRGEVFKRGSHFVLFPTCVVGPPHLKCGQYRLDTKSSGCCIHPVCIXPTCVIDPACIHPSCFPPRFFSC

SEQ ID NO: 255473 - protein, 172 aa, Glycine max
  Clone ID: PAT_MRT3847_72713C.1.pep
MKESVGNPLRLQSVNHISLICRSVEQSMDFYQNVLGFYPIRRPGSLDFDGAWLFGYGIGIHLLEAENPEKLPKKKEINPKDNHISFQCESMVAVEKKLKEMEIDYVRATVEEGGIQVDQLFFHDPDGFMIEICNCDSLPVIPLVGEVARSCSLVNLEKMQNQQQIQKMLQQL

SEQ ID NO: 255474 - protein, 205 aa, Glycine max
  Clone ID: PAT_MRT3847_72714C.1.pep
LRPLVKTNAWDYVVVWKYGDDPTRFIEWVGCCCRGSCSVNIDVVKPEEEKGEVCNLAQSCRDDHFHFQHLVRTKACEALAQLPFALSLYSGVHGEVAISQQARWLTQDSIGTQVLIPIVGGLIELFTENLIPMDMNIVEFITAHGCVSLEQEAISAQSYTSLNINEHLPLREQYSHWSPHMPTLTPSVHQPATRQCSSHPSIEGP

SEQ ID NO: 255475 - protein, 266 aa, Glycine max
  unsure (1)..(266): unsure at all Xaa locations
  Clone ID: PAT_MRT3847_72715C.1.pep
MNVFVEKMEAVMGLMRRIPPKHTETALSALLSLMPDNSSDLLSQVDQPLQVLCDVECGKEFILCEYNRDADSYRSPWSNKYHPPLEDGSLPSSXNTTELRKLRNDIFAKKISSXLEGGILPSYMWEDDXNEGFVACFXIKQDXSKTGQGRRGYLEEGAWDAIHVIEVGPEEEENTNYRLTSTVMLTLTTNNESSGTFSLSGSIRRQMSMKLSVADGHLCNMGRMIEEMESKLRNSLDQVYFGKTREMVCTLRPPSEVAQLRMPDSA

SEQ ID NO: 255476 - protein, 77 aa, Glycine max
  Clone ID: PAT_MRT3847_72716C.1.pep
KRAPGAPAAQNRKASFSQSFWAQVKKIGQNPSSLWAVLLSNTAKRGGVNPQVGVPIPKGCNRANPPVGYKWGPSPLP

SEQ ID NO: 255477 - protein, 83 aa, Glycine max
  Clone ID: PAT_MRT3847_72717C.1.pep
NVGVGNHTWGIIFHFNIHCFFQILLLQKQTSHGRFFFKEIICNTLFKLCLYNYNQDGFFFSTPYPPVFFLWGGGGVKQKELYF

SEQ ID NO: 255478 - protein, 162 aa, Glycine max
  Clone ID: PAT_MRT3847_72718C.1.pep
RNPAEENVVAATFTLAMAIVLRLGSRSRSKGNHPSSHIVFFSTSNSNSNSNSNSNSPFSDLFSEIKNNFKESSPSPSNTPRSSNFRDEINKNLHEFRARTTAPPPQQQQISFQKIYQENMNRNPPNSSSFNFNSIRDSLKNIKPAAQTTQILSRPMPSTTSG

SEQ ID NO: 255479 - protein, 271 aa, Glycine max
  Clone ID: PAT_MRT3847_72719C.1.pep
MSVSCSNCFPDDDHSFLLCGEDSSGIMDSSPECSSDLDSSPPSEAESIAGFMEDERNFVPGFEYLNRFQSRSLDASAREESVAWILKVQAYYAFQPVTAYLSVNYLDRFLNSRPLPPKTNGWPLQLLSVACLSLAAKMEESLVPSLLDLQVEGAKYVFEPRTIRRMELLVLGVLDWRLRSVTPLCFLVFFACKADSTGTFTRFLISRATEIIVSNIQEASFLAYRPSCIAAAAILTAANEIPNWSVVKPEQAESWCQGIRKVSIYSIYAWF

SEQ ID NO: 255480 - protein, 71 aa, Glycine max
  Clone ID: PAT_MRT3847_7271C.1.pep
PINILGNYPSTMGVTTPFNFFYKHSRLIPTFTCYKGILNHFQGPLNAGDVDQINANSPFKNLIFQDFPPNG

SEQ ID NO: 255481 - protein, 62 aa, Glycine max
  Clone ID: PAT_MRT3847_72720C.1.pep
WWGNEKKTAPPKSSIFTGGGAGPNFFFFLTPPCLPGFYKRREADQYFPRAGFVPPPAFLRAP

SEQ ID NO: 255482 - protein, 106 aa, Glycine max
  Clone ID: PAT_MRT3847_72721C.1.pep
LFKPMGPQGVSQDSRTLGTSSFIQGLFFNLVLHQTTERNFHPTFYFLFPPSLKGKISPFTKEKSSFFLGGLSLWFNIGKFYTIFYCLDFFFWEWGLLPPFSFGKPI

SEQ ID NO: 255483 - protein, 48 aa, Glycine max
  Clone ID: PAT_MRT3847_72722C.1.pep
FGRIVSGGQHNPKGWGVSPYKATSVSYFTSRCLRLERASYRQGLAPLL

SEQ ID NO: 255484 - protein, 49 aa, Glycine max
  unsure (1)..(49): unsure at all Xaa locations
  Clone ID: PAT_MRT3847_72723C.1.pep
SXIDIRRXXXLXXSENGXPTSQPLXSLSHTQTHFVXXSSXXFTIXSGXG

SEQ ID NO: 255485 - protein, 235 aa, Glycine max
  Clone ID: PAT_MRT3847_72724C.1.pep
VRARRTPTRPDIQDLTAKMADLQEKGRDVDDELDLQGNDLEEYFRIKEEAGMKTAKLREEKELLDRKLNADSEAQKNLEENLQQLRNRESELNSQEEQMRARLEKILDNSAKNKVGLENLKKELRVMQDKHRDSKKKYENLKLKIGELENQLRELKADRYENERDVRLSQAVETLKRLFQGVHGRMTDLCRPTQKKYNLAVTVAMGKFMDAVVVDNEKTGKECIKYLKDQRLSPQ

SEQ ID NO: 255486 - protein, 62 aa, Glycine max
  Clone ID: PAT_MRT3847_72725C.1.pep
VFVMAKFLFKSSNLQNEVAFGSSNEGCHRAGGYLSAHYYISPPSSMGMQHKTHKIGLNRSGP

SEQ ID NO: 255487 - protein, 109 aa, Glycine max
  unsure (1)..(109): unsure at all Xaa locations
  Clone ID: PAT_MRT3847_72726C.1.pep
SWCRXKLGXRXXXXYKQRFXXQXSRXLYRSYXLPXIRKKKKXPTMXLXTPITXPKHLXLLKXXXWATLFXXCLFNTKXQIPRKXSXXXYXGFXLXXXVXXXSXXGLSLL

SEQ ID NO: 255488 - protein, 36 aa, Glycine max
  Clone ID: PAT_MRT3847_72727C.1.pep
SLTPLGCCFKKKIHFWSEFFDNPKQPSISKIKFPQK

SEQ ID NO: 255489 - protein, 88 aa, Glycine max
  Clone ID: PAT_MRT3847_72728C.1.pep
MQMNVLDFFVATILVAWQCHAYDMFPLLMNTGYCARTPEVKCSSWRLAAEAHNIIRFYTMIEECVVSTTEYIHGEQYISYYLTANQQA

SEQ ID NO: 255490 - protein, 71 aa, Glycine max
  Clone ID: PAT_MRT3847_72729C.1.pep
EAQPRKKKIMKKRNKGQNEHLHTYHTPTCKKDDSTPETGWLHRRGGTRRGTVTKITIVWGLGKKNYGFCAD

SEQ ID NO: 255491 - protein, 90 aa, Glycine max
  unsure (1)..(90): unsure at all Xaa locations
  Clone ID: PAT_MRT3847_7272C.1.pep
LKVGYTFLRVVFFTKTLVTLSGGHTMCFCHCSSFQNIIHIFNVTHDVYPSLYSSFASNLIXYCPLNNQSXYACSSMDPSTTTFEMYILHS

SEQ ID NO: 255492 - protein, 47 aa, Glycine max
  Clone ID: PAT_MRT3847_72730C.1.pep
TESSVIVRVFFPKYHSCVRVCDLRFESLIGVLSKIKCYVVTLINRTK

SEQ ID NO: 255493 - protein, 55 aa, Glycine max
  Clone ID: PAT_MRT3847_72731C.1.pep
ESWKVQPTLLCLMQNQHICIGNWKANFLKGISMTENRRGTGSFCEGQFKSQGLAI

SEQ ID NO: 255494 - protein, 109 aa, Glycine max
  Clone ID: PAT_MRT3847_72732C.1.pep
NHTNNNSFISLGDIRHKDHMKPLDSLKNEILRNIIHHEISFNNFLLSSWFPSTLFYKTKNYAIHSPHQYLQWFSLHTSKPPYLFFCHFLLDWHHINIYFVLSCVTTNSF

SEQ ID NO: 255495 - protein, 93 aa, Glycine max
  Clone ID: PAT_MRT3847_72733C.1.pep
NIIAKRPMIPAPIHAQSISGFSCKNHDLVWTKSYGNGESVKKREKKDLSENKLSHNVVEELCSAELSSSFPLLSLPLVSLQRDAWVDPNSGRS

SEQ ID NO: 255496 - protein, 67 aa, Glycine max
  Clone ID: PAT_MRT3847_72734C.1.pep
DIELKCPLKLNLVPFPFVLKKKKKKKKKKKKKKKKKKKKKKKKKKKKKKKNKKKKKKKKKKLGGPPN

SEQ ID NO: 255497 - protein, 127 aa, Glycine max
  unsure (1)..(127): unsure at all Xaa locations
  Clone ID: PAT_MRT3847_72735C.1.pep
RTPSFPLLRSPRPWPPPPPPPGLKGCSGPLEFQVLQFKQFPMDVIPFDSDSIQFKLDDNFHAGNNNGSAVNSFAAVQSVASMMDAGNXTTCHSTVMVDLVAPTNIDATVNMTNPCQFHDDKGWPCKN

SEQ ID NO: 255498 - protein, 142 aa, Glycine max
  Clone ID: PAT_MRT3847_72736C.1.pep
MSYLLPHLHSGWAVDQAILAEEERLVVIRFGHDWDETCMQMDEVLASVAETIKNFAVIYLVDITEVPDFNTMYELYDPSTVMFFFRNKHIMIDLGTGNNNKINWALKDKQEFIDIVETVYRGARKGRGLVIAPKDYSTKYRY

SEQ ID NO: 255499 - protein, 79 aa, Glycine max
  Clone ID: PAT_MRT3847_72737C.1.pep
RYVMGQARIGGYYGRGEAFRLVNLVGIKKWLCHKRGNPLEERLSSILFNKIVLFLLFKFWIPNSVRSLTTDMLGICDLV

SEQ ID NO: 255500 - protein, 48 aa, Glycine max
  Clone ID: PAT_MRT3847_72738C.1.pep
RRVYFLGQKNKHRMVLVRTNTVKKFSRQVIDLYYSFMTLDFYTNMNLF

SEQ ID NO: 255501 - protein, 155 aa, Glycine max
  unsure (1)..(155): unsure at all Xaa locations
  Clone ID: PAT_MRT3847_72739C.1.pep
DGGEGARCCRCERTSSRIDSRLGRWSRAYTTGRTTKIRGRRHWVTRRSVRAWAFYRAGIAXEFEATFLGLYITGLTVMGVAGAKSKCSTVGIQGIAWAFGGMILALGYCTDGXSGGHINTAVTFVSVFAXRRLSLSRAILYIVMHCYGCVFEALA

SEQ ID NO: 255502 - protein, 76 aa, Glycine max
  Clone ID: PAT_MRT3847_7273C.1.pep
LFNLLSSGCLCLLSLSPIFNYCEARCISMLPMSRSSIPLSFVYSQLLFMLSQSTSPSSTFAFYCPPPPPKKEDVIQ

SEQ ID NO: 255503 - protein, 61 aa, Glycine max
  Clone ID: PAT_MRT3847_72740C.1.pep
THRVAPPNKRNTLLSFENIHQTLSSTTKYRTETYRHTNSSYNDLHKSITNHIHSRNSMKFL

SEQ ID NO: 255504 - protein, 123 aa, Glycine max
  Clone ID: PAT_MRT3847_72741C.1.pep
VKIFSPFSLLGGGPNFFLPHLENGYPSQILGGIYHKLEGGFFLGGPESPLKNGFFFGGRGSSFPGNSQIFFYKTPPRVNPPGGFSWPPETPKTRNSGPGLKIFFKVFPFPWCLKTGDFPPPRV

SEQ ID NO: 255505 - protein, 60 aa, Glycine max
  Clone ID: PAT_MRT3847_72742C.1.pep
DRSFFFSFFFFFFCECDTHAWSIDTNLNEIGHANLPSLIGDIYPNLKRACSRSTFTLKVL

SEQ ID NO: 255506 - protein, 85 aa, Glycine max
  Clone ID: PAT_MRT3847_72743C.1.pep
SIFIFNKKQNGIVKIHETPGGNYLIKLNQIQHKQLPVTDINTTVNLLIDAIENIILCGTYFSYQPYYTDYISAFFLFYAHKPQIY

SEQ ID NO: 255507 - protein, 88 aa, Glycine max
  unsure (1)..(88): unsure at all Xaa locations
  Clone ID: PAT_MRT3847_72744C.1.pep
NNSTGAAXPPEHGTERPKPDSTTTGTGAAHSQRAHEHKEKHTAARDAAPNAAGKKGDNENHTQEEEGPNEHNDGRKGAEKQNAHTEGA

SEQ ID NO: 255508 - protein, 461 aa, Glycine max
  Clone ID: PAT_MRT3847_72745C.1.pep
MRLSSVTSSPLQFFSMMSLSVSPSLGSPYQMKCEQRGLVLIHLLLAGANFVATGDLQNANLTLEQISQHASLDGDTMQRIASYFSEALADRILKTWPGIHRALNSSRITMVSDEILVQKLFFELLPFLKFSYILTNQAIVEAMEGEKMVHIVDLYGAGPAQWISLLQVLSARPEGPPHLRITGVHHKKEVLDQMAHKLTEEAEKLDIPFQFNPVLSKLENLDFNKLRVKTGEALAISSIMQLHSLLALDEDASRRKSPLLSKNSNAIHLQKGLLMNHNTLGDLLDGYSPSPDSASSSPAASSSALMNSESFLNALWGLSPKVMVVTEQDFNHNCLTMMERLAEALFSYAAYFDCLESTVSRASMDRLKLEKMLFGEEIKNIIACEGCERKERHEKMDRWIQRLDLSGFANVPISYYGMLQGRRFLQTYGCEGYKMREECGRVMICWQERSLFSITAWRPRK

SEQ ID NO: 255509 - protein, 58 aa, Glycine max
  Clone ID: PAT_MRT3847_72746C.1.pep
LFLNCITLTFLVLSQADLNVLNEYPQVHSISAFNNIYNGTGIFGIQVTTVSPFESCPL

SEQ ID NO: 255510 - protein, 87 aa, Glycine max
  Clone ID: PAT_MRT3847_72747C.1.pep
SKPISTLFSEFHCGTKASTSLLSGNPGSLSESRLYRLSLSETHTFVVRTRTLKKAALTPEARRSVLYVHSGDAEANYPDQGSENQNC

SEQ ID NO: 255511 - protein, 52 aa, Glycine max
  Clone ID: PAT_MRT3847_72748C.1.pep
ILNPGLQPLWWKDRSRVDNTCLIFDPVNLVARYEAYGDDPYPGIGSQDAMIL

SEQ ID NO: 255512 - protein, 104 aa, Glycine max
  unsure (1)..(104): unsure at all Xaa locations
  Clone ID: PAT_MRT3847_72749C.1.pep
RVSSFSSIKKLDVKHMIKTISGRAGSSEVSETVSHLLISLSSTIICRGAFGIRYEYEGSEKNMFHGLLNXLHRLIGTFSITDFIPFTGWIDKLKGLDALLERNF

SEQ ID NO: 255513 - protein, 66 aa, Glycine max
  Clone ID: PAT_MRT3847_7274C.1.pep
LSKKLTLKGCAFCTSAKENLEKSGCSLRVLSGRKKWVKPSVAKILGRDDEYFAKKRSKDAFKATSA

SEQ ID NO: 255514 - protein, 97 aa, Glycine max
  unsure (1)..(97): unsure at all Xaa locations
  Clone ID: PAT_MRT3847_72750C.1.pep
MVKHKNVIPNGHFRKHWQNYFKTLFNITPTETQKHCGLDKKTLKIFSTHXTSRPFTPIAHGQTLKYNMKVRSERGFSLEELKAAGIPKKLAPTIGIA

SEQ ID NO: 255515 - protein, 93 aa, Glycine max
  Clone ID: PAT_MRT3847_72751C.1.pep
PLRSGNKPRVQPFIFQNPYHLYMFFSLLMDIKCLSYVYITVDHTQLHSRLQSLTLLLALVNRQIIKLLWTSNSALNTFIKALLFSYNGYATAH

SEQ ID NO: 255516 - protein, 349 aa, Glycine max
  unsure (1)..(349): unsure at all Xaa locations
  Clone ID: PAT_MRT3847_72752C.1.pep
MNYDNEADGGYDASAASEQWNFSEGVKSSSFLQEARVLEEPPVESQDVRSKQRAQMLEDLETEALMRQWGLNENAFHHSPPKDFAGFGSPIHLPPEEPPTLPPLDDGLGPFLQTKDGGFLRTMSPSIFKNSKSCGSLIMHVSNPVVVPAEMGSGIMEVLQCLASVGIEKLSMQAKELMPLEDITGKTMQQIAWEAMPSLEGAXRQCHLRHDPITVPDSAGVQRDLKGMPSKQKSGKFSSRTVANQTGSEFVSVEDLAPLAMDKIEALSMEGLRIQSGMSEEEAPSNIIAQSIGDISALQGKGVDISGSLGLDGAAGLQLMDVKERCDGVDGNMSLSLTLDEWMKLDSGE

SEQ ID NO: 255517 - protein, 115 aa, Glycine max
  Clone ID: PAT_MRT3847_72753C.1.pep
KNWEPTTYRKRFDLTRKLLFTVTLEKTHPNKTETIFLSIPILYSRIFFYNPEKPLCVKKHLCVYKDSEISWDHLYREKPAGAVALLAYDTSDTGSGAGTDLTFQPLPLLERLLGF

SEQ ID NO: 255518 - protein, 94 aa, Glycine max
  Clone ID: PAT_MRT3847_72754C.1.pep
SNLLIDNEGNLKLADFGLARSFSNEHNANLTNRVITLWYRPPELLLGTTRYGPAVDMWSVGCIFAELLHGKPIFPGKDEVSDNMYNSCLKLGVK

SEQ ID NO: 255519 - protein, 123 aa, Glycine max
  Clone ID: PAT_MRT3847_72755C.1.pep
MLAHAEHKNVKTALSNSTWKQAMQVEYDALLCNGTWSLVELPTSVSVISCKWVFRVKENPDGSITKYKVKLVAKGFYQQLGKDYNETFSPVIKPVTVRILLTLAVTNKWKLQQMDVNNAFIRE

SEQ ID NO: 255520 - protein, 56 aa, Glycine max
  Clone ID: PAT_MRT3847_72756C.1.pep
DCGLHQNCRPVQSFSVLSLDTFSQLHNIFCGNMAKLGDCASHFSIAALGLSTFYVT

SEQ ID NO: 255521 - protein, 52 aa, Glycine max
  Clone ID: PAT_MRT3847_72757C.1.pep
LEFVALAVRALAIMGLRQECNLGQIGMNWMVKVGASAFSCPFSTMLWARPPE

SEQ ID NO: 255522 - protein, 33 aa, Glycine max
  unsure (1)..(33): unsure at all Xaa locations
  Clone ID: PAT_MRT3847_72758C.1.pep
XIKLXXYXXXTRNSTXKNQXTNSRXXVNLSPQX

SEQ ID NO: 255523 - protein, 73 aa, Glycine max
  Clone ID: PAT_MRT3847_72759C.1.pep
THYQLTIKLRPIIHYSSKKKKKKKKKKKKKKKKKKKKKKKKKKKKKKKKKKKKKKKKKKKKKKGGGRFKGPKF

SEQ ID NO: 255524 - protein, 140 aa, Glycine max
  Clone ID: PAT_MRT3847_7275C.1.pep
MAQPDTLTITPTSSKDERESLKNDTPIDNNACNNSTDERESLKNDTPIDNNACNNSTDERESLKNDTPIDNNACNNSTDERESLKNDTPIDNNACNNSTDERESLKNDSPVDNNAFNNSTDERESLKNDTPIDSNACKDV

SEQ ID NO: 255525 - protein, 77 aa, Glycine max
  Clone ID: PAT_MRT3847_72760C.1.pep
DALVRLTLFMKITEKRSPGSRLLFLGKPLIFQLFMLKSSFFTVSCSSEPFLQLQKRFGYSCSSDPCNSFCIWCKDTD

SEQ ID NO: 255526 - protein, 178 aa, Glycine max
  Clone ID: PAT_MRT3847_72761C.1.pep
ELGIRLEAAYTTFSFFSTPQNQKTFFLQPFKRHVSFLKPFKCVRPGSASTRFRPNPVISSSALRTSALVVPSKLEHLAEEFGSLREPVERVKRLLHYAAAMAPMPESNRVDANRVMGCTARVWVEVGIDEEGKVRVAADSDSEITRGFCACLVWVLDGSEPDEVMKVTTDDLTALNVG

SEQ ID NO: 255527 - protein, 86 aa, Glycine max
  Clone ID: PAT_MRT3847_72762C.1.pep
VRPQNDNQCADTSSSPSEIAQFNATQEFPDGNKEQQSSLANRRQSTRNRPLTTKALEALEYRFTTLRGKERTQNVQTIIQSPNVYV

SEQ ID NO: 255528 - protein, 127 aa, Glycine max
  Clone ID: PAT_MRT3847_72763C.1.pep
NVKLHPEILGDFQKFVVKEKSLTTDKPVFFVFHGGSGSSAQEIETAVGNGVVKMNIDTDTQWAYWDGLRKFYEDKKDYLQGQIGNPDGADVPNKKYYDPRVWVRKSEESMIIRLQQAYRDLNCVNVL

SEQ ID NO: 255529 - protein, 70 aa, Glycine max
  Clone ID: PAT_MRT3847_72764C.1.pep
APTAMPPEKEAMITDSESIHYAGIAQGDTDLGQNQSEKEPNMEALAAQCGDQAPAMHALLSHSGHNRAYT

SEQ ID NO: 255530 - protein, 59 aa, Glycine max
  Clone ID: PAT_MRT3847_72765C.1.pep
LNNESVYHYSFKSNLNITSDMVDNHLNRFKINSYMILKYEFKFNSISKINSYKQSYPPF

SEQ ID NO: 255531 - protein, 111 aa, Glycine max
  unsure (1)..(111): unsure at all Xaa locations
  Clone ID: PAT_MRT3847_72766C.1.pep
LVEQGAMLSTMVGSYEXAARTRASYEVRSXIVCVHVYDTVIDTIIGKFTWNETGYEQLQTMGIGLCIAVLIISASTIVANVRVLVPNQHGIDDEPVDEPLNILWNISQHFL

SEQ ID NO: 255532 - protein, 28 aa, Glycine max
  Clone ID: PAT_MRT3847_72767C.1.pep
CPFFATLNLCPLANFIHSLTFSTTLFEI

SEQ ID NO: 255533 - protein, 240 aa, Glycine max
  Clone ID: PAT_MRT3847_72768C.1.pep
MGATNSRAEKNEALSLCKERKRFIKVAIDSRYALVAAHVSYIQSLRNVGIALRRYAESQVEVESSLSISNKTPSQTSYPSPSSPSHVAEVEVLESPLHTESPLSPPVATTLSYMRSGGSAAVTVRINAFGNNNYLDDESTVVPMPPPPPPPPESGASWDFFEPAEDSDSFRFAVHCSESREFRDEEKGDQWLHVGSDRHCMMQPLLDEKFSGNFSSAAMGNECGNSYAHCLDNSTVSRGE

SEQ ID NO: 255534 - protein, 61 aa, Glycine max
  Clone ID: PAT_MRT3847_72769C.1.pep
IILSEAQANYVLFFLYLCKSYLCTIFPLLLHKTPLFCMYMGTLTGVSDLDPGSLAAISLAI

SEQ ID NO: 255535 - protein, 49 aa, Glycine max
  unsure (1)..(49): unsure at all Xaa locations
  Clone ID: PAT_MRT3847_7276C.1.pep
ISLVQVNSENSGSFQXXHSVITPLKMNSIMENCTPQYTPPRVWLSLYPA

SEQ ID NO: 255536 - protein, 42 aa, Glycine max
  Clone ID: PAT_MRT3847_72770C.1.pep
SLIYCYLYSDFKALAKLFLKKCFLIFKLFFRVCNLHCLHEFH

SEQ ID NO: 255537 - protein, 69 aa, Glycine max
  Clone ID: PAT_MRT3847_72771C.1.pep
FYVSSVRSVKPPLRRGTTLLANNSNSRAASLPSHSKESFPIGKVKPGQTIAAADFGAGLIWGPAIVGWG

SEQ ID NO: 255538 - protein, 149 aa, Glycine max
  unsure (1)..(149): unsure at all Xaa locations
  Clone ID: PAT_MRT3847_72772C.1.pep
XKNTFLGIIGENKVEINQPKIKNGRPSQTIQDQDEGVDARFEDVRNAIQSLSSPPTTHFGGGVRSYVWGRRGCTTTSGLELLPRLVAVPGDMVVWPDFSLVLVEAVAAQSGGEDVQIKISRVRISLLFDMPHAFLISLEKISRSKCKNP

SEQ ID NO: 255539 - protein, 59 aa, Glycine max
  Clone ID: PAT_MRT3847_72773C.1.pep
SINMLTLKFYLTYTFLQQHISYIILPKFISLTFFLKLLIYKNPNFTQLNYLSIYSHFTI

SEQ ID NO: 255540 - protein, 55 aa, Glycine max
  unsure (1)..(55): unsure at all Xaa locations
  Clone ID: PAT_MRT3847_72774C.1.pep
XXKFXDXHGXACPXDIXSXERPXMXSSGAXXCVXCAMXXXFKYXRXSCLQXVQDA

SEQ ID NO: 255541 - protein, 76 aa, Glycine max
  Clone ID: PAT_MRT3847_72775C.1.pep
CIIIITTIQQKNGFGTLVFYAISIFLVCRPTIQQKNGYGTLLFYALTFLNVSKRILQMMGLGLTVAARFWSFIFMD

SEQ ID NO: 255542 - protein, 36 aa, Glycine max
  Clone ID: PAT_MRT3847_72776C.1.pep
RETIPACPPRCPSPYHLLFPCLVIILIRDISLYGID

SEQ ID NO: 255543 - protein, 53 aa, Glycine max
  Clone ID: PAT_MRT3847_72777C.1.pep
QECRAGKFGLWYRLSQHKLHLVCQTSKYLIEKKNLNINNKLEPRSNFITQKLQ

SEQ ID NO: 255544 - protein, 105 aa, Glycine max
  Clone ID: PAT_MRT3847_72778C.1.pep
KHWWSSANIFISTSHANFEHKAITQASLCLHCFIHLQVSTWVPNDESEESRSVLFLSLSLSSLIVLHIFVKYIIAELKSTKRSRNHMCGFWSIIDVYQIKIACTY

SEQ ID NO: 255545 - protein, 52 aa, Glycine max
  Clone ID: PAT_MRT3847_72779C.1.pep
GVGFFFGGVGGKNFEYIINKPFKVFVYNETQKDFGTNFFTGLNLNQKPWLIF

SEQ ID NO: 255546 - protein, 214 aa, Glycine max
  Clone ID: PAT_MRT3847_7277C.1.pep
MAVKGNNPILKNHFRKDWQRRVRVHFDQPGKKASRRNTRKEKAARVAPKPVDKLRPIVRCPTVKYNRRVRAGRGFSLAELKEANIPRKLARTIGISVDPRRQNLSEESLKANVERLKAYQQRLILFPRNSKAPKKGEASAEEVKAVRDGDHVLFTNSALPINNKAVVTEEKISENPSTENAYRKLRDARSEARLVGVREKRAKAKADEEAEKKK

SEQ ID NO: 255547 - protein, 73 aa, Glycine max
  Clone ID: PAT_MRT3847_72780C.1.pep
RLLGSSQLLLAPLTETFAVLSPSQIGCLRARVFSWFCHPFMPYSDTLRLVLGLLIAPIRAANLSWPGALDAVG

SEQ ID NO: 255548 - protein, 107 aa, Glycine max
  Clone ID: PAT_MRT3847_72781C.1.pep
NSAIIQKGGKRALKNIEALLWHCYSEKNFLLQARTLISKLTEEKNSAIHQNIKLQQELELLRREAKRNQRGIPFIYVFLAGLIGIILGYLLKRTWPPPCYTFFSFFD

SEQ ID NO: 255549 - protein, 208 aa, Glycine max
  Clone ID: PAT_MRT3847_72782C.1.pep
MLSLSHMQSQGLALPPEPGVGPSTARVSTKESCADPSGNDPDTGDSYKCGLYIEEYPPRLVALGRVYEGSTSIHNIPLLHDQVKVGVEEIRDANAPIPVPTKEVKVMGQALNTFLAWPTHLVKRLSEQGVVGPAKPADRPDHEVDDPLYLMTLTIPQLFLKPLQVMWDATLFGLFNENFPLYIKHEDLSEIAHGGQCLSISVIQLWIL

SEQ ID NO: 255550 - protein, 105 aa, Glycine max
  Clone ID: PAT_MRT3847_72783C.1.pep
ISWGENQKGKKVFGPKKVKKLQNREKGLFPPWERTNAKIGGPPKKNWGAQEKKTRGEENPAPIGGGPSSPISPKKEKKYHFKNPGEGPKQPEKKTISKIPGRVNP

SEQ ID NO: 255551 - protein, 83 aa, Glycine max
  unsure (1)..(83): unsure at all Xaa locations
  Clone ID: PAT_MRT3847_72784C.1.pep
DSHLLTVPPFPIGFPXYIAHLTSLPIARHWDQTRAPSLGAAIIFKKDLGRYDPCIIWVRPFVGAALAPLYHQIGIMLIPFKSN

SEQ ID NO: 255552 - protein, 176 aa, Glycine max
  Clone ID: PAT_MRT3847_72785C.1.pep
SSSRRFSNSEDVTSDHPVSDWKSGSTAKQDITQSSFPLVGSTPPPPSSKNEDSSITPPEAWGGERLSDKYAYTRQPVNAPSRFGVLASAGQTAGSMLSGLQDTSSSVGVSSYTSSSLSFANLRAKDASSSQETSLGFTDHMFSAPLPMSINTKTSLGQAIDSPKILDSPRMSSFNR

SEQ ID NO: 255553 - protein, 49 aa, Glycine max
  Clone ID: PAT_MRT3847_72786C.1.pep
VVVLYYTTSGVWTHTKNFLIVIRPHDAVHFNDITCPPLIASRYQYQPWY

SEQ ID NO: 255554 - protein, 130 aa, Glycine max
  Clone ID: PAT_MRT3847_72787C.1.pep
KADRWAIPAASRIQTNRIGGRIRGPSPLIHQWIEFCLQSARALPFKQEVIPGASPSHLQGHSANVPVELTKGGPRINGNLVDGAPPPATLSDYHWLLTSIQEPGHGLIHKMYQNIISVAKFSGWFNSKLT

SEQ ID NO: 255555 - protein, 131 aa, Glycine max
  Clone ID: PAT_MRT3847_72788C.1.pep
AIPAASRIQTNRIGGRIRGPSPLIHQWIEFCLQSARALPFKQEVIPGASPSHLQGHSANVPVELTKGGPRINGNLVDGAPPPDILERCEFLEPLSNSTLSDYHWLLTSIQEPGHGLIHKMYQNIISVVKFS

SEQ ID NO: 255556 - protein, 92 aa, Glycine max
  Clone ID: PAT_MRT3847_72789C.1.pep
GNTSIPVTQFQPNPTKPLGTLTGKATLSTHFNNINNHPHPLFLVLTHHTPYLSINGDPPKRRRIDKETPSHTMDPPRDRAPYSRLPREMVFP

SEQ ID NO: 255557 - protein, 62 aa, Glycine max
  Clone ID: PAT_MRT3847_7278C.1.pep
LQQTEDHRRVLMRFDARLVRMHIRSHNGTASTDHSDAASRQQISRVSLPNYTPTITLPLTTQ

SEQ ID NO: 255558 - protein, 69 aa, Glycine max
  Clone ID: PAT_MRT3847_72790C.1.pep
FLKARGSVLKVSAHVWNTLRSCILLLTYKTASPEKWASHLWSVKATLHRRVIQLELSVGKKKKKKKKGG

SEQ ID NO: 255559 - protein, 89 aa, Glycine max
  Clone ID: PAT_MRT3847_72791C.1.pep
LKLVMISVDSKHVVHGTYSSSTGDFSCVWINITSFCNCLIFIQKTAECMIQNFLLSIYVYSLIRVIWCNISCSESLIWVRNFCLSIVAL

SEQ ID NO: 255560 - protein, 99 aa, Glycine max
  Clone ID: PAT_MRT3847_72792C.1.pep
VSYRSSGCLRRDVADAAWYAHPEWSGHQSVRAGILLSDAVLSCSRSWSTHNAVLHRAYEHHDGIRELRPKRDGYLQQEVAGPQHHQSADTVLHRDMARA

SEQ ID NO: 255561 - protein, 106 aa, Glycine max
  unsure (1)..(106): unsure at all Xaa locations
  Clone ID: PAT_MRT3847_72793C.1.pep
XAXXXAXXXXXXAXXHXXXXXXXXTXPXXXXCXLXXXXXXFXAXXRXXXCRXIXAAXXXXXXXXXLRXXXXXXXXXXXXXXXXXYXXCHRXXHXSSXIXILXXXXX

SEQ ID NO: 255562 - protein, 56 aa, Glycine max
  Clone ID: PAT_MRT3847_72794C.1.pep
IRRQYENSSTILLSVAAMQQIVEIQTNIEQRDGHMHSCTHKVRRNWENHFNSITFS

SEQ ID NO: 255563 - protein, 95 aa, Glycine max
  Clone ID: PAT_MRT3847_72795C.1.pep
HHHYQLQTDLNLQVNPTPSYKVFSASKRPPKKCVFTDNPSHYYTMFQPPPNTMLACPQDFEALQHMNHTRPTNDNQPEVQTKASLFPPPRCGYED

SEQ ID NO: 255564 - protein, 62 aa, Glycine max
  Clone ID: PAT_MRT3847_72796C.1.pep
AKRYIVGERQLMRIKLGKLHTLKLVRLTSGETQLQNIGTVPSLQVALPPNKRPERPRSSLAY

SEQ ID NO: 255565 - protein, 113 aa, Glycine max
  Clone ID: PAT_MRT3847_72797C.1.pep
ARDPIRSDPMEEFSEDLRTPPVTLASLVGCPELHTLISTHLIGAQSPINTLVLHEFFKIQLFNKNSTDYTDSTTATSPCPIVAGIHKRNWVVKHRTKLPFVLVELYPFHHLSL

SEQ ID NO: 255566 - protein, 73 aa, Glycine max
  Clone ID: PAT_MRT3847_72798C.1.pep
TILLHTHANKQGGLYNAAETSTKDRDLSQPHCDGHHHRVHRMPAETLAHTQLTSHPNTSLLDPGRLQSDITAT

SEQ ID NO: 255567 - protein, 123 aa, Glycine max
  Clone ID: PAT_MRT3847_72799C.1.pep
PSGARVVPQFPRGRFFCSVWVLSLFGPYLGTHFVRSCPFFWPGVFVRPGPFLVFVFFPPGSLFVALFVGVYFFLPWVVSAQFGVLSASSVVSGGIFFSLSACFVFFVFPFLFSVYIRAMLLCK

SEQ ID NO: 255568 - protein, 136 aa, Glycine max
  unsure (1)..(136): unsure at all Xaa locations
  Clone ID: PAT_MRT3847_7279C.1.pep
QSNTMIRGTXXYVAXEWFKNVAVTXXXXVYSXGIMLLEIICCRRSVVMEEPGEEEKAVLADWACDCYMEGRIDALVENEEEALSDKERLQKWIKIAIWCIHENPEMRPTIGMVVQMLEGFVQVSNPPPTFTMHSVS

SEQ ID NO: 255569 - protein, 56 aa, Glycine max
  Clone ID: PAT_MRT3847_727C.1.pep
NRVYLSKRPCRITNFRSRLPRLTRFLAQTYLSIIIIRNIFDSHSFNVIMFVHGNLH

SEQ ID NO: 255570 - protein, 84 aa, Glycine max
  Clone ID: PAT_MRT3847_72800C.1.pep
VVFFFCVVFFEENRHTSNSFRGLPICDIQKGFCWPQLPVGYIQKQIFSLKLLITGVFTCWGGGSLINGAPNFENKCFFQNQLQF

SEQ ID NO: 255571 - protein, 86 aa, Glycine max
  Clone ID: PAT_MRT3847_72801C.1.pep
AEVHLGSIFGAILIVCGLYTVVWGKSKDRKSTTEIEKGESQELPIKNGTKSASDIFDGIEINVPAEVLKKGGGKNVPPATTTTTTS

SEQ ID NO: 255572 - protein, 92 aa, Glycine max
  unsure (1)..(92): unsure at all Xaa locations
  Clone ID: PAT_MRT3847_72802C.1.pep
DGVPGLHRGFNISCVAIIVASWLFTTGMHDSLKPDSCWLEXSCIDDFLTLENLSGWGITIGARLPTYTIDTVRRIMIITCGESVNYKISFLA

SEQ ID NO: 255573 - protein, 399 aa, Glycine max
  Clone ID: PAT_MRT3847_72803C.1.pep
MEDQNGSGKLSQGLRKVKPYLAILSLQFGYSGMYIITMVSFKHGMSHWILSVYRHVVAAIIIVPFALVLERKIRPKMTLPIFLRIVALGFLEPVLDQNLYNMGMKMTSTTFASATVNVLPAITFVMALIFRLEKVNLRKFHSVAKVIGTLITVSGAMVMTLYKGPAFQIIKGGGAISNHSNSSSTSTTEPSDQHWIVGTVYLISSCASWAGFFILQSFTLKKYPAELSLTAWICVMGIIEGSIASLIFERDFSVWAIGWDSRLLACVYSGVICSGMAYYVQGVVTRERGPVFVTSFSPLCMIITAALGSLVLAEQVHLGSIFGAILIVCGLYTVVWGKSKDRKSTTEIEKGESQELPIKNGTKSASDIFDGIEINVPSEVLKKGGGKNVPPATTTTTTS

SEQ ID NO: 255574 - protein, 363 aa, Glycine max
  unsure (1)..(363): unsure at all Xaa locations
  Clone ID: PAT_MRT3847_72804C.1.pep
MSCNVAGSVTRINYPFYTPGIRLATLNLSAFKNLEWLEVSNCGLQGTIPSDIGNLSKLTHLDLSHNSLHGEMPSDIGXSLTHLDLSHNSLHSEIPSSLANFTQLEFLIISHNNIQGSIPELLFLKNLTVLDLSNNSLDGEIPRPANLIQLQSLILSNNKFQGPIPRELFLKNLIVLDLSYNSLDGEIPRPTNLTPLQSLILSTREVQGSIPSELLFLKNLTRLDLSYNSLDGEIPPALTNLTQLESLIISHNNIQGSIPQNLVFLKSLTLLDLSANKISGTLPLSQTNFPSLILLDISDNLLSGSLKPLSVGNHAQLTTIYLRNNSISGKIPPELGYLPVLSTLDLRYNNLTGTVPLSLKNFH

SEQ ID NO: 255575 - protein, 38 aa, Glycine max
  Clone ID: PAT_MRT3847_72805C.1.pep
QNVIRLMKKMVDKGGNQTDTFYLILKNYVLVIHLFTYH

SEQ ID NO: 255576 - protein, 96 aa, Glycine max
  unsure (1)..(96): unsure at all Xaa locations
  Clone ID: PAT_MRT3847_72806C.1.pep
KKEGVRLECGFPFXTPLTVICNSIFKEMLIRYSYEKLLRQAKASSLFLQSFKNFDSLGEYGDDNXLISVHEYXVEPYFNGTKLKSILSPVINITHY

SEQ ID NO: 255577 - protein, 474 aa, Glycine max
  Clone ID: PAT_MRT3847_72807C.1.pep
MSLPPPSLVTAATPTELPIRQIPGSYGFPLLGPISDRLDYFWFQKPESFFRKRVEKYKSTVFRTNVPPSFPFFVNVNPNVIAVLDVKSFSHLFDMDLVDKKDVLVGDFVPSVAFTGNMRVGVYQDTTEPQHSKVKNYIMDILKRSSGIWVSELESNLDTLWDNIEASLSKSSSVSYLFPLQQFLFTFLCKVLAGADPARDPKIAESGYSMLNSWLALQLLPTVSVGILQPLEEIFLHSFAYPFFLVGGNYNNLYNFIKQQGKDTINRGAIGFGLTEEEAIHNLLFVLGFNSYGGFSIFLPSLIDAIASNSALQEKLKKEAREKGGSTLTFDSVKEMDLIQSVVYETLRMNPPVPLQYGRARKDFRLSSHDSVFHVKKGELLCGFQKLVMRDSVIFDEPDRFKPDRFTQEKGAQLLNYLYWSNGPQTGSPSVSNKQCAGKDVVTLTAALIVAYLFRRYDSIQGDGSSITALQKTK

SEQ ID NO: 255578 - protein, 71 aa, Glycine max
  Clone ID: PAT_MRT3847_72808C.1.pep
KWLRMRRRLTCIFGMQHVSQFLANDRSMSPRVDCTMFSELKSCMSVFLYSYCIQFGPLFYSGATPRFAFLF

SEQ ID NO: 255579 - protein, 97 aa, Glycine max
  Clone ID: PAT_MRT3847_72809C.1.pep
RPLFFKRGKFVEPPPKKILALKPHLKRLKGKLVLKTGFGGKAPPLSPFPNFGGRPPFPQRGGGFFFFLVTQPPPVWAHPPLGPFGKGWDGKSFQIPF

SEQ ID NO: 255580 - protein, 62 aa, Glycine max
  Clone ID: PAT_MRT3847_7280C.1.pep
PLEFLESFRCSISSVSMSYVPELDILVISYDHSKILSASVVQFLASRYITSPIRTTVSPVMT

SEQ ID NO: 255581 - protein, 129 aa, Glycine max
  Clone ID: PAT_MRT3847_72810C.1.pep
WVATRRGCSPRHSSFWASYSFGHFAHLVCIFAPRLLNLRNIMKSLMATMGGYKKMLVFTTILLLALQQIWAFRPLKEDQWLKQRLVIQSLHRGSEQYSERNPCSTVPGRSSRRSCTFVHAAPTLPEVAN

SEQ ID NO: 255582 - protein, 45 aa, Glycine max
  Clone ID: PAT_MRT3847_72811C.1.pep
SLRGLITHGAIHVRIDGAFDEPFGLRMCYEVQLVRVFGLCGELYE

SEQ ID NO: 255583 - protein, 92 aa, Glycine max
  Clone ID: PAT_MRT3847_72812C.1.pep
EQEDFNSSRSDIGDSHNPLYTDGIDSVLLDHGDYSYVFDPDQSDLSHDEYDNLTKSFYPSYLYPNLDEDMDYSDPPDTSRNYGFADEDHVLW

SEQ ID NO: 255584 - protein, 94 aa, Glycine max
  Clone ID: PAT_MRT3847_72813C.1.pep
GLQAPIVMDPESVWPTETTLVWSELSQAIVNKDWEKATEAKKTVEERQRELQRERESKGKTWIPKHFRVSYSKEEGWDCSPIQKSVPNAPIVTL

SEQ ID NO: 255585 - protein, 70 aa, Glycine max
  unsure (1)..(70): unsure at all Xaa locations
  Clone ID: PAT_MRT3847_72814C.1.pep
GSGXFSSGXPXXXSXXAALLXXXXXXGXFPSGFXPXXRSGLXLXSXXWGLXXXFFSSGVXRPLWXXXXSP

SEQ ID NO: 255586 - protein, 46 aa, Glycine max
  Clone ID: PAT_MRT3847_72815C.1.pep
CKTIQNLKGAHRGHDAIGDGELISYLHIYGYLTKGRLSNDNFDESV

SEQ ID NO: 255587 - protein, 59 aa, Glycine max
  Clone ID: PAT_MRT3847_72816C.1.pep
RQANALAPAPRLQLLRMVLHCTLNSLSFALNDARINKTTVCVIAAKRQRRWRWRGSSCC

SEQ ID NO: 255588 - protein, 45 aa, Glycine max
  Clone ID: PAT_MRT3847_72817C.1.pep
PVIFLNQHQPKLFFGRHQIRFFLSKVCRKYLLADVSRGYFLAQVG

SEQ ID NO: 255589 - protein, 144 aa, Glycine max
  Clone ID: PAT_MRT3847_72818C.1.pep
IRLELMSIGNGGLSCSIAFGADQVNKKDKPNNQRALETFFSWYYASTAFSVIIALTVIVYIQDHFGWKVGFGVPAALMFMSTFFFFLASPLYVKNKIQGSLITGLTQVIVVGYKNRKLPLPPMNSAEMYHHMKDSDLVVPTDKL

SEQ ID NO: 255590 - protein, 80 aa, Glycine max
  Clone ID: PAT_MRT3847_72819C.1.pep
KYIIQFKGLPSQTEDPAAFNAACEAAISKLKAAGADVRDRLDCVATVTASMSKETLDKVKTFPEVGNIESDSTANAAKAA

SEQ ID NO: 255591 - protein, 77 aa, Glycine max
  unsure (1)..(77): unsure at all Xaa locations
  Clone ID: PAT_MRT3847_7281C.1.pep
MAQTFLFTSRAVNEGHPDELXDQIYDAALDACLEQDXQTAKAACESCPRNNSDMVFRETTTKACDDLQEDKARPLHE

SEQ ID NO: 255592 - protein, 42 aa, Glycine max
  Clone ID: PAT_MRT3847_72820C.1.pep
DGKNLEGDWVTNHVTYNSNLFIKAGKDYFCLEEYKRMKLVFL

SEQ ID NO: 255593 - protein, 60 aa, Glycine max
  unsure (1)..(60): unsure at all Xaa locations
  Clone ID: PAT_MRT3847_72821C.1.pep
INSGNIKQHTLSAFLCNCRVFSLFVCHSQRKFHTYFIXNKKKIIDFFFSFYXITLIRRIK

SEQ ID NO: 255594 - protein, 69 aa, Glycine max
  Clone ID: PAT_MRT3847_72822C.1.pep
RKLKSFKIEEKAFIHGRPLLLIYLFTPFSIFLFNYFYIFFFVFLTFTLFHYMLCYFIQYCSVLNILHIT

SEQ ID NO: 255595 - protein, 42 aa, Glycine max
  Clone ID: PAT_MRT3847_72823C.1.pep
HSTQGFYPTPREEIKENTNDLLHSNNTCFTQKYVYMTLNYMP

SEQ ID NO: 255596 - protein, 132 aa, Glycine max
  Clone ID: PAT_MRT3847_72824C.1.pep
NLSAGSLEQGPHNNAHGWTAARDPIFFAHHSNVPGGYRRDFTDDDDWLESSFLFYDGNKNLVRVKVVKDCLDSRKLGYDYEYVDTQWLRTRTIPKYPVSLPLPVPLPQPLPFHSTYNCVERGRKGEGVSDGS

SEQ ID NO: 255597 - protein, 79 aa, Glycine max
  Clone ID: PAT_MRT3847_72825C.1.pep
KTGVRLCYFSTFIFRWVTPLIKKGLLKLGLSNWSRILGRLGNIGKNYPFYFWFNFPRFGICFLEKENKRAQSYSESSRG

SEQ ID NO: 255598 - protein, 80 aa, Glycine max
  Clone ID: PAT_MRT3847_72826C.1.pep
PPVKRGRMHLPNPSGWMLYKSCSMHEPRSAFFLPPYIDPGWPSVLDPCSAPSQLYRSPEFSRDWSWHSAINWLERSRSLG

SEQ ID NO: 255599 - protein, 354 aa, Glycine max
  Clone ID: PAT_MRT3847_72827C.1.pep
MLWVDKYRPKTLDQVMVHTDIARNLKKLVTEQDCPHLLFYGPSGSGKKTLIMALLRQMFGPGAEKVKVDNRTWKVDAGSRSLDLELTTLSSANHIEMSPSDAGFQDRYIVQEVIKEMAKNRPIDTKGKKGFKVLVLNDVDKLSREAQHSLRRTMEKYSAYCRLILCCNSSSRVTEAIRSRCLNVRINAPSEEQIVEVLEFIGKKEGLQLPPGFAARIVEKSNRNLRRAILSFETCRVQQYPFTNKQTIPPMDWEEYISEIASDIMKEQSPKRLFQVRGKLYELLINCIPPEIILKRLLYELLRKLDAELKHEVCHWAAYYEYRMRLGQKAIFHIEAFVAKFMSIYKSFLISTFG

SEQ ID NO: 255600 - protein, 23 aa, Glycine max
  Clone ID: PAT_MRT3847_72828C.1.pep
RTSDGHQITTLKDNPPHDQHQCK

SEQ ID NO: 255601 - protein, 97 aa, Glycine max
  Clone ID: PAT_MRT3847_72829C.1.pep
FLHCRRAECYIIFLCEIEVHLLYIVFPFLIVVHFTRNRRLILYTYLQKTWVVQSLRLEPTIVKEQYLQRLMGEVEAKSNFLVQDLLNVRTHVKVRTV

SEQ ID NO: 255602 - protein, 66 aa, Glycine max
  Clone ID: PAT_MRT3847_7282C.1.pep
IRIFSRKITNFPGKCIKRCKVTEIVIKYEYDIFFFFKLRLCFQIKTAISTQCYTDILARTRENKQH

SEQ ID NO: 255603 - protein, 92 aa, Glycine max
  Clone ID: PAT_MRT3847_72830C.1.pep
LTRLFFELYDKIDVPPFLHLTYVLFGTSSLVHCMPAKHVVQTVDVPHSFKSNATMTCQLHCCHANFELLKENLIFSRMSIRVCNLYYQQYPL

SEQ ID NO: 255604 - protein, 266 aa, Glycine max
  Clone ID: PAT_MRT3847_72831C.1.pep
PRVRSSDHKQQHSFTLNYLLNTFGFSPETASKLSTRIRLETSHDPDSILSLFKSHGFSDAQIRRIIQTYPYFLSYNARKTILPKLTFLLSKGASTSDLVRIVTKNPRILHFDLHNAITPRYDFIKKFMLSDDSTLRSIKSCPSIIFSNTPLLNIQFLLHNDVPESKVVMLLRYWACSLVANAPTFQDAVREVMELGFRPNKTLFLVALRAKLGRKSLWERKVEVYRKWGWSEEILLSTFLRNPWCMLVSEKKIEAMMEFFITHLGL

SEQ ID NO: 255605 - protein, 76 aa, Glycine max
  Clone ID: PAT_MRT3847_72832C.1.pep
RFDGSPGLGPTFGAIFFTGLEWALLGLAGLGWLHSIYGPWVGGVVCPHLFFGWASRLEIGCVLSRFYIGVDESLCF

SEQ ID NO: 255606 - protein, 85 aa, Glycine max
  Clone ID: PAT_MRT3847_72833C.1.pep
YSDSMKFCQRQKFRKKFYSKSMKRGHQWMKKSYVIRGKKRGICISILLKQKKRDVQYDGHPLPLKGHVQWMRVSHLKEKDQYKHE

SEQ ID NO: 255607 - protein, 117 aa, Glycine max
  Clone ID: PAT_MRT3847_72834C.1.pep
AQVSDLNFASLSEPPVLSQGSTEQLALKNKAPRWHEQLQCWCLNFKGRVSVASVKNFQLVAAVDPSHNISAEEQEKVILQFGKIGKDIFTMDYCYPLSTFQAFAICLSSFDTKPACE

SEQ ID NO: 255608 - protein, 98 aa, Glycine max
  Clone ID: PAT_MRT3847_72835C.1.pep
PKLSFAEFVYVLLRVNPYHFSAKALVVPGRSVMLSRLYNFLACTLTPFYSTPGASGVIITQKLPVILLFSAINPVILIVAHTPPPPQRRRTSYSDDGK

SEQ ID NO: 255609 - protein, 123 aa, Glycine max
  unsure (1)..(123): unsure at all Xaa locations
  Clone ID: PAT_MRT3847_72836C.1.pep
TRNPFKFALGKKEAPKEAGARPKLGHLPLXSGSETPEREMGAXAEKYGPILTNNNGVKKEYGISNWEIAKESYTKNDIVAQTRPKQVGIEHMCYNXQTMIGFAPNGPYWRELTKNGKHRKTTP

SEQ ID NO: 255610 - protein, 42 aa, Glycine max
  Clone ID: PAT_MRT3847_72837C.1.pep
KRRFYNKFTPSDHAGLRLSLSQEISHPHQRFILLLSSFGCEK

SEQ ID NO: 255611 - protein, 178 aa, Glycine max
  unsure (1)..(178): unsure at all Xaa locations
  Clone ID: PAT_MRT3847_72838C.1.pep
GKALLYHSDDFVNWKLHPNPLYASDNTGMFECPDFFPVHISGSKSGVDTSIQNSSVKHVLKISYQNNNXEYYFLGEYFPDQEKFIPDADWARTGLDLILDHGMFYASKSFFDNAKKRRILWGWSKECDTTQDDYEKGWAGLQSIPRQVWLDKNGKWLMQWPIEEVEXLRDXQVSITVE

SEQ ID NO: 255612 - protein, 72 aa, Glycine max
  Clone ID: PAT_MRT3847_72839C.1.pep
LPPNLMLPLPPATPQTVLRPLVLLLQLLPLTSSLLVPPRLSLPVSLPQLVLLPCYKWLMVWTVERKRWMVLF

SEQ ID NO: 255613 - protein, 41 aa, Glycine max
  Clone ID: PAT_MRT3847_7283C.1.pep
VTVPFYYDYSIFFSLSINLDIAIDLGFGGDFTHLSGKFSNI

SEQ ID NO: 255614 - protein, 36 aa, Glycine max
  Clone ID: PAT_MRT3847_72840C.1.pep
IVRKSYITRVWYIRLWVYSRESSKFRCVFLLLLKVA

SEQ ID NO: 255615 - protein, 77 aa, Glycine max
  Clone ID: PAT_MRT3847_72841C.1.pep
QTTITALDKTPNHWKALSIEHPGATKTNNTNALEGNTGIYGNFKTHNSESMSKQSNVAQPKNEKHGSWNWTHKCKEQ

SEQ ID NO: 255616 - protein, 24 aa, Glycine max
  Clone ID: PAT_MRT3847_72842C.1.pep
VVFSHQNISVVITELIRYVVLYNS

SEQ ID NO: 255617 - protein, 73 aa, Glycine max
  unsure (1)..(73): unsure at all Xaa locations
  Clone ID: PAT_MRT3847_72843C.1.pep
LSLXXXXXRXXASXPFCXSDXGXXVFDXXXFXIKXXXXSAXXVXXEGXXWXPQLVFXRIXVEXGPVLXXXLLX

SEQ ID NO: 255618 - protein, 70 aa, Glycine max
  Clone ID: PAT_MRT3847_72844C.1.pep
GENATDNPRRFPGTCFNRCISLGAGFSMARTRLTLCCSVAPTQGPRSLKHSGLYAKVQSSSLDWDPCRES

SEQ ID NO: 255619 - protein, 339 aa, Glycine max
  unsure (1)..(339): unsure at all Xaa locations
  Clone ID: PAT_MRT3847_72845C.1.pep
MESEKNLRLPLSDDRNQRDERQRKVSAMTRRGVFAALSYMASSVLLVMFNKAALSSYNFPFANVITLAQMVFAFIILYVLRSLKIISFTAGESLSSSKNTIIFVSYRTLAQTLPLALTYLLFMVVTMEAVRGINIPMYTTLRRTVVAFTMVMEYFLSGQTHSRFVVGSVGIIIAGAFVAGARDLAFDAFSYSVVFVENMCKAVYLASVSRVGKSSGLNIFGIVWCNVVICGPILFLXPYSEEISQATLNFPYFFSRGFQVVMLLSCAFTFFINYIVVLNTTINSALTQAICGNLKDVFTSGIGWLLFGGLPYDLFNILGQVLGFLGSCLYAYCKLMQAV

SEQ ID NO: 255620 - protein, 79 aa, Glycine max
  Clone ID: PAT_MRT3847_72846C.1.pep
TSPDTCSSSKNKRRAYYKRSKLPLNRPYCARDIFSPRLSVVRRPLDVCSSDRPLDEDVLAKLNVVTLLYREISEGVATA

SEQ ID NO: 255621 - protein, 93 aa, Glycine max
  Clone ID: PAT_MRT3847_72847C.1.pep
MGFRIPAIVTQASFSTTQAASKRVEVQKGYLAVYVGDKMRRFMIPVSYLNKPSFQELLSQAEEEFGYDHPTGGLTIPCKEDEFLSTIANLNEL

SEQ ID NO: 255622 - protein, 75 aa, Glycine max
  unsure (1)..(75): unsure at all Xaa locations
  Clone ID: PAT_MRT3847_72848C.1.pep
CVSSSQWAIARVKRLRLLIFVRFSLGYCRDVYRSLWCCFQAXAMSRLDTAQCDRRCELLLLIIVPFALVLERKIR

SEQ ID NO: 255623 - protein, 85 aa, Glycine max
  Clone ID: PAT_MRT3847_72849C.1.pep
YIRGLQRFFQNREKSPLKTFQDNPLFFFFKAKISLAKKKGKSQGRKNPAPWFGFQAWNPACKKLAGEDQKAAHTGGHSEENILET

SEQ ID NO: 255624 - protein, 137 aa, Glycine max
  unsure (1)..(137): unsure at all Xaa locations
  Clone ID: PAT_MRT3847_7284C.1.pep
SFVSYKLVYREENLKLGGYSGAALLLGAWPCHASGSQRLPVPMRTVYGERPLQVKRPSYRLXLQAHNIRAFKTIXPKSAVEPTXDYINXNNLDHHYQTDNQQADFYASEREGHYNDILIYRIYDTGLCNIAYYQKHG

SEQ ID NO: 255625 - protein, 108 aa, Glycine max
  Clone ID: PAT_MRT3847_72850C.1.pep
ADGGEYDGWFSSVMSYVKRSDHPAPSGFSEISISWSFHVMNPFGFKDNSNSFFSFCRLYITFSKYLISYRIAGFICIYMISIMVEIRLRLSFLDSIVRAFITNVCLLL

SEQ ID NO: 255626 - protein, 227 aa, Glycine max
  Clone ID: PAT_MRT3847_72851C.1.pep
MFGVVRRRVASGSPSPWLLGQSAQKIRSGPSVSARASSIVEKEIVFRSGGCGFVQNFSHITPGSWINSKPMRVVIHPEATVRTWGRLFSSESGDTVDVVVPPLAESISDGTLAQFLKRPGDRVNADEPIAQIETDKVTIDVSSPESGVILKLLANEGDTVEPGNKIAIISRSADATHVAPSETTSEKGAPQPTQKVSEEKKAPKVETAPAKEKPKAPPAILKSPTSP

SEQ ID NO: 255627 - protein, 295 aa, Glycine max
  unsure (1)..(295): unsure at all Xaa locations
  Clone ID: PAT_MRT3847_72852C.1.pep
VGNCVRLQRLDLSRNHFTXMLPNQIGNLVNLELLXVSDNMLSGEIPXGTLGNLIRLTDLELGGNQFSGSISLHLGKLGALQIALNLSHNKLSGLIPDSLGNLQMLESLYLNDNELVGEIPSSIGNLLSLVICNVSNNKLVGTVPDTTTFRKMDFTNFAGNNGLCRVGTNHCHPSLSPSHAAKHSWIRNGSSREKIVSIVSGVVGLVSLIFIVCICFAMRRGSRAAFVSLERQIETHVLDNYYFPKEGFTYQDLXEATGNFSEATVLGRGACGIVYKAAMSDLQIKMRIKMDFFKS

SEQ ID NO: 255628 - protein, 101 aa, Glycine max
  Clone ID: PAT_MRT3847_72853C.1.pep
APKHSLHPNRVINRAVYLTQAWCTNCSVSTPLWTQLTFLHQKQYVFWSNNQTGKCSRHKNLCDNMCSMRLTDRGDWTVCILRVWEEHLNEEADQCARRSIR

SEQ ID NO: 255629 - protein, 44 aa, Glycine max
  Clone ID: PAT_MRT3847_72854C.1.pep
SISGQDPQRGPAVRIQQKAPRTHPRGQGHAQPTDRGTPPGQPRG

SEQ ID NO: 255630 - protein, 61 aa, Glycine max
  Clone ID: PAT_MRT3847_72855C.1.pep
ESCESVESAILLSLQIFNHSKETTQRIRRSSTRGTHEGRRILLYPFCLAGWCESIVTIHVC

SEQ ID NO: 255631 - protein, 45 aa, Glycine max
  Clone ID: PAT_MRT3847_72856C.1.pep
LTTVLQLNRRSTIWGSKFAIGKCRVPWCLGTRVYSEDGAYDIKFL

SEQ ID NO: 255632 - protein, 140 aa, Glycine max
  unsure (1)..(140): unsure at all Xaa locations
  Clone ID: PAT_MRT3847_72857C.1.pep
LDAIKPIADAHFKRFFKXFEIALRDYKAQLEEDPIVPRPLSSLYDSLMEQNLWRLIDPYARVEIAHIAELIKLPVDHVEQKLFQMILDKKFVGTLDQGAGCLVIFDDPKTDAIYPATLETIFNIGKVVDSLYVRSAKIVA

SEQ ID NO: 255633 - protein, 52 aa, Glycine max
  Clone ID: PAT_MRT3847_72858C.1.pep
AARAGGRDPTAVPSAGYVNPLTSFHSLHRFGGALPETELDPDRRRNTAGEEM

SEQ ID NO: 255634 - protein, 64 aa, Glycine max
  Clone ID: PAT_MRT3847_72859C.1.pep
WKRGTWKGNKVLKSIRYHNFDCNAEVFGVSAASICNSCHVNCNMSAIFCSIKDSVTTIENLERT

SEQ ID NO: 255635 - protein, 197 aa, Glycine max
  Clone ID: PAT_MRT3847_7285C.1.pep
MDYYFGNLNPNPYYHHSAVVNMASPSSEFMLSDYLVLEDALVVDHHQESWSQSTETESSEKATSSDASHGFGDATSTNTNMHIKCQNSGIKGKNAEVSQRITFRTRSQLEVMDDGYKWRKYGKKTVKSSPNPRNYYKCSGEGCDVKKRVERDRDDSNYVLTTYDGVHNHQTPSTAYYSQMPLLHSNHDWALHPSANS

SEQ ID NO: 255636 - protein, 58 aa, Glycine max
  Clone ID: PAT_MRT3847_72860C.1.pep
ARLSLRQWRPVTPFTTLRPNSSTGGHSSITTGGNLSGKTDLRLQNPSSTAKCQKDVHA

SEQ ID NO: 255637 - protein, 51 aa, Glycine max
  Clone ID: PAT_MRT3847_72861C.1.pep
VSRCMQSSMVQFPYKNVFIYLLFSTVNGTTFGRSCIFNKLKPTNYAYFNIC

SEQ ID NO: 255638 - protein, 104 aa, Glycine max
  unsure (1)..(104): unsure at all Xaa locations
  Clone ID: PAT_MRT3847_72862C.1.pep
MARVLVYYSSSHNTGNGSYYYYHGRIWMDTDGNPIQAHGGGILYDERXRTYYWYEYKDGPTYHAHKRASARMRLNKVSELIHNSTNHQNLDSAGVSVHFQEIVD

SEQ ID NO: 255639 - protein, 62 aa, Glycine max
  Clone ID: PAT_MRT3847_72863C.1.pep
CHGNFIRILYPLIAFLKGEKGLCNVFFKEIEKLFPLILPSKPTLTLWRSSSTTQLCRSQCSA

SEQ ID NO: 255640 - protein, 75 aa, Glycine max
  Clone ID: PAT_MRT3847_72864C.1.pep
MTFKSLQCNNIIEKAVYLSFHQLFSSQPIFSLVQGRKYFNVSSTYFFPISKERSCNCEGILSLQFFYVQHFYRSK

SEQ ID NO: 255641 - protein, 107 aa, Glycine max
  Clone ID: PAT_MRT3847_72865C.1.pep
RIIWLLLSLDFGTPVLLGVFIVQGVSFSKNSPSFYTHYADATYNPGGAYCEMLRFDMAIQLYQHSSHFITYSARRPERISWNIYRRSLTTIDISRKCSHLASGIKPY

SEQ ID NO: 255642 - protein, 123 aa, Glycine max
  Clone ID: PAT_MRT3847_72866C.1.pep
IFLNISVISVLRYLLRWWTSQIRRLSHTVEQSKHHISFLIGRSFTFGDGVEHGRRQGTRRMPCFASFAQWRLCWSAYDCQYAFFDIGLEGCRVSAGRIRSKPSPSTLANRVNLERVSSLYLLG

SEQ ID NO: 255643 - protein, 58 aa, Glycine max
  Clone ID: PAT_MRT3847_72867C.1.pep
NSKHATGLYETYPYYSYRRKIRETGFLFNVVSRKLPTMKILINKTADSYLRVYENSRT

SEQ ID NO: 255644 - protein, 128 aa, Glycine max
  unsure (1)..(128): unsure at all Xaa locations
  Clone ID: PAT_MRT3847_72868C.1.pep
GPRHSMPSHENICXPPPNAPNTPRPGYGNFSSPSEGIPMHHGVPNTPRSSSYGNFSGPNEGIPRHPGAPITQRSSSYGNFSAPNEGIPRHPSAPNTPRPSSYGNFSTPNGHETQGVKAGMHRNREGNQ

SEQ ID NO: 255645 - protein, 119 aa, Glycine max
  Clone ID: PAT_MRT3847_72869C.1.pep
MVLFKQLASLSTLLTLFFLHLLLVDSQILETPSPPPDPTSLVPNILNFIDQRLAQVFPIIQTFKNTITSDPRGVTSTWVGPNICNYTGFYCDNPPDNLTGTTIASIDFNGFQLTAPTLD

SEQ ID NO: 255646 - protein, 46 aa, Glycine max
  Clone ID: PAT_MRT3847_7286C.1.pep
ILLTFKIFNLKVIQTINFHLTLNNEKKCKHTTYMKDATLTYTYMGT

SEQ ID NO: 255647 - protein, 72 aa, Glycine max
  Clone ID: PAT_MRT3847_72870C.1.pep
DCTVSLYFRADVYSVPFYFTKSHTYPSLLNALPFPSFPKPSFQLNLVIITHPVIFTTYNLLIRSHFPYDDFT

SEQ ID NO: 255648 - protein, 127 aa, Glycine max
  unsure (1)..(127): unsure at all Xaa locations
  Clone ID: PAT_MRT3847_72871C.1.pep
VSSQAPTRSLLXPXPXAKGKAFHSEQSPPXXXTXTAIAHCNAGKGLRKSHRQAPPQDQPNTLRSKRLPAHPNPMRQQHQRIQHPLTQLQTQKHPPKLPQRAGQGQIHQRPLPKAPQQALKEPTKAPL

SEQ ID NO: 255649 - protein, 49 aa, Glycine max
  Clone ID: PAT_MRT3847_72872C.1.pep
GRWCTSICIHNKRCIRHLISRPHHQASFLWSQGGWEFLRTNGSTRGSRR

SEQ ID NO: 255650 - protein, 114 aa, Glycine max
  Clone ID: PAT_MRT3847_72873C.1.pep
LICVLVSNPFLAYVHLSPIHPYRVFLARYLHRICMLFLPEFKITFGCYICRVINGNRGSGKESKESCGYSGVGLFLRLELSLCCFFLGHIYSSFCCFTFQSFQNIFWLWLYFSF

SEQ ID NO: 255651 - protein, 71 aa, Glycine max
  Clone ID: PAT_MRT3847_72874C.1.pep
PGVNFLTMLYYIKTLGLSLLFMTIPLFFGGGFESQNPQIYQILGVHTVGKKIIHPPAYFNRMAFSHHQFLS

SEQ ID NO: 255652 - protein, 75 aa, Glycine max
  Clone ID: PAT_MRT3847_72875C.1.pep
ANATLVDIMRERMRERERPLPWCIARFTLTLMTLAMSASFLLSFFLSLWVEMALPDFFSRGNSLIPFLIYSSCLK

SEQ ID NO: 255653 - protein, 136 aa, Glycine max
  Clone ID: PAT_MRT3847_72876C.1.pep
MVGEHSTTSPASGDHKIPLLPVHEPVEGTHTNISFSTKSILTLQNFYVILGPMLSLFICLFVKLDAPPTSQKMLGVIAWVFSWWVTQAVPLPVTSMCPLFLFPIFGIASADSVAHSYMDDVITLVLGSFILALAVE

SEQ ID NO: 255654 - protein, 95 aa, Glycine max
  Clone ID: PAT_MRT3847_72877C.1.pep
MAHTASGMAVHDDCYLRILELNATRTHLFIVFNIDDQHKHDIAENLAAPAQGYVDFTARLPADECQYAAHDLQSLSERNVPTSIIHFIAGSPDTS

SEQ ID NO: 255655 - protein, 71 aa, Glycine max
  Clone ID: PAT_MRT3847_72878C.1.pep
MASFASFLQELLAALSLMPEGLATYDTPVPLPAVCNPPLVKPTIVHPSVLSPKPSVYLPQASVYTPPHERS

SEQ ID NO: 255656 - protein, 203 aa, Glycine max
  Clone ID: PAT_MRT3847_72879C.1.pep
MRAGKGSQEEDEYEEEEFGSSKKQGTSSAPNANKDGKAIDKASAIRSKHSVTEQRRRSKINERFQILRDLIPHSDQKRDTASFLLEVMEYVQYLQEKVQKYEGSYQGWGQEPLKLMPWRNSHWRVQSFAGQPTAVKNGLGPVSPFPVKFDESNASISPTMLSGTQNTIDPYQSRDIVNKTAERQPDLVNKGMPLPLAMHANMS

SEQ ID NO: 255657 - protein, 67 aa, Glycine max
  Clone ID: PAT_MRT3847_7287C.1.pep
QCPYFFFGNTIISNGLDFAFSFTNLEFSSFYFLQTALFFVLHPFSPLHLPAPERVSCLKLKISFFRV

SEQ ID NO: 255658 - protein, 86 aa, Glycine max
  Clone ID: PAT_MRT3847_72880C.1.pep
LSSSSKGPPRCLLICFMFVGLSQDLSHVIMDPFSMSVCNSRLRLEEIPPPANGCIHLGLVLFPSEVCRYEGLWKTWFILDTPRAEI

SEQ ID NO: 255659 - protein, 335 aa, Glycine max
  Clone ID: PAT_MRT3847_72881C.1.pep
MRAGKGSQEEDEYEEEEFGSSKKQGTSSAPNTNKDGKAIDKASAIRSKHSVTEQRRRSKINERFQILRDLIPHSDQKRDTASFLLEVIEYVQYLQEKVQKYEGSYQGWGQEPSKLMPWRNSHWRVQSFAGQPTAVKNGLGPVSPFPGKFDESNVSISPTMLNGSQNTIDPDQSRDIVNKTAERQPDLVSKGIPLPLAMHANMSVPVRSDGVLAHPLQGTVSNAQSTECPTTSEPQNQQDELSVEGGTISISSAYSQGLLNNLTQALQSAGLDLSQASISVQINLGKRANKGLNCGTSSLKHHDNPSSNNQTIAHFRDAGSGEDSDQAQKRMKTYK

SEQ ID NO: 255660 - protein, 90 aa, Glycine max
  unsure (1)..(90): unsure at all Xaa locations
  Clone ID: PAT_MRT3847_72882C.1.pep
EKIFKKKKKKKKKRKNKKKKKYKKKKKKKNXNKKKKKLKKKKKRGGPPLLTPSPRNLFPARSLRASHFSFYGAVLNLGENMDIPFPWGKI

SEQ ID NO: 255661 - protein, 209 aa, Glycine max
  Clone ID: PAT_MRT3847_72883C.1.pep
MTRTPCCERMGSKKGPWTAEEDQILVSHIQQYGHGNWRALPKQAGLLRCGKSCRLRWINYLRPDIKRGKFSKEEEHTILKLHGIRGNRWSAIAASLPGRTDNEIKNFWHTHLKKRIQKSGVHNGNPSSRILQEAQANTSSNASSVMIANYGLPSRNINPPIAGFYGAVSSDTFGEIKDNHGSCQLSEEMEFWYNIYSSNQGKHHETMEI

SEQ ID NO: 255662 - protein, 66 aa, Glycine max
  unsure (1)..(66): unsure at all Xaa locations
  Clone ID: PAT_MRT3847_72884C.1.pep
IPGLRFMVVVAMVNLALVVFGRXWWAQLGKTYKIKSCVRFLLGGWIAMAITFGLTKLLGAKALDKE

SEQ ID NO: 255663 - protein, 85 aa, Glycine max
  unsure (1)..(85): unsure at all Xaa locations
  Clone ID: PAT_MRT3847_72885C.1.pep
FCFFPPPLVIGHNKTLXRTAKPNSVNDNHNTQSXXKFLIFFLLXXEASRXKXHXCXVDRSTAXXNHGXASKXSKIXRXXGEVEIE

SEQ ID NO: 255664 - protein, 75 aa, Glycine max
  unsure (1)..(75): unsure at all Xaa locations
  Clone ID: PAT_MRT3847_72886C.1.pep
TXXIXXXXAXYCXRXYXRXGXAILKFXXXIXVQXXHLQXFXVDYPILDLWQFRFHIICKSXSXCVSVXCCRKILG

SEQ ID NO: 255665 - protein, 62 aa, Glycine max
  Clone ID: PAT_MRT3847_72887C.1.pep
GITYVAPNHASVDSAVGTGVSDQSRHSDISASMQERRSHLRMRPKPCAWMRSKQPIPVILEP

SEQ ID NO: 255666 - protein, 67 aa, Glycine max
  Clone ID: PAT_MRT3847_72888C.1.pep
FSNSKFWSLTMNVFTCRYFFFGMHLRTIIYVRRMLKLQNAILLPVICVLGPNCFMPLSGIYISLLFL

SEQ ID NO: 255667 - protein, 163 aa, Glycine max
  Clone ID: PAT_MRT3847_72889C.1.pep
NMLTLTAAAMAGVAATIATGDAPLLALKLSSTLLFSASTGMLMVMNKIQPSQLAEEQRNATRLFKQLKSHIETILAIGNPTEEDVKDSMEKVLALDKAYPLPLVGAMIGKFPKKFEPAMWWPSKRNNSQYHETNKQHGKNNGWNERLEIELKDVLKVVKENDM

SEQ ID NO: 255668 - protein, 57 aa, Glycine max
  unsure (1)..(57): unsure at all Xaa locations
  Clone ID: PAT_MRT3847_7288C.1.pep
VFDKDGNGSISAAXLRRVMSILGEKLPDDQVGEMIIEADNDGGGQVNYEEFAQMMSA

SEQ ID NO: 255669 - protein, 80 aa, Glycine max
  Clone ID: PAT_MRT3847_72890C.1.pep
RLHGSFHEHIQQKHGGDLSVAEGRMSPSHYHHMTFSKPNDISPYYVSTCLPSSFNIFYLSTIVNKTTPYLIPTKLILTIS

SEQ ID NO: 255670 - protein, 47 aa, Glycine max
  Clone ID: PAT_MRT3847_72891C.1.pep
NREQKQSLLDYKNFSIYSYFFAYEHLRGRKTLSELITDSGKHFFYHS

SEQ ID NO: 255671 - protein, 92 aa, Glycine max
  unsure (1)..(92): unsure at all Xaa locations
  Clone ID: PAT_MRT3847_72892C.1.pep
PCSSNNNGSGSNNSTTTTPSRYENQKRRDWNTFCQYLRNQRPPLSMAVCGGAHVLEFLQYLDQFGKTKVHNPTCPFFXLPNPPAPCPCPLRQ

SEQ ID NO: 255672 - protein, 53 aa, Glycine max
  unsure (1)..(53): unsure at all Xaa locations
  Clone ID: PAT_MRT3847_72893C.1.pep
INFLYRCHLTSCGSCFLVCLPIXXXWGGGGCFFSLYMYMHIFFGVVHAMREAN

SEQ ID NO: 255673 - protein, 76 aa, Glycine max
  Clone ID: PAT_MRT3847_72894C.1.pep
NRGKFWAGMNYPRQRNSLHFKTGLPTLSVNPAKRIQGTLKRHFKKTRGNSPQPIWGLRTESTVGSYLGYNSPQVIA

SEQ ID NO: 255674 - protein, 70 aa, Glycine max
  Clone ID: PAT_MRT3847_72895C.1.pep
RNSSRGFSRGPRPAFIFSSIWPVSTGGSRTTQRLTDLQAPHFDSALCHRAPSPELQIHHIEGMSWPTSGD

SEQ ID NO: 255675 - protein, 75 aa, Glycine max
  unsure (1)..(75): unsure at all Xaa locations
  Clone ID: PAT_MRT3847_72896C.1.pep
SPTLTPLKKTASHIDGYPRVGPMRELKFAVEYIXDGPNNAXDVQKVSSDLKASIWKQMADAGIKHIPSNTFFHYD

SEQ ID NO: 255676 - protein, 104 aa, Glycine max
  unsure (1)..(104): unsure at all Xaa locations
  Clone ID: PAT_MRT3847_72897C.1.pep
TLDSYAAISTLKRHQMRVNSVDYLVTHNNQYMILGTDDYTDTVCDYHPRNCVHTLKXRRPMMLQYSAHPDLSIIXTPTEDSTDKMWEAVTYRLXTTLNYRLNRV

SEQ ID NO: 255677 - protein, 52 aa, Glycine max
  Clone ID: PAT_MRT3847_72898C.1.pep
RKACSYYPHLSPNFECARGHFHSQKSFFINVSKRVCEVTLDPLPDLSITLRC

SEQ ID NO: 255678 - protein, 104 aa, Glycine max
  unsure (1)..(104): unsure at all Xaa locations
  Clone ID: PAT_MRT3847_72899C.1.pep
SGLDDQIPTAFDPFADANADDSGAGSKDYVHIRVQQLNGMKSLTTVHGXKKEFSSNKILRDVKIEFCRTGTTGHDPGLGQVIQLXGDQRKNDTTYLVEAGVVKN

SEQ ID NO: 255679 - protein, 34 aa, Glycine max
  Clone ID: PAT_MRT3847_7289C.1.pep
VRIAPDIETRRYSLTQLPPAPPCSDIPPGAHSHS

SEQ ID NO: 255680 - protein, 71 aa, Glycine max
  Clone ID: PAT_MRT3847_728C.1.pep
IAERLTPYIFILGSDGSIHGNHKDLFFTIFVVFFKCIKALIRVTTVGGELPYFEENPDEDMLNVSSQKSQC

SEQ ID NO: 255681 - protein, 163 aa, Glycine max
  Clone ID: PAT_MRT3847_72900C.1.pep
DQEGDRSLPGKEGSPISQREGPFYKAPLVCPEHKVTPSDFPIVSRASKRVPVLALRSPRSDGPLFPFNEIEKALSGPSAKLRSESQWPFITPQGHPYLTGPWFQFHPCGPRHWMKLFFHSESSLNKNGFVIAPDLISWFPALGQVVGFKIPLEMVEPVVSNDS

SEQ ID NO: 255682 - protein, 40 aa, Glycine max
  Clone ID: PAT_MRT3847_72901C.1.pep
SLLEESSLFQAYRYSVPAKFQSKYLDVMVCITFKSNYYKS

SEQ ID NO: 255683 - protein, 52 aa, Glycine max
  Clone ID: PAT_MRT3847_72902C.1.pep
VIPFLSIGTITGELPRFQAGVTMEISCLDAWYSDKDGTLECRATYIVKGLCR

SEQ ID NO: 255684 - protein, 110 aa, Glycine max
  unsure (1)..(110): unsure at all Xaa locations
  Clone ID: PAT_MRT3847_72903C.1.pep
MTLTLSIRTASICSWRLTISLNGSIGLITRKTSAAIKDRDXKKPISCTHSAVLQFTAGXIHRLMKSMTAAHDRFWATSAVYYAAILEYLTAEVLHLARNASKDLIVKRIT

SEQ ID NO: 255685 - protein, 150 aa, Glycine max
  unsure (1)..(150): unsure at all Xaa locations
  Clone ID: PAT_MRT3847_72904C.1.pep
NDAKIVIKFLKKNIFSRFGMPRILISDGGSHFYYSQLNKVLKHDSVRHKVETSYHPQTNGQAKVSNIHXREFLREKNVASSRKDWSSKLEDALWACKTAKKTPIGLTPFQMVYRKACHLPVELKHKAYWAMKCLNFDPTISGEKRKLQIA

SEQ ID NO: 255686 - protein, 80 aa, Glycine max
  Clone ID: PAT_MRT3847_72905C.1.pep
GILVFLCRSGERMFSLSSTKVKWVALETLFLHYNGSILLAAAVGVSVTVRERIGTSQRVRVTERRMAGSATQKRRERERE

SEQ ID NO: 255687 - protein, 310 aa, Glycine max
  Clone ID: PAT_MRT3847_72906C.1.pep
MSRRSSRTVYVGNLPGDIREREVEDLFLKYGHITHIDLKVPPRPPGYAFVEFEDAQDAEDAIRGRDGYDFDGHRLRVEPAHGGRGHSSSKDRHNSHSNGRGGRGVSRRSEYRVLVTGLPSSASWQDLKDHMRKAGDVCFSQVFHDGRGTTGIVDYTNYDDMKYAIKKLDDSEFRNAFSKGYVRVREYDSRRDSSRSPSHGPSHSRGRSYSRSRSRSHSYSRDRSQSKSPKGKSSQRSPAKSPKGKSSQRSPAKSPSRSPSRSRSRSRSRSLSGSRSRSRSPLPPRNKSPKKRSASRSPSRSRSRSKSLSR

SEQ ID NO: 255688 - protein, 73 aa, Glycine max
  unsure (1)..(73): unsure at all Xaa locations
  Clone ID: PAT_MRT3847_72907C.1.pep
EKAQETFLSTSDCGNEGHPDKLFYQISDAELSADLEQDPDSXAACKTCTKTNMAMVFGEITPNANVDYEKIVP

SEQ ID NO: 255689 - protein, 272 aa, Glycine max
  Clone ID: PAT_MRT3847_72908C.1.pep
VGEQEEKLAEGIKLYALLATATSKRTVLSDLITVYAKGGKTIVFTQTKKDADEVSMALTSSIASEALHGDISQHQRERTLNGFRQGKFTVLVATDVATRGLDIPNVDLVIHYELPNDAETFVHRSGRTGRAGKQGNAILLYTSSQRRTVRSLERDVGCKFEFVSSPAMEEVLEASAEQVVATLCGVHPESVQFFTPTAQKLIEEQGARALAAALAQLSGFSQPPSCRSLINHEQGWTTLQLTRDSDTSGRYFSARSVTGFLSDVYSQAADEV

SEQ ID NO: 255690 - protein, 82 aa, Glycine max
  Clone ID: PAT_MRT3847_72909C.1.pep
SFSASIATFTWQDQVFIFYSNITSGYCYCYYYYYSSQVTMTMLGCCLRYSRDSNLSFESSFVILILLVNLEYLGRVVFNTNA

SEQ ID NO: 255691 - protein, 111 aa, Glycine max
  Clone ID: PAT_MRT3847_7290C.1.pep
TGRKTRATHAPSYNKTTKDAQTKRGTAGPPRGGPPEEATQAHTQRRRGPDHKERIPLATPEGTPHVPPRKNGEKGKRRPAPGEGEEKTTTPGTRDEEANNKQKGQPEKRAP

SEQ ID NO: 255692 - protein, 44 aa, Glycine max
  Clone ID: PAT_MRT3847_72910C.1.pep
YRDEIPYEVAKEIDDAIFDLRKAMSEDNVDEIESKLDAAIKAVS

SEQ ID NO: 255693 - protein, 233 aa, Glycine max
  unsure (1)..(233): unsure at all Xaa locations
  Clone ID: PAT_MRT3847_72911C.1.pep
KPSLYMFLALALNVTTHEGHFYWYTDPKAGPAFSQEFVGVIYAIGAVASLIGVLIYHKALKDYPFRDLVFYAQLLYGISGVLDLIFILRWNLVIGIPDYFFVVIEESATRITSKIRWMPMMVLSTQLCPLGIEGTFFALLMCIDSIGALLSRWGGGVLLRVLHITRTDFTNLWLAVLIRDMLRFATLALVFLVPKTDXYEELLPFEVSGKNTSDKVDEEETLELVPINGKTEV

SEQ ID NO: 255694 - protein, 66 aa, Glycine max
  Clone ID: PAT_MRT3847_72912C.1.pep
LANGRFHLHYTHGLTLQKSNKLEGLTYRKGQRFTLPPSRSKRSFQTCGARNFSRRCKNSVHFSARI

SEQ ID NO: 255695 - protein, 97 aa, Glycine max
  Clone ID: PAT_MRT3847_72913C.1.pep
VRSSLMLLGGVVIVGLDPMQFIKGTLLQLVHSGGSDCLGLAKHRVVLFPLIHCMRVTGSGLLSHWSDRDVSVGSHLFLFLGRYLCSPIQSSALNART

SEQ ID NO: 255696 - protein, 82 aa, Glycine max
  Clone ID: PAT_MRT3847_72914C.1.pep
CVSKIKTTKYLVELFFLFSGIVLRLSLVSIWYLWIENNASFFDKMFLLFHLFAYLVVSYASLSMATHFGGISFIFSCFLSFY

SEQ ID NO: 255697 - protein, 215 aa, Glycine max
  Clone ID: PAT_MRT3847_72915C.1.pep
CSGFQKDCVVCSGTTDSIAAFLAARATQPGKAVTSLGSTLAIKLLSNTRIEDSRFGVYSHRLDDKWLVGGASNTGGAILRQLFTDDQLDKLTEQINPSQPSLLHYYPLPKAGERFPVADPNLAPRLLPRPENDVEFLHGILESIARIEAKAYGLLKELGATQVDEVFTAGGGAKNEKWIKIRERVIGLPVSRANQTEAAYGAALLAMKGDQQNIL

SEQ ID NO: 255698 - protein, 397 aa, Glycine max
  unsure (1)..(397): unsure at all Xaa locations
  Clone ID: PAT_MRT3847_72916C.1.pep
MPSIETKNIKKPLERKRGKTEKSISLEVLQRYFAGSLKDAAKSLGVCPTTMKRICRQHGISRWPSRKINKVNRSLSKLKRVIESVQGAEGAFGLNSLSKSPLPIAVGSFPEPSTPNKFSQLEWKNQLLGGRTQNLEKVINDKGGYTREVGREPKRTRTRNGSSEDSTNPTSHGSCHDSPPNESSPVKDIFITSNNDQCAGIKRSPESTLQPTINTPSRPTAYPMPDXAVELQEPFGGMLIEDAGSSKDLRNLCPLVAEVILEDMIPEACGTNLPGPDLSPKLSMGTPNKAVTPFAAMKEMKTVTIKATYREDIIRFRVSLTCGIVELKEEIAKRLKLEVGTFDIKYLDDDHEWVLIACDADLQECMDVSRSSGSNIIRVLVHDITSNLGSSCESSGE

SEQ ID NO: 255699 - protein, 179 aa, Glycine max
  unsure (1)..(179): unsure at all Xaa locations
  Clone ID: PAT_MRT3847_72917C.1.pep
SKEPRELDRQLKFNSSSLEVHTCPRKDENVHSSSDSTTDCSVKTVFPFSKADVYTTFDGTTFSYNIEEKKKVEISDTRXSIEEQVGQLGRPIYLXXXQAXXEQKMIGSLSFPLPPENLKQEIPRLPPVKLKSXXXPLVVNWEQKFELDGPTSKLFGVDSTLLAGSYLDXPIGQXINPSG

SEQ ID NO: 255700 - protein, 211 aa, Glycine max
  Clone ID: PAT_MRT3847_72918C.1.pep
MGIIPTNKDIAEDAINFFNYWSGSSPNPEYNKLIVAPSDIRDVFIDRIDKEIRSHLQHGNGKIMMKMNSLTDKTIIEKLFEASQAGVKIQLIIRGICCLKPGIPADVMTRNMIKRVEILFPVEDKSIGQRLVNYMNLQLSDNQKGRYQDAQGVYHYVENNSSPLNSQSYLMQEAIKYGEELKKQSVQPSGQPVHSRRGGSWMRKLKNTFKR

SEQ ID NO: 255701 - protein, 70 aa, Glycine max
  unsure (1)..(70): unsure at all Xaa locations
  Clone ID: PAT_MRT3847_72919C.1.pep
QTLLWIFLEKWIIVKEFTXAPFKKLLKGMDENNKSMAGAKTDEEKEKFKTKKQNATTGLRTCNYHLNMTK

SEQ ID NO: 255702 - protein, 126 aa, Glycine max
  unsure (1)..(126): unsure at all Xaa locations
  Clone ID: PAT_MRT3847_7291C.1.pep
WFCNFSFLRVFFWGPGSSFFCFFRAVDPKKKSLFFPIFWFFLLPFFRKEKKXEVQIFSWLVLERELSGATLPLSHTPPLTPGPPPASRRWKALLXRXGLRFAACFSXVVPFXXLLLGXFLRRGSXV

SEQ ID NO: 255703 - protein, 70 aa, Glycine max
  unsure (1)..(70): unsure at all Xaa locations
  Clone ID: PAT_MRT3847_72920C.1.pep
PAPSGKSKECAALKRGPENPPPREVGRACLSQVPPRKCGPHNRSPLRTNGTNNGPPPPGGQPXSLEMSPF

SEQ ID NO: 255704 - protein, 495 aa, Glycine max
  Clone ID: PAT_MRT3847_72921C.1.pep
MEKKKGELKSIFLPFLSTSHIIPLVDMARLFALHDVDVTIITTAHNATVFQKSIDLDASRGRPIRTHVVNFPAAQVGLPVGIEAFNVDTPREMTPRIYMGLSLLQQVFEKLFHDLQPDFIVTDMFHPWSVDAAAKLGIPRIMFHGASYLARSAAHSVEQYAPHLEAKFDTDKFVLPGLPDNLEMTRLQLPDWLRSPNQYTELMRTIKQSEKKSYGSLFNSFYDLESAYYEHYKSIMGTKSWGIGPVSLWANQDAQDKAARGYAKEEEEKEGWLKWLNSKAESSVLYVSFGSMNKFPYSQLVEIARALEDSGHDFIWVVRKNDGGEGDNFLEEFEKRMKESNKGYLIWGWAPQLLILENPAIGGLVTHCGWNTVVESVNAGLPMATWPLFAEHFFNEKLVVDVLKIGVPVGAKEWRNWNEFGSEVVKREEIGNAIASLMSEEEEDGGMRKRAKELSVAAKSAIKVGGSSHNNMKELIRELKEIKLSKEAQETAPNP

SEQ ID NO: 255705 - protein, 56 aa, Glycine max
  Clone ID: PAT_MRT3847_72922C.1.pep
NCYWSYQDCFWIKIPFKDSENIIIHNSQWTRTFIVEWGPISRISPVRTPGRTRGSV

SEQ ID NO: 255706 - protein, 31 aa, Glycine max
  Clone ID: PAT_MRT3847_72923C.1.pep
TYNQRTKRVTYSCHAKIAWGTPINGWTLLHM

SEQ ID NO: 255707 - protein, 79 aa, Glycine max
  Clone ID: PAT_MRT3847_72924C.1.pep
PMMNFDIKFRKKQSSHNLNMRDAAPYIVIQFIKDEKQISKQMAIGSQNKKSFYIRKSRQVTRGLEILIKVETTEKLIKM

SEQ ID NO: 255708 - protein, 74 aa, Glycine max
  Clone ID: PAT_MRT3847_72925C.1.pep
KYKKSPKNGSGISTTPLFFKGFSINPQGNRKRGVKTLSPPQGHQQTNRGFFAWEKKNQILVTKARGRQFKNSGV

SEQ ID NO: 255709 - protein, 73 aa, Glycine max
  unsure (1)..(73): unsure at all Xaa locations
  Clone ID: PAT_MRT3847_72926C.1.pep
VVLIAVGMVYLGLKXPVAEGQVEVRKLELQELVKMFQHEAETHAQVRKNISPKNLPPTAGDGFRSDADYLVIQ

SEQ ID NO: 255710 - protein, 73 aa, Glycine max
  Clone ID: PAT_MRT3847_72927C.1.pep
GGRNKGTKAPPPPTQQGANTQHPPRRNRNDSGRKPNGTQRDQTGPEGISPEGPAARIRGRHTPPPNERANEGT

SEQ ID NO: 255711 - protein, 56 aa, Glycine max
  Clone ID: PAT_MRT3847_72928C.1.pep
DNVEYETENRHYTHVDCPGHADYKKNMITGATQMDGAILCVCGADCPMPQTEEHIL

SEQ ID NO: 255712 - protein, 39 aa, Glycine max
  Clone ID: PAT_MRT3847_72929C.1.pep
VLNGNEGRPPPQRAQIKKQRRHYPKPGREPERFNGTSFP

SEQ ID NO: 255713 - protein, 97 aa, Glycine max
  Clone ID: PAT_MRT3847_7292C.1.pep
GHSEVGEISIRFSQEIDSSNVQESSSMSSALDEASLEATSFRQLQQVMDQLDIRTKLCIRDSLYRLAKSAEQRHNDTNASGQIGDDVEACQAVMIQD

SEQ ID NO: 255714 - protein, 85 aa, Glycine max
  unsure (1)..(85): unsure at all Xaa locations
  Clone ID: PAT_MRT3847_72930C.1.pep
RTLGKDAHNLLEYCKRMQAENHGCFYAIQLDEDDRVSNVLXAGTRSRTSYKHMGDAESLDAAYGKHRYAVSYAPYTGRNCHGRMI

SEQ ID NO: 255715 - protein, 231 aa, Glycine max
  unsure (1)..(231): unsure at all Xaa locations
  Clone ID: PAT_MRT3847_72931C.1.pep
MEEETFEKPLLKKNYHENCPGCKVDQAKELKKDVSFRNLSYIWLAVLCGTLPVASFFPFVYFMVKDFNIAETEEDISTYAGYVGSSMMLGRSLTSILWVXIFNTLFGLSTNLWMAVSMRFLLGCLNGLLGPIKAYATEIFREEEQALGLSTXLVIGPALGGYLAQPVLKYPHIFPKGSFWDRFPYFLPCFIISAFAFASAIACIWLPVCISVHLPSSIFITFILNINMIDI

SEQ ID NO: 255716 - protein, 305 aa, Glycine max
  unsure (1)..(305): unsure at all Xaa locations
  Clone ID: PAT_MRT3847_72932C.1.pep
MEEETFEKPLLKKNYHENCPGCKVDQAKELKKDVSFRNLSYIWLAVLCGTLPVASFFPFVYFMXEFPGYETRVRADISTYAGYVGSSMMLGRALTSIFWGMISDRYGRKPVIISGIITVVIFNTLFGLSTNLWMAISMRFLLGSLNGLLGPIKAYAAEIFREEKQALGLSNFVAAWGVGLVIGPALGGYLAQPVLKYPHMFPKDSFWDRFPYFLPCFIISAFAFASGIACIWLPETLHNHKSSSESTNSVEALEMESNETNNDKMISASLQETLHNHNGGSIESTINVKALEIGKHEAKDQTIKE

SEQ ID NO: 255717 - protein, 57 aa, Glycine max
  Clone ID: PAT_MRT3847_72933C.1.pep
TSLSENFCDVMTPLWFTVHRGSIPHLFLMGSLFKASAFICTLKLIQAQGNILSIPKL

SEQ ID NO: 255718 - protein, 62 aa, Glycine max
  Clone ID: PAT_MRT3847_72934C.1.pep
DVYSDESSVSRFRQRTDLMLSLTCRRLNRRQNLCVPFLVCRSCSLQRQRVPASSDVRMSWRP

SEQ ID NO: 255719 - protein, 53 aa, Glycine max
  unsure (1)..(53): unsure at all Xaa locations
  Clone ID: PAT_MRT3847_72936C.1.pep
GILRIEVLANFLTFGHFRASVDLLXTHRIIGMIXMVATVGFTENSGISLACAI

SEQ ID NO: 255720 - protein, 49 aa, Glycine max
  unsure (1)..(49): unsure at all Xaa locations
  Clone ID: PAT_MRT3847_72937C.1.pep
EGNLVPFTIRHMTEIASFFPFSYFQLESIESHIHLGLRTGTXEVKKLYL

SEQ ID NO: 255721 - protein, 34 aa, Glycine max
  Clone ID: PAT_MRT3847_72938C.1.pep
GENLVQQRSVVSELGLVFGIWQSYITLGFFHCIL

SEQ ID NO: 255722 - protein, 72 aa, Glycine max
  Clone ID: PAT_MRT3847_72939C.1.pep
TRRGSPVSTPSASGAPPASIIGGSGEDQVLAAGADKVSWVPDPVNGCSKPGGIKEIDAPELTSLVLGKKFFL

SEQ ID NO: 255723 - protein, 163 aa, Glycine max
  Clone ID: PAT_MRT3847_7293C.1.pep
MDDKLVKDQVLLVPVTCGCTGNRSFANISYEINQGDSFYFVATTSYENLTNWRAVMDLNPVLSPNKLPIGIQVVFPLFCKCPSKNQLDKEIKYLITYVWKPGDNVSLVSDKFGASPEDIMSENNYGQNFTAANNLPVLIPVTRLPVLARSPSDGRKAEFVFRL

SEQ ID NO: 255724 - protein, 379 aa, Glycine max
  Clone ID: PAT_MRT3847_72940C.1.pep
GRIINAEAMDNAQLWLAWVQSSSWLASLIFQFLPNMIIFVSTRAARAARAARADSARGHLTVSGEQRAALMKMVCFFLVNLILLRGLVESSLESMILKMGRCYLDGEDCKRIEQYMSASILSKSCLSSLAFLITSTFLGISYDLLAPIPWIKRNIQKFRKNDMLQLVPEQSEEYPLENQGIDNQNSLQRPLMHDNAYDIANGDNVEGQDLFVYPITGSSPAPKQTFDFAQYYAFNLTIFALTLVYCSFNPLVVPVGAIYFGYRYVVDKYNFLFVYRVRGFPAGNDGRLIDTVICIMRFCVDLFLLAMLLFFSVQGDSTKLQAIFTLGLLVVYKLLPSSNDSFQPTLLEGIQTVDNVVDTRPIDYEVFSQPRFDWDTPQM

SEQ ID NO: 255725 - protein, 242 aa, Glycine max
  Clone ID: PAT_MRT3847_72941C.1.pep
FMDVYTANKAVRHFQNEKRRRIGKFFSVMELRLRRNQWKVERAPLATDIYWKNMGTPRMSLKLRRVFVNTCLLLMLLFFSSPLAVISAAKSAGRIINAEAMDNAQLWLAWVQSSSWLASLIFQFLPNVIIFVSMYIVIPSALSYLSKFERHLTVSGEQRAVLMKMVCFFLVNLILLRGLVESSLESTILKMGRCYLDGEDCKRIEQYMSASLLSKSCLSSLAFLITSTFLGISYDLLAPIPW

SEQ ID NO: 255726 - protein, 163 aa, Glycine max
  Clone ID: PAT_MRT3847_72942C.1.pep
MASSYRDRTSEFRLLLETLKKIGSPVQPENAPSTSHGESYSRSEFNRKASRIGLGIHETSQKIARLTQLARKSSMFNDPAVEIQELTVLIKNEITALNSALFDLQTVQNTDMADGGYSQDTIVHSTAVCDDLKSKLMGATKHLQDVLAARTENIKAHENRKQI

SEQ ID NO: 255727 - protein, 335 aa, Glycine max
  Clone ID: PAT_MRT3847_72943C.1.pep
MASSYRDRTSEFRLLSETMKKIGGPVQPENPPSTSRGGESSYSRSEFNRKASRIGLGIHETSQKIARLAQLARKSSMFNDPAVEIQELTVLIKNEITTLNSALSDLQTIQNTDMADGGYSQDTIVHSTAACDDLKSKLMGATKHLQDVLTARTENIKAHENRKQIFSKNASRENPFQHQPKPANEPPPWSNSSNASESLQQESALPSNGAPVGNQLRRRLAVDNTPSQQMEMSMVQQVVPRHENYAQSRATALHNVESTITELSGIFSHLATMVAHQGELAIRIDDNMDESLANVEGAHSSLLRHLNRISSNRWLLIKIFAILILFLTIFIFFVA

SEQ ID NO: 255728 - protein, 81 aa, Glycine max
  unsure (1)..(81): unsure at all Xaa locations
  Clone ID: PAT_MRT3847_72944C.1.pep
QSTIAITFYSSLLTPPLCGLITSYRALPSHQAKLLPILXQPESLQVLHNNHIISQQPDHQVTNKSQFFTNPVHPTRTLPKH

SEQ ID NO: 255729 - protein, 350 aa, Glycine max
  unsure (1)..(350): unsure at all Xaa locations
  Clone ID: PAT_MRT3847_72945C.1.pep
LMLRNWHQPGSDGPMPRQSGTNDMHDKNVVQFPLPTSASAKTSLDDQEKIDFTSQLLRACDSLRQQSFVNYLMDILQQLVYVFKSPVNNEGVHSNAGPGCGALLTIRRDLPAGNFLPFFSDSYAKVHRTDIFMDYHRLLLENAFQLVXTLVRPEKHDKTGEKEKVYKLSHGKDLKLDGYQDVLCTYINNPHTNFVRRYARRLFLHLCGSKSHYYSVRDSWQFSTEAKRLYKHINKSGGFQNNPIPYERSVKIVKCLSTMAEVAAARPRNWQKYCLRHGDILSFLMNGIFYFGEESVIQTLKLLNFAFYTGKDVGHTPQKMESGDISSNKSGTVSQESKKKKKKKKKKRPP

SEQ ID NO: 255730 - protein, 138 aa, Glycine max
  unsure (1)..(138): unsure at all Xaa locations
  Clone ID: PAT_MRT3847_72946C.1.pep
TLPKKKNGIGSFFLLTHKPTNREGGWGKMGWPLTNLFRWLLAMKEMWILLLGLVPVGRTPIWSRLMLVEFVATFPTFGFNVVPVKSKTINFNFGELGXKARLGPLFRHFFPDLFGFYFKCVLIFFLGLYFFSSLFLCF

SEQ ID NO: 255731 - protein, 56 aa, Glycine max
  Clone ID: PAT_MRT3847_72947C.1.pep
VPPGEREGLLVSHPSIADAAVVPLCFKSELHKDVAGGEVPVAFVVRTNGFDLTAEA

SEQ ID NO: 255732 - protein, 124 aa, Glycine max
  unsure (1)..(124): unsure at all Xaa locations
  Clone ID: PAT_MRT3847_72948C.1.pep
MAPPHGESLPSSFSKNNNVNMSKPPRLSSDHHIQRTISDISFELTKEGIDLTLPPITEVVDAKCECCGMSEECTPEYIERVRDKFLGKWXCVGLCAEAVKEELEKNGGKKEEALSSHMSACVRF

SEQ ID NO: 255733 - protein, 52 aa, Glycine max
  unsure (1)..(52): unsure at all Xaa locations
  Clone ID: PAT_MRT3847_72949C.1.pep
XKXXXXEINWXCRCTVAXXFNTSFXRERTMXVXXIXXLGKXLKFXKGXXXIX

SEQ ID NO: 255734 - protein, 58 aa, Glycine max
  Clone ID: PAT_MRT3847_7294C.1.pep
ENAKAYNPNLFALLRSLVGTPLMPGNSVDPYIYALYDEDLKPAPRSERAFGMCTTDLT

SEQ ID NO: 255735 - protein, 41 aa, Glycine max
  Clone ID: PAT_MRT3847_72950C.1.pep
IFNKSPVSHKLWMFWVAPFTSSALAALKRQLVIRAIPLKSK

SEQ ID NO: 255736 - protein, 182 aa, Glycine max
  unsure (1)..(182): unsure at all Xaa locations
  Clone ID: PAT_MRT3847_72951C.1.pep
MLLCKSQELNLNSLCISFEGISMDLTKVQAIILWPSPNSFKEGSQLPWPNILIAATHIGGFSTIVAPITKCLKGETYXXPEASQRSFKLIKSXIIEAPILSLANFKKVCXGVCGEASCIGIYVVLSQEGPSISYFSEKLNVSWRNHXIYDKEFYVIISKEIILFSDNGQHKLNNSHVKWVEF

SEQ ID NO: 255737 - protein, 31 aa, Glycine max
  Clone ID: PAT_MRT3847_72952C.1.pep
SYSPYMLLLLISTHWPLLLLCLLSCSPYMPL

SEQ ID NO: 255738 - protein, 245 aa, Glycine max
  Clone ID: PAT_MRT3847_72953C.1.pep
PRVRLSKEAFCNIMQFLIASIKKDRQMEALVEKLCHRFSGVTDVRQWEYISYCLSQLSFTEKGMKKLIELFKSYEHVLSEDSVMDHFRNILNKGKKFAKLELKACIEEFEDKLNKFHTDKKEQEVTARNAQIHQQKIGSREGFTVTINSEDHLSSNSSSDETEGEIIDAYTEEATMPLNERSESKLVSESHSGASSELTESDQGDIETRDIEIQSPQVKTKGVQRSRTNKSNVKGGTKRTIRSKR

SEQ ID NO: 255739 - protein, 61 aa, Glycine max
  Clone ID: PAT_MRT3847_72954C.1.pep
TRGFGAINFSSKGQWDKPQKLFKIYTSFNLWRVELQSWLPAYTWGPLRGKPSTKFLHKFCS

SEQ ID NO: 255740 - protein, 41 aa, Glycine max
  Clone ID: PAT_MRT3847_72955C.1.pep
AHAYVDAWAAMVIMSASITLGCTPPSSMVVPGIATLSSVTL

SEQ ID NO: 255741 - protein, 132 aa, Glycine max
  Clone ID: PAT_MRT3847_72956C.1.pep
MLGNPPSFREDVAEYSRKMRGLSLKLLEAISESLGLERDYIDKALGKHGQHLAINYYPPCPEPELTYGLPAHADPNAITILLQNEVPGLPSLYDGKWLTVNPVPNTFIVNIGDQIQVFCALNFEILNGNYVI

SEQ ID NO: 255742 - protein, 282 aa, Glycine max
  Clone ID: PAT_MRT3847_72957C.1.pep
DTTLIIIDSGTYREKVVVQANKTNLIVQGQGYLNTTIEWNDTANSTGGTSYSYSFAVFASKFTAYNISFKNTAPPPSPGVVGAQAVALRVTGDQAAFYGCGFYGAQDTLNDDGGRHYFKECFIQGSIDFIFGNARSLYEDCTINCVAKEEKDGISGSITAQGRQSMNEESGFSFVNCSIVGSGRVWLETAWGAYASVVFSRTYMSDVVAPNGWNDWRDPSRDQSVFFGEYRCLGPGANYTSRVPYAKQLRDYEANSYTNISHIDGTDWLLDYFQNYVNPSYI

SEQ ID NO: 255743 - protein, 82 aa, Glycine max
  unsure (1)..(82): unsure at all Xaa locations
  Clone ID: PAT_MRT3847_72958C.1.pep
VLCIIGFEFEYYTCAFFFFLLFYLKRNQPFSETTHHTGAVTVPFFLSCFLFRFSSTSTNAKNQNLPCPFSLFLFASNSRXRX

SEQ ID NO: 255744 - protein, 87 aa, Glycine max
  Clone ID: PAT_MRT3847_72959C.1.pep
VTAFVFCLGSFSVLATDKKQGWAIDSFYLYKEFRYSLSVNVIGFVHSALQICDLGRYFATGKHLVEPQLRGYFTFALDQVKQVLCSL

SEQ ID NO: 255745 - protein, 61 aa, Glycine max
  unsure (1)..(61): unsure at all Xaa locations
  Clone ID: PAT_MRT3847_7295C.1.pep
NVEQQEFSLPSQPXCQMLSAYLLKLKICMTHESTPRYIPPQKCTLMCIKIHAHKCSKYLYS

SEQ ID NO: 255746 - protein, 228 aa, Glycine max
  unsure (1)..(228): unsure at all Xaa locations
  Clone ID: PAT_MRT3847_72960C.1.pep
LRPGPEASGCLSSVPTGGCPPPPATTPLRGIYACIRGRGGRSSGALETRPKGPLRFGVPLLASSESHLALRVSVNNLVVPVIIDPKINFKNQDPTEATSDKCLQSVKDYLSPHDMKRLEAYVDNLADFHLLGERGVLMTKILDLVPTLTHLYFQEKLPVTLSYAQASVLLCIGLQNQNISYIEGTNEFGKGKRYWSLFIKVXKKVYQYLEWPCLPKRLNQPLPRLKRS

SEQ ID NO: 255747 - protein, 219 aa, Glycine max
  Clone ID: PAT_MRT3847_72961C.1.pep
LPHEGSSSRLRPGDWVIAMGCPLSLQNTVTAGIVSCVDRKSSDLGFSGMPREYLQTDCAINMGNSGGPLVNMDGEIIGVNIMKVAAADGLSFSVPIDSVCKILEHFKISGRVILPWLGLKMLDLNEMIIAQLKKQDPSFPNVNKGILVPMVTPRSPGERAGFFPGDVVIEFDGRPVERLKEVIEVLGDKVGVPIKVLVKRAGDKLVTLTVIPEEANLDV

SEQ ID NO: 255748 - protein, 81 aa, Glycine max
  Clone ID: PAT_MRT3847_72962C.1.pep
IVDEHSPIQNRWIWKWRLKLEGKFGAKASSVQGNALKIVAKPEFQAKLKFRQRAKDSSLAKQELVAEEEFCCVHLRSVYFG

SEQ ID NO: 255749 - protein, 82 aa, Glycine max
  Clone ID: PAT_MRT3847_72963C.1.pep
NQFFPPNVSSLFHSPPLAFPFMIKVCMLLGNSDPYSLFPPGAPRPKVPLFLIFSPHFFLLRNQERTKITGSTHESKKKKNIL

SEQ ID NO: 255750 - protein, 169 aa, Glycine max
  unsure (1)..(169): unsure at all Xaa locations
  Clone ID: PAT_MRT3847_72964C.1.pep
MSPAMVGSGEKGESDTPGNQYQKGVKQLVENGLHTIPKKYILPPSDRPATNSENSNVAKQNLQLPIIDFSELIGPRRPQVLQSLANACERYGFFQLVNHGISDDVISSMRDVSGRFFDLPFEERAKHMTTDMHAPVRYGTSFSQTKDSVFCWRDFLKLXCHPLPDFLPH

SEQ ID NO: 255751 - protein, 58 aa, Glycine max
  Clone ID: PAT_MRT3847_72965C.1.pep
IRFFRSFAAVGVDPAVMGVGPAVAIPAAVKSVGLELGNIDLFEINEVKVLTVVITGSI

SEQ ID NO: 255752 - protein, 91 aa, Glycine max
  Clone ID: PAT_MRT3847_72966C.1.pep
MGRHRTSSSSTTLSNHKKTSSVSRLRKGCLSFAASLQKGFRYVKAFFVGQVKTITARNEKEASEAELEATKMQVEATDAAEDIKNRLNKSA

SEQ ID NO: 255753 - protein, 48 aa, Glycine max
  Clone ID: PAT_MRT3847_72967C.1.pep
QQQIGWIQPATLRPPWNFGSSKQSFRKMSIDLFGGRILLHIAELMDHT

SEQ ID NO: 255754 - protein, 65 aa, Glycine max
  Clone ID: PAT_MRT3847_72968C.1.pep
FFPSFKVSSFVHTFSSLLFFFFIQRLHLFVLNREKNSFSIKGLVYFFVVMLESVPHCILGDLGIG

SEQ ID NO: 255755 - protein, 92 aa, Glycine max
  unsure (1)..(92): unsure at all Xaa locations
  Clone ID: PAT_MRT3847_72969C.1.pep
ILRLVMHHHIIRLYEVLETPSDIYVVIEYVKSGXLFYYIIENGLLQXIKXRHFFQQIISGVEYCHRNMVVHXDLKPENLLLDSKFNINIAYF

SEQ ID NO: 255756 - protein, 80 aa, Glycine max
  unsure (1)..(80): unsure at all Xaa locations
  Clone ID: PAT_MRT3847_7296C.1.pep
PPGIQVPIGSEGCFXGVIAPVRNKAIVWFGENLGAKVDIVDIPKDFQEQAQDYRAQMIENIVEFDDQAMENYLPGIEPDE

SEQ ID NO: 255757 - protein, 79 aa, Glycine max
  Clone ID: PAT_MRT3847_72970C.1.pep
WKVGPADRSDYGRPSAVNDPFLLLRLHLYTIPTTQYSVASCRQIKYKITMAFTGTTEMQACDKTVHSASHLRGALSKNC

SEQ ID NO: 255758 - protein, 111 aa, Glycine max
  unsure (1)..(111): unsure at all Xaa locations
  Clone ID: PAT_MRT3847_72971C.1.pep
NWKNFGVTKLNPFEKNPLFTSWRIRKKARTNPLSKKLPTLIGKWNAPCXGPLNPGGCXVTRKGTFKFETPLAPSXFRFFPLIFXYNFAGFPRKNLKRGAPLRVPIKGLKGL

SEQ ID NO: 255759 - protein, 77 aa, Glycine max
  Clone ID: PAT_MRT3847_72972C.1.pep
LQLSHFTSLLLSPYPFFILILNISYSVHFHSTNILSTNNTITFIFISLFLFISINNLTFAPFFLLLHPYSILIPILL

SEQ ID NO: 255760 - protein, 109 aa, Glycine max
  unsure (1)..(109): unsure at all Xaa locations
  Clone ID: PAT_MRT3847_72973C.1.pep
QNNKNDGHLVLLSKDVTWKIKCMAEGLLCEPVQKFRDSLVDPFSERFLWDNSVPREQTWSCQDDVVLRXKYGRLSKPSKGVANGLKLIMLHNSQYALSQWHSVEPVQQF

SEQ ID NO: 255761 - protein, 35 aa, Glycine max
  unsure (1)..(35): unsure at all Xaa locations
  Clone ID: PAT_MRT3847_72974C.1.pep
KKKSVPPPPRSRXTFTRNSNTSSLAITLIERFQAL

SEQ ID NO: 255762 - protein, 65 aa, Glycine max
  Clone ID: PAT_MRT3847_72975C.1.pep
FWVFFKSHVFLFYRERILHDSNTATIKFVSGRQNNQRFKTLSKEIRKQKLCTKLPNAQVYSFKRG

SEQ ID NO: 255763 - protein, 119 aa, Glycine max
  unsure (1)..(119): unsure at all Xaa locations
  Clone ID: PAT_MRT3847_72976C.1.pep
ITEANRRMGKPTFPQGTPRSGKRKPPPIGGGAGAKKAXHMNTPNACHTKRRQYDGELVSEVSKMTNTYTKXTATNFKATGKPAEDTIKPEALPHKLAQHGENQEKDATKFPQEENPTAW

SEQ ID NO: 255764 - protein, 90 aa, Glycine max
  Clone ID: PAT_MRT3847_72977C.1.pep
TQREKEKEEGPWFQTHNIDRLVNPKTMGGETQKSSQIWPHWHLEPTLQHPFLFLFARGGVPKKEIKPKFFSKRGEKRKGKRGLVLITKKF

SEQ ID NO: 255765 - protein, 82 aa, Glycine max
  unsure (1)..(82): unsure at all Xaa locations
  Clone ID: PAT_MRT3847_72978C.1.pep
ARDAIGVTSLYIGXGLYGSVWISSEMKGLHDDCGYFEVFLPGHLYSSKQIGCRRLYNPPWFSEAIPSALYEPLVSRHPFEQA

SEQ ID NO: 255766 - protein, 98 aa, Glycine max
  unsure (1)..(98): unsure at all Xaa locations
  Clone ID: PAT_MRT3847_72979C.1.pep
RFPLFFGVFGDGRFXFVGGVVSAVVAPVGXSAFVVLVVLCGGCPRXWLXSVRGRRRVGXGSALLAWRVFVWGSGGLVWGRPLARWVPGFRFLLLGEFQ

SEQ ID NO: 255767 - protein, 90 aa, Glycine max
  Clone ID: PAT_MRT3847_7297C.1.pep
SPVSVLDEFTRSPLSPSCHSGRHSFPRIQHQKQQLLKKPGEEDISSTYIYERMAYESVNRKVNDEDHLVMWSSKAMIKSVDEVCRDVAWG

SEQ ID NO: 255768 - protein, 47 aa, Glycine max
  Clone ID: PAT_MRT3847_72980C.1.pep
TEKKKKKKKKKKKKKKKKKKKKKKKKFFLKKKKKKKKKKKKKKGGAV

SEQ ID NO: 255769 - protein, 87 aa, Glycine max
  unsure (1)..(87): unsure at all Xaa locations
  Clone ID: PAT_MRT3847_72981C.1.pep
PLCKKDGVALTPAFERFPGLGPPFSGTREYKLLAALSSPIYXKNVAKFSYVVQEFYSLPPPGFWKAPPFFRGKGKLKAQNPGGGGFP

SEQ ID NO: 255770 - protein, 72 aa, Glycine max
  Clone ID: PAT_MRT3847_72982C.1.pep
PRVRPRVRPRVRPRVRPRVRPRVRKKKKKKKKKKKKKKKKKKKKKKKKKKKKKKKKKKKKKKGGPFKRNKVN

SEQ ID NO: 255771 - protein, 128 aa, Glycine max
  unsure (1)..(128): unsure at all Xaa locations
  Clone ID: PAT_MRT3847_72983C.1.pep
KRGDGKNLGVTKLNGLEENPLLARGGKSKKARTDGLSKKLPTLKGKGNXPEAANXSGGGGGVTPRGTVKLARALGPVXFGFFPFFFRKVGGFSRESLKWGVPLRVPIKGLRXHLNPKKIDKGEGSKEG

SEQ ID NO: 255772 - protein, 52 aa, Glycine max
  Clone ID: PAT_MRT3847_72984C.1.pep
IMLKNIHTYKFKAETIAKNYCRRTDKSRAATSYKNKVALNFQLRIPQSFHIV

SEQ ID NO: 255773 - protein, 36 aa, Glycine max
  Clone ID: PAT_MRT3847_72985C.1.pep
DLSSYLSPKVQFGVHCLDDLSNEYLSTMKVRLQNNF

SEQ ID NO: 255774 - protein, 68 aa, Glycine max
  Clone ID: PAT_MRT3847_72986C.1.pep
ALKDAGFLKSCTFKSYFHTLLTSVLPTYHSLTYSYLSSTIKQLYPFSHYKSLDQTSIMFSPHSSNPSL

SEQ ID NO: 255775 - protein, 42 aa, Glycine max
  Clone ID: PAT_MRT3847_72987C.1.pep
LFEIITCTDQSIDYPLKQKPWVTGPFEKTFCPWLDMSVTSLL

SEQ ID NO: 255776 - protein, 138 aa, Glycine max
  Clone ID: PAT_MRT3847_72988C.1.pep
MDDLFDSSLNLEDTHYKEGYDEGYSHGLVTGKEEARQVGLKVGFEVGEELGFYRGCVEIWTSAIRLDPTCFSPRAKTFICQMEELIQKYPLMDPENAQVQEIMDSLRLKFKMVCSSLHVKLEYNGYPKSSTEVNDIQF

SEQ ID NO: 255777 - protein, 91 aa, Glycine max
  unsure (1)..(91): unsure at all Xaa locations
  Clone ID: PAT_MRT3847_72989C.1.pep
LLLTFITTSTVPAFKLSTKVKVNNTLILKIIITLHLIYTIYTTTINPKKGNLEIITPITINFIIRTNILLDKTFSKSXMNPTMTFKPTVVS

SEQ ID NO: 255778 - protein, 47 aa, Glycine max
  Clone ID: PAT_MRT3847_7298C.1.pep
KLGDRLIGCKSSLSFLICAGYIFKGNQYGRCFKCLLMCFSKVCHFVF

SEQ ID NO: 255779 - protein, 46 aa, Glycine max
  Clone ID: PAT_MRT3847_72990C.1.pep
PAKSMEIRASRVLTPLSLLLDNGTSIIQQKRKINLIFSKTLFFLKL

SEQ ID NO: 255780 - protein, 52 aa, Glycine max
  Clone ID: PAT_MRT3847_72991C.1.pep
VSEKLGIIYLCLKGKNIYHGHQLSVCCRTVVNSVFGWSLKILEMIIMPSHNM

SEQ ID NO: 255781 - protein, 67 aa, Glycine max
  Clone ID: PAT_MRT3847_72992C.1.pep
REPLFCFLLSHRPQQGITYLSGVTMFAPEGQEAWGPICFLIPNKTVLRPTFHARAANDGHSDCGRGD

SEQ ID NO: 255782 - protein, 48 aa, Glycine max
  Clone ID: PAT_MRT3847_72993C.1.pep
KAEPPNTEKAVKWLRKASVCGNVRAQYQLALCLHRSGGRVRSNLKEAA

SEQ ID NO: 255783 - protein, 51 aa, Glycine max
  Clone ID: PAT_MRT3847_72994C.1.pep
QFRVTKFNKLVYKMLCPYLHHFCISLPHFMFIPTLVLLLCSTFMLIITPPN

SEQ ID NO: 255784 - protein, 92 aa, Glycine max
  unsure (1)..(92): unsure at all Xaa locations
  Clone ID: PAT_MRT3847_72995C.1.pep
MVHXSCDRNYGKTFKXXRXPYXXERLDAEXKLVGEYGLRCNXELWSVQYALXRIRNNAXXLLTLDEXNPRRIXEGXALLXRMFRYGLXXEIR

SEQ ID NO: 255785 - protein, 64 aa, Glycine max
  unsure (1)..(64): unsure at all Xaa locations
  Clone ID: PAT_MRT3847_72996C.1.pep
LIYVSGLKNENYLLYPLQLFNKTDATNVYVTSSTHNFVNVIKCCCVACCSGIWGMXFTDIQYTV

SEQ ID NO: 255786 - protein, 195 aa, Glycine max
  Clone ID: PAT_MRT3847_72997C.1.pep
DPKSSFWESNPLKKSLPRYNFQSNTTAHSHRPTIHSRKASYNNIDKYELGFFNSPGSLGISRENSYSNDYSFNCSAVTNSLPHWLREAVNTPPIQPNMSAAISLSSHPEIPGTSDRCFSAGKSCFVPQNWFNGLTPNEIYMSNGSHYSTYSRRKYGVVKMNKSLEQRVHKPDNLIIIDSDTSSEETISDDHRSSL

SEQ ID NO: 255787 - protein, 101 aa, Glycine max
  Clone ID: PAT_MRT3847_72998C.1.pep
FLGNKQVFNPSPPSPMNGLSQEKPKGGSTSSGEKVRVPKGVFPKKVKGNPGLLWEGAHLGPEKEGSFQGEKRPRALKQFKGPFPPKSNFQPKSLPVFDQPS

SEQ ID NO: 255788 - protein, 301 aa, Glycine max
  Clone ID: PAT_MRT3847_72999C.1.pep
MAGMSGYSCCWQWAEVKSMGMGYWFPSSTTKRSFRPVLVSVSAISDDNSHSYTSSGRKLEEEGIKGSGTTARDRRLLRIRQEKRQREYDLLNNYPAWAKVLENACKDDAELRAVLGDSIGNPELMRKRVEDRVRKKGRDFQKSKTGSVLAFKVTFRDFNPLDSYIWFELFGSPSDRDVNLIGNVIQSWYVMGRLGAFNSSNLQLANSSVEYDPLYDADKGFKVMPSSFHDISDIEFQENWGRVWVDLGTSDYFAIDVLLNCLTALSSEYHGRLQIVFGGRRMGDWEEGMTSPEYGYKYFKI

SEQ ID NO: 255789 - protein, 57 aa, Glycine max
  Clone ID: PAT_MRT3847_7299C.1.pep
VLVNTCLLAISCQCLFSTNERLISHLKKKKSDWKKIVNTLHLTRESETKLVFDKRVR

SEQ ID NO: 255790 - protein, 139 aa, Glycine max
  Clone ID: PAT_MRT3847_729C.1.pep
KEPGFFGFSSCVGGICPILAPLWGFVKPGEKAKGFSVLAPLCGAPPPGGFSRFFFKIGGGNFFCPRVSPLFAAPRPFGFFPSPLGWKLFQLGALFFPPGLGPALKFLGLWGFPGVCWLPFFFFCSSWGLPDFVPPVGFI

SEQ ID NO: 255791 - protein, 68 aa, Glycine max
  Clone ID: PAT_MRT3847_72C.1.pep
KQHKGAPTKMQGAVRKLTRIISHRQVVGFRSYCTDKVVVDIGQPTSASHPQVYYSFPFVFILKFKKQK

SEQ ID NO: 255792 - protein, 155 aa, Glycine max
  Clone ID: PAT_MRT3847_73000C.1.pep
GDQKQQAGRENGPPPPGRKTKKKSQRKRSQKQTQKDGGNRSRSTNAASSQDSRGGQEPRTVQNGGEAQPPRRKKEGRDKTRRNNDPAHPGRRKTPSNRGGGGRRPRRNEQQGGRNRRSDGRRRRRQRAAKGKGGPARRLDGGPWWGACDYHPPGG

SEQ ID NO: 255793 - protein, 34 aa, Glycine max
  Clone ID: PAT_MRT3847_73001C.1.pep
NSKADRPVNPRIRPAFFRETNPLSNKRFSSARGI

SEQ ID NO: 255794 - protein, 40 aa, Glycine max
  Clone ID: PAT_MRT3847_73002C.1.pep
KGFPPKGFWGKRTGFFTGKASKFHVSLTLKQGLVKPEGFQ

SEQ ID NO: 255795 - protein, 64 aa, Glycine max
  Clone ID: PAT_MRT3847_73003C.1.pep
TFNTFHYVDLLSLMPVCRFHTHQSPIVLRCTAAYPKIRRSPLQISCCFWASHKDYPESYSSLDC

SEQ ID NO: 255796 - protein, 81 aa, Glycine max
  unsure (1)..(81): unsure at all Xaa locations
  Clone ID: PAT_MRT3847_73004C.1.pep
FGLPPEEKALISAPRKEIXAPMEIVCEKMKLLAEVGPPGSFFFHYVTPLSFVLFPKTASFVSFPAPPARFPPRLKEPEILS

SEQ ID NO: 255797 - protein, 123 aa, Glycine max
  Clone ID: PAT_MRT3847_73005C.1.pep
KKKKQQLKKWRTKYFRIFLRLRKKVFRKINIAKEKWVIKPILFIKKRIREFWQRNPILLLQLKEIYKLTEAKKENNSIISNGMIQSSSGSIDSIILSLRERKMKELTDRINTMLKIIEKMKKD

SEQ ID NO: 255798 - protein, 701 aa, Glycine max
  unsure (1)..(701): unsure at all Xaa locations
  Clone ID: PAT_MRT3847_73006C.1.pep
MDGYEATRIVFSRIQNLDPENASKIMGVLLLQDHGEKEMIRLAFGPEALVHSVILKARKELGLPSNSPPTPSTPPSPSPFLSRQNSTSSRXQWYQHPSCSHYPKPFSWPTMSDDLIRTNHLVVGSSTSSSSLPYYANGGSDPIDDFQLQDQLSFLNDGSPTSTAFAHKTNPDLFYPTNNSDLSSSPTTAVDPTLFPSYGWGGSIHRRSCSVNDACLGSEDPSSGLGWKPCLYFARGYCKNGTSCRFLHGGIGDADGGAAAAMVGSPSKIEMMEQCHELLRSKSFQQQRLAAASQLMASSIFPYSPKSMNFLLQQQQNDTQRAAAAALMMSEDLHKFGRSRLERNDFSLNSPVMVNPASRQIYLTFPADSTFREEDVSNYFSIYGPVQDVRIPYQQKRMFGFVTFVYPETVKLILSKGNPHFVCDARVLVKPYKEKGKVPDKKQQQQQVDRGDFSPCGTPTGLDARXKFDLQLGGRMLYNTQDMLWRRKLEEQADLQQALELQSRRLMGLQLLDIKKHHQRALSTGSPIPSPTHSPNMFNQNLVPSFHITSESPKESGSTSAPASTASVSAGQQPVNISVGKEVVVNGENGYDEGNGKQSSSHDDCDLQECLEHNLPDSPFASPTKADGDFMVAFSNGPNEANDADASAASANSKFGTSTLLPAASALDMGTFKSFNCQIPRFSSGHGTIGMFAGTGGPIGI

SEQ ID NO: 255799 - protein, 138 aa, Glycine max
  unsure (1)..(138): unsure at all Xaa locations
  Clone ID: PAT_MRT3847_73007C.1.pep
KRNCPELKKDKVSTSEFGGVAVVSEKSHGENVLYVSSNVNDDDWILDSACTFHMTPNRDWFATFQNVDGGKVLMGNDGACSIAGKGTVKIKMNDGIVRTLTHVRXMFPALKKNLISISTLDSNRCTYQAKGGALRVSK

SEQ ID NO: 255800 - protein, 60 aa, Glycine max
  unsure (1)..(60): unsure at all Xaa locations
  Clone ID: PAT_MRT3847_73008C.1.pep
TLTVVXXSQIXRNIXTXXMANXXRYNXLRGPGGIFRXPXXHXIKKNCSDFLINGXNEDVE

SEQ ID NO: 255801 - protein, 51 aa, Glycine max
  unsure (1)..(51): unsure at all Xaa locations
  Clone ID: PAT_MRT3847_73009C.1.pep
AMIQSKKGFPLDHQRLXIFAGKQLDYVGSLSEFSIQKDTTFHFVLRLSGGF

SEQ ID NO: 255802 - protein, 63 aa, Glycine max
  Clone ID: PAT_MRT3847_7300C.1.pep
NTSLYQKTLREPRLKKRIQPFFFNVWSTILLSDPIWDRIIKLRHSTYSARSPPPVLLVGQSYP

SEQ ID NO: 255803 - protein, 104 aa, Glycine max
  unsure (1)..(104): unsure at all Xaa locations
  Clone ID: PAT_MRT3847_73010C.1.pep
FPKTLPGKKGRTQGPKTGPGGGPRKSGRGPGGGPSFPKGGGTKGGRKKGQNWSPGKKGNPSQFHTRGXRKDKTKKRGGPMRGPPPIRWGGPPAPLKKGKPRGPM

SEQ ID NO: 255804 - protein, 229 aa, Glycine max
  Clone ID: PAT_MRT3847_73011C.1.pep
MGEKEKRNKNKKQKHQHPNDQSTKQNSDFSFKPSSEVKGIKFGGQFIVKSFTIRRARPLELLKVLSFPPTNNTNKPKDKLPFPSTTAFLPTNFTILAHHAWHTLTLGLGTKKSKVLLFVFETEAMKASVDRIWPPEIALGDVNKRLIRGLNGCEMARFKFRKGCITFYVYAVRQVGSFGFSCAEDLRTILQSVVELKDFLDHTVMLSMPNQRSISYSQSQSQPQVAMAH

SEQ ID NO: 255805 - protein, 72 aa, Glycine max
  Clone ID: PAT_MRT3847_73012C.1.pep
AIAVNQSSFHQSLYIYIYIYIYIYICFQVLPSSLHINICIFIRVLRDIFWLNLLTWFPSLLEFWEAYYWFIC

SEQ ID NO: 255806 - protein, 187 aa, Glycine max
  Clone ID: PAT_MRT3847_73013C.1.pep
MKYVLVTGGVVSGLGKGVTASSIGLILKACGLRVTSIKIDPYLNTDAGTMSPFEHGEVFVLDDGGEVDLDLGNYERFLDIKLTRDNNITTGKIYQSVIEKERRGDYLGKTVQVVPHITDAIQEWIERVAKIPVDGKEGPADVCVIELGGTIGDIESMPFIEALGQFSYRVGPGNFCLVHVSLVPILH

SEQ ID NO: 255807 - protein, 90 aa, Glycine max
  unsure (1)..(90): unsure at all Xaa locations
  Clone ID: PAT_MRT3847_73014C.1.pep
CVLLTITIYVLFNRIYILFYLIYIYIYIYIYYLEFFNIIQLIILYIMLHLXFYYYYLLVDYIFYYYNFSFIYYIIYYALFSLLFYMLCFK

SEQ ID NO: 255808 - protein, 37 aa, Glycine max
  Clone ID: PAT_MRT3847_73015C.1.pep
IIKTNARDKWHIILDYITCWGVAKLQHMNSLERGTLV

SEQ ID NO: 255809 - protein, 45 aa, Glycine max
  Clone ID: PAT_MRT3847_73016C.1.pep
LLEIFYILSSRSWGSSTNDSYIILIILGLGTCNSFCYQQMCGPHQ

SEQ ID NO: 255810 - protein, 128 aa, Glycine max
  unsure (1)..(128): unsure at all Xaa locations
  Clone ID: PAT_MRT3847_73017C.1.pep
GSFSTSSSSSSKLLFRPLFXEESFTYTYLSPDGSRPXKPAPXLFDPLGKTVNQGICPSLSHLGVKLLYXINTLVAGRPVXGLGLIRTKFPLVKTGFSKTKGRTANFLLGPGGKAPFGNLFHKVPEPPG

SEQ ID NO: 255811 - protein, 86 aa, Glycine max
  Clone ID: PAT_MRT3847_73018C.1.pep
LLIEKFNHTKPWTMKTACKENYVAQTKKETKKSLTVLEISNVLLQYNTGAAATTFVVNDPKEIQLNHVKCKPNTKSAKRNEPAGMQ

SEQ ID NO: 255812 - protein, 197 aa, Glycine max
  Clone ID: PAT_MRT3847_73019C.1.pep
METHHGGQWNKAFLPLLLLLSVFSTVGSSSSAIRFRLAPLARGAAERQVPMQAGAPFKIALFADLHFGEDAWTDWGPRQDLNSIRVMSTVLHNENPDFVIYLGDVITANNIMIANASLYWDQATAPARNRGIPWASVFGNHDDAAFEWPLKWFSAPGIPPIHCPQNTTSYSGEEECSFKGTGRLNLMTNEIKHNGSF

SEQ ID NO: 255813 - protein, 75 aa, Glycine max
  Clone ID: PAT_MRT3847_7301C.1.pep
FGECWVAGWGIKHGFSGGHGVGVLDLGHLSEEILRAWRYLGDRRSLGDLVIFLMPKHYPLLPLETHFQPFQTKPP

SEQ ID NO: 255814 - protein, 465 aa, Glycine max
  Clone ID: PAT_MRT3847_73020C.1.pep
REFKDIYVVFELMESDLHQVIKANDDLTPEHYQFFLYQLLRGLFYIHTANVFHRDLKPKNILANADCKLKICDFGLARVAFNDTPTAIFWTDYVATRWYRAPELCGSFFSKYTPAIDIWSIGCIFAELLTGKPLFPGKNVVHQLDLMTDLLGTPSLEAIARVRNEKARRYLCCMRKKKPVPFSQKFPNVDPLALRVLERMLAFEPKDRPTAEEALAYPYFKGLAKVEREPSAQPVTKMEFEFERRRITKEDVRELIYREILEYHPKMLKEHLEGEEPTRFILNSAVDHFKKQFAYLEEHYGKGGTVAPPERQHASLPRPCVLYSDHSMQNTSEVADDLSKCCIKEVEKQPIERSSAIPMSRLPLQAPQNIQGVAARPRKVVGSVMRYNNCGVAVTAEAEQRRVVRNPSVSAQYAASSCSYPRRNPGYKNERGAEDDGIEGSNGLQPKYMAKKVAAAQAGPGGQWY

SEQ ID NO: 255815 - protein, 36 aa, Glycine max
  Clone ID: PAT_MRT3847_73021C.1.pep
WGVNLSFYAGGAYICSLSQLVYIDKQRFNMHDSIEN

SEQ ID NO: 255816 - protein, 458 aa, Glycine max
  unsure (1)..(458): unsure at all Xaa locations
  Clone ID: PAT_MRT3847_73022C.1.pep
MLPDQRKKSSVEVDFFTEYGEGSRYRIEEVIGKGSYGVVCSAYDTHTGEKVAIKKINDIFEHVSDATRILREIKLLRLLRHPDIVEIKHILLPPSRREFKDIYVVFELMESDLHQVIKANDDLTPEHYQFFLYQLLRGLKYIHFSHVIXSYNSPKNILANADCKLKICDFGLARVAFNDTPTAIFWTDYVATRWYRAPELCGSFFSKYTPAIDIWSIGCIYAELXTRELIVPMKKVLHHVFHLTDFLWSNFNGXLMIQLMIFLLSNLLXKSNTKGSEKXMNLKAGRLLHCIIEVVTFTLVLFGYQYQDNVFSSLKKKKLIAKLPKSYSLVYFXYGGIFGVSSLIRSNNRNGVLXPQCMVYHPKMLKEFLEGAEPTGFILTSAVDHFKKQFAYLEEHYGKGGTVAPPERQHASLPRPCVLYSDHSMQNTSEVADDLSKCCIKEVEKQPIERSFTIPIQS

SEQ ID NO: 255817 - protein, 181 aa, Glycine max
  Clone ID: PAT_MRT3847_73023C.1.pep
VRELIYREILEYHPKMLKEHLEGAEPTGFMYPSAVDHFKKQFAYLEEHYGKGGTVTPPERQHASLPRSCVLYSDNSRPNMAEVADDISRCSIKEVEKPAMDRTGGIPMARLPLQAPQNIQGVMTDRSMYFAASPFPPFFFLSCLSYVHDRNYLQRVLCSLLRLVTFGSSFFEPIRIMFLVV

SEQ ID NO: 255818 - protein, 115 aa, Glycine max
  unsure (1)..(115): unsure at all Xaa locations
  Clone ID: PAT_MRT3847_73024C.1.pep
SIVSKSGKVLCSRSIGDITRIKPYGLLSTITKWIGTGKQHTYGQSENVRSAYPPLKPLYLLLAHTKTATYCXDSQTLXLLSRLVPKHTYSLAEYLLCNXAYEQIFAFDNIIYLAH

SEQ ID NO: 255819 - protein, 88 aa, Glycine max
  unsure (1)..(88): unsure at all Xaa locations
  Clone ID: PAT_MRT3847_73025C.1.pep
XXRPGFSVPAGRWEEXXXNYLRTVVPRSIRDXLKKVTGSHDGLITVHNIERFCLQADTVEKSICEYQAEYCKDHQNREGXXVAYXXXV

SEQ ID NO: 255820 - protein, 43 aa, Glycine max
  Clone ID: PAT_MRT3847_73026C.1.pep
ISHCVMCTTHFNWSSLATYSGRNCSLKEGSNFLLPLFLCLLLR

SEQ ID NO: 255821 - protein, 66 aa, Glycine max
  Clone ID: PAT_MRT3847_73027C.1.pep
VHCIIIIIFLMIICVWITCLAVLKSQYEDWVYIVLLMLYYLKIYLSMYVLISVRGISVFLNFSFPI

SEQ ID NO: 255822 - protein, 37 aa, Glycine max
  Clone ID: PAT_MRT3847_73028C.1.pep
IKKRLPCIRLRREIHSCFISQSSVREIFEYRHGSHHM

SEQ ID NO: 255823 - protein, 69 aa, Glycine max
  Clone ID: PAT_MRT3847_73029C.1.pep
MGETEKIGQFLDFDFPTKKSRVYPKTPLPPKRWQFIVFLKKFLMETLIFNSRFELVLTKNCSIGSPSKR

SEQ ID NO: 255824 - protein, 66 aa, Glycine max
  Clone ID: PAT_MRT3847_7302C.1.pep
PPHVLISQSWGMCSHSGNPFSSTKPPTLQVIEIVIDLVRIEYPVDAIIDQNSNDVETIVFIYKQTG

SEQ ID NO: 255825 - protein, 190 aa, Glycine max
  Clone ID: PAT_MRT3847_73030C.1.pep
MGIQTVGSLGNGQQSHLQPSSLSRQGSWYSLTLDEVNCQLGDMGKPLGSMNLDELLQNVWTAEASKSSVVVGVESENMSSSSSSLQRQASLTLARALSGKTVDDVWREIQQGQKKKYGEDVRSQEGEMTLGETTLEDFLVQAGLFAEASISPAVGLDAMDSLATQGFQQKTGLLSSSPSIGSLSDTRLGR

SEQ ID NO: 255826 - protein, 85 aa, Glycine max
  Clone ID: PAT_MRT3847_73031C.1.pep
KGEFKNVKSTKLFQCSLAFDDLLAEEQKYTRALEVIVHDYLLPLRKANESKRRSILPNFLQQVVISKDDLNNVLSNVEALLKVHT

SEQ ID NO: 255827 - protein, 59 aa, Glycine max
  Clone ID: PAT_MRT3847_73032C.1.pep
QWLGYFNLGPTFSLVGLTFKCPSSDFIFMHIEFLFIIVLASSTLFMGDNVCVQVNPIHR

SEQ ID NO: 255828 - protein, 65 aa, Glycine max
  Clone ID: PAT_MRT3847_73033C.1.pep
PTFGNILHFNVAVTVDLHVTRSFWNRMAGKYSNIFHSKRKGQDASIEAAVIAISSCFKESFTIWC

SEQ ID NO: 255829 - protein, 430 aa, Glycine max
  unsure (1)..(430): unsure at all Xaa locations
  Clone ID: PAT_MRT3847_73034C.1.pep
VSGNHKGSYLTMLSSGGLVFGIINIVGNFGTVFVDNGYWVSAIAARPSSTHKGYLLGGLVWFAVPFSLATSLGLGALALDLPINENEAGRGLVPPATAVALMGKGGXILLLTMLFMAVTSAGSSELIAVSSLCTYDIYRTYINPNASGKQILKVSRGVVLGFGCFMGLLAVILNKAEVSLGWMYLAMGVLIGSAVLPIAFMLLWRKANAIGAILGTVLGCVLGIITWLSVTKIQYGRVNLNTTGRNAPMLAGNLVSILTGGVAHAVCSMLRPQNYDWSTTKQITVVEKEKSRNSARGFKEEKLIRAKSWVVKWGVGFTLLIVILWPILSLPAGEFSKGYFYFWAVIAIGWGTVGSAVIIVLPLIESWETIQTVIMGMFTNDRLMEKVEELNFKLQTIMQAMPEAERLYLLEKGKAKKLDSSEQQASSLPA

SEQ ID NO: 255830 - protein, 34 aa, Glycine max
  Clone ID: PAT_MRT3847_73035C.1.pep
LGQPVFRFSKDIISRYVIVKSDKFILHQTRCSCG

SEQ ID NO: 255831 - protein, 41 aa, Glycine max
  unsure (1)..(41): unsure at all Xaa locations
  Clone ID: PAT_MRT3847_73036C.1.pep
THLLYRYFDPKVRECEXSLMRFKYILVGHXMSYVMTRXRXI

SEQ ID NO: 255832 - protein, 244 aa, Glycine max
  Clone ID: PAT_MRT3847_73037C.1.pep
GSRQTDVVVRIFKQLLDLGIVPNVYFCCSLLNVLTQTPKEELGKLTDCIEKANTKLGTVVRYLMEELEGDEAFRKEALELLNSIDAEVKKPLCNCLIDLCVKLNVPERARDLLDLGLMLEIYTNIQFKSQTQWSLHLKELSVGAAMTALHVWINDLSKALESGEDLPPLLGINTGQGKHKYSDKGLASVFESHLKELNAPFHESKAGWFLVTKAAAKSWLESRDSTESIAGLNSLVLGVPTMVL

SEQ ID NO: 255833 - protein, 154 aa, Glycine max
  Clone ID: PAT_MRT3847_73038C.1.pep
MPLCNCLIDLCVKLNVPERACDLLDLGLVLEIYPNIQSKSQTQWSLHLKELSVGAAMTALHVWINELSKALESGEDLPPLLGINTGKGKLKYSEKGLAGVFESHLKELHAPFHEAKAGWFLVTKAAAKSWLESRGSIADLNFELYGFTCSNFQQ

SEQ ID NO: 255834 - protein, 47 aa, Glycine max
  unsure (1)..(47): unsure at all Xaa locations
  Clone ID: PAT_MRT3847_73039C.1.pep
ARVRGLGMPARXALNSXIXXPEFCSIXXIXXXCIVQTXSXIXSXQXX

SEQ ID NO: 255835 - protein, 106 aa, Glycine max
  unsure (1)..(106): unsure at all Xaa locations
  Clone ID: PAT_MRT3847_7303C.1.pep
IKTKDGAEHQRGGESGARIGAFLAIHRLQSREVEQRRRFAPPLLPPFPALVSFTLHLPWLSSSTLRLKFQIPIHILSLSLYLCMYLFVKGRSCLCLFLGFCXIHSI

SEQ ID NO: 255836 - protein, 71 aa, Glycine max
  Clone ID: PAT_MRT3847_73040C.1.pep
LEHLLTNQPRITAKDSSNKIGKFIDNTPFKRQVSTIQQNIAVFMYNLSCASFLQSNLRIWNEKHLVQQHLC

SEQ ID NO: 255837 - protein, 62 aa, Glycine max
  Clone ID: PAT_MRT3847_73041C.1.pep
PKLASPILLLNIFCLKQGSFKSFLNRRGSKIFFFKNTKTFFLSKTFGETQFLGEHLLHLFKH

SEQ ID NO: 255838 - protein, 110 aa, Glycine max
  unsure (1)..(110): unsure at all Xaa locations
  Clone ID: PAT_MRT3847_73042C.1.pep
DFNPGKLKTTNTHCWMWLYGLAYEYWHPQILVEXXGAIGSPIALDENTVKKTFGHYARILVDFDLTNKLLKQILVXEGFAFFVGVEYEKVPRFCSTCIRVYVCVTVKTFL

SEQ ID NO: 255839 - protein, 33 aa, Glycine max
  Clone ID: PAT_MRT3847_73043C.1.pep
KRIASYISVKLGGIMGGGGLANGIGIYELALVR

SEQ ID NO: 255840 - protein, 106 aa, Glycine max
  Clone ID: PAT_MRT3847_73044C.1.pep
RHMGYGRHLPTQSTVTGNCRRCSNKPQSTGIWTTQAIRAAAGRPCIWTSRKTSRSFENFEFYFSPEALPNSTRERGQAPHVKDASPKLPNPTMQRNGAMKGGVSVI

SEQ ID NO: 255841 - protein, 45 aa, Glycine max
  Clone ID: PAT_MRT3847_73045C.1.pep
CIFSTNELDPLTYIISIFYIINQLKIILQDVYYENQQLIIYIIFV

SEQ ID NO: 255842 - protein, 53 aa, Glycine max
  Clone ID: PAT_MRT3847_73046C.1.pep
WSDIISFVDVVLARIRPFMTFQHLKISILNNKYDNKVKNGLYRNDSLYLYKFC

SEQ ID NO: 255843 - protein, 177 aa, Glycine max
  unsure (1)..(177): unsure at all Xaa locations
  Clone ID: PAT_MRT3847_73047C.1.pep
ARVSLAVSVISGCIGGSIMVAARGVWGNLFSHQKGVVKGVEKAMLLMALVEVFNFPVTVCXGGIVRGTGRPWLSMYAXLGGFYFLTLPLGVVFAFKLRFGLGGLLIGLLIGIAACLVLLLTFIVRINWVEEATKAQTFVCNAQVHEQVSRNEVNELTENPEGDQVCKETSITPYSCI

SEQ ID NO: 255844 - protein, 33 aa, Glycine max
  Clone ID: PAT_MRT3847_73048C.1.pep
GMLVRAATGKGVTYQARNTKDVTMEVDNMHEKQ

SEQ ID NO: 255845 - protein, 97 aa, Glycine max
  Clone ID: PAT_MRT3847_73049C.1.pep
LKPVSVQAFWAPLKVGGWLYLYLRVLLCKIKMEVTVFSNPVKVWGQRTALVFLALFFVGLRLGIFFQKKVVFSWLNGEGTLVLNRIPKGFLGGFKTF

SEQ ID NO: 255846 - protein, 100 aa, Glycine max
  Clone ID: PAT_MRT3847_7304C.1.pep
IGQIERLQEFLVQDVDSLKEEGCNYELLAPSTLGLENQSDCFPRTRWLHKKFSSSYASQEKNFVLSIPKFKCSEAYGYDLEPRVFSHSSNNCINAIEENC

SEQ ID NO: 255847 - protein, 65 aa, Glycine max
  unsure (1)..(65): unsure at all Xaa locations
  Clone ID: PAT_MRT3847_73050C.1.pep
RECVPRTYWVLNPQNPFVFNRRMGKLTTPQRTDRTAYXMPLCIARGAGSKNDFFTYLSEACLLKC

SEQ ID NO: 255848 - protein, 53 aa, Glycine max
  unsure (1)..(53): unsure at all Xaa locations
  Clone ID: PAT_MRT3847_73051C.1.pep
KAKHMXTDLLQCKKDFCADTIMQDVRFXXLHXLFKYYPHGHHSIHKEGRPVYY

SEQ ID NO: 255849 - protein, 72 aa, Glycine max
  Clone ID: PAT_MRT3847_73052C.1.pep
THQSVYNPAAERAYSIMAGSVESLILKNNRFINLRHLFPSIRIRWAVHMSRPHPTCSRPAWFFSNRRLCTLP

SEQ ID NO: 255850 - protein, 55 aa, Glycine max
  unsure (1)..(55): unsure at all Xaa locations
  Clone ID: PAT_MRT3847_73053C.1.pep
KVTFHALIXMIGCCNIYLVHYVYAFSNIDILXTAVXCRXDMXAGQFQKVRVLVWS

SEQ ID NO: 255851 - protein, 39 aa, Glycine max
  Clone ID: PAT_MRT3847_73054C.1.pep
MGLEKELGYTSSCPSGQEGGCDPPHGFILWPCSLMNLNS

SEQ ID NO: 255852 - protein, 253 aa, Glycine max
  unsure (1)..(253): unsure at all Xaa locations
  Clone ID: PAT_MRT3847_73055C.1.pep
ARGCSKWVKLSGIDLLPGDVVSIGRSSGQNGEEKSVPADMLLLAGSVIVNEAXILTGESTTQWEISIAGRAMEETLSAKRDKNHVLFGGTKILQHTPDKSFPLKTPDGGCLAVILRTGFETSQGKLMRTILFSTERVTANSWESGFFILFLVVFALIAAGYVLVKGLEDPTRSKYKLILSCSLIVTSVIPPELPMELSIAVNTSLIALARRGIFCTEPFRIPFAGKVDICCFDKTGTLTSDDIGFSGNCWVEW

SEQ ID NO: 255853 - protein, 39 aa, Glycine max
  Clone ID: PAT_MRT3847_73056C.1.pep
LSIYYLSFPSLPPISSSKIFSITFSKIYFLNHIIKNIIT

SEQ ID NO: 255854 - protein, 86 aa, Glycine max
  Clone ID: PAT_MRT3847_73057C.1.pep
MMFPGLGSAFLVQALLPRLYWAWKNFCSLIMPPGGVAVWTSVRCCLVASLGLSCRFIPPLSTKSSGVFRHSSYQVSTVAIPVSMWL

SEQ ID NO: 255855 - protein, 47 aa, Glycine max
  Clone ID: PAT_MRT3847_73058C.1.pep
NREMSGTTLDFFDMEKSWISTYKHILLKRNSIRYHFNGKKVGHLSFL

SEQ ID NO: 255856 - protein, 105 aa, Glycine max
  unsure (1)..(105): unsure at all Xaa locations
  Clone ID: PAT_MRT3847_73059C.1.pep
MDMYQLWSKKITLXSFAFVPLFLSASSDDVVVRSEDNFXKEIGHDXXALVEFYAPCCRHCEKLAPEYALLGSSFKKATSVLVRTVDCHHHINSCTIYGLSGYRTI

SEQ ID NO: 255857 - protein, 60 aa, Glycine max
  unsure (1)..(60): unsure at all Xaa locations
  Clone ID: PAT_MRT3847_7305C.1.pep
EVDIQTSVMLGFNQKIKLMKYECKTPYSICLTIWGNQRIHKDAPICKDHISLAXXVGIVL

SEQ ID NO: 255858 - protein, 73 aa, Glycine max
  Clone ID: PAT_MRT3847_73060C.1.pep
LELRHLRYFVAVAREQSFTRAAEAMHVAQPALSKQVQQFEEEFGLALIERGSRPVRLTEPGRVIYEQALQILE

SEQ ID NO: 255859 - protein, 106 aa, Glycine max
  Clone ID: PAT_MRT3847_73061C.1.pep
GSELLSLREIPFFCSFSAHSIFSIRFSDILAPNSLTFFDPLRVSLHEIRPRALASSFALFFSEFQFGIRVYGVSRAFGLVECNFPFWGSTSYDFNIIRGFNLMRVS

SEQ ID NO: 255860 - protein, 55 aa, Glycine max
  Clone ID: PAT_MRT3847_73062C.1.pep
AGSAEDLKLHPPKSKLTHAEAFQCKCEQIKLKGCKLKPTTLAMIITVTQPNKFYM

SEQ ID NO: 255861 - protein, 106 aa, Glycine max
  Clone ID: PAT_MRT3847_73063C.1.pep
TPMPTRVYCYLTVVLLLIAINPIILRSTAPLLFVFAFLFLSFLVGSHPSAITILALGFFPPLVPFFYSSAAPIVTLISQPFTGYATFQLWPVTYALCLYARWFVSS

SEQ ID NO: 255862 - protein, 119 aa, Glycine max
  unsure (1)..(119): unsure at all Xaa locations
  Clone ID: PAT_MRT3847_73064C.1.pep
VLFSVTVICDSIFNETLIRCSYEKXLRQAKAASMFVQSFKNLVSLWVYGDDNLLSVDECVKPYYSGSKLKSLLAGHKIPIADGIDKTSATLQXITAADCDFLKRNYKQMSHVFWAVPGD

SEQ ID NO: 255863 - protein, 55 aa, Glycine max
  Clone ID: PAT_MRT3847_73065C.1.pep
RISIKNEGNNSNQKLLTIVVFFQPDLGKQPKLKIRTWDTDLKRLSRASLFSYYNP

SEQ ID NO: 255864 - protein, 49 aa, Glycine max
  Clone ID: PAT_MRT3847_73066C.1.pep
GWLLLSLLFLQSMLMDIKLNPMQHSIATLQKLCMRYHIYQNKNPLLKAK

SEQ ID NO: 255865 - protein, 63 aa, Glycine max
  Clone ID: PAT_MRT3847_73067C.1.pep
SYLCIYNQFVRKPLILFFDFQIELAESFVFNAELQTIADFDDVNHFFCLDVLQCMNLRIIFTI

SEQ ID NO: 255866 - protein, 68 aa, Glycine max
  Clone ID: PAT_MRT3847_73068C.1.pep
MAICKLKSLLSLSKCNSALVSSSIRAFSSAQVPPNHLRNVGFIGLGNMGSRMANNLIKAGFRLTVHDL

SEQ ID NO: 255867 - protein, 46 aa, Glycine max
  Clone ID: PAT_MRT3847_73069C.1.pep
PYAQSINSIHSHHTTIHHTISNTSKSYRSHIYHIDNTYSHAIYLLP

SEQ ID NO: 255868 - protein, 67 aa, Glycine max
  Clone ID: PAT_MRT3847_7306C.1.pep
QSRRRQESSKWHQCRITSIVTLVRWHDFIHQQLTTFRAAAIMKGLECRTAYCYYQFSHHQSEEIGAS

SEQ ID NO: 255869 - protein, 413 aa, Glycine max
  Clone ID: PAT_MRT3847_73070C.1.pep
MAICKLKSLLSLSKCNSALVSSSIRAFSSAQNVGFIGLGNMGSRMANNLIKAGFRLTVHDLNSDVLEMFSQMGVPTKKTPYEVSEASDVVITMLPTSAHVIDVYTGPNGLLHGGKLLRPWLLLDSSTIDPQTSRNRLRPAICKLKSLLSLSKCNSALVSSSIRAFSSAQVIDVYTGPNGLLHGGKLLRPWLLLDSSTIDPQTSRNLSATVTNYILREKKGEWEKPFKLDAPVSGSVTAAEAGTLTFMVGGSEEAFLAAKPLLFSMGKSAIYCGGAGSGSAAKICNNLALAVSMLGISEALALGQSLGVSASTLTNIFNCSSARCWSSDAYNPVPGLMEGVPSSGDYNGGFASKLMAKDLNLAVESAKLAGCKYPLTSQAQKIYTELCSVGHEAKDFSCAFRHYYSGIDEPHDQ

SEQ ID NO: 255870 - protein, 93 aa, Glycine max
  Clone ID: PAT_MRT3847_73071C.1.pep
IHHLPISLYGNTTKPEKAILLTPKDNITQILRIQVKKPISCFKNCQIIPQHQKGDPGVFLLGNKNTFILRQEVANRNSSWLTLKHLNRQMLGI

SEQ ID NO: 255871 - protein, 107 aa, Glycine max
  Clone ID: PAT_MRT3847_73072C.1.pep
ITTTHKVRAAPPIWQYQQMFPFQSVKNQDNQLQQESPSKQFKIKATNESLITRCQCAINKRMHQENRNHFPAHASVLRHGKSKEGSLCTHHNCLKHRVTIKYLISTE

SEQ ID NO: 255872 - protein, 350 aa, Glycine max
  Clone ID: PAT_MRT3847_73073C.1.pep
MAICKLKSLLSLSKCNSALVSSSIRAFSSAQVPPNHLRNVGFIGLGNMGSRMANNLIKAGFRLTVHDLNSDVLEMFSQMGVPTKKTPYEVSEASDVVITMLPTSAHVIDVYTGPNGLLHGGKLLRPWLLLDSSTIDPQTSRNLSATVTNYILREKKGEWEKPFKLDAPVSGSVTAAEAGTLTFMVGGSEKAFLAAKPLLFSMGKSAIYCGGAGSGSAAKICNNLALAVSMLGISEALALGQSLGVSARTLTNIFNCSSARCWSSDAYNPVPGLMEGVPSSRDYNGGFASKLMAKDLNLAVESAKLAGCKYPLTSQAQKIYTELCSVGHEAKDFSCAFHHYYSGMDEPHDK

SEQ ID NO: 255873 - protein, 134 aa, Glycine max
  unsure (1)..(134): unsure at all Xaa locations
  Clone ID: PAT_MRT3847_73074C.1.pep
TKPLTGYSFGRDGNIIYVCTAYYITLSELKEATNNFSKNIGKGSXFGSVYYGKMKDGKEVAVKTMTDPSSYWNQQFVNEVTLLSRIHHXRNLVPLIGYCEEEYQHILVYEYMHNGTLREYIHGLISHLFVHLFT

SEQ ID NO: 255874 - protein, 251 aa, Glycine max
  Clone ID: PAT_MRT3847_73075C.1.pep
ASPGALMERSPSSTSIERRYVNRSSVKRNLEIDESGRRNSTNVRDFSASDDRLGRESTLEKPLLDEPSQADSSLYGRTNQSNAPLISPPPGFRATLDRPYMGSLEDDVRDNSNSRYRRSSEPGFGRGHGGNSWRAVPNWNSPVPNGFVPFPPGPAHGGFQTMVPQFTSQSLFGVRPPMEVNHAGIPYHIADADRFPGHLRPLGWQNLMDGTGTAHLHGWDNNNGVFRDDPHMYGGSDWDRNRHSTNSHGWE

SEQ ID NO: 255875 - protein, 150 aa, Glycine max
  Clone ID: PAT_MRT3847_73076C.1.pep
MNNGVSQESGVLLDLASHVNRFAFDSFRSDYNNSNTLLSNFSQFNNTRTGEAAVKRSVSLGLKVGGASVRFRNILNDFNRAVRFHCEKIPIGFASLRVGDGDGDGNGADGNGNGVRVDEWYGVENEGFRGDGVEGEKPKEVLILMSDTGG

SEQ ID NO: 255876 - protein, 63 aa, Glycine max
  Clone ID: PAT_MRT3847_73077C.1.pep
QLVMYIYALLMPNKVLYMLYQAIHAHTCIHNATLYCTCYFIMLTRCMLDPIQYNFFTIRPDLL

SEQ ID NO: 255877 - protein, 250 aa, Glycine max
  Clone ID: PAT_MRT3847_73078C.1.pep
VRRDPAALELAISMSETSDEIDNVADSVVPSVYVGQFAQLLEQGDNVDMLPLTDEEYIHYAISEGKRFRDSLEIIALLKKAYESYSSMKIQRMSSFCAFQMSKEYFAEGDISNAKKTFDSIASLYRKEGWVTLLWDVLGYLRECSRKNGTIKDFVEYSLEMAALPISSDTGVRRDIGPAGPVNLLQREIVQNEVFELVRGASGKATNEHPSNLKIMGDESLQLEVDLVSPLRLVMLASVAFHEQQKRPGA

SEQ ID NO: 255878 - protein, 54 aa, Glycine max
  Clone ID: PAT_MRT3847_73079C.1.pep
LIQAGISFTLTALIQGSRIKDHLPGTIKTRSVTPLPLERRPWCQQRRWFRLIFA

SEQ ID NO: 255879 - protein, 608 aa, Glycine max
  Clone ID: PAT_MRT3847_7307C.1.pep
MDSKTSSRALPKHHQKTAGIQTPETKDTGSSFQKMGKTELAAPVDLSMYAANASKQNTGETAEIKKLGGLTLKGSADSLSIKSGSGASSSVLDKVVHAANENIGSQESSIDLDKKTSEDGSVKNSSVSAKVSDGASSLAKTSGSAKISNRADFVESGKSSICRGSTSSDVSDESTCSSFSSTINKPHKANDLRWEAIQAVRSRDGVLGLGHFRLLKRLGCGDIGSVYLSELSGTKCYFAMKVMDKGSLASRKKLLRAQTEREILQSLDHPFLPTLYTHFETEKFSCLVMEFCPGGDLHTLRQKQPGKHFPEQAVKFYVAEVLLALEYLHMLGIVYRDLKPENVLVRDDGHIMLSDFDLSLRCAVSPTLVKTSSTDSEPLRKNAVYCVQPACIEPPSCIQPSCVAPTTCFSPRLFSSKSKKDRKPKNEIGNQVSPLPELIAEPTDARSMSFVGTHEYLAPEIIKGEGHGSAVDWWTFGIFLYELLFGKTPFKGSGNRATLFNVVGQPLRFPEAPVVSFAARDLIRGLLVKEPQHRLAYKRGATEIKQHPFFEGVNWALIRCATPPEIPKAVEFEKIPSPASSSGGEKAANHISIANQKGSDNYLEFDFF

SEQ ID NO: 255880 - protein, 92 aa, Glycine max
  Clone ID: PAT_MRT3847_73080C.1.pep
PGAGHLLQSLCPNSHDDSVTYASAQVFPMEVKWGFSTGRLGHPWKQNLGVMFYQTPSFGSTHLGHNSFMPWEPSKAPSPLFPRIWPQLKFLF

SEQ ID NO: 255881 - protein, 141 aa, Glycine max
  Clone ID: PAT_MRT3847_73081C.1.pep
VVVDFNYYRGNDPSNPRLNQDVWEEVEQLAFFKHGAKPHWAKNRNIAFLGVNQKYPKFNMFIAAKKQMDPLNVFSSEWSDEILYGQELSEKVDGCALEGLCICSEHRHCSPQKGYYCSHGLVYKEARVCRYLQSFISSTIV

SEQ ID NO: 255882 - protein, 74 aa, Glycine max
  unsure (1)..(74): unsure at all Xaa locations
  Clone ID: PAT_MRT3847_73082C.1.pep
MTTQVKVMXETFLFTSESVNEGHPDKLCDQISXAVLDACLEQDPDSKVACETCTTTKLVMVFGEITTKXNVTTR

SEQ ID NO: 255883 - protein, 111 aa, Glycine max
  unsure (1)..(111): unsure at all Xaa locations
  Clone ID: PAT_MRT3847_73083C.1.pep
QTPQFPKVGAAFFLPTHKTSPFSGQGWEAFLEPIKKARGFNTPVFFLLKARCPLXKKTAFAFKQKGAPKPRIKFYNPVSAFXTLPQKGFLTSSLVVDCPPILCPVPYTGDM

SEQ ID NO: 255884 - protein, 83 aa, Glycine max
  unsure (1)..(83): unsure at all Xaa locations
  Clone ID: PAT_MRT3847_73084C.1.pep
QIHSKQERXXKLLLLLFLXGWRRFKGXXXXXXXXXQLTLQFLQFWSPXDPSLVGEXRKWVILWAXYGCXHSXGTNFDFXXXXS

SEQ ID NO: 255885 - protein, 79 aa, Glycine max
  Clone ID: PAT_MRT3847_73085C.1.pep
MQDAIGIPACFFFALKSSDDHTTVTRLGQSVHMSLYRTKIADQCRLITITWCKNVMLHGLSVSVEGPKGEAQYCCKVEL

SEQ ID NO: 255886 - protein, 154 aa, Glycine max
  unsure (1)..(154): unsure at all Xaa locations
  Clone ID: PAT_MRT3847_73086C.1.pep
SDAPCAVVGLTSSYTPTPLLESGLQKDRGLIVEYFGWMSHDAHNVKYPQXKIXLEGNFSFDIKSRSRLEKVSFTKAQFVSGKTSXFDIIGAGSHSSEDFXETEDHDKPIKIDAILIQIIFPHFIEDXAHMETNFVKLPFDDVETLKVPCRNLKF

SEQ ID NO: 255887 - protein, 117 aa, Glycine max
  Clone ID: PAT_MRT3847_73087C.1.pep
SLCPVRAISCPCLLLMYVAFFVGSFGNLVLPCSGSTAQVAAGPVAAMRVGSASPWWLICHGGPLIYIASYPCSCWLVFCASVSFLLGGPCQSWAVVCLALVGKNKGSFAAFLLLGSS

SEQ ID NO: 255888 - protein, 159 aa, Glycine max
  Clone ID: PAT_MRT3847_73088C.1.pep
MLRNIRRAAQSVCRINSRYLEVSENGPVVSVGPNIHHCRLYMQYKFPSEACSSFLWHGTREGFRKRGSFRNFSVTSASNTVTHHSQIAWKRLYRKYCSSGDGTFPPTVNMIAQAVSLALARTYFLAPGILAFTCGELALAQRNWAEAERCHYRMDRYAA

SEQ ID NO: 255889 - protein, 59 aa, Glycine max
  Clone ID: PAT_MRT3847_73089C.1.pep
MRPALALLPLLVAFSLASTTVSRIDLREYWNMIMKDQEMSDGFQGLVSFQSDNNPKSQE

SEQ ID NO: 255890 - protein, 310 aa, Glycine max
  Clone ID: PAT_MRT3847_7308C.1.pep
MGEKSKILIIGGTGYIGKHIVEASAKAGNPTFALVRESTLSDPSKAQLIHNFEALGVNLVRGDLYDHEKLVKAIKQVDVVISTLGHLQLADQLKIIAAIKEAGNVKRFFPSEFGNDVDRVHAVEPAKSALAIKAQIRRSIEAEGIPYTYVSSNYFAGYFLPTLAQPGAFAPPPPKDKVIILGDGNPKAIFNKEEDIGTYTIRAVDDPRTLNKILYLRPPKNIYSFNELVALWENKIGKTLEKIYVPEEKVLKDIEEAPLPINVVLAINHSVFVKGDHTNFEIEPSFGVEASELYPDVNYTTVEEYLGQFA

SEQ ID NO: 255891 - protein, 44 aa, Glycine max
  unsure (1)..(44): unsure at all Xaa locations
  Clone ID: PAT_MRT3847_73090C.1.pep
FFQENFSFFFKSSSPFYGPRFQQLKQSLCFRGPPPKKKXXKKKK

SEQ ID NO: 255892 - protein, 205 aa, Glycine max
  unsure (1)..(205): unsure at all Xaa locations
  Clone ID: PAT_MRT3847_73091C.1.pep
MGKRKQKDLQQSSQTDTVSTPSSIFSKLFAIAPERTTATTAASLFSDDNPFRRKPTPLSDSTNRTQNPNDGDHPVNTDSGEEKKRKRNKEKTDKTPAPAIDTVVSVIEASDKSEKKRKRDSDEGKDLIVGAEASGKRKRKRGEVEKDWEEKKYGIVEEGLENKTVGIKRKTLDDPADMMVXKXGFDDEDKLLRTVXVGNLPLKVK

SEQ ID NO: 255893 - protein, 94 aa, Glycine max
  unsure (1)..(94): unsure at all Xaa locations
  Clone ID: PAT_MRT3847_73092C.1.pep
SRYACAENTGVALLCAMNRSFWGRTTYDIYTICSQDCEVWNPACTKAMTLSFKPNPRADSWSQESCCRSVFNXDIICVTGWTATPMHEAHVTIV

SEQ ID NO: 255894 - protein, 152 aa, Glycine max
  unsure (1)..(152): unsure at all Xaa locations
  Clone ID: PAT_MRT3847_73093C.1.pep
MAETTQSNAELLEWPKKDKRRFLHVVYRXFYTECFGMKLLRKRDIPEEKYANAFLGFGPEQSHFVVELTYNYGVTSYDIGTGFGHFAIATPDVYKLVEDIRAKGGNVTREPGPVKGGKSVIAFVKDPDGYAFELIQRPSTPEPLCQVMLRVG

SEQ ID NO: 255895 - protein, 149 aa, Glycine max
  Clone ID: PAT_MRT3847_73094C.1.pep
MAETTQSNAELLEWPKKDKRRFLHVVYRVGDLDRTIKFYTECFGMKLLRKRDIPEEKYANAFLGFGPEQSHFVVELTYNYGVTSYDIGTGFGHFAIATPDVYKLVEDIRAKGGNVTREPGPVKGGKSVIAFVKDPDGYAFELIQRPSTP

SEQ ID NO: 255896 - protein, 87 aa, Glycine max
  Clone ID: PAT_MRT3847_73095C.1.pep
AFLLPGEIRSSYVGSLTRRLRDADEATEVAHLKELYHQNNPEAVIRAFESQHSLHCNPSALPQYVKALKKVDRLDQTKLLKTLQRGN

SEQ ID NO: 255897 - protein, 168 aa, Glycine max
  Clone ID: PAT_MRT3847_73096C.1.pep
MAQQKRLRGLAQNLKDKASVIAAALSTKRHLSSVRVHVLRATTHALAAPPSEETISAVLAVGHGGSHRHPRACIDTLMDRLHTTRSATVALKCLYTLHNVVVKGPFVLKDQLSCYPSYGGHNFLNLSTFRDVSDLESLELSSWVRWYASVLEQTLTVSRILRYYLNDS

SEQ ID NO: 255898 - protein, 280 aa, Glycine max
  Clone ID: PAT_MRT3847_73097C.1.pep
MADLLEWSKQDKKRMLHVVYRVGDLDRTIKFYTECLGMKLLRQRDIPEEKYANAFLGFGPEESHFVVELTYNYGVTSYDIGDGFGHFAIATQDIYKLVEHIRAKGGNITREPGPVQGGTTVIAFVKDPDGYTFGLIQRPTVHDPFCQVMLRVGDLERSIKFYEKALGMKVVRKVDKPEYKYTIAMLGYGEEHETTVLELTYNYGVTEYSKGNAYAQIAIGTDDVYKSAEVVNQVIKEVGGKITRQPGPIPGLNTKTTSFLDPDGWKTVLVDNVDFLEELK

SEQ ID NO: 255899 - protein, 92 aa, Glycine max
  Clone ID: PAT_MRT3847_73098C.1.pep
PRVRPRFLSYLVEGLLKNAPCLLYKGVLLTRFATKGYGMKKGGMVNGKGGQGAGLGSKRFRLGEGSHSKFEARRDFIGKGLRLVIKCEIHMP

SEQ ID NO: 255900 - protein, 284 aa, Glycine max
  unsure (1)..(284): unsure at all Xaa locations
  Clone ID: PAT_MRT3847_73099C.1.pep
MADLLEWSKQDKKRMLHVVYRVGDLDRTIKFYTEXCFGMKLLRKRDIPEXKYANAFLGFGPEQSQFXHFVVELTYNXYGVYDIGTGFGHFAIATPDDIYKLVEHIRAKGGNITREPGPVQGGTTVIAFVKDPDGYTFELIQRPSIPEPLCQVMLRVGDLERSIKFYEKALGLRVVRKTDRPEYKYTIAMLGYAEEHETTVLELTYNYGVTEYTKGNAYAQVAIGTDDVYKSAEVVNIVTQELGGKITRQPGPIPGLNTKITSFLDPDGWKTVLVDNQDFLKELE

SEQ ID NO: 255901 - protein, 100 aa, Glycine max
  Clone ID: PAT_MRT3847_7309C.1.pep
RTAKKSLHRKLMKKAARRKVVNNVQKCCGLIKNSCFNKTLAPDFSDGSFFKFIQNNKAPTTERKQLQQYLPQFPSGSSQILPLAFFPTTFRPLEKASVVH

SEQ ID NO: 255902 - protein, 76 aa, Glycine max
  Clone ID: PAT_MRT3847_730C.1.pep
KGGREKKTVLSGVALPRRVVGTIHTIHLNTRVNSARDRSKEFHKVEVTLCEKAYPVSLKRADVKFEKFITCLDILE

SEQ ID NO: 255903 - protein, 372 aa, Glycine max
  Clone ID: PAT_MRT3847_73100C.1.pep
HVKTSSTQKLGSFMEMLFGGRYVLLLMALFSIYCGLIYNEFFSVPFHIFGASAYKCRDSSCRDAHTIGLIKYQDPYPFGVDPSWRGSHPVLPFLNSLKMKMSILLGVVHMNLGILLSYFNARFFGNSLDIRYQFVPQMIFLNCLFGYLSLLIVVKWCTGSQADLYHVMIYMFLSPFDNLGENQLFWGQRPLQIVLLLLAVIAVPWMLFPKPFILKKLHTERFQGRTYGILNNSEVDLEAEPDSARQHHEEFNFSEVFVHQMIHAIEFVLGSVSNTASYLRLWALSLAHSELSTVFYEKVLLLAWGYDNLVIRLVGLAVFAFATAFILLMMESLSAFLHALRLHWVEFQNKFYHGDGYKFRPFSFASLTEDDD

SEQ ID NO: 255904 - protein, 88 aa, Glycine max
  unsure (1)..(88): unsure at all Xaa locations
  Clone ID: PAT_MRT3847_73101C.1.pep
RXXSXKKRVXXRXFMSXXXXSXXVXXEXXLPEGXXXGDXXXXXACXXXTVXGXXVXXXFCXXTXVXXWXXGXXSXXXRVXXXWCXHXV

SEQ ID NO: 255905 - protein, 52 aa, Glycine max
  Clone ID: PAT_MRT3847_73102C.1.pep
KVIINIIPKVKLYIIQCKGESFIYLHPSLLVNRKQTSEKVFLCQNHSNSKEK

SEQ ID NO: 255906 - protein, 34 aa, Glycine max
  Clone ID: PAT_MRT3847_73103C.1.pep
NWRLFLRSGRSMEVKTLDRGFLCIEWRKIGNVVT

SEQ ID NO: 255907 - protein, 45 aa, Glycine max
  unsure (1)..(45): unsure at all Xaa locations
  Clone ID: PAT_MRT3847_73104C.1.pep
QSHTXXRXLXNXXQXXDTTXAXXXXHXXXAXEXCXAXDVQHXXXT

SEQ ID NO: 255908 - protein, 131 aa, Glycine max
  Clone ID: PAT_MRT3847_73105C.1.pep
SCQTDRGCIVIDGYGKTNVPGIYAIGDVAGPPMLAHKAEHEGVICVEAIKGLHPHPMDKNLIPGCTYCQPQVASVGLTEAKAKENGREIRVGRFPFVGNGKAIALGEDQGLVKVIFDKKTGQLLGAHMVGA

SEQ ID NO: 255909 - protein, 169 aa, Glycine max
  Clone ID: PAT_MRT3847_73106C.1.pep
MHPSFLLQIWNCSRDEADIRVHEFFKTPYFKSGIHPLPGAQMALQKLSRFCSLSVVTSRQNAIKDHTIEWLEKNYPGLFHEIHFGNHFALDGVSRPKSEICRSLNAKVLIDDNPRYAIECADVGIRVLLFDYENSYPWCKNESVDQHPLVTRVKNWEEVEQQLMSLIAS

SEQ ID NO: 255910 - protein, 49 aa, Glycine max
  Clone ID: PAT_MRT3847_73107C.1.pep
SNLNFLANRRKVKRGTNRDLSFFLSFVPSQSYQPPSRRVNLYKCPPNPL

SEQ ID NO: 255911 - protein, 59 aa, Glycine max
  unsure (1)..(59): unsure at all Xaa locations
  Clone ID: PAT_MRT3847_73108C.1.pep
VAFVNLLVNNPVTPGSGLRSQFSKVGGNSFFSPCNCYLSGGRWVFSKKKTPXXIYHPPS

SEQ ID NO: 255912 - protein, 71 aa, Glycine max
  Clone ID: PAT_MRT3847_73109C.1.pep
LSNKTSYHTSNILNTTIIMSSIATYNIPIVTTYSIFTKLFSNHTSSNFIFYKIYIFLFLLLFFNFTFFLFF

SEQ ID NO: 255913 - protein, 115 aa, Glycine max
  unsure (1)..(115): unsure at all Xaa locations
  Clone ID: PAT_MRT3847_7310C.1.pep
GEKSKILIIGGTGYIGKHIVEASAKAGNPTFALVRESTLSDPSKAQLIHNFEALGVNLVRVRLLSNYLILISFQSTNXWQWQGDLYDHEKLVKAIKQVDVVISTLGHLQLADQLK

SEQ ID NO: 255914 - protein, 58 aa, Glycine max
  Clone ID: PAT_MRT3847_73110C.1.pep
VRELRCCRRRNSRTLRLFRLSFGSIIILVIYENKILAVFNYEPVYCSGPVRFLKHAKT

SEQ ID NO: 255915 - protein, 81 aa, Glycine max
  Clone ID: PAT_MRT3847_73111C.1.pep
FLGVGLGVLRGAPLSWYPLFGHVFLLSFPFPGLACFGCPLGFWGGPGASCYFVGPLALRAPLWVCFWGSPSPWGPFFGVTT

SEQ ID NO: 255916 - protein, 274 aa, Glycine max
  Clone ID: PAT_MRT3847_73112C.1.pep
MLRMGLRKLQDKVALITGAASGIGKATATKFINNGAKVIIADIDQELGQETAKELGPNATFIACDVTQESDISNAVDLAVSKHKQLDIMYNNAGIACRSPLSIVDLDLELFDKVMDINVRGVVAGIKHAARVMIPRGSGSILCTASVTGVIGGVSQHTYSISKFAVVGIVKSLASELCRHGIRVNCISPFAIPTPLVMGEMSQIYPHVDAQRHEDIVHNAGVLKGANCEPNDIANAALFLVSDDAKYVSGHNLVVDGGFTSFKNLDLPAPNQVQ

SEQ ID NO: 255917 - protein, 47 aa, Glycine max
  Clone ID: PAT_MRT3847_73113C.1.pep
RRRRSYTWVAKRDRTTRDPIIVYAEWRGYQRTDLDAVDDNAGLEGML

SEQ ID NO: 255918 - protein, 80 aa, Glycine max
  Clone ID: PAT_MRT3847_73114C.1.pep
TFVSKCQLLFPILLPFVYVPLLPCIFGLFHLLLSMHYFSVTFSRLFITLNSDPSYLQKNSSLLPSLACFLQNIIWVFPGI

SEQ ID NO: 255919 - protein, 48 aa, Glycine max
  Clone ID: PAT_MRT3847_73115C.1.pep
SPFYTLYPLTTDISPCYYRITSAICAFNIGSLFTTSLCYVTSKEHLFF

SEQ ID NO: 255920 - protein, 44 aa, Glycine max
  Clone ID: PAT_MRT3847_73116C.1.pep
ERGIRELLCAYTRRWGLIDEGTASMVIIWGTVLYTNPHVISHSL

SEQ ID NO: 255921 - protein, 80 aa, Glycine max
  Clone ID: PAT_MRT3847_73117C.1.pep
GVRTPERRPLKTPINMHISYESLQYVFPIPQSYHLYIHFHYLKRSKLTDDILVKLIGLLLNDILNDLINFNVINKNSINI

SEQ ID NO: 255922 - protein, 68 aa, Glycine max
  Clone ID: PAT_MRT3847_73118C.1.pep
LLAPSPVYGLIALAPALPPRQLAQGLPMRIPRIASWLLLRDTKFMPRRPSTFSRPRPVRLSPLTQNST

SEQ ID NO: 255923 - protein, 51 aa, Glycine max
  Clone ID: PAT_MRT3847_73119C.1.pep
NQRSWFVGILYSLVFTSPLFLKANNISNALRSSTAVFLIRYIATGRSISFL

SEQ ID NO: 255924 - protein, 168 aa, Glycine max
  Clone ID: PAT_MRT3847_7311C.1.pep
LLGLRIFIQTFDVLENLLLWYINFFEGLANLVLPQGHKLVERVNVLRGPKVENLVQCPRVIHSPDGVGSNVLFLRPPKNIYSFNELVALWENKIGKTLEKIYVPEEKVLKDIEEAPLPINVVLAINHSVFVKGDHTNFEIEPSFGVEASELYPDVNYTTVEEYLGQFA

SEQ ID NO: 255925 - protein, 101 aa, Glycine max
  unsure (1)..(101): unsure at all Xaa locations
  Clone ID: PAT_MRT3847_73120C.1.pep
VLSKKGEKINRVSGGDEKLRRQRTHLMVPCLSRMEMXKKEVTPAEWGTPSTCSLTVVSYRIINERLIHYRYELLLGQAKGARLQLQCLKDVHTLRVCGDDN

SEQ ID NO: 255926 - protein, 213 aa, Glycine max
  Clone ID: PAT_MRT3847_73121C.1.pep
DAIRGKVVQLMRLDCKRAVPLLIQNRDLISPPEVVNQLLNADDKSDCRYFLHLYLHSLFEVNPHAGKDEKTTEGELYADYDPKMLLPFLRSSQHYSLEKAYEICIKRDLLREQVFILGRMGNSKQALAVIINKLGDIEEAVEFVTMQHDDELWEELIKQCLHKPEMVGILLEHTVGNLDPLYIVNKVPNGLEIPRLRDRLVKIITDYRTETSL

SEQ ID NO: 255927 - protein, 958 aa, Glycine max
  unsure (1)..(958): unsure at all Xaa locations
  Clone ID: PAT_MRT3847_73122C.1.pep
MVPFPSENGVEGDDEREEEDEEEEEEEEDEEVVEDEEDEEEPRLKYQRMGGSIPSLLASDAASCIAVAERMIALGTHGGTVHILDFLGNQVKEFSAHASVVNDLSFDTEGEYIGSCSDDGSVVINSLFTDEKLKFEYHRPMKAVALDPDYARKMSRRFVAGGLAGHLYLNSKKWLGYRDQVLHSGEGSIHAVKWRATSLVAWVNDAGVKVYDTANDQRITFIEKPRGSPRPELLLPHLVWQDDSLLVIGWGKSVKIASIRTNHQKAANGSFRQVPLTGMTQVDIVASFQTSYFISGLAPFGDALVVLAYIPGEEDGDKDFSSTAPLRQGNAQRPEVRIVTWNNDELSTDALPVHGFEHYRAKDYSLAHAPFSGSSYAGGQWAAGDEPLYYIVSLKDVVIAKPRDTEDHISWLLQHGWHEKALAVVESGQGRSELLDEVGSRYLDHLIVERKYSEAASLCPKLLRGSASAWERWVFHFAHLRQLPVLVPYMPTENPRLRDTAYEVALVALATNPSFHKDLLSTVKSWPSVIYSALPVISAIEPQLNTSSMTESLKEALAELYVIDEQYEKAFLLYADLMKPEVFDFIDKHNLHDAIRGKVVQLMRLDCKRAVPLLIQNRDLISPPEVVKQLLNADDKSDCRYFLHLYLHSLFEVNPHAGKDXDDRRVELYADYDPKMLLPFLRSSQHYTLEKAYEICIKRDLLREQVFILGRMGNSKQALAVIINKLGDIEEAVEFVTMQHDDELWEELIKQCLHKPEMVGILLEHTVGNLDPLYIVNKVPNGLEIPRLRDRLVKIITDYRTETSLRHGCNDIIKADCVNLLIKYYKEARHGISLGNEDEPRVKMSDTRASQVFDKSPSLRTVELKSKTRGGGRCCICFDPFSIQNVSVIVFFCCHGYHTTCLMDSSYTSSNQKEVQATSLEAETYDGYNGYEEDASEDDEEAKSGGPRMRCILCTTAG

SEQ ID NO: 255928 - protein, 41 aa, Glycine max
  Clone ID: PAT_MRT3847_73123C.1.pep
SIPQWILEVLQSRPCCKIDPQSLIQIVIQYLQIADQPDRCL

SEQ ID NO: 255929 - protein, 109 aa, Glycine max
  Clone ID: PAT_MRT3847_73124C.1.pep
QQVQVFTTCYCPPPQYEYLRRIGISKQLKCATIPSLSVSASSVLRNASFCCTSSVHCNLPSSPKIFVKGLPLSTSEGRLMKVFSEFGDVTLGNNKFFLGWCFQSLVKLL

SEQ ID NO: 255930 - protein, 45 aa, Glycine max
  Clone ID: PAT_MRT3847_73125C.1.pep
ECVLKGKPSDDGLSYCHCLISYMVINSPDDVHMVALMPALFIRLS

SEQ ID NO: 255931 - protein, 38 aa, Glycine max
  Clone ID: PAT_MRT3847_73126C.1.pep
AWGLQPLPFFFFFFFFFFFFFFFFFFFFFFFLDDNNIL

SEQ ID NO: 255932 - protein, 122 aa, Glycine max
  Clone ID: PAT_MRT3847_73127C.1.pep
ECHASGLLFSKVSNCAVVKSSWTQGSSGLSQRSGIFSVISTSISGKDQNQKKPVVLLDSSVFPTGPPVPVQTQKLLKFIDTSQLCKGPQDSPGHWLITGASLVLDKGKICLWAKFSLLHAGS

SEQ ID NO: 255933 - protein, 45 aa, Glycine max
  Clone ID: PAT_MRT3847_73128C.1.pep
KAQSGNIFDASFDCTYSALCQSVEKIKCVHSKCGEGNGTVWCSLL

SEQ ID NO: 255934 - protein, 75 aa, Glycine max
  unsure (1)..(75): unsure at all Xaa locations
  Clone ID: PAT_MRT3847_73129C.1.pep
VGFFVVLLTKAHLTDTAYYTFNKFNLIQPNIMLQKDARIXPVGCXQLTKDGSNGVHTLQSIARALYAVAIQISDS

SEQ ID NO: 255935 - protein, 85 aa, Glycine max
  unsure (1)..(85): unsure at all Xaa locations
  Clone ID: PAT_MRT3847_7312C.1.pep
FNLRYIIFEVLQWVKVCLLCEANENDAEDEIKSAESLHTNLNTIQVATEDSSESNKLGQRGFXAVYRGRLSTGQMIAANTVTRDS

SEQ ID NO: 255936 - protein, 87 aa, Glycine max
  Clone ID: PAT_MRT3847_73130C.1.pep
STSMECPFLLGEEGGTVPLGSALRNKLSLLEDGFSFLSRTSFLASKHEQNEANRSMKRSSKVLGRDILLLTAGSNCERTREWLYEGQ

SEQ ID NO: 255937 - protein, 76 aa, Glycine max
  unsure (1)..(76): unsure at all Xaa locations
  Clone ID: PAT_MRT3847_73131C.1.pep
HSYTYPQDVADRERIFKLFDSNGDGXISSQEIGDARKALGXMAEIDTDGDGFISHEEFTNFARANRGLVRDVAKIF

SEQ ID NO: 255938 - protein, 81 aa, Glycine max
  Clone ID: PAT_MRT3847_73132C.1.pep
FPSSQCCCFASASPSFFAFVPLTPVACLFPSPQGFRPVVFPRCPPWVARTSRFRLSASPPRFNSSSVVGPVGPNCSCAVPL

SEQ ID NO: 255939 - protein, 61 aa, Glycine max
  Clone ID: PAT_MRT3847_73133C.1.pep
EEMLRVGLQNHPCLNKKCGSQPMQGCFVLTTRHYLFSGDLNFNRGDFIPLCAAFPRQRILV

SEQ ID NO: 255940 - protein, 98 aa, Glycine max
  Clone ID: PAT_MRT3847_73134C.1.pep
KFAPRMVSASAFTIDEKRLTIIHVGKGRIYEGVSVHALDLLNIHRALIYAGDASIMDGDRFNAGCWQQKPVYKALVKGKTLSRDNIAYTSFVGFAYRA

SEQ ID NO: 255941 - protein, 55 aa, Glycine max
  unsure (1)..(55): unsure at all Xaa locations
  Clone ID: PAT_MRT3847_73135C.1.pep
MLVYQELLTGDEPLCDSFRYKEIENGMLWEVDGKWVAXGAGDVNIVANPSAEGRR

SEQ ID NO: 255942 - protein, 142 aa, Glycine max
  Clone ID: PAT_MRT3847_73136C.1.pep
MRPPRKRVDFSRGDKVEICSNEEGFLGSYYPATVVSRLDNGLYVVRYDTLLEDDASFQPLTETLFPKELRPHPPRVPRTHFALHQCVDAFDNDGWWLGQITGKKDGEHYYVYFSTTNEEIAYHVSGIRVHHEWSHGEWVLSN

SEQ ID NO: 255943 - protein, 52 aa, Glycine max
  Clone ID: PAT_MRT3847_73137C.1.pep
SVHLTITVGKAFWVSKCNRYSLLFRRSHVHVISGLVPFSRASIYVCIRSFYV

SEQ ID NO: 255944 - protein, 120 aa, Glycine max
  Clone ID: PAT_MRT3847_73138C.1.pep
MEVARTVKDVSPHDFVKAYSAHLKRSGKMELPHWTDIVKTGKFKELAPYDPDWYFIRAASMARKIYLRQGVGVGAFQKIYGGRKRNGSRPPHFCKSNGAIARNILQQLEAMKIVELDLKG

SEQ ID NO: 255945 - protein, 49 aa, Glycine max
  Clone ID: PAT_MRT3847_73139C.1.pep
PPLCNPQLRSGILMDNLAPIRSNLYKCDESLFLCYGGGPFLFYPHQHDN

SEQ ID NO: 255946 - protein, 141 aa, Glycine max
  Clone ID: PAT_MRT3847_7313C.1.pep
EASRFSDRVLERLFSKAGTGFVSVVVGSFARNLVLGFYDAESVGTRSQSDVPGWVNVICDERCGKLIGDCVQTFVSTAVAVFLDKTKDVNTYDEMLAGLSNPKHQENVKGILVSMCNGAVETFVRTSHQVLTNRSVRSNSG

SEQ ID NO: 255947 - protein, 70 aa, Glycine max
  Clone ID: PAT_MRT3847_73140C.1.pep
FWKKFRGKKRWSFFFWGIRIKSPPPPVILKKGGPLFPPPKVFFRGENFFFKIPWKGKLICRKGVKKGCSR

SEQ ID NO: 255948 - protein, 81 aa, Glycine max
  Clone ID: PAT_MRT3847_73141C.1.pep
FGDNETRKADMPSYSYPLQKQNSRASVDDDNKENCGHTYKSEQLMNCSPIKSATLDEKNSQRDTVDGNSQHNVKQDLLILK

SEQ ID NO: 255949 - protein, 65 aa, Glycine max
  Clone ID: PAT_MRT3847_73142C.1.pep
AATKRFYFIKLFIRSGKDIVHDWELFELRSDITICVAKDLYAGLPFLFPLNSDGPGHLALRRRDL

SEQ ID NO: 255950 - protein, 48 aa, Glycine max
  Clone ID: PAT_MRT3847_73143C.1.pep
EYTLQMGESGIIWDCIVLLVTNMDDIDSESENKSLFYVNGTNHWFLQK

SEQ ID NO: 255951 - protein, 106 aa, Glycine max
  unsure (1)..(106): unsure at all Xaa locations
  Clone ID: PAT_MRT3847_73144C.1.pep
XXTTXXSSXXNTSSXXHXIXXXSXTXXXXXSPXPXXXNLHIHXXXHHHHHLPPXXTAFXXXPXHLLXXXXIXTPXXTXIXXPXXHYSXTTLSLXXXXXLXXRILQT

SEQ ID NO: 255952 - protein, 88 aa, Glycine max
  Clone ID: PAT_MRT3847_73145C.1.pep
HSPCSGVYRPACFHSQSAMIDVEGTAEQYKSKGCRYERTGNIKQPTLQLVVSQAWMLWSWHPYSRDQEIAVKSLFLSSTPIYSLYPYS

SEQ ID NO: 255953 - protein, 49 aa, Glycine max
  Clone ID: PAT_MRT3847_73146C.1.pep
CGLLMYSHLFFRSILASYNFIVLKIQSRCSFLEYYFKKQVDMYNMLDQI

SEQ ID NO: 255954 - protein, 156 aa, Glycine max
  Clone ID: PAT_MRT3847_73147C.1.pep
MSLLAKLRCVTIDVTGRLEAYKGELGDYYCMAAKAAGKPCPDYKRMHEGFKLAYKEMAKNYPCFGHAAKMPNIVWWKTCVRDSFVRAGYEYDEETFEKIFRRIYASFGSSAPYTVFPDSQPFLRWLRGEGLKVGIASNGEYRYQDVILSLGLKRTL

SEQ ID NO: 255955 - protein, 33 aa, Glycine max
  Clone ID: PAT_MRT3847_73148C.1.pep
KNEDGWNSKRSDLLAKYRIQNFMLKLSKCLIIS

SEQ ID NO: 255956 - protein, 58 aa, Glycine max
  unsure (1)..(58): unsure at all Xaa locations
  Clone ID: PAT_MRT3847_73149C.1.pep
XVXGXLXRWXCCXXXXWRXXXXXXXRGXGGXXXXXXXXRRXXWXGCCEAXAXAXVXAX

SEQ ID NO: 255957 - protein, 33 aa, Glycine max
  Clone ID: PAT_MRT3847_7314C.1.pep
LHRFYHETYSLNLLISSVNSPSERTYRAFYKFL

SEQ ID NO: 255958 - protein, 151 aa, Glycine max
  Clone ID: PAT_MRT3847_73150C.1.pep
MKMGGGCKCLVSLVLALVLMRSLAEAQSGSSTTCAQELIPCVNFLNGTTTPPSSCCDPLKQTVENQLDCLCNIFFSPGLLQSFNVSVDQALALSRRCGVTNGITSCTNGSAPAPGSGPPPVTPGGDKGGAGRVTFTGLSFLLLFWVSMLFN

SEQ ID NO: 255959 - protein, 158 aa, Glycine max
  Clone ID: PAT_MRT3847_73151C.1.pep
GVRVGADTKVEWDPDVERVYLDSGKPLVPDYAMTFVNGTSSKPFARLWWDETVPTVVTRAEPHNQAILHPEQDRVLTIRENARLQGFPDFYKLCGPVKERYIQVGNAVAVPVARALGYTLGLAFEGSTSTSDDPLYKLPDKFPMIRDRVSSVSSEDDV

SEQ ID NO: 255960 - protein, 39 aa, Glycine max
  Clone ID: PAT_MRT3847_73152C.1.pep
MYYQPVQSATKLLLVRQNVGHVLLRVLLHDLRHSILKSF

SEQ ID NO: 255961 - protein, 49 aa, Glycine max
  Clone ID: PAT_MRT3847_73153C.1.pep
FKEKNSITLRLTSGQIYINILKSQRTILLIKQKITNNKVKFKQNFTLKF

SEQ ID NO: 255962 - protein, 371 aa, Glycine max
  Clone ID: PAT_MRT3847_73154C.1.pep
MSLNNNDSKLNPSSLLNSVTKLLWGQSLPPGLLVATVRTAWNSTWHLMMSQLAPSDSSGGYSRPASKFRFSSTTPSQGSSLHLYVGLACPWAHRTLIVRALKGLEDAVPVSVASPGLDGSWEFKRAGGPDTNTIAPSLDRANGCNTLKEVYRLRRGGYDGRSTVPMLWDKGSKDVVCNESYDIIHLFNSELNSVAQNPGLDLSPPQLKKQTEEWYQIIYPNVNNGVYRCGFAQSQEAYDRAVNDLFSTLDKLEDHLANSRYLCGDTLTLVDICLFTTLIRFDLAYNVLFKCTKKKLCEYTNLHAYMRDIYQIPKVAATCNFTEIMDGYYKILFPLNPGSIRPAMPSTSEHESLCRPHGRESLSSATLAFVK

SEQ ID NO: 255963 - protein, 48 aa, Glycine max
  unsure (1)..(48): unsure at all Xaa locations
  Clone ID: PAT_MRT3847_73155C.1.pep
LXXXXXLCXXXXCXVXWCSXSLCLCXXXFAXXXLSRXIPCXRXRXCXX

SEQ ID NO: 255964 - protein, 74 aa, Glycine max
  Clone ID: PAT_MRT3847_73156C.1.pep
SARNDELISLVTFSRFTGIQHNYRDTHFCDRILLFFSSYTWIEIFIQLITEYLIWPFLCQCTLLTGLFCLEVIS

SEQ ID NO: 255965 - protein, 108 aa, Glycine max
  Clone ID: PAT_MRT3847_73157C.1.pep
MFLWLSNFIRSWPLLIYAATWVTVMTFTVAVASLSTEVAFVSAISSSEKCKSDGSLVRVRVPVEETPCFPAHLFTKSHIDVIVPPIFAALVVAASACVVKVVGLWEHD

SEQ ID NO: 255966 - protein, 82 aa, Glycine max
  Clone ID: PAT_MRT3847_73158C.1.pep
GGLETFWLGLEGGPKGVLPTKTNRINLLKRKRFCLRTIFFPTGGGFRPMVGVQTLFKKSKNPGFLSLVPPLREVGKVNCGRC

SEQ ID NO: 255967 - protein, 35 aa, Glycine max
  Clone ID: PAT_MRT3847_73159C.1.pep
ELEILSMIILKNPHSKLFSFQASRIFISHNILSRL

SEQ ID NO: 255968 - protein, 63 aa, Glycine max
  Clone ID: PAT_MRT3847_7315C.1.pep
TTECRRSRAAPTPAGPPGMKSEIIAPPHMIAHSLRTLLFRLKVETFFHPMENDRRKNKAFKEQ

SEQ ID NO: 255969 - protein, 167 aa, Glycine max
  Clone ID: PAT_MRT3847_73160C.1.pep
MAINNGGGSEEGALQTVLYMWGYLPGALPQRTPLLTPVAVRVPPCDYSWNDVCGGGCGFAIAISESGKLITWGSTDDLGQSYVTSGKHGETPEPFPLPTEASIVKAAAGWAHCVAVTEHGAVYTWGWKECIPSGRVFGEPSTGVSLEKDVPGRHSQVSTEQVSPRSQ

SEQ ID NO: 255970 - protein, 117 aa, Glycine max
  Clone ID: PAT_MRT3847_73161C.1.pep
TPRFQREAESLATSYVKLKESYFWAWKSSHMDLDHAVKQWIRSGNWLTNARIHVNQGFPVLEMVEFIIPIPFLEAAQLRFHDTNKELQRDFGSLSALEGSKRTNCKAYSDSCDGYVI

SEQ ID NO: 255971 - protein, 129 aa, Glycine max
  unsure (1)..(129): unsure at all Xaa locations
  Clone ID: PAT_MRT3847_73162C.1.pep
GKTYLGFFPPTNPEINFXPXXXKGXXGCXLQLWNFDLAXXXPXRTXTVFGLCXQKKAFGXXXISXPVKXILXKXXPCFXLXXMAQXQKGXLRXLWGPNEXAKXVXGKXXQXMAGPXRXEFITLGGLSGR

SEQ ID NO: 255972 - protein, 64 aa, Glycine max
  Clone ID: PAT_MRT3847_73163C.1.pep
LKPKWLQKKSLHRGGEGSTKSLFSKKRHPRFPLFFPNFFGFLILKTRTFKLLLWNSFHPPPGPS

SEQ ID NO: 255973 - protein, 73 aa, Glycine max
  Clone ID: PAT_MRT3847_73164C.1.pep
SEFGSSLFKRYGNEMDILLKPGENIFRSLRWDLNDLDPHDVSCSNWGLYAFRGKRYEATKKETEEEVHSDRTA

SEQ ID NO: 255974 - protein, 91 aa, Glycine max
  unsure (1)..(91): unsure at all Xaa locations
  Clone ID: PAT_MRT3847_73165C.1.pep
EVTSLATCSPTRCPPRRALYYVQDSXRDSHDGEKTVSTSFDFTPVVSPSDSRPYSCHCSSTRVYKKDHRPSLKPREQIDDIVEEGLVQGDD

SEQ ID NO: 255975 - protein, 191 aa, Glycine max
  Clone ID: PAT_MRT3847_73166C.1.pep
MKEIVTVQVGDFANFVGSHFWNFQDELLGLAGNPSADSVFKNQDLNMDVLYRTGETQQGIPSYTPRLLSINLRGSLGSMSSRGTLYTEVASTTPDVVTWTGRVSTQASEPYKRNLFLQRLYEEEESLNMINEIRGSNNGSQSEYEDKDITECLENGVQFWTDYSKVHYHPRSLYELNGVWAHVEEFDNYGI

SEQ ID NO: 255976 - protein, 56 aa, Glycine max
  Clone ID: PAT_MRT3847_73167C.1.pep
LLIIIHNNYQLMLLEYWTGFYSQTIILYVYFIRQQLTHLIYYYLKLLSCYDHYMWE

SEQ ID NO: 255977 - protein, 123 aa, Glycine max
  unsure (1)..(123): unsure at all Xaa locations
  Clone ID: PAT_MRT3847_73168C.1.pep
LCDLREREIKNKFFLDXHDSSMEDLKTNAXRIWQASVLQAEXDAKDTADDSAAKHSSMEKLIQRGIHTSSIRLSNIHRRHMKLXDMGTKHISATESIVKNATDNIEQHSRKAHSARVTAEEDV

SEQ ID NO: 255978 - protein, 250 aa, Glycine max
  Clone ID: PAT_MRT3847_73169C.1.pep
PRVRPNARMARIASLESMLNISSNSLVAMASQLSEAEERERAFTNRGRWNQLRSMGEAKNLLQYLFNSVGDARCQLWEKDTEIKEIKDQIKELVGLLRQSEMKRKETEKELKAREQAVATTLATPTSGNSPNSLKHYAEDIKEPLSPESVPVQKQRKYMPGITNGQVRESAAFVDQSRTMIPIGQLSMKKLAIVGQASGKLWRWKRSHHQWLVQFKWKWQKPWRLSERIRHSDETIMRARPRSQALPHIM

SEQ ID NO: 255979 - protein, 50 aa, Glycine max
  Clone ID: PAT_MRT3847_7316C.1.pep
NLCFGHIYWLQHVMTNGIHSFGCHRINRTKGDQSFNNVIKDTHGTQHMEA

SEQ ID NO: 255980 - protein, 173 aa, Glycine max
  Clone ID: PAT_MRT3847_73170C.1.pep
LFFFSSIPSSIGRLSHLQIMNLSTNFFSGEIPDIGVLSTFDKNSFVGNVDLCGRQVQKPCRTSLGFPVVLPHAESDEAAVPTKRPSHYMKGVLIGAMAILGLALVIILSFLWTRLLSKKERAAKRYTEVKKQADPKASTKLITFHGDLPYTSSEIIEKLESLDEEDIVGSGGF

SEQ ID NO: 255981 - protein, 75 aa, Glycine max
  Clone ID: PAT_MRT3847_73171C.1.pep
MLIYLIARRLLDGVFETHHCSCCAKVFLYARDRSLLPPVQTKMTETYNSYLNGQTRSENLLTMCTAFRRMSRVCL

SEQ ID NO: 255982 - protein, 44 aa, Glycine max
  Clone ID: PAT_MRT3847_73172C.1.pep
RKDSNNWTFRLKHKQKIKTRLLPTLRYRSFHSSPSPCRCRASIT

SEQ ID NO: 255983 - protein, 82 aa, Glycine max
  Clone ID: PAT_MRT3847_73173C.1.pep
WSWQLFPSLIEFLIDVVSGIIRRREWYIIWLSNIIVPCPRRYSVYFLPCYMIVNCSRIAFSPPVLIALNLTCGAICKSFLLD

SEQ ID NO: 255984 - protein, 274 aa, Glycine max
  unsure (1)..(274): unsure at all Xaa locations
  Clone ID: PAT_MRT3847_73174C.1.pep
MACSTTLHASILKLLIIFLFAGWVSLWLLKPTQIWTRKWKQAEDSANDTIFGYYGLSFAVYAFPIIAIAIIGLLLLDLKAGYQRSRSARSTPSKSNFFSNPLVVNTTLGILSSIEILIAFLFIVFLAWTYYSRIYTDFKKLMPYKSLKLNTWQLKYHRIATRFGLLAEACMALLLLPILRGLAVFRILGIQFEASVRYHTWIGTAMILFATIHGASTLLVWGVSHHIEDEIWKWQKTGRIYLAGEIALVVGLVIWVTSLPXIRRRKFEIFYYTH

SEQ ID NO: 255985 - protein, 44 aa, Glycine max
  Clone ID: PAT_MRT3847_73175C.1.pep
LKKLYLGLGNHLKPGISDQILVLRIRRSFLGSQWLTNFKQKMNI

SEQ ID NO: 255986 - protein, 51 aa, Glycine max
  Clone ID: PAT_MRT3847_73176C.1.pep
RVSNVCMMVYHSPREDKASHYYPSLKVAHSIRIERAPRRDTQSRCIRELKG

SEQ ID NO: 255987 - protein, 110 aa, Glycine max
  Clone ID: PAT_MRT3847_73177C.1.pep
EDPFSSVFPRFYRRSVFCQFFLFNFGGVFGVNWFLGLPVEKIVVGFKSLFFFLTFIVSIGFPPRFFFSKLTLHLLKIKKKGPFSPLVLNGVWKNGFVWGLNSSSTFSLFF

SEQ ID NO: 255988 - protein, 416 aa, Glycine max
  Clone ID: PAT_MRT3847_73178C.1.pep
MAMFDLNVDINHCDADADSSCDQKGLVLQSFPPEISDSRTSSSSVWNPVEEDSSNNSSPLIFDILKKERDESEFDAATERVNKEQNMAPQEAEIVARTLFPVTAAVDKGVRVPDFKLGLWGKTECLNLSLPEPDGQNGLRTLQQKVPPVRKNRRGPRSRSSQYRGVTFYRRTGRWESHIWDCGKQVYLGGFDTAQAAARAYDRAAIKFRGVDADINFSLSDYEEDLKQMRNLSKEEFVLLLRRQINGISRRSSTYRGALALRKDAQGEPRMGPFVGMTCYPKPSINCDDGKAEASFKPCSYKGEIIVNSNMTGTCHNLDLSLGISPSSKRLKNNDYSGGYSFGCMTCKIPEERGPMEKVMVDRIKNVPLQKISNLAWQLCSNGSIVPRPFQPNAASSGFVSSSSCLITRTSNQHTY

SEQ ID NO: 255989 - protein, 48 aa, Glycine max
  Clone ID: PAT_MRT3847_73179C.1.pep
SPASPLRFGRSSSSSCRHVPYYLSLGTIVSRMVSFMSTPRPCKDSAKA

SEQ ID NO: 255990 - protein, 74 aa, Glycine max
  Clone ID: PAT_MRT3847_7317C.1.pep
KTFTSLLVTKRVLDPLVFGEYPAEMRSILGSKLPVFSPKEKSLIKGSLDFIGINHYGTLYAKDCTLSTCSLGAD

SEQ ID NO: 255991 - protein, 137 aa, Glycine max
  Clone ID: PAT_MRT3847_73180C.1.pep
MGCFMACFGLSNKRKRRKTIYKVLAGHQKYGNYEVLAITEKSTIPDSDSRGRDEVKEQNSVKTKKKKVTFNLNVQVYEPNPTAYQILNNEEEENRNYAAETEGSATLPVKYPSNHRYYNSGDGYDEEDGMAYEDSDI

SEQ ID NO: 255992 - protein, 104 aa, Glycine max
  Clone ID: PAT_MRT3847_73181C.1.pep
SSSLSILIVLNSYLFADNQFSLTVLANILRYHVLLQFLSWSDPFDKLIITLLQITSHATNNFGFVNVTCNSQFGVISIRSPTSYSPSNVTIRAATNRAQLSPRR

SEQ ID NO: 255993 - protein, 185 aa, Glycine max
  unsure (1)..(185): unsure at all Xaa locations
  Clone ID: PAT_MRT3847_73182C.1.pep
HACDILKSERLKNTKSVRLPGDSVRNAELNENGILGDAQNSSGNRSNDRRDSKILAKEIRSGTLDGKIEHLEKKIKMLEGELREAAAIEAALYTVVAEHGNSTSKVHAPARRLSRLYLHASKENLQERRAGAAKSSVSGLVLVTKACGNDVPRLTFWLSNTIVLRTIISXTVKVPPNPAGSGRRK

SEQ ID NO: 255994 - protein, 199 aa, Glycine max
  Clone ID: PAT_MRT3847_73183C.1.pep
MDSLERAYKYNIILIHLSSHLCHAPHNGSLILPLHSHRPQLLPFCRQPVLLDCPCQHPSLPRPPPIPLLVRPSHPPHPFDKLIITLLQITSHATNNFGFVNVTCNSQFGVISIRSPTSYSPSNVTILSFIKKCDDAKKSLSVTALRQIVLNFLLAGRDTSSVALTWFFWLIINHLTVEEKIHTKLMAVFTSTRGDDQWH

SEQ ID NO: 255995 - protein, 124 aa, Glycine max
  unsure (1)..(124): unsure at all Xaa locations
  Clone ID: PAT_MRT3847_73184C.1.pep
EKLKNTLGECFYHRGAVATLVAPNQKSQVEDLHALHNAHKGWRTDEKTLIHLFDHRKRSSHXNYTKKIYDEIYQDDLIKHLESNLSGDFNRAVYLFILHPTYRHTLLTHVAINNAPTSYHIIVE

SEQ ID NO: 255996 - protein, 59 aa, Glycine max
  unsure (1)..(59): unsure at all Xaa locations
  Clone ID: PAT_MRT3847_73185C.1.pep
VKKKKRVNHLVIDXIRWIPXLWYXAKSGLLVYHVSTRLCRFLNFSMNTTRTRISGNSID

SEQ ID NO: 255997 - protein, 67 aa, Glycine max
  Clone ID: PAT_MRT3847_73186C.1.pep
FRSNFLSVLNFFKELLSGKKKGLLQLPFDKAFLFDPVFRPLVDKYAPDENAFFADYAEAPQKLSELG

SEQ ID NO: 255998 - protein, 63 aa, Glycine max
  unsure (1)..(63): unsure at all Xaa locations
  Clone ID: PAT_MRT3847_73187C.1.pep
LSGYKAKRVWVRGKXRDDLKXRVYXQXXXXXXATAXATXXXXEAXFDDEXGLXRRXLLSRHXD

SEQ ID NO: 255999 - protein, 92 aa, Glycine max
  Clone ID: PAT_MRT3847_73188C.1.pep
YAANAVTCGPHAASDAGLNRGIYWRVNDGDYMTAGTGGPTTYPDADMIPEDLAGDQPYSCTDISRAREVHTTMTAASHALSAQLTHPRFNPH

SEQ ID NO: 256000 - protein, 78 aa, Glycine max
  unsure (1)..(78): unsure at all Xaa locations
  Clone ID: PAT_MRT3847_73189C.1.pep
TRGERFGGGNFFLCSKSRSRQEKVTCTKAQFVRGKTFKVDITGAGSHSSEDFCWERXDLDKPKKIVARLRQRIHPQYN

SEQ ID NO: 256001 - protein, 38 aa, Glycine max
  Clone ID: PAT_MRT3847_7318C.1.pep
IGIAFVLIYSRLAELYVKCTISSFLSLFLVLLILNPTF

SEQ ID NO: 256002 - protein, 71 aa, Glycine max
  Clone ID: PAT_MRT3847_73190C.1.pep
EDPNTLCFMVTVSRAAYMGSLLDRRMLFRTTIMAGFQWPNANQKLGIPMGFPWQSWAARKEVPKRKAQVNW

SEQ ID NO: 256003 - protein, 73 aa, Glycine max
  Clone ID: PAT_MRT3847_73191C.1.pep
TTPHKGPSPRTPTKGCLPTTPQKGLSPTPPQKGTLVRSFTEGYGCQKTTEGYGCQNTTEGDPSGQAGLPAEFT

SEQ ID NO: 256004 - protein, 63 aa, Glycine max
  unsure (1)..(63): unsure at all Xaa locations
  Clone ID: PAT_MRT3847_73192C.1.pep
KERDMISVELERVMLTDKLARTGLKYPEGGQIKKYKDRQAPPTIDLLYXGVATLVWSNRPRED

SEQ ID NO: 256005 - protein, 69 aa, Glycine max
  Clone ID: PAT_MRT3847_73193C.1.pep
EQNRIICMVLDLIPSSGFELLMEKNCDYWEERIPLKVISQVLQIGRYIYIYIYIYIYIYIYILGFQSSQ

SEQ ID NO: 256006 - protein, 88 aa, Glycine max
  Clone ID: PAT_MRT3847_73194C.1.pep
CRAQVGHVLAYSSWPSLAPGLSVQYFVSRVEVLNPGCTLEAPGKLSEFLRPEPHPKPISSESLGGTEPGFCQLKPAMVTSVSSYTENS

SEQ ID NO: 256007 - protein, 97 aa, Glycine max
  Clone ID: PAT_MRT3847_73195C.1.pep
MGRDPSSATVEVQVHPRRDTIAGCGRRLSPSPPSPPAVRDRDFSLFKRWFPWLVPTFVVANIVVFIVTMYINDCPKHSFYGSCVASFLGRFSFQPLK

SEQ ID NO: 256008 - protein, 100 aa, Glycine max
  Clone ID: PAT_MRT3847_73196C.1.pep
LTLICHMIRFNTAGHGESNSSFGPPIGHFKDAGYCCSYPTPTVNARLRVHHGRTTYNGDPAFDDAYFVHRDDPSTALGRDPTLLLFEPALKTEPFFLCLL

SEQ ID NO: 256009 - protein, 45 aa, Glycine max
  Clone ID: PAT_MRT3847_73197C.1.pep
EARAVIDPEAHALKSNTFKECGATFKIHAYLVHHMQRHLLDESNL

SEQ ID NO: 256010 - protein, 104 aa, Glycine max
  unsure (1)..(104): unsure at all Xaa locations
  Clone ID: PAT_MRT3847_73199C.1.pep
PIKTIAVGGPEKATNPDPLKAVLVDLIXTLIFGSAGXGSGFAYTRLTDTGLATLAGLISASIALAIPSLVARSVGANISGGHLNPAEPLGPCVGEITFLRGICY

SEQ ID NO: 256011 - protein, 45 aa, Glycine max
  Clone ID: PAT_MRT3847_7319C.1.pep
GKVGTVGKGGGPTSLGRLFQPPAPIHGALRDPVQGEVIDQSFGED

SEQ ID NO: 256012 - protein, 54 aa, Glycine max
  Clone ID: PAT_MRT3847_731C.1.pep
NCNYYAIRLKLEKVTIGGFVKISPDGNLKSTLNRIMLIKLFISSDVENAALKIS

SEQ ID NO: 256013 - protein, 306 aa, Glycine max
  unsure (1)..(306): unsure at all Xaa locations
  Clone ID: PAT_MRT3847_73200C.1.pep
MPDQDIFSCISEPRLVARKFLARPQHEGVGAVVRRSIGRFELKYFDPFLVLDEFSVTAPAGFPDHPHRGFETVTYMLQGAVTHEDFEGHKGTIEAGDLQWMTAGRGLVHSEMPAAQGTQQGLQLWINIASKNIMIELRYQEMVSKEISETMLDGIKVRVLEGEALGGKPPIYTRTSTQXLHLSPRLGLHFQQLTSKTIIPIFWNALVYILEGEGVFGNQKSQPVTSHHILLLGSGDGLEAWNKSSKVLRFILVGGEPLGESVVQFGPFVMNTQEEIDQTIDDFENYTNGFEKARHWRSESAISLDY

SEQ ID NO: 256014 - protein, 42 aa, Glycine max
  Clone ID: PAT_MRT3847_73201C.1.pep
GCCHSSTFSVITHFISLPTLPCSAGIFRYGRRICEGLCSSRR

SEQ ID NO: 256015 - protein, 89 aa, Glycine max
  unsure (1)..(89): unsure at all Xaa locations
  Clone ID: PAT_MRT3847_73202C.1.pep
TCRSAFMDXIHTRGFXGLXXGVSPXLVEXIPYAXLQFGTXDTFKXWGMAXXHRDSXTXXEEXXAXFQRFRXGIAAXTXXXXFCHXXEVC

SEQ ID NO: 256016 - protein, 321 aa, Glycine max
  Clone ID: PAT_MRT3847_73203C.1.pep
MAVEFMMGYRNDTFAEDNAVREAASGLESVEKLIKLLSHTQQQYQTTSKSSMENIDTDYTAVADVAVSKFKKVISLLGRTRTGHARFRRAPVPVPVPVASPPPSEPRVYRATPLQQIPPPTLHTHSVTDHSLIPKIERKDSSKTINFSYSNSFVSSLTAGDTDTKQPCSSSPSPATAFQITNLSQVSSAGKPPLSSSSLKRKCSSENLGSAKCGSSSSRCHCSKKSRKMRQKRVVRVPAISLKMADIPPDDYSWRKYGQKPIKGSPHPRGYYKCSSVRGCPARKHVERALDDPSMLVVTYEGEHNHTLSAAEATNLILESS

SEQ ID NO: 256017 - protein, 90 aa, Glycine max
  unsure (1)..(90): unsure at all Xaa locations
  Clone ID: PAT_MRT3847_73204C.1.pep
LKLHIIYTFIKNSSASQTRIVQKLVWLPLPTPNISFLLNLLILLINHQSPITNHQSXSLLFLVSMSISFLFQKPISLSLFLIFFLFSLNK

SEQ ID NO: 256018 - protein, 121 aa, Glycine max
  unsure (1)..(121): unsure at all Xaa locations
  Clone ID: PAT_MRT3847_73205C.1.pep
VPXXFPSAGXGCSGSXSACSGVGSXSVXXPFSAXAAFXXVSAXLFGLRVCXLLFLSSRRGFVXXGAAVXWVGXALVAXVVALLCLCLAFGSFFXXVCVWFRGCRXLVVVVXVGFPRXFXFL

SEQ ID NO: 256019 - protein, 511 aa, Glycine max
  unsure (1)..(511): unsure at all Xaa locations
  Clone ID: PAT_MRT3847_73206C.1.pep
MVSVDNGKDEIEESNGSKVNEFASIDISTSRITMLNSENPQKVLQGTLFSFSIPNRINFFKFGSASAKFTTLASSIDKVQIPIFIESAQGSYSHGIRRXCQKFDWASVKKKSMEWIRNPVNMALFVWIICIAVSGAILFLVMTVMLNGVLPRKLKRNACLRKVYCKNVTNYPQEWTPMMVVVILRHFNGFVQYALCGLNLGYKRSERPAIGVGICISFAIAGLYTILSPLGKDYDCEMDEEAQVQITASQGKEQLREKPTEKKYSFASKDQQRVVENRPKWSGGILDIWNDISLAYLSLFCTFCVLGWNMKRLGFGNMYVHIAIFMLFCMAPFWIFLLASVNIDDDNVRQALAAVGIILCFLGLLYGGFWRIQMRKRFNLPAYDFCFGKPSASDCTLWLPCCWCSLAQEARTRNNYDLVEDKFSRKETDTSDQPSISPLAREDVVSTRSGTSSPMGSTSNSSPYMMKTSSSPNSSNVLKGYYSPDKMLSTLNEDNCERGQDGTMNPLYAQK

SEQ ID NO: 256020 - protein, 42 aa, Glycine max
  Clone ID: PAT_MRT3847_73207C.1.pep
VPLTLHKKEILNGLAGASNHSHQGKGDSKWSMNNINSIKILS

SEQ ID NO: 256021 - protein, 372 aa, Glycine max
  Clone ID: PAT_MRT3847_73208C.1.pep
MFAKKLDWVSLKKMCLEWFRDPMNMALFVWILCVAVSGAILFLVMTGMLNGLLPRKSQRNTWFEINNQILNALFTLMCLYQHPKRFYHLVLLIRWRPTDISRLRKVYCKNGTYKPHEWTHMMVVVILLHVNCFAQYALCGLNLGYKRSERPAIGVGICISFAIAAPAIAGLYTILSPLGKDYDCEMDEEAQVQVTASQGQEQLREKPFEKNYSFASKDDRQRQALAAVGIILCCLGLLYGGFWRIQMRKRFNLPAYDFCFGKHSVSDCILWLCCCWCTLAQEARTGNSYDLVEDKFSRKETDTRDEKPSISPLAREDVVSTKSGTSSPIGSTSNSSPYVMTTSSPPNSSNVLKGYYTSDRMLSNLNQENCER

SEQ ID NO: 256022 - protein, 91 aa, Glycine max
  Clone ID: PAT_MRT3847_73209C.1.pep
TIEVSLRFEDSGDGEPWPPAATVTLPNKSSSSSSNASELTSLSRSPISSLSLSTTSYFYSLLFLSLWLPCFNRNFTLFFNRPIIRLDLISY

SEQ ID NO: 256023 - protein, 96 aa, Glycine max
  Clone ID: PAT_MRT3847_7320C.1.pep
VPPSLHVKHQGTFSFQQHSHIASSLAASNQNFAASIGSSVGSKLRNEGQLQHDFLVHLNFVHQCQASKLSQEYYCKQHLNFQFATNAIGPWPVPRA

SEQ ID NO: 256024 - protein, 280 aa, Glycine max
  Clone ID: PAT_MRT3847_73210C.1.pep
MTTGGDGDTSKQELFHLIKRFGACVTFKISNLFSLSLHGLDIRSIGAVAGLAVAIVFTWRLLRSPSGSQRRQQKRQGPSSSNPGVGTNSNSNASVVPSDACSPSDDSRAQNVVDEFFQPVKPTLGQIVRQKLSEGRKVTCRLLGVILEESSPEELQKQATVRSSVLEVLLEVTKFCDLYLMERVLDDESEKRVLVALEEAGVFTSGGLVKDKVLFCSTENGRSSFVRQLEPDWHIDSNPEIVTQLARFIKYQLHVSPYKTERTAANVFSAPSLEQFFGSI

SEQ ID NO: 256025 - protein, 114 aa, Glycine max
  Clone ID: PAT_MRT3847_73211C.1.pep
MAPTQCFLDHHTITTPAICSSQHTMVGTLTNLPVRTAHTHEDIDVSPISRRLALIVLIGAAAAGSKDQPDDASHGDTANVLEKPNTDTDFLPSNGDGLKLSTSSEWNPSIEVAH

SEQ ID NO: 256026 - protein, 341 aa, Glycine max
  unsure (1)..(341): unsure at all Xaa locations
  Clone ID: PAT_MRT3847_73212C.1.pep
MPESPGGGDAGAPPQTTENENPQTEQTAAGPPVLSKNARKKLAKQQRFEAKKAEKKAAAKEQKRKEVERKRKEWEESLAGVSEEEKAKLIESRRNLRKERMEKRSQEKESKRERLTVARERGQNVVVDLQFSHLMNPNEIHSLVQQIMYCYAVNGASPAHLWLTGCEGEMDSXRGGGLKRIPGIDKWIIEKENRSYIEALSDRKEDLVYLTADSETVLEELDLNKVYVIGGLVDRNRWKGITLKKAEEQGIPTAKLPIGNFMKMSSSQVLTVNQVVEILLKYLETRDWRTSFFAVIPQRKRCQSDSEGNAEDTVEGEEEREQNDDITANKKICAEEVPSNC

SEQ ID NO: 256027 - protein, 60 aa, Glycine max
  Clone ID: PAT_MRT3847_73213C.1.pep
LKIMDKDNFSQDDCLGEATIHLDPVFEAGSIPETAERNEEQGYDAPEESYGGWKESSGEY

SEQ ID NO: 256028 - protein, 56 aa, Glycine max
  Clone ID: PAT_MRT3847_73214C.1.pep
HASFVLDTLAFEDYVLTIGYCVVYLPNIIQVASNDTFHPGLFFSDAGRFQSTTLKP

SEQ ID NO: 256029 - protein, 51 aa, Glycine max
  Clone ID: PAT_MRT3847_73215C.1.pep
FFFFFKKIEFLFQFNGIEYVNLLSLILVVIYCNIQPISQILLTDSCSKKKK

SEQ ID NO: 256030 - protein, 157 aa, Glycine max
  Clone ID: PAT_MRT3847_73216C.1.pep
MASSLVSCSLGLNPKMFDLHTSYGGSCGLIQPCYDTFGLNESISLSHSHMHGRENSPSNSSSKTSSFVSEVATKKRPSNCSLPKESEAKVKKSRPSCPPLKVRKEKLGDRIQTLQRLVAPFGKTSTAYVLSEAIGYIHFLHQQIQTLSIPYMKSAQS

SEQ ID NO: 256031 - protein, 97 aa, Glycine max
  Clone ID: PAT_MRT3847_73217C.1.pep
LRGIWSGWHPHNQKKSPFLLNFFSWGPGAFSPDNHKFFKTSLWDEDQGPTSPNPGGKFSLLQKPTNPFTPLISQFQPHFPHLTLVNIPKPPPFQAFL

SEQ ID NO: 256032 - protein, 86 aa, Glycine max
  unsure (1)..(86): unsure at all Xaa locations
  Clone ID: PAT_MRT3847_73218C.1.pep
YIKGSKIFSDGGLVEKMVFNERGTLESVGDDVISAHLYEGSVCGEELXLTWCLEHPLASKGCGKARIPRQKLVSNRTVGCLTNVEA

SEQ ID NO: 256033 - protein, 115 aa, Glycine max
  Clone ID: PAT_MRT3847_73219C.1.pep
FSACFFFYSPLYRRQTHRLARAMCPSCLGLHGGPAKLSRGRWFLHDCCSGRPQTAVRVVAVPVSALCETLFGAVAFMDDPLAEHVRTLLHGCGKGARDPRLAVAEEAWVPSGHEL

SEQ ID NO: 256034 - protein, 46 aa, Glycine max
  Clone ID: PAT_MRT3847_7321C.1.pep
IPPLFLIKGVSPWVGGSYFLPFFSSSPCLRMSVCFSSNQELLFFFF

SEQ ID NO: 256035 - protein, 172 aa, Glycine max
  unsure (1)..(172): unsure at all Xaa locations
  Clone ID: PAT_MRT3847_73220C.1.pep
MAVSRTLLSWWFWGSSKGEKEPVXSSGSTLNSSSEWSFKERETVKFPSVKGTKIAPSHRKVKRKWQSREERRHDREYDVVLVPSDGDGCLSSSESDDSDFSIGWLEPHGSDFLQSDDDLDNSFAVLVPCYRKEVGSSNKELLSAIKNLPNEFSSAGKNYMEHWLASLKNLEA

SEQ ID NO: 256036 - protein, 63 aa, Glycine max
  Clone ID: PAT_MRT3847_73221C.1.pep
SSLVCHTNVGFLPQCSIARYCVFRYSSCAFKHIPSRSELLIIIHRSVGISSGRFKPVHSTVTI

SEQ ID NO: 256037 - protein, 64 aa, Glycine max
  unsure (1)..(64): unsure at all Xaa locations
  Clone ID: PAT_MRT3847_73222C.1.pep
MLLLTVLGVEVQGQLVPDHKTFPSGIKALADYVHGKGLKLGIYSDAGVFTCQVPPGSIXHXTDD

SEQ ID NO: 256038 - protein, 98 aa, Glycine max
  Clone ID: PAT_MRT3847_73223C.1.pep
RRIKKALINKKRGGLNYEMFKEKGLGGPKTKKDPSGNPSREFKKKKRKRKRPRGDTKNPLGHKQAYQQLEAGPQGLGLFFQTPPTTGAGERKKQKALI

SEQ ID NO: 256039 - protein, 97 aa, Glycine max
  unsure (1)..(97): unsure at all Xaa locations
  Clone ID: PAT_MRT3847_73224C.1.pep
FFFFQIFSLPSFYLFICFATKSSTSLIFSFPFVKYRWHAVASWTWDAQDETCGICKMAFDGCCPDLXLPGDDLPLSKLLLMILLATFIGIMVCTKLS

SEQ ID NO: 256040 - protein, 32 aa, Glycine max
  Clone ID: PAT_MRT3847_73225C.1.pep
MGYVIKVALFLVFHAMLLMADGGTWRKAKNPP

SEQ ID NO: 256041 - protein, 53 aa, Glycine max
  Clone ID: PAT_MRT3847_73226C.1.pep
MTGHTLIHVKMILDTFTKQKGVIFFFSKTLGNNKLFLNTLKLTKKSWLKLKPF

SEQ ID NO: 256042 - protein, 57 aa, Glycine max
  Clone ID: PAT_MRT3847_73227C.1.pep
HDNGYYMGVTILTRLFSIYYTSDFIAKKLKAENTWRHNNHKGIKLSAGHWTTENDGI

SEQ ID NO: 256043 - protein, 183 aa, Glycine max
  Clone ID: PAT_MRT3847_73228C.1.pep
EILGKMENITQLELKYTPLKEFPFSFRNLARLRDLVLVDCGNVQLPISIVMLPELAQIFALGCKGLLLPKQDKDEQEVSSMSSNVNCLCLSRCNLSDEYFPMVLAWFSNVKELELSCNNFTFLPECIKECHSLILLNLDNCEHLQEIRGIPPNLEYFSAGNCKSLSFCCTAMLLNQVAFKCIF

SEQ ID NO: 256044 - protein, 91 aa, Glycine max
  unsure (1)..(91): unsure at all Xaa locations
  Clone ID: PAT_MRT3847_73229C.1.pep
LEDRGSKXTXRAGTXXRXTRXSGRXXVLVGGXGGEXEEDXRRKKRXFGXWVLDLVVEXGXXGEGGGDGEFAHGXAEGXXXAXXEXAXXXXI

SEQ ID NO: 256045 - protein, 74 aa, Glycine max
  unsure (1)..(74): unsure at all Xaa locations
  Clone ID: PAT_MRT3847_7322C.1.pep
KKKNFKKKKKKKKKKKKKKKKKKTLKKKFRXXXXKFKKKKNPGGEEGGVKNFDENPEGGGLKKGRREKTWEEQN

SEQ ID NO: 256046 - protein, 56 aa, Glycine max
  Clone ID: PAT_MRT3847_73230C.1.pep
NLFTRFILKQKPLSYFLKSTQLGGKYTFCQLGSFGGHSRPNYIKLVGVIKNLFFSP

SEQ ID NO: 256047 - protein, 183 aa, Glycine max
  unsure (1)..(183): unsure at all Xaa locations
  Clone ID: PAT_MRT3847_73231C.1.pep
MSGLLNSSLNGSASNLPDGAGRSFASSFSGQSGAASPNFHHTGAIQGLHNIHGSFNVPNMPGTLTSRNSTINNVPSGGVQQPTGSLSSGRFTSNNLPVALSQLSHGSSXNSGITNRGGISVVGNPGFSSSTNGVGGSIPGILPTSAAVGNRNAVPGLGVNPILGNAGPRITSSVGNMVGGGNI

SEQ ID NO: 256048 - protein, 168 aa, Glycine max
  Clone ID: PAT_MRT3847_73232C.1.pep
PLVRNNVPSGGVQQPTGSLSSGRFTSNNLPVALSQLSHGSSHSGITNRGGLGVNPILGNAGPRITSSVGNMVGGGNIGRTGGGLSVPALASRLNLGANSGSGGLGMQGPNRLMSGVLPQGSPQVISMLGNSYPSGGPLSQSHVQAVSNLNSMGMLNDVNTNDQSPLTS

SEQ ID NO: 256049 - protein, 204 aa, Glycine max
  Clone ID: PAT_MRT3847_73233C.1.pep
MALELVIKLDWVDLIMMDWLVQIEMSAVNITNVTVLDNPASFLTPFQFEISYECLTALKDDLEWKLIYVGSAEDETYDQLLESVLVGPADPPDPSKIREEDIIGVTVLLLTCSYLGQEFIRVGYYVNNDYDDEQLREEPPPKVLIDRVQRNILSDKPRVTKFPINFHPENNENEEQLPPSEHPSETGEDPLAVVDRDPPDEKDS

SEQ ID NO: 256050 - protein, 90 aa, Glycine max
  unsure (1)..(90): unsure at all Xaa locations
  Clone ID: PAT_MRT3847_73234C.1.pep
FFSEWICFKSSRWCWTVFCFIIFWSVWCSLPNFSSHWXIQGLHNIHGSFNVPNMPGTLTSRNSTINNVPSGGXQQPTGSLFSGRITSNNL

SEQ ID NO: 256051 - protein, 36 aa, Glycine max
  Clone ID: PAT_MRT3847_73235C.1.pep
IQEKKVSNRNHSTSTCHYILVSLKDIHIKNSEMNAN

SEQ ID NO: 256052 - protein, 192 aa, Glycine max
  Clone ID: PAT_MRT3847_73236C.1.pep
MSAVNITNVTVLDNPASFLTPFQFEISYECLTALKDDLEWKLIYVGSAEDETYDQLLESVLVGPVNVGNYRFVLQADPPDPSKIREEDIIGVTVLLLTCSYLGQEFIRVGYYVNNDYDDEQLREEPPPKVLIDRVQRNILSDKPRVTKFPINFHPENNENEEQQPPPSEHPSETGEDPLAVVDRDPPDEKDS

SEQ ID NO: 256053 - protein, 140 aa, Glycine max
  Clone ID: PAT_MRT3847_73237C.1.pep
MDLVPSVKEKLNYFRIKELKDVLTQLHLSKQGKKQDLVDRILSVLSDEQVSKIWAKKNAGGGKEQVAKLVDDTYRKMQISGATDLASKGQGASYSSSVKVKSECDDAFQPDVKIRCLCGSRFKTEKLVKCEDARCHVWQH

SEQ ID NO: 256054 - protein, 869 aa, Glycine max
  unsure (1)..(869): unsure at all Xaa locations
  Clone ID: PAT_MRT3847_73238C.1.pep
MDLVPSVKEKLNYFRIKELKDVLTQLHLSKQGKKQDLVDRILSVLSDEQVSKMWAKKNAGGKEQVAKLVDDTYRKMQISGATDLASKGQGASDSSSVKVKSEFDDAFQRDVKIRCLCGSRLETEDLVKCDDPRCHVWQHTRYEIITEKPAKDISDVPDTFXLSSLKYVQYGPACSFPLNNLCSIGRTLXSSKSSVVLTPDFRFRKIVEXVVRHLWSSMKWQLIHNDNGSEASHGGTELQITLCQNACTHPLWQRCCGRNDSLCLISKLSFQKLSIISAKSYYLXVNCLGVRIVKRRSMQQILNSIPKESDGVSNEEALARVCRCVGGGNAADDADSDSDLEVVSDTFTINLRCPMSGSRMKIAGRFKPCIHMGCFDLEVFVEMNQRSRKWQCPICLKNYALENIIIDPYFNRITSMMMNCGEEIAEIEVKPDGSWRVKVKSESERLELGNLAQWRLPDGTLCVSTAGDVKRVDTLKQVKQEGVSDSPAGLKLGIKKNCNGVWEVSKPEGTNTSSGNNLKRVFGNPEQVVIPMSSSATGSGRDGDDPSVNQGGGGHIDYSTTNGIEMDSLCLNNVDLAYEYTAPNTSAQVGGAEVIVLSDSEEDNDLLASPAIAYKNNRNDATDGYSVPPPVIVDSYTEDHNLGGNSCLGLFPNDDEFGMSSLWPLPSGSQAGPGFQLFGSDADVSDALVHLQHGPMNCSSSLNGYALAPNTALGSGSILQESSAGRSDADLNGGLVDNPLAFGGDDPSLQIFLPTRPADSSMHNELRDQASVANGVCTEEDWISLSLGGGAGGNNGDAPTQNGLNSRHQIPTREGAKNTLDDTASLLLGMNDVRSDRARRQRSDSPFSFPRQKRSVRPRLYLSIDSDSE

SEQ ID NO: 256055 - protein, 125 aa, Glycine max
  Clone ID: PAT_MRT3847_73239C.1.pep
KSGIRPGALNDIVIGAIAFAKTLSAIVTTLILRIRLRDYHAVCRRRDASKISIKIDGVRTFSYGELYCATNNVSTSAQVGQGGYGKVYKGAHSDGTIGAIKRAQEGSLQGEKEFLTEISLLSRLH

SEQ ID NO: 256056 - protein, 125 aa, Glycine max
  Clone ID: PAT_MRT3847_7323C.1.pep
PRAAEHHLLKGEGVAGGAFMTNQPCFSDDITSLSKKDYPMSHHARLFGLRAAVAIRLRSIYNSTDDFVLEFFLPVDCNDIEEQRKMLTSLSNIIQRVCRSLRVIREKELEEANLSVNEVIALADS

SEQ ID NO: 256057 - protein, 494 aa, Glycine max
  unsure (1)..(494): unsure at all Xaa locations
  Clone ID: PAT_MRT3847_73240C.1.pep
SDRVLLVSACASFVVVVIDFPVCDSRDSSRAELLGLTAWIWYRASRKLNYFRIKELKDVLTQLHLSKQGKMIWYLTIRSXKSIIVLHICCNLLSLTLLSXLFTFLYFLLCRKMQISGATDLASKGQGASDSSSVKVKSEFDDAFQPDVKIRCLCGSRLETENLVKCDDARCHVWQHISCVIIPEKPTEGIPLVPDKFYCELCRLTRADPFWVSVAHPLHPVKLTTTSNPTDGNNPVQSVERTFQLTRADKDLVSKPEFDVEAWCMLLNDKVPFRMQWPQYTDLQVNGVPVRATNRPGSQLLGANGRDDGPIITPYTKDGINKISLARGDARIFCLGVRIVKRRSMQQILNSIPKESDGEKFEDALARVCRCVGGGNAVDDADSDSDLEVVSDTFTVNLRCPMSGSRMKIAGRFKPCIHMGCFDLEVFVEMNQRSRKWQCPICLKNYALENIIIDPYFNRITSMMMNCGEEIAEIEVKPDGSCRVRXKSESERLE

SEQ ID NO: 256058 - protein, 107 aa, Glycine max
  Clone ID: PAT_MRT3847_73241C.1.pep
FILFLFPPSKKPGPIPRTLWVHKKVGLTFALKFFTNFKTRPGGSKNGGCQPFHFHYPLRRHLNQRGETFQPCSLYEHNLKEHPSAIKSQVRKTHISLSGDHYLAPPN

SEQ ID NO: 256059 - protein, 108 aa, Glycine max
  Clone ID: PAT_MRT3847_73242C.1.pep
LKKRQGGNSTKTVTIDAHLKKDRGPGPARLHQNSYCTSTKLLATAPWLNMDIHLHSWRRYCTSRRLEVPLLCHLTCWNPYLTVCPPLHLEADLEKYSCTRPTFLCPTL

SEQ ID NO: 256060 - protein, 108 aa, Glycine max
  unsure (1)..(108): unsure at all Xaa locations
  Clone ID: PAT_MRT3847_73243C.1.pep
ALVARRYARARKAKEAIXTFEKMEQYGLKPHASDFNRLVDVLXKSKCVEEAHEVFDKMRHLRLDPDIKSYTILLEGWSQQQNLIKVNEVCREMEDKGFQLDVVAYGII

SEQ ID NO: 256061 - protein, 67 aa, Glycine max
  Clone ID: PAT_MRT3847_73244C.1.pep
TFFFGGQNATFTQIFGCTKTHFLKTRALLILKRITSSQLGFIVDPESLNLDRQATNSSIWATKITII

SEQ ID NO: 256062 - protein, 177 aa, Glycine max
  Clone ID: PAT_MRT3847_73245C.1.pep
MGKPASSSSSSISSTTNRHLLLSTASSLTQELPTDLRLGLGISATQHFASSISRGQWQQSHHPFVNIYSQVPAEVNDCSNDHSSFFVKVYMEGIPIGRKLNILAHGGYYELVRTLEHMFDTTILWGTEMNGVQPERCHVLTYEDEEGDLVMVGDVPWEMFLSTVKRLKITRVDTFGC

SEQ ID NO: 256063 - protein, 124 aa, Glycine max
  Clone ID: PAT_MRT3847_73246C.1.pep
HASGQQSHHPFVNIYSQVPAEVNDCSNDHSSFFVKVYMEGIPIGRKLNILAHGGYYELVRTLEHMFDTTILWGTEMNGVQPERCHVLTYEDEEGDLVMVGDVPWEMFLSTVKRLKITRVDTFGC

SEQ ID NO: 256064 - protein, 61 aa, Glycine max
  Clone ID: PAT_MRT3847_73247C.1.pep
SMRVSNHHRLLIHTTNGLTTTTLRTAGSTLLKTAGSPMALCPDGSHAKGDHVTHARENNSI

SEQ ID NO: 256065 - protein, 34 aa, Glycine max
  Clone ID: PAT_MRT3847_73248C.1.pep
KMELPNCYMFTLSLLVLYYHTPTCLYDDLGGGTR

SEQ ID NO: 256066 - protein, 132 aa, Glycine max
  Clone ID: PAT_MRT3847_73249C.1.pep
RQPLLSLLVPVQVSTPPRGYPRSLLQSPSCPTGISVAPGVTHQLLPHRKSLTLPGFTQTNHCIFSYQLLLYRLASLRTLLSPTSLSFGAFIPHIFTPYTIAIAVHLHLQLDILLTSQLYDAYSAPLSPPPPP

SEQ ID NO: 256067 - protein, 135 aa, Glycine max
  unsure (1)..(135): unsure at all Xaa locations
  Clone ID: PAT_MRT3847_7324C.1.pep
MEAALCRALTLSPCQCYPAADAGDKNVAWRDHKDRSSCMTMAPTVLLGHGPEYLXKTTIQTQSPLRESXYTGGQKAYTSPPYRVLLDNDNLDLRHYRLLTTIXVIPGMTTHNAVDNMQDAHYYGLARVIVCADMD

SEQ ID NO: 256068 - protein, 87 aa, Glycine max
  Clone ID: PAT_MRT3847_73250C.1.pep
FNESFLSPKWERNPFVFLEHHNPFKVKLTTFARSQFSTLAGGFFSLVSGFAFFGWAFFFFGALAFTFLASKRPSFFSSFSLSQGTRE

SEQ ID NO: 256069 - protein, 41 aa, Glycine max
  unsure (1)..(41): unsure at all Xaa locations
  Clone ID: PAT_MRT3847_73251C.1.pep
SLVXDRNSPTRSTQPILKQNNPTPPRSPRRTPRPLQFLSTT

SEQ ID NO: 256070 - protein, 107 aa, Glycine max
  unsure (1)..(107): unsure at all Xaa locations
  Clone ID: PAT_MRT3847_73252C.1.pep
MHAYVSSEFGSXLRTQLFSLSLXSVVVXLGQKTPFXDRWSXXFXGXTPXGXXFGXXXTXXXXXXXXXXXXXXXGXNXEFEVNXXGXRXEXSKXLESSGXXXVYRVHS

SEQ ID NO: 256071 - protein, 53 aa, Glycine max
  Clone ID: PAT_MRT3847_73253C.1.pep
PFYHRLPSWSPFTDITNLYQQLPIKMGLSSFYHLIIQSPSQLTNNMSLYHLAT

SEQ ID NO: 256072 - protein, 94 aa, Glycine max
  Clone ID: PAT_MRT3847_73254C.1.pep
NQHGERVYHVVSAPSQIHKANKQDGELLDLHPPLTPKLSRYDSGIVIDTQFHVNFSKTGNKDNDSFQRIGQMCLVRVDSEGVGWSSRILGVGTA

SEQ ID NO: 256073 - protein, 72 aa, Glycine max
  unsure (1)..(72): unsure at all Xaa locations
  Clone ID: PAT_MRT3847_73255C.1.pep
QKKESFQKKLKKGKKDRKFEVTIEDQFGGGGLLDGISSRHGKCGKXHGYILKGKELKFYMKKLQKNKGKGAV

SEQ ID NO: 256074 - protein, 82 aa, Glycine max
  Clone ID: PAT_MRT3847_73256C.1.pep
TLASQLHILRKACIVRDNVSGFPIVLGPSPLLVHTTPMAAAVPCIPVSSSPCFAAFTFSLPFSTPCCSKVRSHRLLHCTDVI

SEQ ID NO: 256075 - protein, 86 aa, Glycine max
  unsure (1)..(86): unsure at all Xaa locations
  Clone ID: PAT_MRT3847_73257C.1.pep
XXXRLHXARMXTVXCQSSVGQEXXLXXLHRCXHKDXEXXYXCXXXXDCRXDAYQGTSGQXIMTQRDLDSSXSXVXLXXXXSXAGWX

SEQ ID NO: 256076 - protein, 74 aa, Glycine max
  Clone ID: PAT_MRT3847_73258C.1.pep
HTIDSICYLCPDTPIMITIAELLSKNKDVVDIRQDQEEEAKTNVMNEYIMQIRINLGRNKHASGKKILNQIING

SEQ ID NO: 256077 - protein, 43 aa, Glycine max
  Clone ID: PAT_MRT3847_73259C.1.pep
EIKGRTDLILKILHLRLILIQHRGRKLIFKFELKKLITLLSLK

SEQ ID NO: 256078 - protein, 46 aa, Glycine max
  Clone ID: PAT_MRT3847_7325C.1.pep
MLCFIDYLALMALSVDKVEIEGLLLNIDCLALCGRHGTVILSMSLH

SEQ ID NO: 256079 - protein, 81 aa, Glycine max
  unsure (1)..(81): unsure at all Xaa locations
  Clone ID: PAT_MRT3847_73260C.1.pep
QNNINLLNPATELDKRKHKLKRLVQSPNSFFIDSKYQKYFNITTIFSHSQTVVGWQNCQTMXYQPTSGRAKLTENTPLRRK

SEQ ID NO: 256080 - protein, 255 aa, Glycine max
  unsure (1)..(255): unsure at all Xaa locations
  Clone ID: PAT_MRT3847_73261C.1.pep
LKNLIPSKSSPNFKFVKGDIGSADLVNYLLITESIDTIMHFAAQTHVDNSFGNSFEFTKNNIYGTHVLLEACKVTGQIKRFIHVSTDEVYGETDEDAVVGNHEASQLLPTNPYSATKAGAEMLVMAYGRSYGLPVITTRGNNVYGPNQFPEKLIPKFILLAMQGKPLPIHXDGSNVRSYLYXTKKERRVIXDVAKDMCRLFKMDPETSIKFVENRPFNDQRYFLDDEKLKXXXWSERTTWEEGLKKTXDWYINNP

SEQ ID NO: 256081 - protein, 55 aa, Glycine max
  Clone ID: PAT_MRT3847_73262C.1.pep
LKVTLHILKHNFGPARGKHTTEIRWVRLNNHEIVLDRIFKEAGPCRTRTRKAYGT

SEQ ID NO: 256082 - protein, 669 aa, Glycine max
  Clone ID: PAT_MRT3847_73263C.1.pep
MATHTPKNILITGAAGFIASHVANRLIRNYPQYKIVVLDKLDYCSNLKNLIPSKSSPNFKFVKGDIGSADLVNYLLITESIDTIMHFAAQTHVDNSFGNSFEFTKNNIYGTHVLLEACKVTGQIKRFIHVSTDEVYGETDEDAVVGNHEASQLLPTNPYSATKAGAEMLVMAYGRSYGLPVITTRGNNVYGPNQFPEKLIPKFILLAMQGKPLPIHGDGSNVRSYLYCEDVAEAFEVILHKGEVGHVYNIGTKKERRVIDVAKDICRLFKMDPETSIKFVENRPFNDQRYFLDDEKLKILGWSERTTWEEGLKKTMDWYINNPDWWGDVSGALLPHPRMLMMPGGLERHFDGSDEEKPPSYVSTNTRMVVPTSKNVNSSQKHPFKFLLYGRTGWIGGLLGKLCEKQEIPYEYGKGRLEDRSSLVADIQNVKPTHIFNAAGVTGRPNVDWCESHKTETIRTNVAGTLTLADVSREHGILMINYATGCIFEYDAAHPEGSGIGFKEEDRPNFFGSFYSKTKAMVEELLKEYDNVCTLRVRMPISSDLSNPRNFITKISRYNKVVNIPNSMTILDELLPISIEMAKRNLRGIWNFTNPGAVSHNEILEMYRDYIDPSFKWANFNLEEQAKVIIAARSNNEMDASKLKNEFPELLSIKESLIKYVFEPNKKTA

SEQ ID NO: 256083 - protein, 493 aa, Glycine max
  Clone ID: PAT_MRT3847_73264C.1.pep
CDIHHCPWGYSSVEIWTCLTPFLAKAIQALRPLRIRLGGSLQDQVLYDVGSLKSPCHPLQKVKGGLFGFSKGCLHMKRWDELNQFFNETGAIVTFGLNALHGKHQISHNVWEGAWDPTNAYDFIEYTISKGYKIDSWELGNELSGKGIGASVGVAQYGKDLIKLKQILSTLYESSKFKPSLVAPGGFYEKHWYDRLLQVSGSGIINVLTHHLYNLGPGSDEHLERKILDPERLSRVESIFGNLSETIKIYGPWSSAWVGEAGGAYNSGGNHVSNRFLNSFWYLDQLGIASCYSTKVYCRQTLIGGNYGLLNTTTFAPNPDYYSALLWHRLMGKKVLAVSSDVSSPFLRTYAHCTKDRAGVTLLLINLSNQTDFILTVRNPVTASVVENEVATSTHKESSFFDKLKKTFSWVGTKGSEVTFREEYHLTPKDGYSRSQTMVLNGIPLELTDEGDLPPLDPVRNNVRSPIYMTPLSIAFVVYPNFDAPACATHRKL

SEQ ID NO: 256084 - protein, 348 aa, Glycine max
  Clone ID: PAT_MRT3847_73265C.1.pep
MRFRIALFLFLASLQATLSQDIEHGSLLVDGAQTKAETGDNFICATIDWWPHDKCDYNHCPWGYSSVVNLDLSHPFLAKAIQALKPLRIRLGGSLQDRVLYDVGSLKSPCHPLQSVKGELFGFSKGCLHMKRWDELNQFFNETGAIVTFGLNLLHGKHQISHNVWEGAWDPTNAYNFIEYTISKGYKIDSWELGNELSGKGIGASVGVAQYGKDLIKLKQILSTLYENSNFKPSLVAPGGFYEKHWYDRLLQVSGSGIINVLTHHIYNLGPGSDEHLERKILDPERLSRVESIFSNLSETIQKYGPWCSAWVGEAGGAYNSGGNDVSNRFLNNLCNNLILKKHASCII

SEQ ID NO: 256085 - protein, 48 aa, Glycine max
  Clone ID: PAT_MRT3847_73266C.1.pep
SLLQFHGSWFCYFSSRIYSPNFAFPILNLFFSQFYSCAALKVSFSNND

SEQ ID NO: 256086 - protein, 46 aa, Glycine max
  unsure (1)..(46): unsure at all Xaa locations
  Clone ID: PAT_MRT3847_73267C.1.pep
SQHKLAILINXXSRMYQEFTSAFQFCYGQSLDTVHQVFLVLFFNQN

SEQ ID NO: 256087 - protein, 86 aa, Glycine max
  Clone ID: PAT_MRT3847_73268C.1.pep
HQERERERERERERERERERERERERERERERERERERERERERERERERYLWGSSCTLFMWLCYVHYIEMCEISAFACFCLFAQG

SEQ ID NO: 256088 - protein, 216 aa, Glycine max
  Clone ID: PAT_MRT3847_73269C.1.pep
MAATFDSVRSLALLTLAFVCSVANSMRFELQSGHTKCISEDIKTNAMSVGKYSVVNPREGYPLPDSHRIVVKVTSPHANMYHFGDHVDSGNYAFTASESGDYSACFWVQDTRDTPSVVTIEFEWRTGVAAKDWSKVAKKGQIEVMEFELKKLYDTILSIHDEMFYLREREEEMQDFNKATNSKMFTFSFLSIVVCLSVAGLQLWHLKTFFERKKLL

SEQ ID NO: 256089 - protein, 29 aa, Glycine max
  Clone ID: PAT_MRT3847_7326C.1.pep
SSISLSIYYCPGPVSSKTFLINGCYQKAN

SEQ ID NO: 256090 - protein, 247 aa, Glycine max
  Clone ID: PAT_MRT3847_73270C.1.pep
MVYFHSSISLCKFVDQSSFMANSICSADFGSKSRQINHLQKNRRTPSSSSSSSSSSNSLQIPPCDRSRSAMVDVVMFIAVVCACGFLFFPYVEFLVTKCYEVIKGVVFLIKEEVSVAPWIYISIGLSVVFAALATWAVVACTTRKCGNPSCKGLRKAAEFDIQLETEDCVKNLASASSNVAKDGGGGTKKGLFELPRDHHRELEAELKKMAPPNGRAVLVLRARCGCSVGRLEVPGPRKHLRKINKK

SEQ ID NO: 256091 - protein, 139 aa, Glycine max
  Clone ID: PAT_MRT3847_73271C.1.pep
TRRRMVSVLENSYDKKAKPLNGTHKSHVHSTLEAGILAKYRPWINTTLLMTELNQTEETAAKAIEYFKNTRHIVLYYEDLIKNATKLKDVQEFLRLPFRDMHSRQVKIHTAPLLKQIENWDDVYKTLRGTSYQNFLFSD

SEQ ID NO: 256092 - protein, 243 aa, Glycine max
  Clone ID: PAT_MRT3847_73272C.1.pep
MVYFHSSISLCKSVDQSSSSANSICSADFGSKSRQINHLQKNRRTPSSSSSSNSLQIPPCDRSRSAMVDVVMFIAVVCACGFLFFPYVEFLVTKCYEVIKVVVFLIKEEVSVAPWIYVSIGLSVVFAALATWGVVACTTRKCGNPNCKGLRKAAEFDIQLETEDCVKNSASSSSNVAKDGAGGVKKGLFELPRDHHRELEAELKKMAPPNGRAVLVLRARCGCSVGRLEVPGPRKHLRKINKK

SEQ ID NO: 256093 - protein, 104 aa, Glycine max
  unsure (1)..(104): unsure at all Xaa locations
  Clone ID: PAT_MRT3847_73273C.1.pep
EPAEGILLRVESLTXEGNEIHNISITQSALTVTSEEAGTGEQAKKIVLMFLERLSHPLGLPKSNKQQRNTDMIARILPYLTYGEPATMDALAHHFTPYLQDWST

SEQ ID NO: 256094 - protein, 43 aa, Glycine max
  Clone ID: PAT_MRT3847_73274C.1.pep
LSNVLVGTTELDKIPFHHQIRKESISIENKTKRILLTSVLKSG

SEQ ID NO: 256095 - protein, 131 aa, Glycine max
  unsure (1)..(131): unsure at all Xaa locations
  Clone ID: PAT_MRT3847_73275C.1.pep
MGRVGSNLASKARGARSGXQXIGXRGGXERDYAAKDIKFGGEGGGLMLXGGGELADAVKXTMGPKGRNGVIEQRFXAPKGGGDXXTXAXSVGFKEKGKNVGARLGKEGGNATNEXGGDRTTWATGLTRTIF

SEQ ID NO: 256096 - protein, 668 aa, Glycine max
  unsure (1)..(668): unsure at all Xaa locations
  Clone ID: PAT_MRT3847_73276C.1.pep
MIRRSYVLGIGYNCADNNLKQLQPLVLADSKQGQIIAHIDQTPPSKPDNVKYAYTYDAIFILGDSSRRVLCLPAEQEKTPSGIGTLSEQMPQSTPVLDSPSFEKESFSDEGMDFWLSNQITEDLPSNVSAERNSGFLTIGGLKLYTQDISDNESDEYNDGDSPDEDSSASSEPEELLGSSETNDSEYSSDSDSDINEEVVEDYLEGVGGSDNIMEAKWLLKPVLDESNDDSSSSSCYDEALEKLSGFVLQEASREYGMKKAQPWKKRSVGSGPLALEDLMLEKDPRSISARKKHVPRFPQSWPSHAQKSKASKRIHGEKKKLRKERIAVKRFERMLQFXLNVRKNLMILKKFSFTVGYDLSVFTRLNCWISRSXLQLAAIYLLQSSSQGSGKKRFVTVMRTQSTSMPSSSGRQRLEKLLGVDDEDADFSVADYVNKKSVSGDRRLGKKNAKRNDFRFQEPQSAQNKYSGSHKVKDKKGSGQKGSYANQPVSFVSSGLIHSETVQVTVDAEETNRNGVTSSANIGSFEEHTTGFGSKMMAKMGYTEGAGLGKNGQGMAQPIEVIQRPKSLGLGVEFSNNSAEPARNKSSRVGAKSLGVGVEFSNSPAKPAPNKSSNVGAFEKHTKGFGSKMMAKMGFVEGTGLGRESQGITTPLSAVRLPKSRGLGAKS

SEQ ID NO: 256097 - protein, 48 aa, Glycine max
  Clone ID: PAT_MRT3847_73277C.1.pep
EDSLSFLYHNSYSLLHTNSYKKKLFYFVLFNFIRLEVPLVIITMSKMM

SEQ ID NO: 256098 - protein, 341 aa, Glycine max
  unsure (1)..(341): unsure at all Xaa locations
  Clone ID: PAT_MRT3847_73278C.1.pep
VKRRERMLHRGVDLEKINSKLEKIVLEEVDIFSFQPMHFRDCSQIQRLAAIYQMQSNSQGSGKKRFVTVMRTQSTSMPSSSGRQRLEKLLGVDDDEDADFSVADYVNKKSVSGDRRLGKKNAKRNDFRLQEPQSAQNKYSGSRKLKDKKGNGQKGSYANQPVSFVSSGLINSETLQVTVXMLKRQIGKGVTSSANIXXFEEHTXGFGSKMMAKMGYTEGAGLGKNGQGMAQPIEVIQRPKSLGLGVEFYNNSAEPARNKSSRVGAKSLGLGVEFSNSPAEPARNKSSKVGSFEKHTKGFGSKMMAKMGFVEGNGLGRESQGITTPLSAVRLPKSRGLGAKS

SEQ ID NO: 256099 - protein, 58 aa, Glycine max
  Clone ID: PAT_MRT3847_73279C.1.pep
CYYYSCTHFSGFISRVYYNFILKLFLCVLFRKCQDPVVIAAAAAQHNPSIPSVVFSQP

SEQ ID NO: 256100 - protein, 66 aa, Glycine max
  Clone ID: PAT_MRT3847_7327C.1.pep
QPKGYVWTTGALHSLQHISKKHFQKNGSTGPMTARCPMGYFQRQHRGLQRRPIFVHCPKKAIELDE

SEQ ID NO: 256101 - protein, 47 aa, Glycine max
  Clone ID: PAT_MRT3847_73280C.1.pep
LKEVGFITWEMLILRHPSDYSGKLSFDYKSVERENLDNEGYSIIGNV

SEQ ID NO: 256102 - protein, 75 aa, Glycine max
  Clone ID: PAT_MRT3847_73281C.1.pep
CTRFDAKAQFQCNRFCGIRPVIITLASSRMDHHLRLEEKNINRPSRIHVFLPTFTLFLFRYRLKRESSCRLAPTK

SEQ ID NO: 256103 - protein, 47 aa, Glycine max
  Clone ID: PAT_MRT3847_73282C.1.pep
WTRFILSVRFQYLTIFSDVPVEELALWSSFSTFHKIWVRACLFVNGS

SEQ ID NO: 256104 - protein, 69 aa, Glycine max
  Clone ID: PAT_MRT3847_73283C.1.pep
KKPPLVQNKYHEQQNCYIGEHMQDDVSGQMVGIVLVNARALTPSCDVAIFKETHCVHRLFEHSVMHTPS

SEQ ID NO: 256105 - protein, 49 aa, Glycine max
  Clone ID: PAT_MRT3847_73284C.1.pep
VVITFSYFCGSHYFFKNNLYGRKKWPALDIPLDSSLIMRTLEGRPKTFL

SEQ ID NO: 256106 - protein, 64 aa, Glycine max
  Clone ID: PAT_MRT3847_73285C.1.pep
NGGTFLALPNESEFVDPNTSNVINFLGGAMGGYIGKIIGVKGTNGIGKEQRSFNVTILDARYFG

SEQ ID NO: 256107 - protein, 59 aa, Glycine max
  Clone ID: PAT_MRT3847_73286C.1.pep
GSRSQCNHFLLSGYSSCHPINHSISRYIWSNDYVCDMILIYITSQSLGIHSHRGLFWGL

SEQ ID NO: 256108 - protein, 59 aa, Glycine max
  Clone ID: PAT_MRT3847_73287C.1.pep
RAPGIIACHQRGTTCSSPLQMVNFFFWTFCRQVIYNCLMGVLRSLCIIILIMWQILLYT

SEQ ID NO: 256109 - protein, 123 aa, Glycine max
  unsure (1)..(123): unsure at all Xaa locations
  Clone ID: PAT_MRT3847_73288C.1.pep
TILLQDQIGXLQVLHENHWVNAPPVRGALVVNIGDILQLMTNDKFISVYHRVLLRNMGPRISVATFFMNFTISKCTSKSYGPIKELLSEENPPVYRDMNMKEILTNYYAKGLDGSSYLLPLRL

SEQ ID NO: 256110 - protein, 49 aa, Glycine max
  Clone ID: PAT_MRT3847_73289C.1.pep
SSEDLLHVFSNLARNINFFGHTRIGGWELDQRARPIIIGPCFYLSKKCG

SEQ ID NO: 256111 - protein, 131 aa, Glycine max
  Clone ID: PAT_MRT3847_7328C.1.pep
NLGGLQVGGGIKSDNCLSYIEEGACHVIVTFEKLQYFHIKELKEARILKTKHDFLLNLFIGKFSCNSAHQHIYEGQNAFEALSKAQVKEKPTNYIFEITVSMCVNYIILLIYLKIKLNFIDFKNKFRCFFW

SEQ ID NO: 256112 - protein, 244 aa, Glycine max
  unsure (1)..(244): unsure at all Xaa locations
  Clone ID: PAT_MRT3847_73290C.1.pep
FDDGLNNWSGRGCKIMLHDSMNDGKIVPKSGKFFASATERTQSWNGIQQEITGRVQRKLAYEVTALVRIFGNNVSTADVRATLWVQTPDLREQYIGIAKVQATDKDWVTMQGKFLLNGSPSKVVLYLEGPPPGTDILLNNLILKHAAKTPPSTPPDLKNIAFGVNIIENSNLADSTNGWFPLGNCTLSVKTGSPXFPPMARDSLGSHEFLSGRYILVTNRTQTWMGPAQTITDKXKLFVTYQVS

SEQ ID NO: 256113 - protein, 40 aa, Glycine max
  Clone ID: PAT_MRT3847_73291C.1.pep
IQYSPFINIERSTYPKATILKQSIYSEGKAQLASVSSDRV

SEQ ID NO: 256114 - protein, 81 aa, Glycine max
  Clone ID: PAT_MRT3847_73292C.1.pep
NWVSYPNKLSNNNRIWLTRQITNMHFSINILISYQQVFLRLSAGILHAGSRYRAGILWVLLGLLWIVMLSYSYVETTIVSI

SEQ ID NO: 256115 - protein, 49 aa, Glycine max
  unsure (1)..(49): unsure at all Xaa locations
  Clone ID: PAT_MRT3847_73293C.1.pep
NISEFFSTSIHKILIKKIIXIRKQFTQKCYQYTFIIILREKELQYILIV

SEQ ID NO: 256116 - protein, 143 aa, Glycine max
  Clone ID: PAT_MRT3847_73294C.1.pep
MFSSSSVIKWRFRHKPMTLVRLFPLVCLLLFSLNDVVSSDSDKSVLLELKHSLSDPSGLLTTWQGSDHCAWSGVLCGSATRRRVVAINVTGNGGNRKTLSPCSDFAQFPLYGFGIRRSCEGFRGALLGKLSPKLSELTELKVL

SEQ ID NO: 256117 - protein, 74 aa, Glycine max
  Clone ID: PAT_MRT3847_73295C.1.pep
HGGTGQMFSGFISINNSITCLPVQKHVSPQVVWGVKTLTRRDANMALIKTEFNYSGCNFNFQQMSKPPISSLEN

SEQ ID NO: 256118 - protein, 34 aa, Glycine max
  Clone ID: PAT_MRT3847_73296C.1.pep
VPSERAARVIIRLYRDLDPDNVMATEMSMIGSST

SEQ ID NO: 256119 - protein, 41 aa, Glycine max
  Clone ID: PAT_MRT3847_73297C.1.pep
SCVILANNLVKIFVLSSSRYLASSSHLILWHNKHVVFLAKP

SEQ ID NO: 256120 - protein, 164 aa, Glycine max
  unsure (1)..(164): unsure at all Xaa locations
  Clone ID: PAT_MRT3847_73298C.1.pep
MLVRRRVMSWRRVAKALQALVAHVLLFTFTITLALKLDHVIRHSWWKVFFPLWVFHAVVARGRFSLPAPSMPHDRRWAPFHSLVATPLLVAFELLLCMHLGSSYVMNLRIVFMPLIFLEMAILFDNVRMCRALMPGDDENLTDEAVWEXTLPHFWVSISMVFFI

SEQ ID NO: 256121 - protein, 63 aa, Glycine max
  Clone ID: PAT_MRT3847_73299C.1.pep
VHSLFFILNDIYEHCITDPVRFLHTPFGLLLIYIHQYKTTLKFNLLYQISLFNLFIFLPISSL

SEQ ID NO: 256122 - protein, 154 aa, Glycine max
  unsure (1)..(154): unsure at all Xaa locations
  Clone ID: PAT_MRT3847_7329C.1.pep
MNWLSTLMGGFFFRSKFVMGESKQSFKEEKFKTQLEDTRHGELKKKCIDCLITGLLIMSSSLLYGAYVHSYERITKATESCTPSTQESTSWWTPKSMALFNSKMHIMWXQVQVMSRMAFGILTIYAGAYLLXKRSTTTLQTMPSHFILLMLGIF

SEQ ID NO: 256123 - protein, 58 aa, Glycine max
  Clone ID: PAT_MRT3847_732C.1.pep
ILTKKKPSSLTKYIYHHIFYKTLTILQTSFKYYILTKHVLYTPVNISFFIQQTFIFIN

SEQ ID NO: 256124 - protein, 212 aa, Glycine max
  Clone ID: PAT_MRT3847_73300C.1.pep
MKNPTPNPTHLCLECRNLIWTSSRAFHQYLELQMENTWILSFHLLLLLLHPNAAKGAISVGVGVGVGVGVGVGIGIGNSPGPSGSTGSNLKNAFTALQAWKSAITDDPLKILDTWVGSNVCSYKGVFCANSEDDNGIVTTAATESSVVAGIDLNHANLQGTLVKELSLLSDITLFHLNSNRFSGSLPDTFRDLTSLEELDLSSNQLTSPRGR

SEQ ID NO: 256125 - protein, 154 aa, Glycine max
  Clone ID: PAT_MRT3847_73301C.1.pep
MENTWILTFHLLLLLLHPNAAKGAIGVGVGVGGRGGIGVGIGIGGSVNTPGPSGSNLKSAFTALQAWKSAMTDDPLKILDTWVGPNVCSYRGVFCANSQDDNGIVTTAATESSIVAGIDLNHANLQGTLVKDLSLLSDITLFHLNSNRFSGSLP

SEQ ID NO: 256126 - protein, 88 aa, Glycine max
  Clone ID: PAT_MRT3847_73302C.1.pep
MAGGGKVSFKVTLTSDPKLPFKVFSVPEAAPFTAVLKFAAEEFKVPPQTSAIITNDGVGINPQQSAGNVFLKHGSELRLIPRDRVGAF

SEQ ID NO: 256127 - protein, 118 aa, Glycine max
  unsure (1)..(118): unsure at all Xaa locations
  Clone ID: PAT_MRT3847_73303C.1.pep
GGGKVSFKVTLTSDPKLPFKVFSVPEAAPFTAVLKFAAEEFKVPPQTSAIITNGSFXPLGSQKLGHTRNVFGLRKYFLSSIYRWFHGVGINPQQSAGNVFLKHGSELRLIPRDRVGAF

SEQ ID NO: 256128 - protein, 75 aa, Glycine max
  Clone ID: PAT_MRT3847_73304C.1.pep
VPIPRKVLFLKALFLKNVFPFPLFFVPCGPPKFKLLSPPLKRASKMLLGASHPLACPGKTFFQSCFFHFLELPPF

SEQ ID NO: 256129 - protein, 248 aa, Glycine max
  Clone ID: PAT_MRT3847_73305C.1.pep
MEYTHQYSWIIPFIPFPVPMLIGVGLLLFPTATKYLRRMWAFPSILLLTIVMIFSLVLSIHQINNSSFYQYVWSWTINNDLSLEFGYLIDSLTSIMSILITTVGILVLIYCDNYMSPEGGYLRFFAYLTLFNISMLGLVTSSNLIQIYVFWELVGMCSYLLIGFWFTRPIAANACQKAFVTNRVGDFGLLLGILGLYWITGSLEFRDLFQIINNLIYKNEVNIFFLTLVALLLFCGSVAKSAQFPLHV

SEQ ID NO: 256130 - protein, 152 aa, Glycine max
  unsure (1)..(152): unsure at all Xaa locations
  Clone ID: PAT_MRT3847_73306C.1.pep
PRRTGARGRQNKHIGLQAIKRWTHLILPDVGYLPEHDPPEIIRFXCEGGSDKGHLGQEKIGDLGVAASLHGSQPAHSVIGTRQFMAPHSYEEEYYELSDTHSFGMRVLQMLTSDHPYRAXAYPAQIYKIVTSGKLPASSFRMEDTEALRFIG

SEQ ID NO: 256131 - protein, 38 aa, Glycine max
  Clone ID: PAT_MRT3847_73307C.1.pep
GGAILTLMPNGLVQKYSRTPLCAMFEFKEKRKAQEDSM

SEQ ID NO: 256132 - protein, 133 aa, Glycine max
  Clone ID: PAT_MRT3847_73308C.1.pep
MAVPLLSKRIVKKRVKKFIRPQSDRKISVKPSWRRPKGIDSRVRRKFKGCTLMPNIGYGSDKKTRHYLPNGFKKFVVHNVKDLELLMMHNRTYCAEIAHNVSTRKRKDIVERAAQLDVVLTNKTARLRSQEDE

SEQ ID NO: 256133 - protein, 88 aa, Glycine max
  unsure (1)..(88): unsure at all Xaa locations
  Clone ID: PAT_MRT3847_73309C.1.pep
RFSCTGQIFFGKSYLIFLWLDTWIPSSKNISTLFFAFLKYYHSEIISLGTPPFLGGQISFGIFCLSWSVSSNSQNFFLSVNHQKXXKX

SEQ ID NO: 256134 - protein, 237 aa, Glycine max
  unsure (1)..(237): unsure at all Xaa locations
  Clone ID: PAT_MRT3847_7330C.1.pep
MMMQSKRAGWWLLRKAKAKLSLNTDRNLSSSQHLILDNPNLNQVLVEGNGFSRMAILNRPSALNALNTNMAATLHKLYRSWEEDPDIGFVMLKGSGRAFAAGGDIVALYHLINKGNLEACKEFFRTAYSFMYLIGTYLKPHVALLNGITMGGGAGISIPGTFRVATDKTIFATPEVLIGFHPDAAASLYLSHLPGQLGEYLALTGEKLNGVQMVALWLATHYSSSARLXFNREQLGK

SEQ ID NO: 256135 - protein, 194 aa, Glycine max
  Clone ID: PAT_MRT3847_73310C.1.pep
MSSKGKEIAEGSSTTTTATRSSHGGDDHHHHHNQQQQQQQQQLPLSRYESQKRRDWNTFGQYLRNQRPPVALSQCSSNHVLEFLRYLDQFGKTKVHSQGCLFFGQTEPPGPCTCPLRQAWGSLDALIGRLRAAYEENGGLPETNPFASGAIRVYLREVRDSQSKARGIPYKKKKKKRNVIKPNGDTSSSNLPMQ

SEQ ID NO: 256136 - protein, 65 aa, Glycine max
  unsure (1)..(65): unsure at all Xaa locations
  Clone ID: PAT_MRT3847_73311C.1.pep
LSADSHIALKPTSQGSTGMLGKNLYLSCDPYMRGHMREXHGSYIPPCLPAHALEGFAVSIAVQSA

SEQ ID NO: 256137 - protein, 198 aa, Glycine max
  Clone ID: PAT_MRT3847_73312C.1.pep
TAARRRQKGREEKRKKAKKNPKAIPSVCLHIGREGYQTSKSSGCVGCYKRPSLSPTVDVPSKGLATQSNVVRKPSSSEDFWTTSTHDMDNSAVQSQGSISSASLTNQAVVSHAGSSKSSTNPTEFVNHGVILWNQTRQRWVGNKKPENRTQQLREPKLNWNATYESLLGSNKPFHQPIPLAEMVDFLVDIWEQDGLYD

SEQ ID NO: 256138 - protein, 160 aa, Glycine max
  Clone ID: PAT_MRT3847_73313C.1.pep
MHMGGCVGCYKRPTLSATVDVPSKGLATQGNGVRKPSSSEDFWTTSTHDMDNSAVQSQGSISSASLTNQAVVLHAGSSKSSTNPTEFVNHGVILWNQTRQRWVGNKKLENRTQQLREPKLNWNATYESLLGSNKPFRQPIPLAEMVDFLVDIWEQDGLYD

SEQ ID NO: 256139 - protein, 54 aa, Glycine max
  Clone ID: PAT_MRT3847_73314C.1.pep
HEKVLTYSAQDSIYKVFDLENYTLLYSISDKNVQEIKISPEIMLLIYAKASYHV

SEQ ID NO: 256140 - protein, 59 aa, Glycine max
  Clone ID: PAT_MRT3847_73315C.1.pep
RSSASIAANKLSPKDVMGSGPVINLRIQFRGHSRSSSGRARFEKHSCSYKAKVVKFCDT

SEQ ID NO: 256141 - protein, 56 aa, Glycine max
  unsure (1)..(56): unsure at all Xaa locations
  Clone ID: PAT_MRT3847_73316C.1.pep
GXGITIGFVVITQKLAIFTIKLKKCLLFKMATNLWGSPTRRFVVLIQGKSFFLENI

SEQ ID NO: 256142 - protein, 190 aa, Glycine max
  Clone ID: PAT_MRT3847_73317C.1.pep
IGFVFFVFLQNPRDRSNLISLLGVFQTLHAYGSSGCVGCYKRPSLSPTVDVPSKGLATQSNVVRKPSSSEDFWTTSTHDMDNSAVQSQGSISSASLTNQAVVSHAGSSKSSTNPTEFVNHGVILWNQTRQRWVGNKKPENQTQQLQEPKLSWNATYESLLGSNKPFRQPIPLAEMVDFLVDIWEQDGLYD

SEQ ID NO: 256143 - protein, 125 aa, Glycine max
  Clone ID: PAT_MRT3847_73318C.1.pep
KKKKKKKKKKKKREKKKKKKKKKKKKKKKKKKKKKKRGTGFRGFRGFLPWRPPLLRFFFGAPVVSFGGPPFFPRCGGGIPLGFPGLPAWRPFPLFSPWALLLRGPARVPPSPRCPTFFWPWGPPL

SEQ ID NO: 256144 - protein, 391 aa, Glycine max
  Clone ID: PAT_MRT3847_73319C.1.pep
MGRGLGVVLVLLAVYCGLDPFQHSPIAHFPDFEVKRVDMPAWSEVPTDQDKHNLLQKSEIKFANQVQGPESIAFDPLGRGPYTGLADGTIVFWNGHSWLHFAYTSPNRSEICNPIASATPFSYVKNEHICGRPLGLRFDKKTGDLYIADAYFGLLKVGPEGGLATSLVTEAEGIPLRFTNDVDVDTEGNVYFTESSALYPRRNFLQLVFSGDDSGRVLKYNLATKETTVLVRNIQFPNGISLSKDGSFFVFCEGVVGRLRKYWLKGEKAGTSEILAILPGYPDNVRVNEDGDFWVALHSRRYMYAYYNGIYPKMRKIILKLPIPIKIHYLLQIGGRQHAAVIRYSPEGKLLQILEDSEGKVVKAVSEVEEKDGKLWMGSVLMPFVAVYNLK

SEQ ID NO: 256145 - protein, 70 aa, Glycine max
  unsure (1)..(70): unsure at all Xaa locations
  Clone ID: PAT_MRT3847_7331C.1.pep
FTADHELHMDLYGESFPETNYIKKQHHKLFYXRHSNTVLSWLTYFFHDYAFQSFDAIMPLHYTRGSGTPT

SEQ ID NO: 256146 - protein, 43 aa, Glycine max
  Clone ID: PAT_MRT3847_73320C.1.pep
GDGEKVHGLRLHLVGGGGSSTMPDLANIGGDALHSLWTNLQDP

SEQ ID NO: 256147 - protein, 60 aa, Glycine max
  Clone ID: PAT_MRT3847_73321C.1.pep
LTAKLLPPHTMSSFKIHYIILSSHYHSNKLIFFFISTFGTLLFTNTNILLLLLVNTIYRI

SEQ ID NO: 256148 - protein, 78 aa, Glycine max
  Clone ID: PAT_MRT3847_73322C.1.pep
MIGHSREFLESGSSSVVSNAVQQRLQFILQSRPEWWVYAIFWQATKDSDSRLKLEYGDGYFRGKEENGEEQTRNVNDI

SEQ ID NO: 256149 - protein, 37 aa, Glycine max
  Clone ID: PAT_MRT3847_73323C.1.pep
IQVRVIIGTVSSAWHVVLLKMITIHEGDAWFFSLLSS

SEQ ID NO: 256150 - protein, 67 aa, Glycine max
  Clone ID: PAT_MRT3847_73324C.1.pep
ARERLSGGPVQVTRSFHMQVRRFPHGYSCCSKFKIVHSLGLSDGRPAAHIVGFLVEYQCHPKLFLQR

SEQ ID NO: 256151 - protein, 48 aa, Glycine max
  Clone ID: PAT_MRT3847_73325C.1.pep
LARYVFFMRRRPFKILCYICARTTRYDNPNHTSSSTSKAREYKNSTRT

SEQ ID NO: 256152 - protein, 60 aa, Glycine max
  Clone ID: PAT_MRT3847_73326C.1.pep
PVHCLSNQGMIECHIPRAVARAHDHGVMNQAQVMMARDPLLWTYCQSNRVLLSRRKFLAK

SEQ ID NO: 256153 - protein, 81 aa, Glycine max
  Clone ID: PAT_MRT3847_73327C.1.pep
HAYVRLQPKFKTKKTMKNIVSGTITNSIPTIKHLYYLHPLFSFYGTDLSSAPIIIKPIKHSTNLSVTNSDTFSNRIILYTI

SEQ ID NO: 256154 - protein, 78 aa, Glycine max
  Clone ID: PAT_MRT3847_73328C.1.pep
EVSVKGSVLQNIYCDCNGESNQDFVLFLWGTPWEVFFVVNVVLGFFLLFFRKDKKSIFLQPNSKWGQKKFLRSKVFDM

SEQ ID NO: 256155 - protein, 42 aa, Glycine max
  Clone ID: PAT_MRT3847_73329C.1.pep
FTSNISVVSLKKKKRKKRKKKNKTKKKKSRPKEKRKKRKNET

SEQ ID NO: 256156 - protein, 108 aa, Glycine max
  unsure (1)..(108): unsure at all Xaa locations
  Clone ID: PAT_MRT3847_7332C.1.pep
MAYKHHSHCDKMTHSIVAPILERAYVPVTEVMXGEEIDMRVDIFDEEXNPMQVVSKMHETLQQXDDTKDRNWAPGIRNAKVLSGPYTFLSHCMDRXVSVHQDAHAPDN

SEQ ID NO: 256157 - protein, 99 aa, Glycine max
  Clone ID: PAT_MRT3847_73330C.1.pep
SFQKKKPLRRKDRDAGGSRFLQKPKKKNSKPVVNHKTKIPFFLQQNLFHSNGTSGSQRKPKTWPFRKPVKFTDTHSITTKNTKLHSLRELRRGVVTSES

SEQ ID NO: 256158 - protein, 88 aa, Glycine max
  Clone ID: PAT_MRT3847_73331C.1.pep
TKRGKGTVSLRKKKFPIHLFKSANLARELNPNFRVRHPLLGQNKSPNKFLFGGFPKGRVNSPFFQLKKAPVRWDLKKPPKEPECHFFQ

SEQ ID NO: 256159 - protein, 49 aa, Glycine max
  Clone ID: PAT_MRT3847_73332C.1.pep
SYVATMAPGRQPTAVSITVCIPRLLNGPNLSESNRYQHIQLVINPSSII

SEQ ID NO: 256160 - protein, 47 aa, Glycine max
  Clone ID: PAT_MRT3847_73333C.1.pep
FKFGFPVYLQILETPSLLAEGSSGVKKNIFKQKPPQSDASSSGCCSW

SEQ ID NO: 256161 - protein, 102 aa, Glycine max
  Clone ID: PAT_MRT3847_73334C.1.pep
KLVSSIYPCRWLHVWPIEKTNFQKMNGKHKTGSRRKNVPFPANTSTTRCLFSSKMNSSKRAGEAKFTCSGCERKFLLPTITNAYRCYKCDSVANSTLGSEQS

SEQ ID NO: 256162 - protein, 105 aa, Glycine max
  Clone ID: PAT_MRT3847_73335C.1.pep
MMKAFEQRKNINYFIFFFILFTPFLLCYDSLYFSFFIISLLTFIIIFICFISLLFLINLIYAPSLTCEMNNFLELFYINDLKVKRKKKQMIRTRRRILKKENEKD

SEQ ID NO: 256163 - protein, 101 aa, Glycine max
  Clone ID: PAT_MRT3847_73336C.1.pep
AAHIFCVLNKQHGLQVLKTCPSMHSANPWPFMFGECRSSKSKCSIQGAFLLEQRKGKSRENNKIPSSDALFLRCVRKIVWDKRRSPQCFAFFFWINHTHSF

SEQ ID NO: 256164 - protein, 84 aa, Glycine max
  Clone ID: PAT_MRT3847_73337C.1.pep
LLDNPFLLPASTLGILSRLLSLTKKPACSFCSLQEQLDFFYRFLSLGVEKPSDVQSNFRDWGIPWTLGTILWYCPGKGVANPFF

SEQ ID NO: 256165 - protein, 36 aa, Glycine max
  Clone ID: PAT_MRT3847_73338C.1.pep
MYRYMDGSRVTLDRCTVDLATSGNGWLSYTICPQAV

SEQ ID NO: 256166 - protein, 71 aa, Glycine max
  Clone ID: PAT_MRT3847_73339C.1.pep
TSAPPLLDGIREPHLFFPFKKSNSMLKNFSPRISYPKGGSCDIRKHPYPLSCCGICWNLASSWCPSYVFVG

SEQ ID NO: 256167 - protein, 452 aa, Glycine max
  Clone ID: PAT_MRT3847_7333C.1.pep
MSSLSLYANLSSLPSSLTIRSSSSKDTSLKQDWRTKSKPIPPGGTYPAKDHCSRCGLCDTYYIAHVKNACAFLGDGMSKIERLEPVVHGRGRKTDNLDETYLGVYEELLYARKLNPVEGAQWTGIVTTIAIEMLKSGMVEAVICVQSDPDDRFAPRPVLARTPEEVLAAKGVKPTLSPNLNTLALVEAAGVKRLLFCGVGCQVQALRSVEHHLNLDKLYVLGTNCVDNGTRQGLDKFLKAASQSPETVLHYEFMQDYKVHLKHLDGHIEEVPYFCLPANDLVDVIAPSCYSCFDYTNALADLVVGYMGVPKYSGIGMTQHPQYVTVRNERGREMLSLIENLLEITPTISTGDRRPFVMETVKADDEAKLGRGPSQPAPKFIGNLLAFILNLIGPKGLEFARYSLDYHTIRNYLHVNRMWGKERADRHMPTYAKKIVDLYNQNGQIEKMLSNK

SEQ ID NO: 256168 - protein, 154 aa, Glycine max
  unsure (1)..(154): unsure at all Xaa locations
  Clone ID: PAT_MRT3847_73340C.1.pep
ATLAAGRLVAENXFLSGHYRPTDDTLDSFLSYLKENGVKLDEVELHKANEDSDIYEESNVIEKQQPLKCQALVKCGLQSPRAVVPKTAILQRINSKKASKSYQLGHQLSLKWSTGAGPRIGCVADYPIELRTQAYPFFIHANGRPCIAFSLSIL

SEQ ID NO: 256169 - protein, 166 aa, Glycine max
  unsure (1)..(166): unsure at all Xaa locations
  Clone ID: PAT_MRT3847_73341C.1.pep
KVLAFQHWIEAIDPRHRYGHNLQYYYKEWCKTNAGQPFFFXQEREQYEYIVREDKIINKQYGDLFHTNEDSEDAKWIFVMSTSKKLYAGKKKKGLFHHSSFLAGGATLAAGRLVAENXFLSGHYRPTDDTLDSFLSYLKENGVKLDEVELHKANEDSDIYEESNVI

SEQ ID NO: 256170 - protein, 42 aa, Glycine max
  Clone ID: PAT_MRT3847_73342C.1.pep
FPGPQRLAGWSPRFQLWCVSPPPISRVLGYISMGFLIGFKKR

SEQ ID NO: 256171 - protein, 471 aa, Glycine max
  unsure (1)..(471): unsure at all Xaa locations
  Clone ID: PAT_MRT3847_73343C.1.pep
MEVQTHTLDIHQPQFRSSEYPNPTFPHSLHDPPIQTLTHAPGRACPQTNAALKVQKVYRSYRTRRRLADSAVVAEELWWQVIDFARLNHSTISFFNLPETAASRWSRVKLNAAKVGKGLSKDAKAQKLAFQHWIEAIDPRHRYGHNLQYYYKEWCKTDSGQPFFYWLDLGNGKNIDLEQCPRSKLRKQCIKYLGPQEREHYEYIVCEGNIIHKQSGDFLHTNEDSKDAKWIFVMSTSKKLYAGKKKKGLFHHSSFLAGGATLAAGRLVAXNGILKSISAYSGHYRPTDDTLDGFLSYLKENGVKLDEVELHKANEDSDMYEESNLSRAATSEVSNDAKMYVPEISEGASNTSSSVEEDPLPESVTYTRTLSGGLQSPRAVVPKTAILQRINSKKASKSYQLGHQLSLKWSTGAGPRIGCVADYPIELRTQALEMLNLSPKFPPTPSSYVRIGGLVLPSPYPSPSNIDGTLC

SEQ ID NO: 256172 - protein, 65 aa, Glycine max
  unsure (1)..(65): unsure at all Xaa locations
  Clone ID: PAT_MRT3847_73344C.1.pep
VDWGPVVITGVLILLICPGLLFXMPSMGRVIQCGIKQTRGAGILDHAVIYSGLITISLFAIGVTL

SEQ ID NO: 256173 - protein, 54 aa, Glycine max
  Clone ID: PAT_MRT3847_73345C.1.pep
TRKGSTSLFLRAECSCINNFIVHTVTQRDPYLTFFIIEHNLPADLIYSDTTTPF

SEQ ID NO: 256174 - protein, 101 aa, Glycine max
  Clone ID: PAT_MRT3847_73346C.1.pep
PPLAAPGFRIPQRGPRFFGPLSTHGWILGMEPFFLRPPGFFSNFSPPPPRWVPPFFFSGVSRFHFSSPLPPKGLFFSPVGRLPRSLFRVTKTPPPCPVCLF

SEQ ID NO: 256175 - protein, 50 aa, Glycine max
  Clone ID: PAT_MRT3847_73347C.1.pep
RPTISLVERKITCLNDYFRQSVVPLNKLIQPNGCWIGCLITEFVAAFVVK

SEQ ID NO: 256176 - protein, 115 aa, Glycine max
  Clone ID: PAT_MRT3847_73348C.1.pep
KKKRMKLKGQTQATKLVNLYRFCVSSSSSSISRFNHFTLTTTDYNKFKFACAKAKNLQLSLSQRAFVFLSPLNVAANYLRSYRVSGSYICSGSILGVSIASAPIIAHAMDGELHI

SEQ ID NO: 256177 - protein, 61 aa, Glycine max
  unsure (1)..(61): unsure at all Xaa locations
  Clone ID: PAT_MRT3847_73349C.1.pep
GTGYYAASPAASLCHGPGRAFIFVLFFLTCLPGLVCGWFLFFFFCFNQCTGTLARXASDRS

SEQ ID NO: 256178 - protein, 51 aa, Glycine max
  Clone ID: PAT_MRT3847_7334C.1.pep
LLTDLSMVHSESLPVCTSDNLHHNCNRGYMSQALRQHNLSKHLILKTKGQN

SEQ ID NO: 256179 - protein, 90 aa, Glycine max
  Clone ID: PAT_MRT3847_73350C.1.pep
GNMGHVLITYNASAKLLAVSWFFEGRNSSSSAPEASLSHQIDLGEILPEWVTVGFSGGNGNSKGKNVIHSWEFSSNMDLKSTRNPEVINK

SEQ ID NO: 256180 - protein, 37 aa, Glycine max
  Clone ID: PAT_MRT3847_73351C.1.pep
HEVQGQCKKQHQQLQEWDQDVHGRPALSCASAGALAF

SEQ ID NO: 256181 - protein, 40 aa, Glycine max
  unsure (1)..(40): unsure at all Xaa locations
  Clone ID: PAT_MRT3847_73352C.1.pep
IFVPYDHYILHTAXAHNITLSFSFKHSCCTNYSVRIKNGK

SEQ ID NO: 256182 - protein, 88 aa, Glycine max
  unsure (1)..(88): unsure at all Xaa locations
  Clone ID: PAT_MRT3847_73353C.1.pep
FPPKGFREKKWGPFAGRIFVSXAGGFPPDASGDPLGFLKGKVFEGGSGVIVPPPKFKASLFGAVKKAPPGKGSPLGFPLRGGFSQWAC

SEQ ID NO: 256183 - protein, 111 aa, Glycine max
  unsure (1)..(111): unsure at all Xaa locations
  Clone ID: PAT_MRT3847_73354C.1.pep
YPALIDKLTAYSFSTYYSKIHLDGSFFTIPAPLTTMDTAITXINQLIXKNKAHQHAGPLIMHSNHYEQHTFKEFNPLQETSDYPPHILVPIANCSDEMEISIIIYILLITK

SEQ ID NO: 256184 - protein, 44 aa, Glycine max
  Clone ID: PAT_MRT3847_73355C.1.pep
MKGKVSLDPIKGRPFFLIWNSCFANFIKTIIRLLRFVVMVFFFC

SEQ ID NO: 256185 - protein, 28 aa, Glycine max
  Clone ID: PAT_MRT3847_73356C.1.pep
SSFRFLLLMYNLIRVFSFQKTNSYKEIT

SEQ ID NO: 256186 - protein, 53 aa, Glycine max
  Clone ID: PAT_MRT3847_73357C.1.pep
IFPREQVWPWFRQGLKRLPFGENGYPAGTRPGINPRVKRLLIGGPPFFFFFFF

SEQ ID NO: 256187 - protein, 88 aa, Glycine max
  Clone ID: PAT_MRT3847_73358C.1.pep
HETNLLYLHQQILMIIQIMIVIDELGTRVPFSNSDTFVLCVFRSYGSSYFLRSARYAHACARALTQQLPNSSLQPTQSQMHSNQIVVL

SEQ ID NO: 256188 - protein, 70 aa, Glycine max
  Clone ID: PAT_MRT3847_73359C.1.pep
TTFQFCCEVLSLSGSYHSDILIILGSCFLFNCVGCIIFDIQKISIALGKKNKAVSLCYPLPALGITIFPL

SEQ ID NO: 256189 - protein, 206 aa, Glycine max
  Clone ID: PAT_MRT3847_7335C.1.pep
MSSYSSDRDRGRDRGFGAPRFGGSRTGPLSGKKFGNPGEKLVKKKWNLDELPKFEKNFYQEHPDLARRTAQEVDTYRRSKEITVRGHNCPKPVLNFYEANFPANVMDVIARQNFTEPTAIQAQGWPVALSGLDMVGVAQTGSGKTLSYLLPAIVHINHQPFLERGDGPICLVLAPTRELAQQVQQVAAEYCRACRLKSTCIYGWCS

SEQ ID NO: 256190 - protein, 80 aa, Glycine max
  Clone ID: PAT_MRT3847_73360C.1.pep
IRNHPDVHISASIDCFLSEPVVSRENYASRHLQRRGSVFLNKTPMHGTVDQSSQQIIIKHAYARVFSVGHIPDRRVRALI

SEQ ID NO: 256191 - protein, 56 aa, Glycine max
  Clone ID: PAT_MRT3847_73361C.1.pep
RCPDIRRPLLVMNTIMLLQMSDPCLYLKDCFIHFFVRIDCAIRIDHVLALLPYGPC

SEQ ID NO: 256192 - protein, 102 aa, Glycine max
  unsure (1)..(102): unsure at all Xaa locations
  Clone ID: PAT_MRT3847_73362C.1.pep
FFFFFLFFLLFYFLLXFFXXXXXXXFFFFTKGNNYSINHSFPGSCANYKCNNPSFKMENKIVCNMQTDNTRQNYRLGHLHRFKRQCMSLKSFLELQTMYSSH

SEQ ID NO: 256193 - protein, 96 aa, Glycine max
  Clone ID: PAT_MRT3847_73363C.1.pep
WGGDLFFPHLLSLNKTPWKKKRVMGKNFTGVNNRAWDLAYILTPATRVFYPQKGTNNGKTSFKRIVTTFPRAFPWKHDHPQNLWFSQKRVFFWVLT

SEQ ID NO: 256194 - protein, 39 aa, Glycine max
  Clone ID: PAT_MRT3847_73364C.1.pep
MWNRVQLPSYTIFSFNPISTYIHQPPYFKLITKNPPSSH

SEQ ID NO: 256195 - protein, 44 aa, Glycine max
  Clone ID: PAT_MRT3847_73365C.1.pep
TTPKQFIGASKMHDGRCTGGFFFSPREEVYPLPSKRNRQRVVLS

SEQ ID NO: 256196 - protein, 737 aa, Glycine max
  Clone ID: PAT_MRT3847_73366C.1.pep
TRPGYQMIEQPGAIYLRYLVDIHKKYLMIYEFNTSCLAERRIFLANYQTITYSQTLRGANSFHFPSHGKPFSLRLALPPPSRGILVIGSIGTGRSYLVKYLATNSYVPFITVFLNKFLDNKPKGFLIDDSDDIDDSYDSDDIDRDLDMELELLTMMNTLTMDMMPEIDRFYITFQFELAKAMSPCIIWIPNIHDLDVNESNYLSLGLLVNYLSRDCERCSTRNILVIASTHIPQKVDPALIAPNKLNTCIKIRRLLISQQRKHFFTLSYTRGFHLEKKMSHTNGFGSTTMGSNVRDLVALTNEALSISIIQKKSIIDTNIIRSVLHRQTWDFRSQVRSVQDHGILFYQIGRAVSQNVLLSNCSIDPISIYMKKKSCDGGDSYLYKWYFELGTSMKKLTILLYLLSCSAGSVAQDLWSLPGPDEKNGITSYGLVENNSDLVHGLLEVEGALVGSSRTEKDCSQFDKDRVTLLLRSEPRNPLNMIQNGSYSIVDQRFLYEKYESEFEEGGGVLDPQQIEEDFFNHIVWAPRIWSPWGFLFYCIERPNELGFPYWARSFRDKRIIYDEEDELQENDSEFLQGGTMQYQTRDRSSKEQGFFRISQFIWDPADPLFFLFKDQPFVSVFSHRQFFTDEEMSRELLTSQTDLPTSIYKHWFIKNTQEKHFELLIHCQRWLRINSSLSNGFFRSNTLSESYQYLSNLFLSNEALLDQMTKTLLRKRWLFPDEMVVAICSNNESLV

SEQ ID NO: 256197 - protein, 45 aa, Glycine max
  Clone ID: PAT_MRT3847_73367C.1.pep
PCFYYPFSYSVLITLAPSKLSSFSEFSPKPTFGDSLKIPTCSVSL

SEQ ID NO: 256198 - protein, 48 aa, Glycine max
  Clone ID: PAT_MRT3847_73368C.1.pep
IFLQRILDTILFHSVTNIPQCQKPPHYVKVQGGSLYETLFLHMQRDYF

SEQ ID NO: 256199 - protein, 80 aa, Glycine max
  Clone ID: PAT_MRT3847_73369C.1.pep
TVVNSGPPENATKIGSTGVVRKQLLNFSPLRGVNQAIFFFTIGARETAFKKIKTIAKSLADELFNAAKGSSPSFVFKKKD

SEQ ID NO: 256200 - protein, 40 aa, Glycine max
  Clone ID: PAT_MRT3847_7336C.1.pep
RAQRRKTVTWKFFHKRVHSPLFLDIIEKPLFLFFRYVSNQ

SEQ ID NO: 256201 - protein, 93 aa, Glycine max
  unsure (1)..(93): unsure at all Xaa locations
  Clone ID: PAT_MRT3847_73370C.1.pep
LLHXYSXXXFSSXXXLXINXKFXXPXIXLXFFXXLXXXXXXNTYTHTISFLLFFTFYLLFSAFFSSSKAFPDFAPFSLVINEIFYNPLLSSQP

SEQ ID NO: 256202 - protein, 56 aa, Glycine max
  unsure (1)..(56): unsure at all Xaa locations
  Clone ID: PAT_MRT3847_73371C.1.pep
PDGHHXAATRVXRTGSSPTLRLARXPRXXRPXSKXPRMXQXQDXXLVXAXXXVXXP

SEQ ID NO: 256203 - protein, 174 aa, Glycine max
  Clone ID: PAT_MRT3847_73372C.1.pep
MSFQLLTKARKRTVFSYLLSRAFSHRSERACRPTFGIAFDIDGVLLLGNSPVGGSPGALKRLYDADGKLKIPYVFLTNGGGYPEAKRAFELSKLLGINVTPSQVLQGHSPFKQLVKRFENDLIVAVGKGEPAAVMTEYGFRYVLSIDEYASCFENIDPLAPYKKWTTKLAVTQN

SEQ ID NO: 256204 - protein, 79 aa, Glycine max
  unsure (1)..(79): unsure at all Xaa locations
  Clone ID: PAT_MRT3847_73373C.1.pep
TNKCLAYNMXPKWENLEKCLCCHYXHHXALIHTXFTNDNAXSSXSDVCXSXINNFSFTPPCISLFFLFVFAXLVXGRTN

SEQ ID NO: 256205 - protein, 60 aa, Glycine max
  Clone ID: PAT_MRT3847_73374C.1.pep
VLRRDKGTNCCEISTPCHACMSTHSDMMCVFMQWASGRSGFPWRLLVNYSGSIFDAIVIV

SEQ ID NO: 256206 - protein, 80 aa, Glycine max
  Clone ID: PAT_MRT3847_73375C.1.pep
MTTPPILTTMPGPYTGPAMTNNWRVTTAKSPPCTSFSPARTRTLPIPPAGHNTKIFLTYTPDPPPSPEACGAPTSYFPDM

SEQ ID NO: 256207 - protein, 45 aa, Glycine max
  unsure (1)..(45): unsure at all Xaa locations
  Clone ID: PAT_MRT3847_73376C.1.pep
GNGIFGMIFPGCPSSYQEPQEWQQLXLIQMPQYRHQNVHLFREGY

SEQ ID NO: 256208 - protein, 146 aa, Glycine max
  Clone ID: PAT_MRT3847_73377C.1.pep
KKMKEMGVRKEPGCSWIEHGPTRPKFLSGDASHPQSKELHEYLETLSQTMRKEGYVPDISCVLHNVDDEEKETMLCGHSERLAIAFGLLNTPPGTTIRVAKNLRVCNDCHVATKIISKIMDREIILRDVRRFHHFANGTCSCGDYW

SEQ ID NO: 256209 - protein, 132 aa, Glycine max
  Clone ID: PAT_MRT3847_73378C.1.pep
GLQPGITSTGLLPTTGLTSTYQTSTLGMNDLNRNGIPDNLERQGLAGQGFTTGTTLPSSQFQGFSILSDLNGNGIPDNLERRSNLTGGLNDLNRNGIPDNLERQFGQTGFVGQQPLTGLTSLNDRNGNGIPD

SEQ ID NO: 256210 - protein, 30 aa, Glycine max
  Clone ID: PAT_MRT3847_73379C.1.pep
LWVLQPRIGLVIHLFICNNPDPTLGANLQN

SEQ ID NO: 256211 - protein, 46 aa, Glycine max
  Clone ID: PAT_MRT3847_7337C.1.pep
VEENREQRTRKNMGRRMRVKEDFVTELVLTVESIIYIYIYIRGCCC

SEQ ID NO: 256212 - protein, 83 aa, Glycine max
  Clone ID: PAT_MRT3847_73380C.1.pep
EKIKSNFSSYQNPPMIFSHQSWGSPTLFDLQLQPPVPVFFFFHLVKSSLLKPLPPPHIFSFSPWKRKFPFLPNKFVSLSHFCP

SEQ ID NO: 256213 - protein, 36 aa, Glycine max
  unsure (1)..(36): unsure at all Xaa locations
  Clone ID: PAT_MRT3847_73381C.1.pep
KXLGVNNIHHLLRSSLLCMALDTIALNFSLANNRRG

SEQ ID NO: 256214 - protein, 76 aa, Glycine max
  Clone ID: PAT_MRT3847_73382C.1.pep
PCHERDFSTRLIHKLEKHNPKGQIHLRKLMPDAYPCIIKLAISTSIESNILLPLEPSLGRERQLNVGGYTYMSQEP

SEQ ID NO: 256215 - protein, 35 aa, Glycine max
  Clone ID: PAT_MRT3847_73383C.1.pep
RPTRPSYCICTLEKGQARRVLKTNQSENEDLPTLS

SEQ ID NO: 256216 - protein, 65 aa, Glycine max
  unsure (1)..(65): unsure at all Xaa locations
  Clone ID: PAT_MRT3847_73384C.1.pep
LVGPLSTQLSDRRSTIVKQAXCHLLCFLSKELLGDFEACAEMFIPVLFKLVVITVLVITESAGRL

SEQ ID NO: 256217 - protein, 64 aa, Glycine max
  Clone ID: PAT_MRT3847_73385C.1.pep
RTRGRTRGQNLDMVPCILVTFENEQIVVWRGKDYEPRKDGYFLKDRESVDDIGGLCVGKEQQAM

SEQ ID NO: 256218 - protein, 43 aa, Glycine max
  Clone ID: PAT_MRT3847_73386C.1.pep
WNFKIQLVCKYCGLSELSYEEYVAVAKVAFKNIILESVESEMV

SEQ ID NO: 256219 - protein, 102 aa, Glycine max
  Clone ID: PAT_MRT3847_73387C.1.pep
RFSVNFFALPARIFHHKFALPQDIFFFKKKLKKVLYSFFGQFRALKPKFKGMSGPPTPEKIKTPRRKKVPFGFGNQFFSRSILGIILKAPFPPIFGLTFIKY

SEQ ID NO: 256220 - protein, 33 aa, Glycine max
  Clone ID: PAT_MRT3847_73388C.1.pep
KIYILIIPRVKNFLFAQLERPGIFYGSVSSVQV

SEQ ID NO: 256221 - protein, 399 aa, Glycine max
  unsure (1)..(399): unsure at all Xaa locations
  Clone ID: PAT_MRT3847_73389C.1.pep
PSWSGVFYSGTDGSLNLKVVSPTLLVAEKEEAKAVLTLFLKKQGLSNAIDTRTSKKSDHFIDNLSTRLHPKHKSWYRAGREFQVRGCSDTLIPYLESLFAQXAANLCELKRYGYTGTWSIYSXAPETXNTFHAHEIKKLKAVSRVIETDPHNFNLRPHIEYLMDLGLDIEQIXSITRRFPSFAYYSLEGKMXPVVEFFLELGVPKENILTILTKRPQLCGISLSENLKPTMKFFESLGXDKNQWPKVIYRFPALLTYSRPKVMESIDFLLELGLSEESIGKILTRCPNIVSYSVEDNLRPTAKYFHSLGVEVGVLLFRCPQNFGLSIENNLKPATEFFLERGYTLEEIGTMISRYGALYTFSLTENLIPKWDFFLTTGYPKSELVXVPSIFWIQFRGKG

SEQ ID NO: 256222 - protein, 68 aa, Glycine max
  Clone ID: PAT_MRT3847_7338C.1.pep
QVKDKLFSQRKPVVKITGDSMCFLCHKKIGTSVFAVYPNGSTLVHFVCFRDSQNMKAVGKGSQLRKRL

SEQ ID NO: 256223 - protein, 31 aa, Glycine max
  Clone ID: PAT_MRT3847_73390C.1.pep
YLALQDLMLLSQYSPSRRQEVFSLSQPGIAK

SEQ ID NO: 256224 - protein, 103 aa, Glycine max
  unsure (1)..(103): unsure at all Xaa locations
  Clone ID: PAT_MRT3847_73391C.1.pep
GCSYLISDGIFLLRLTYDRKSFLKNHPHYFISNPDTLPDLTFNFNFCHYTIPFKTVTYSYVFYFPLTLHFIXYYPFISSNYKFPHXSFHPNFYPSFTFCYPIL

SEQ ID NO: 256225 - protein, 194 aa, Glycine max
  Clone ID: PAT_MRT3847_73392C.1.pep
MADPIAKALIAFALLASLLLCLQASSDVPFIVAHKKASLNRLKSGAERVSVTIDIYNQGTSTAYDVSLSDDSWPSDAFDVISGSTSKSWERLDAGGIISHTFELEAKSKGVFAGEPAVIKFRVPTKSALQEAYSTPILPLDVLSDRPPEKKFEWAKRLLAKYGSLISVISIMVLFIYLVASPSKSSAKGSKKKR

SEQ ID NO: 256226 - protein, 109 aa, Glycine max
  unsure (1)..(109): unsure at all Xaa locations
  Clone ID: PAT_MRT3847_73393C.1.pep
TTRTYWVSNPQNPFVLNRWMGKLTFPQGTCRRRKRMPLSIGGGAGAKNAILMNMPNADLSMWRYFAGELTFEAFNMTFPYIKXTVSIFIAFGNLADDTXINSDAFPHKL

SEQ ID NO: 256227 - protein, 57 aa, Glycine max
  Clone ID: PAT_MRT3847_73394C.1.pep
KKKKTTHCIRYKKEKKKKRERKKKKKEKEKKKKKKKKKKKRTTKIKDEAKIKTSTKI

SEQ ID NO: 256228 - protein, 67 aa, Glycine max
  Clone ID: PAT_MRT3847_73395C.1.pep
YYFHPVRFNFGYQLCPIISPCAQQYSRTSPDFANLLSILLPQFKSLCPGSYGRSSIFSSLLIHISTF

SEQ ID NO: 256229 - protein, 40 aa, Glycine max
  Clone ID: PAT_MRT3847_73396C.1.pep
RFKGKALRNGEVQNHWMVNVACQVQGFMGPIKDYRIRCTT

SEQ ID NO: 256230 - protein, 176 aa, Glycine max
  unsure (1)..(176): unsure at all Xaa locations
  Clone ID: PAT_MRT3847_73397C.1.pep
QIFVKTLTEKTITLEVESSDTINNIKAKIRNKERIPPNQQHLIFAKKXLKDSHTLANYNIQKXSTLHLILHLHNNIQIFVKTLTSETITLEVESSNTINNIRTKIQDKERIPPDQQHLIFARKQLENERTRRDYNIQKXSTLHLGLHLHNNIQILLKTLTNDTITLKIESCHAMRN

SEQ ID NO: 256231 - protein, 124 aa, Glycine max
  Clone ID: PAT_MRT3847_73398C.1.pep
TRPEKENSGKKSDNVDSLGISLAGILDSSTESTGDTLSEIPSLKYRENNGKKSDNVDSLDASLTDLFNSSTESTRGTLSKIPSSNYREKQRSHKNYSFVADPVLPNKEKLVDDLKKADESKMQN

SEQ ID NO: 256232 - protein, 45 aa, Glycine max
  Clone ID: PAT_MRT3847_73399C.1.pep
SINSTGFLYKCIVCEATGDRHSHGASHALSALKILCKRRESVRLR

SEQ ID NO: 256233 - protein, 53 aa, Glycine max
  Clone ID: PAT_MRT3847_7339C.1.pep
CKRRYPEQSVVYEVFVVFVSGADHCNEKCCCSWPQIRIYSYTLGRRRMNLSSS

SEQ ID NO: 256234 - protein, 71 aa, Glycine max
  unsure (1)..(71): unsure at all Xaa locations
  Clone ID: PAT_MRT3847_733C.1.pep
TYLVTHKATKDQFACKSIPTRRLVDRYYMDYRRLXVQIMHHLTWHRNILELKGAYQDRHFLNLMMELLAGG

SEQ ID NO: 256235 - protein, 41 aa, Glycine max
  Clone ID: PAT_MRT3847_73400C.1.pep
LYVSIRKISHCDCDACVSTDDQWTSGEYTMVAYHNYRSRLQ

SEQ ID NO: 256236 - protein, 47 aa, Glycine max
  Clone ID: PAT_MRT3847_73401C.1.pep
QDYIVRIVKPIYKAKGIVKIESYFSSVNPTIAGHKKNLDSFACQAMF

SEQ ID NO: 256237 - protein, 108 aa, Glycine max
  unsure (1)..(108): unsure at all Xaa locations
  Clone ID: PAT_MRT3847_73402C.1.pep
MVLQISNFLMRMGRGLFECCFTSSSSDTFSKQSKWRILPYKKLAKVTNNFNQSHCLGKRGFATEYYGKLEDGREITIQCFNEDKHHMLQQFINETAILNYLPHXNIVS

SEQ ID NO: 256238 - protein, 78 aa, Glycine max
  unsure (1)..(78): unsure at all Xaa locations
  Clone ID: PAT_MRT3847_73403C.1.pep
MGSVEIPNWLKGLPLAPEFRPTDTEFADPIAYISKIEKEAANFGICKIIPPFPKPSKKYXFSNLNRSLLKCPDFGPDN

SEQ ID NO: 256239 - protein, 103 aa, Glycine max
  Clone ID: PAT_MRT3847_73404C.1.pep
PILIPTAHFSRVLSSCLFLAPCLERGIVIVAIRGGSDRTLPSRASVGTLAVVTAIGTELPRPILPLITKLPILVVPLALGVTATTVARIHNQLPKSKVNAIIL

SEQ ID NO: 256240 - protein, 102 aa, Glycine max
  Clone ID: PAT_MRT3847_73405C.1.pep
VCLNLTNSISKILIETPLEFNNSTMQDEVNCKQPTKLFCFAFYLLMESYLNCSPKCPIDWNLVPHQLEIWLKLSSKLGQSSLYKSILRVKSPINSNISIPYF

SEQ ID NO: 256241 - protein, 174 aa, Glycine max
  Clone ID: PAT_MRT3847_73406C.1.pep
MPTLLPTTAATAALTLTILFTHHTLMKLTVTAALPRGFIIQFPVLIPTAQLLQGALLQPLLGHLLGARIVIVAIGGGSARTLPSRASVGTLALVPAIGTELPRPILPLITKLPILVVPLALRVTATTVARIHNQLPKSKLNAIILYNFLEGAHEFAQTTLTLRGGFWFNDLKIE

SEQ ID NO: 256242 - protein, 50 aa, Glycine max
  Clone ID: PAT_MRT3847_73407C.1.pep
YAYLYWTYTYQPYVNLIKYRSSNSTKLHHLKAQSILQKTHISANCYTTYY

SEQ ID NO: 256243 - protein, 71 aa, Glycine max
  Clone ID: PAT_MRT3847_73408C.1.pep
NFIVMRKRARNKGGFGVSSISSQMMQQLNGEVSGVLQDGGKSAWEKKQWMKKKVVQLEEQQVSYQMQAFGM

SEQ ID NO: 256244 - protein, 55 aa, Glycine max
  Clone ID: PAT_MRT3847_73409C.1.pep
MKSMTGRDFEMTSKMYSTTKAIRGQSTLADYNIQKEVTVQLVLHLRGGMQIFVKT

SEQ ID NO: 256245 - protein, 80 aa, Glycine max
  Clone ID: PAT_MRT3847_73410C.1.pep
TRYEKRFTTDELIRIRRTRPTIELITNPPQTYPSTQAALDYNVYEHVFYYDNVLYPFTGPSHSSQCDPPTLLILCCIFVF

SEQ ID NO: 256246 - protein, 95 aa, Glycine max
  unsure (1)..(95): unsure at all Xaa locations
  Clone ID: PAT_MRT3847_73411C.1.pep
MADGSNGGVVMLQAPPYYGWPTLSNTAIIDSLXYIVDDYPDPRVKLEGDRLVEDEMRCSTNKPTAYLKDYPPVSNFNFQQNYPMIARESEPFMSR

SEQ ID NO: 256247 - protein, 67 aa, Glycine max
  unsure (1)..(67): unsure at all Xaa locations
  Clone ID: PAT_MRT3847_73412C.1.pep
AHGSRLSSPSIIHHNRVRYVLHMNDDRSLLLRVSEXQCSLIHWLIVTSAHDDSVTTFTWDQFQLPII

SEQ ID NO: 256248 - protein, 114 aa, Glycine max
  unsure (1)..(114): unsure at all Xaa locations
  Clone ID: PAT_MRT3847_73413C.1.pep
KQFGRWCKCLLSLISFGDNRLTEKTIFTCRDLDILVVYYTIATQFRKFLPYYIXRWHLDTXLIYILPSFLTAEIKNKLNLSKIHISGYIYDGRYKFLTKHKKIFALQKRKDGCD

SEQ ID NO: 256249 - protein, 51 aa, Glycine max
  Clone ID: PAT_MRT3847_73414C.1.pep
RFNIDNAGQSTVCDILLGIFQDLTIGGEILRPAFSVRQDAARSCENTQSSA

SEQ ID NO: 256250 - protein, 522 aa, Glycine max
  Clone ID: PAT_MRT3847_73415C.1.pep
ELSTDGQFLQLRAKQVRSRRITGVGDGFIQGTEALAQGVAFGVSGVVRKPVESARQNGILGLAHGLGRAFLGFIVQPVSGALDFFSLTVDGIGASCSKCFEVFNNKTAFHRIRNPRAVHSDGILREYCEREAIGQMVLYLGEASQQFGCAEIFKEPSKFALSDYYEEHFTVPHQRIVLVTNKRVMLLQCLAPDKMDKKACKIIWDVPWDELMALELAKAGSSQPSFLILHLKHFRRSENFVRVIKCNSVEVFEGREPQAIKICSVVRRAWKTYQSNMKNLILKVPSSQRQVHFSWTEVDSREPRIPNKAIISSREISSNSTASDDRRFVRHIITFSKIWSSEQEYNGRCSLCSRKQISQDGRICSIWRPVCPVGYIYIGDIARVGIHPPNVAAVYRKIDGFFALPMGYDLVWRNCPEDYVTPLSIWHPRAPDGFVAPGCVAIAGYLEPEPDLVYCIAESLVEETEFEELKVWSAPDSYPWTCHIYPVQSDALHFVALRQSKEESDWKPKRVRDNPHCQLQSP

SEQ ID NO: 256251 - protein, 122 aa, Glycine max
  unsure (1)..(122): unsure at all Xaa locations
  Clone ID: PAT_MRT3847_73416C.1.pep
NLLPLKKKKKKKKKKKKKKKKKKKKKKKKXXHXXKLKKKKTXKKXKKKNIXXFKKKLNFNWGGFFKGKKLFFLPLNALFFFWDLQKFFLVATFFKPVWVEKPLVTPYIFLGQTPPAFSSGGN

SEQ ID NO: 256252 - protein, 87 aa, Glycine max
  unsure (1)..(87): unsure at all Xaa locations
  Clone ID: PAT_MRT3847_73417C.1.pep
MSLTPSFFGGRRSNGLDPFSLDVWDPVKDYPFPTSLSAEHSAVESALVNCNETPEAHVFKADIPGLTNEEMILQITNXRILQISGQR

SEQ ID NO: 256253 - protein, 101 aa, Glycine max
  Clone ID: PAT_MRT3847_73418C.1.pep
GFSLFLVLVVFAANEALASVANIGLRTNMMLYLMGSYKFHLAKATQVLLLSSATSNLTPLIGAFIADSCLGRFLSVGFGSSISFLVLSFQIPFCLFSSEFC

SEQ ID NO: 256254 - protein, 83 aa, Glycine max
  unsure (1)..(83): unsure at all Xaa locations
  Clone ID: PAT_MRT3847_73419C.1.pep
ELLNVXYKDXRVXXXLXELVEAKRAGAAYVIGHSHVKAKWNSPFLKRFAINLYSFLRKNCRSPAVGLNIPQISLIKVGMNYHV

SEQ ID NO: 256255 - protein, 336 aa, Glycine max
  Clone ID: PAT_MRT3847_7341C.1.pep
MGGSSIGDDWELTSSSNEGRTVVLVGRTGNGKSATGNTILGRKVFKSRASSSAVSTSCELQTTELNDGQIVNVIDTPGLFDLSVGSEFVGKEIVKCIDLAKDGIHAVIVVFSVRTRFTEEEETALRSLQTLFGSKIVDYMIVVFTGGDELEENAETLEDYLGRECPEPLKEILVLCDNRCVLFDNKTKDEGKRFGQVQQLLSFVNTVLSRNGGRPYTDELFTQLKKGAMELHNQQREVDSLKGYSKGEILKFKKQMQQTYDDQLKRITEMVESKLREATMRLEQQLAEEQAARLKAEENAMLAQMRSDDEIRKLREHLEKAHEELRKRGEGRCAIL

SEQ ID NO: 256256 - protein, 147 aa, Glycine max
  unsure (1)..(147): unsure at all Xaa locations
  Clone ID: PAT_MRT3847_73420C.1.pep
NNTANRGPGGPQGLLIAENWIQRIAVELKMSPEKIREINSQGEGSILHYGQIVQYSTLAPLWNELKLSCDFAKARKEVDEFNSHNRWRKRGIAMIPNKFGISFTTKLMNHAGALAQVYTDGTVLVTHGGVEMGPGXHTKVAQSAASA

SEQ ID NO: 256257 - protein, 61 aa, Glycine max
  Clone ID: PAT_MRT3847_73421C.1.pep
LKHHTLIAEMSSIRMLMHESSSIDGYTLEAFTWARHNPTRPTPEPIYFKFQESAPRYNKNS

SEQ ID NO: 256258 - protein, 62 aa, Glycine max
  Clone ID: PAT_MRT3847_73422C.1.pep
SRLASTISITERSTMFHSHEASVSLKHTSVSVICISFKSTEVIIPNSAHHLIQCNHTHDMDH

SEQ ID NO: 256259 - protein, 86 aa, Glycine max
  unsure (1)..(86): unsure at all Xaa locations
  Clone ID: PAT_MRT3847_73423C.1.pep
SSLXSTTNXPHVXQEXFXSLXXXXXVXKXESSXXLVXILXPXEKXYEEXGPDXTEEDXXEGXRLLIRSXPLXCYFICVVFFXSCSV

SEQ ID NO: 256260 - protein, 46 aa, Glycine max
  Clone ID: PAT_MRT3847_73424C.1.pep
VPCYILMSLRTNLYKKNTWYGACDMSEVQMHLKNIYILARAIMFCR

SEQ ID NO: 256261 - protein, 63 aa, Glycine max
  Clone ID: PAT_MRT3847_73425C.1.pep
IAKGWTWCLRSCKDQVEGFPRSLLTPKKLISSPLPNSYQAGSNGVSVRLKALHVPHALKFMRA

SEQ ID NO: 256262 - protein, 96 aa, Glycine max
  Clone ID: PAT_MRT3847_73426C.1.pep
EKTTEGEGSWHKEDKILDDKCVQQRWKKGQERGSPTDTSHLVGLNWEILVVNEPVLNAFCLPDGKIVVFTGLFDHFKRDAEIATIIGHEVLYLCLV

SEQ ID NO: 256263 - protein, 125 aa, Glycine max
  Clone ID: PAT_MRT3847_73427C.1.pep
ASPLYYNYYFLSLFVTCKHGVLKDLCLPLPLHALPAPPPTPILGCGYCGKPPKKHKPGKTPKTPTVPVVKPPVTIPPIVKPPVTIPPIVNPPVTIPPIVNPPVTIPPIVNPPVTVPPVVFHHSEA

SEQ ID NO: 256264 - protein, 44 aa, Glycine max
  Clone ID: PAT_MRT3847_73428C.1.pep
RAGIDTKFTALLSRLLAPEIITRRGYAAKRIQSSKPCNSVELDR

SEQ ID NO: 256265 - protein, 50 aa, Glycine max
  unsure (1)..(50): unsure at all Xaa locations
  Clone ID: PAT_MRT3847_73429C.1.pep
XXPXSXTKCLPGNLYRXTXXXQIFDXXFSRAKSIVARAEFRSLXTRXXLX

SEQ ID NO: 256266 - protein, 53 aa, Glycine max
  Clone ID: PAT_MRT3847_7342C.1.pep
KKYKSLFECLSYKALSCFHLKFFRDQNILVDLRNKVCEPLKASLKNQNYYDNF

SEQ ID NO: 256267 - protein, 66 aa, Glycine max
  unsure (1)..(66): unsure at all Xaa locations
  Clone ID: PAT_MRT3847_73430C.1.pep
MGKKKRSRVSEDEEIESDTNPFDQNEHTLYQVLGVEKTASXQEIKKAYYKLALRLHPDKNPGDEEA

SEQ ID NO: 256268 - protein, 76 aa, Glycine max
  Clone ID: PAT_MRT3847_73431C.1.pep
RPLSRSRTVSRPPHRVVPAKAFEASAPKVKAVTLAKKSVNKTNKYARRGEAYRVTPYLKPTHLFSGKRSNGRSEIR

SEQ ID NO: 256269 - protein, 62 aa, Glycine max
  Clone ID: PAT_MRT3847_73432C.1.pep
AVGNPSVQARALRPSSSSTRPGDGLGLCPCHVRALLSPFLFAWVGCSFQAQSRGEIKINPIT

SEQ ID NO: 256270 - protein, 70 aa, Glycine max
  Clone ID: PAT_MRT3847_73433C.1.pep
TQISFCLEDYKLYRSHTELTFLQIRKQHVEIYECLLLQTKIRYSMSINKKDQIFNILSKKELIPNFKLSM

SEQ ID NO: 256271 - protein, 77 aa, Glycine max
  Clone ID: PAT_MRT3847_73434C.1.pep
KSVLVFYSTYLGAKSENSNGRSVLHDPSHTNACMRRHAYSISPPKCKHWDDFYPGKTDKTLVLPQLCCRASNLPCLK

SEQ ID NO: 256272 - protein, 116 aa, Glycine max
  Clone ID: PAT_MRT3847_73435C.1.pep
SYFQNLTSLTVDGCERLTHIFSYSVARKLVKLEHLLISSCKSVEQIFVADENSGHHHHFRISAPTELVPIFPNLETFGISHMDNLKSIWPDQLTENSFYKLKKMEITSCNNLLNVF

SEQ ID NO: 256273 - protein, 85 aa, Glycine max
  unsure (1)..(85): unsure at all Xaa locations
  Clone ID: PAT_MRT3847_73436C.1.pep
LSLPFFFFLSLFPFFWILPTPVHWSFFSLPLCLSAHPSSIARVLKLIFPFFPSCWFAPFKMLYLALXRSPPSCKWSSSFCXPSXP

SEQ ID NO: 256274 - protein, 31 aa, Glycine max
  Clone ID: PAT_MRT3847_73438C.1.pep
SKDKMTIGSRYVELFPSTPDEARRAESRSRQ

SEQ ID NO: 256275 - protein, 123 aa, Glycine max
  unsure (1)..(123): unsure at all Xaa locations
  Clone ID: PAT_MRT3847_73439C.1.pep
KRLRHPNIILFMGAVTSPQHLCIVTEFLPRXNTSKIDWRRRVHMALDVARGVNYLHHCNPPIIHRDLKSSNILVDKNWTVKVGDFGLSRLKHETYLTTKTGKGTPQWMAPEVLRNELSDEKSD

SEQ ID NO: 256276 - protein, 44 aa, Glycine max
  Clone ID: PAT_MRT3847_7343C.1.pep
CSYLPLICSNCKYEHQIYNWSKLMVMIFIFIKCHKFFPKCPPVI

SEQ ID NO: 256277 - protein, 243 aa, Glycine max
  Clone ID: PAT_MRT3847_73440C.1.pep
MHPHPHTIHAHNNNNNINNFHSNTPCFVEEGPSRLLVGGALQEDARLALFRLDSGEVLQYQVFVKADRVSPFDLAASWRAYQDKFRPSSVRWIPDVSINSAPQTGGENGCSVGLELDLEHYVVPTPATAANSAHVYAANMTENPRSLICGSGSSSYPIKEMQVIVPDPSKMFQSSGMVESKSVGTFSPLQKQESQRGLFVDRGVGSPRLVKSSSSYIFSTDLNLDNETKNSMPAAAGAVAAAA

SEQ ID NO: 256278 - protein, 70 aa, Glycine max
  Clone ID: PAT_MRT3847_73441C.1.pep
NYKMVNMKDIINVGNKYGGTALHFSSIHNIQIYLKGLLNFFPLIYFQISYSPFNTPLSSFLNSKFPSPFF

SEQ ID NO: 256279 - protein, 68 aa, Glycine max
  Clone ID: PAT_MRT3847_73442C.1.pep
KKLGTPKKGPPTSKEPENNFKNTARCGSKLFQNPEHSKKARLVLKNLAWSLCAKATENAIKGGRFFHP

SEQ ID NO: 256280 - protein, 75 aa, Glycine max
  unsure (1)..(75): unsure at all Xaa locations
  Clone ID: PAT_MRT3847_73443C.1.pep
PTVIDEDRTETYRALSHTELLTSVKDEAANNFARGHYTIGKEIVELCXDQIRKLADNCTGLQRLLVINAVGEGPG

SEQ ID NO: 256281 - protein, 64 aa, Glycine max
  Clone ID: PAT_MRT3847_73444C.1.pep
WKTRKDTEHNLTSCDFQGKTFAGYCKHSCPFTSCRPPSNAHSQHFAYNLPPVCKTLLSSPSTRY

SEQ ID NO: 256282 - protein, 48 aa, Glycine max
  Clone ID: PAT_MRT3847_73445C.1.pep
FFFFFFFFFFVFFFFFFFFFFFGGPLCFPNSLINLVDNFKKAHNLIFC

SEQ ID NO: 256283 - protein, 50 aa, Glycine max
  Clone ID: PAT_MRT3847_73446C.1.pep
MALNPQLFPNGMPVPFVNEMFVLARDGVEFEVDKIPASGSVTNFFPLFFL

SEQ ID NO: 256284 - protein, 199 aa, Glycine max
  unsure (1)..(199): unsure at all Xaa locations
  Clone ID: PAT_MRT3847_73447C.1.pep
MSLNMKTLTQALAKTAAVIEKTVQTTVQEVTGPKALQDYELLDQIGSAGPGLAWRLYSGRARDPSRQHQYPVVCVWVLDKRSLSEARMRAGLTKAAEDSFLDLIRMDAAKLVRLRHPGXVVHVVQALDESKNAMAMVTEPLFASAANTLGIVDNILNLPKDLRGMEMGNLEVKHGLLQIAESLDFLPHHAHLIHRSISP

SEQ ID NO: 256285 - protein, 148 aa, Glycine max
  unsure (1)..(148): unsure at all Xaa locations
  Clone ID: PAT_MRT3847_73448C.1.pep
KLTSAKTNRETHGRDAKRNHHXKEGKSSRKDXGGQEKREREINKKRARQXTRLIRXASKEXTRSNTKTKKTTEAGEGRXRNNRERISXRKTKQADKGERRSRPRRRLSGPVGDKEPRRRRPSARTXQGSQRXQRHRARNLNXXXXGQX

SEQ ID NO: 256286 - protein, 51 aa, Glycine max
  Clone ID: PAT_MRT3847_73449C.1.pep
QQLEVLMSLACCISYIFKRFIGPFISRAVPYFLSLSLSLSLSLSFSIFPTL

SEQ ID NO: 256287 - protein, 93 aa, Glycine max
  Clone ID: PAT_MRT3847_7344C.1.pep
GCEKTTEGTTPTLPSSFLDGFVIPYDNCCSLQAEELQQKLFSETQYGDTCVDLPCEKKGNERTISPQSVAPRERRRKFTKRTQELGKLVPGGP

SEQ ID NO: 256288 - protein, 36 aa, Glycine max
  Clone ID: PAT_MRT3847_73450C.1.pep
TINRDAQLGSPGLILTTGRWRYSRRRGAIRNARTRG

SEQ ID NO: 256289 - protein, 38 aa, Glycine max
  Clone ID: PAT_MRT3847_73451C.1.pep
IPLTRGNVSLKSPKSHVRQFNKPRQNVSLFSPSLQNVK

SEQ ID NO: 256290 - protein, 317 aa, Glycine max
  Clone ID: PAT_MRT3847_73452C.1.pep
MVKFSKELEAQLIPEWKEAFVNYWQLKKQIKRIKLSRLPKQSHHHAKPDFGLSIFDSLSFFVKNIAQNFSASDHHDLNIIQVRKEAPMVVVVVFFDSDLALVLSEEGVPRVWFMWLDEELNKVNQFYRRQESEFIERGETLNKQLQILLDLKQIISDCRRKNSPSKPYSTGVSPQYSPTRDSDYSVCAENFGDSDETNSEISQTDEVITTLEKNGISFVNSVMRTKTKKGKPKMAMRIDVPATNPTRAITAITSMLWEDLVKNPTGDLVHKRKLQCAEKMIRGAFVELYKGFGLLKTYSSLNMVAFTKILKKFDKVS

SEQ ID NO: 256291 - protein, 76 aa, Glycine max
  Clone ID: PAT_MRT3847_73453C.1.pep
ELGCSRLSERTLERRRFLGIQAFYWHERLLFNAYDRPYYEALQTSAEYNTRMLYYIYKAIYSQRSSQDAIWTISKC

SEQ ID NO: 256292 - protein, 164 aa, Glycine max
  unsure (1)..(164): unsure at all Xaa locations
  Clone ID: PAT_MRT3847_73454C.1.pep
FSRPARRYDTRATIFSPEGRLYQVEYAMEAIGQAGTCLGIRAPDGIFIAAQKLTANKLLDDRIMSEKIYKVSANIFCTAAGITSDANVLVDKLREMAVMNTLDFGENIPVEQLVIRLCNTKQHYTQVGGKRPYGVSLLYAGWDTHHGFEIYQSDPXGNYXGWKA

SEQ ID NO: 256293 - protein, 143 aa, Glycine max
  Clone ID: PAT_MRT3847_73455C.1.pep
MSSFLPASAESLDLAVEAKDPSESISILYQVLDDPSSSPDALRMKEQAITNLTEHLREQNRAEDLHSLLTQLRPFFSLIPKAKTAKIVRGIIDTVAKIPGTSDLQITLCKEMMQWTRAEKRTFLRQRVEARLAALLMESKEYS

SEQ ID NO: 256294 - protein, 93 aa, Glycine max
  unsure (1)..(93): unsure at all Xaa locations
  Clone ID: PAT_MRT3847_73456C.1.pep
MDCQGQKITEQLMQLIIVAFAVIAFATGYLMASFQMMILIYAGGVVLTTLVTVPNWPFFNHHPLKWLDPSELXKHPKPQPSPNVSFFKKPPNK

SEQ ID NO: 256295 - protein, 41 aa, Glycine max
  Clone ID: PAT_MRT3847_73457C.1.pep
YSLSSVNLVHLTKSQGKKKPISTEVNEHDKEFEIAVQLIMH

SEQ ID NO: 256296 - protein, 72 aa, Glycine max
  Clone ID: PAT_MRT3847_73458C.1.pep
REGKPFSLLFFLLSMPCCNNNNIYKRGQTKAYKLRGFLGGHTFTSLFTYAPNRTPVWGNFYKTGFCFDRKKF

SEQ ID NO: 256297 - protein, 60 aa, Glycine max
  Clone ID: PAT_MRT3847_73459C.1.pep
QWGATPNSFHFYLKAKVIEVFWLLGASFIKNFLQDSKMERPKILAKQGKAQFGAKNGEPG

SEQ ID NO: 256298 - protein, 35 aa, Glycine max
  Clone ID: PAT_MRT3847_7345C.1.pep
KKSSNPVVVNAGVSILSKQSLPRGSQMYRPNQEYL

SEQ ID NO: 256299 - protein, 76 aa, Glycine max
  Clone ID: PAT_MRT3847_73460C.1.pep
RQRPGGFPFGKFNQCFFYNISFGQPKCFSWGGKLPYFFWEFPHIFPLSVTMFFILSLPPPSLFLGHGGFFFFFFHG

SEQ ID NO: 256300 - protein, 52 aa, Glycine max
  Clone ID: PAT_MRT3847_73461C.1.pep
LLAFSSLFMVLIVMEDASIAFCEFIRIFYYSDNPLFLYDCPVEAILLVSYWL

SEQ ID NO: 256301 - protein, 64 aa, Glycine max
  Clone ID: PAT_MRT3847_73462C.1.pep
VASRAYTSPFCLKQKPASLKAYRARGVGMLKWARSGPQDTGVPHAQRFGLAHETLLSDGGVVLW

SEQ ID NO: 256302 - protein, 60 aa, Glycine max
  Clone ID: PAT_MRT3847_73463C.1.pep
KTWYVLDLIYTRLKTYVGWPDLILLHIFQLFFYSLFSVCVTDVIICFKNTLKCPKYFIFL

SEQ ID NO: 256303 - protein, 53 aa, Glycine max
  unsure (1)..(53): unsure at all Xaa locations
  Clone ID: PAT_MRT3847_73464C.1.pep
MQIFVKTLTGKTITLXVESSDTIDMSRAKIQDKXXLPPDQQRLXFAXKAVEVG

SEQ ID NO: 256304 - protein, 51 aa, Glycine max
  Clone ID: PAT_MRT3847_73465C.1.pep
STQRLCRSFLHLCDVMTLTAHVGQSVRTHREAQFSGWYILDGASNLRRFRW

SEQ ID NO: 256305 - protein, 58 aa, Glycine max
  Clone ID: PAT_MRT3847_73466C.1.pep
SVFLVSLNKRCTPLLQERSNLNQGELAISAVKAKHQGVPLSISCLRKQVFGNLLKRQT

SEQ ID NO: 256306 - protein, 97 aa, Glycine max
  Clone ID: PAT_MRT3847_73467C.1.pep
PCPPASSQPSKSLALKLPEKAKNPQKKKNQKRRPRPFKKTPRYRPSALAGSRNATEKAAVKPRDVHCIDPRPGRRSVRTPSTNRKPRPPASRKEKGR

SEQ ID NO: 256307 - protein, 86 aa, Glycine max
  unsure (1)..(86): unsure at all Xaa locations
  Clone ID: PAT_MRT3847_73468C.1.pep
LEWKFGDKKXYFRHASREMYGRSRALAKDRSINRSILRTYAHEDGSAGSWYIGLDGKHVDEAKHCCSSWTTGAIRAGVRVECRAFL

SEQ ID NO: 256308 - protein, 55 aa, Glycine max
  Clone ID: PAT_MRT3847_73469C.1.pep
MATPPVNSLPIAYQAWTSLGVPDWLNKGDNAWPMVSATLVGIQSMPGLVILYGSI

SEQ ID NO: 256309 - protein, 59 aa, Glycine max
  Clone ID: PAT_MRT3847_7346C.1.pep
SPCGECRCPLLPWRFLRSSRFSSCGACGSSVTSAPYMFSWRESMFHIASALFSCTHQRQ

SEQ ID NO: 256310 - protein, 114 aa, Glycine max
  unsure (1)..(114): unsure at all Xaa locations
  Clone ID: PAT_MRT3847_73470C.1.pep
NDSLEEARAGVECGTPDGLPLTGVRLSIFNEMHGRYRSEEXLRQAKAPSVLVQSFKNFASWCAYGEDNLISGHXYATPHFSGSKRKRWLARPNISITVGLDTTSATLRFITVAG

SEQ ID NO: 256311 - protein, 270 aa, Glycine max
  unsure (1)..(270): unsure at all Xaa locations
  Clone ID: PAT_MRT3847_73471C.1.pep
LSIDRSEGAALLRTKPRPRSRSSTNGLAPGSTRTCVQRDGREGGPLSGRTPFPKTNGSPHRTPVPTPGGGRPRAAAGTTRGPRRAGTDGDPAIRGQPRLLRRCRIVPPGRDSDLEAFSHNPTDGSFAPLAPQPSTYTKCLNLRFLSYXSRITMATTHHQXGKTNLSHDGLNPAHVPYXWVNNPTLGEFCFTMIGRADIEGSKSDVAMNAWPPQASYPCGNFSDTSCLKPKRSXRDREAPLSRSVFVLKIKIKRAFALLXHGRFLSXLSSP

SEQ ID NO: 256312 - protein, 37 aa, Glycine max
  Clone ID: PAT_MRT3847_73472C.1.pep
TSAIHWEDCKDQIDVLALASIEPILSYDEVVLYVGWN

SEQ ID NO: 256313 - protein, 95 aa, Glycine max
  unsure (1)..(95): unsure at all Xaa locations
  Clone ID: PAT_MRT3847_73473C.1.pep
IWKKPPTFVNLKRAHGLFTIPXXHNLSHSPPSISVYISANHFISFFLYIFQILIFLFTCSSYIFHKHKFTFFLNYNFLPFILITYLNIFCNFIIL

SEQ ID NO: 256314 - protein, 280 aa, Glycine max
  unsure (1)..(280): unsure at all Xaa locations
  Clone ID: PAT_MRT3847_73474C.1.pep
METPLVIQKFTSESDYLPVKSLKDLKFVLWTETVKIWRIAFPMALSALFQFLTISSTSIYAGHIGDIELSSISVYQGVISAIYFYLLFGMSSALATLCGQAFGAGKIQSTCIYVQRSWIILTATCIILLPIYVYATPILKLLGQDEGIAEVAGRYSIQVIPYMFSFAVAFPIQRFLQAQSKVKVIMCIAFVDLLIQNGLLYIFINVFGWGITGLAIVTNIVGWLYAMALVVYTIGWCKEEWTGFSWMAFXDLWSFAXVSXASSXMSCLXQWYGTCIILLA

SEQ ID NO: 256315 - protein, 82 aa, Glycine max
  Clone ID: PAT_MRT3847_73475C.1.pep
FTMVTLCNIGYVDIVPDSTFTKIFTCAFILVGFGFLGFLLNGLVAYICDIQEAFLLSMVDENRYKKILRTYMVDEEKGRMRI

SEQ ID NO: 256316 - protein, 53 aa, Glycine max
  Clone ID: PAT_MRT3847_73476C.1.pep
KSIIWLYINPGLPSHCTKEKKHALFTYATSAHMQRQYNSILYFRLAYNPGGFI

SEQ ID NO: 256317 - protein, 62 aa, Glycine max
  Clone ID: PAT_MRT3847_73477C.1.pep
DCLPFLIPTPRSFFYVVTTELYLIDHTHMDATNLTLHQEYHSSNFYLKRLCAHIHYLLMLHM

SEQ ID NO: 256318 - protein, 117 aa, Glycine max
  Clone ID: PAT_MRT3847_73478C.1.pep
MEIDYGFDFEDCFPSMIARLGAEGFIGELCNGFQLLMDVNMGLITFESLKMSTNLLGLEVRDDELLCMLMEGDLDGDGALNQMEFCILMFRLSPCLMDMQGMVPVNHVNGLMSYNVV

SEQ ID NO: 256319 - protein, 52 aa, Glycine max
  Clone ID: PAT_MRT3847_73479C.1.pep
AEQEGDLPGFGYHDPKFCEQSIQKPMDIILLVKATAHVDLTIKTLSTRWDTG

SEQ ID NO: 256320 - protein, 62 aa, Glycine max
  unsure (1)..(62): unsure at all Xaa locations
  Clone ID: PAT_MRT3847_7347C.1.pep
TLDXXXRXDKXNQIKXXDGSGKVPLKGNVGXPGNNPNPDSEXVLXSRXAKLEXXXWXXXNXX

SEQ ID NO: 256321 - protein, 108 aa, Glycine max
  unsure (1)..(108): unsure at all Xaa locations
  Clone ID: PAT_MRT3847_73480C.1.pep
MARIKVYELRNKTKAELLNQLKDLKAELAXLLRVVKVTGGAPNKLSKIKVARLSIAQVLTVIYQKQKAALREAYTKKKYFALVLRTKKTRAIRRPLTKHQASLETVRE

SEQ ID NO: 256322 - protein, 83 aa, Glycine max
  Clone ID: PAT_MRT3847_73481C.1.pep
CTDTLSVLTLRQITAKCPDGELVRVADELEDELRPSTAPSCTSGAILELSARVHCGTLEFSSDCASCGIGECERSRVNARNRS

SEQ ID NO: 256323 - protein, 53 aa, Glycine max
  Clone ID: PAT_MRT3847_73482C.1.pep
REVFLASVTLENIPHHGTIHFVCHSCVGGAIAYHRDRIFFANKTYLPNATPTP

SEQ ID NO: 256324 - protein, 80 aa, Glycine max
  Clone ID: PAT_MRT3847_73483C.1.pep
TLFSHFSFLAINYMRIPPVVCKKMLRNRIKSRTPRVACRLLLRFLSVPIILFPSILMKPYISLRTWAFPCFFNSTSLAIV

SEQ ID NO: 256325 - protein, 68 aa, Glycine max
  Clone ID: PAT_MRT3847_73484C.1.pep
KNHLLAYQTWPRELEQSVFIAWWGQLQVLFGFSCYFCRASDLLQLMKFRPSSRSRNDWMVGYLNVLGF

SEQ ID NO: 256326 - protein, 143 aa, Glycine max
  unsure (1)..(143): unsure at all Xaa locations
  Clone ID: PAT_MRT3847_73485C.1.pep
XXFWCLXVDSIXXXSXXVSHXCFXTSXXXXXXXQXXXXXXEXXHHXCHXXEXXTXXXXDXPXXXXXVXXXXLXVGTVLVXXXXVXXXXXFXXSXXIXLSXXXXXXXXVXRXXAAXXXXXAXDXXXFFIFGFXAXXVXAXXXXX

SEQ ID NO: 256327 - protein, 192 aa, Glycine max
  Clone ID: PAT_MRT3847_73486C.1.pep
GSRDNITTIDLSNNKLIGTIPSYFSGLPRLQKLSIANNSLSGSVPSTIWQDRILNGPETLHLDMQNNQLTSISGSISLPPNVTLWLLGNPMCSNNNTLVQFCGPETESDGSINGNFSVSCLSQACPSPYVSAVDCFCAAPLVVNYRLKSPAFSDFRIYTNAFQSLMSSGLKIHISQVFINKFAWEEGPTVGM

SEQ ID NO: 256328 - protein, 59 aa, Glycine max
  Clone ID: PAT_MRT3847_73487C.1.pep
VHSLCVCSIRARALMTPDFVDLRGAPPPVETIQCTDIGRRPAFFEKPAVSTNMVSSLKR

SEQ ID NO: 256329 - protein, 97 aa, Glycine max
  Clone ID: PAT_MRT3847_73488C.1.pep
RRHRRVTRRRRCVEVVNLRLHHDAFVDVVEGVRGSTEVGDEVECYVVGLSSEASHWWWWPRQWRWRWVEFRFVGVWLCRFGGCHRFYGASSFVFFVV

SEQ ID NO: 256330 - protein, 83 aa, Glycine max
  Clone ID: PAT_MRT3847_73489C.1.pep
RSCFNKEGRSTNKGFTRTHSKNVAILSKGLAIFSLSKFSIFIHFFPFRTWSPLVQTRSFWWSSSGTDFDTLFCWENITYNKKR

SEQ ID NO: 256331 - protein, 54 aa, Glycine max
  Clone ID: PAT_MRT3847_7348C.1.pep
FHRQHLTILLSYNPILNRFSANKHATFLISSRVFNFGIAVGKFIFIFIYSTPKS

SEQ ID NO: 256332 - protein, 77 aa, Glycine max
  Clone ID: PAT_MRT3847_73490C.1.pep
SNIFEVTNWCGLRNSCCFNCFNLSDTIHACRFCTIALVGVLTKPKELFAEIIGLFLNFVRQRVHVSRNCLYGEGADS

SEQ ID NO: 256333 - protein, 70 aa, Glycine max
  unsure (1)..(70): unsure at all Xaa locations
  Clone ID: PAT_MRT3847_73491C.1.pep
SVLHTSSLAECLGYPTACLKKXVLIWHDLNLSRKAVSFKAVREKYKQHKFKYVANHSAPAHVPSYYFEEQ

SEQ ID NO: 256334 - protein, 76 aa, Glycine max
  Clone ID: PAT_MRT3847_73492C.1.pep
SKKPGGSLWPFFSPQRSRTPPWVCLSHCGKTVWPPVCLKPSKASSVCPPLGFFNPKLFVPMPYKYGFGKLSVFYPS

SEQ ID NO: 256335 - protein, 82 aa, Glycine max
  Clone ID: PAT_MRT3847_73493C.1.pep
CTLKIFLGNFKVHQHCLLRLLFSSLSHQVYIIQSSHGYQVHATLFSSKALTRFLSDHWTRSQLSTAFTQSSMTSMHTYPANS

SEQ ID NO: 256336 - protein, 40 aa, Glycine max
  unsure (1)..(40): unsure at all Xaa locations
  Clone ID: PAT_MRT3847_73494C.1.pep
GXQGSREERTXIARHRXLXPXRLAGFHYMXEXANXXATKG

SEQ ID NO: 256337 - protein, 76 aa, Glycine max
  Clone ID: PAT_MRT3847_73495C.1.pep
IKDELVVLINQLKHIASQKLFKEREKIIIISMFSIHLHKNASHIHFCMSHFLFNMKIVKKNTLFLISQLHLLKNVR

SEQ ID NO: 256338 - protein, 52 aa, Glycine max
  Clone ID: PAT_MRT3847_73496C.1.pep
VASDVLAGIDQAIADGVDVISISMGFDGVPLYEDPIAIASFAAMEKGVVVSS

SEQ ID NO: 256339 - protein, 84 aa, Glycine max
  unsure (1)..(84): unsure at all Xaa locations
  Clone ID: PAT_MRT3847_73497C.1.pep
DLAKPPVFPWXSPFKMGRIAYWRNPIVVPVFPPLGIAPKGALHVPXILFKTPGFFPQGGGFGVFFPRPMILCRKPPSKGEQNSG

SEQ ID NO: 256340 - protein, 77 aa, Glycine max
  unsure (1)..(77): unsure at all Xaa locations
  Clone ID: PAT_MRT3847_7349C.1.pep
TTTFSKSKKISLALSCCMESKLYEVLIYIMIGKLQTPMFKLLFGCYQRMNLIFLYTPRDLVSSVNLFXXAWELINFG

SEQ ID NO: 256341 - protein, 66 aa, Glycine max
  Clone ID: PAT_MRT3847_734C.1.pep
STLAYHILKTVYLLYNIVEPWLDLIDAHSIVKPHYLILIYQTIYHKVLICYLLKPITKYDYDYNYK

SEQ ID NO: 256342 - protein, 71 aa, Glycine max
  Clone ID: PAT_MRT3847_73500C.1.pep
LNTTELDGLHALYCLINPTTHLHDKCCAIIRQANLQCLSSYQSILPSSGNNPKRCFGLAVLSVCLLLPPNW

SEQ ID NO: 256343 - protein, 113 aa, Glycine max
  Clone ID: PAT_MRT3847_73501C.1.pep
QGVVASGIAFAVQIWCIDRGGPVFVAVYQPVQTFVVAIMASIALGEEFYLGGIIGAVLIVAGLYLVLWGKSEERKFAREQLAIASTEHSIIRPASHAKASLAQPLLSSSTENV

SEQ ID NO: 256344 - protein, 59 aa, Glycine max
  Clone ID: PAT_MRT3847_73502C.1.pep
HRRLLESHCGRYNLRCTLGSCCGRYYCIDKRGVCGSGGEPLDMNARLTQRAQAEALSFW

SEQ ID NO: 256345 - protein, 171 aa, Glycine max
  unsure (1)..(171): unsure at all Xaa locations
  Clone ID: PAT_MRT3847_73503C.1.pep
NSSVSGFYNXLTQGLNELHQSFLSHSSFMSFQFLSQVISSLQSFHSQLTILVRKLWLPVGGKWLDEYMDESSRLWDACHVLKSAISGMENYYLAASNIASSLDAYHYFTPQLSRQVHIFFYRQILMVSFLVFLLTKRIKPTIFLSFSSFLIIRLILYTCFFYITVYHSDFI

SEQ ID NO: 256346 - protein, 100 aa, Glycine max
  Clone ID: PAT_MRT3847_73504C.1.pep
ALSLGQVHIFMMAVLNRIQNNHSQDHLTLATYACLYTTNLPQFDSLLEANFAYTVIIHHSHPIYCCSTFLYKREVGVLRCAFYTGIVLSIITRLVWNWIT

SEQ ID NO: 256347 - protein, 67 aa, Glycine max
  Clone ID: PAT_MRT3847_73505C.1.pep
VFFFFFFFITTYIPSSLLICLSFSLKYSSLTEKMMQTYAWTCGRVHAAKLRSVGERGANPRLLLERN

SEQ ID NO: 256348 - protein, 31 aa, Glycine max
  Clone ID: PAT_MRT3847_73506C.1.pep
KIGYICTADLPFKRPSMQQIVGLLKDIEPTG

SEQ ID NO: 256349 - protein, 243 aa, Glycine max
  unsure (1)..(243): unsure at all Xaa locations
  Clone ID: PAT_MRT3847_73507C.1.pep
MEAILVDCVQKSLRHFMHSNAVFLCQRLCAEFPTETNLQLLAKCYLQNNQAYCTYHILKGAQMAQSRYLFAISCFQMGLLSEAEAALCPANEPSVEVPNGAAGHYLLGLIYRYTDRRKSAIHNFKQALSMDPLMWAAYEELCILGAAEDATAVFGEAAALCIQKQYLHCSTSSKLHSSAEDCNIVDTRHSASEDTSPRQLKLMQSMKDISWNHHGPSILGGTAQPINRXLSNISFYTTPSPMA

SEQ ID NO: 256350 - protein, 48 aa, Glycine max
  Clone ID: PAT_MRT3847_73508C.1.pep
SSNYVKLMRLFKGEPVWTAYNRPQEDNPARKEYIKGLTEKFGVPLATH

SEQ ID NO: 256351 - protein, 201 aa, Glycine max
  Clone ID: PAT_MRT3847_73509C.1.pep
MIERTSQSKKGVSFMAIEAWLMDDSNEDPRLSHRRNPNKSVSLDQLAEFGVLYWKLNPTIYENDEELAKIREDRGYNYMDLLDLCPEKVENYEQKLKNFYTEHIHQDEEIRYCLEGSGYFDVRDKDDRWIRILIKAGDLIILPAGIYHRFTLDPSNYVKLMRLFKGEPVWTAYNRPQEDNPARKEYIKGLTEKFGVPLAAH

SEQ ID NO: 256352 - protein, 74 aa, Glycine max
  Clone ID: PAT_MRT3847_7350C.1.pep
KFNFSSTKEQFKGHNDPFHRVMLHKKTNSMRRDRKTPILFVVPEICLGEGKRVKSPLNALNGSIQVCNMNKREK

SEQ ID NO: 256353 - protein, 45 aa, Glycine max
  Clone ID: PAT_MRT3847_73510C.1.pep
FNGCVLFVYLSFSITRQCLLSFALKHNIAFCFVLKKKKKKKKKGA

SEQ ID NO: 256354 - protein, 133 aa, Glycine max
  unsure (1)..(133): unsure at all Xaa locations
  Clone ID: PAT_MRT3847_73511C.1.pep
PGRRTRTLRATADAAGKLTLNAGRTICEPTAAAMAYELDTKATASGATNALILDLRGGTFDVSVLTIEEGICEVNATAGDTHXGRRRFLTTGMANHFDHEFKMKNSKDIRGNARSLRTSRTAXERSNTTLSST

SEQ ID NO: 256355 - protein, 71 aa, Glycine max
  Clone ID: PAT_MRT3847_73512C.1.pep
SPPWGGTKAPKTLWFKTKALRPPFYLRTKALANPPPPLEKPSGKNKTLGLEKPPQKRGKKNNRPNWFILPP

SEQ ID NO: 256356 - protein, 313 aa, Glycine max
  unsure (1)..(313): unsure at all Xaa locations
  Clone ID: PAT_MRT3847_73513C.1.pep
MQDGSASHFFHRAINDYNTGTRKRRKILGQDFGDVRWHKTGRTKPVVFNGIQKGCKKIMVLYVSNVRGGRAEKTNWVMHQYHLGTNEDVXEGEYIISIIFYKXAVXVKLGDKYDEDVPEASEINVLTIVKVDPVTPKFVTPETPCNERWCADLDLGQETHNSPQLPQMDCLDEIQADYQDLANESSMVETQHNEGMDDKEKNTEEGQKWWDSESQNLLDSQQLVEALSLCDDLLQSQSPSRDGKHEDHKNQPGLSVYAQLGPENLKKDIEECQNLALDKANIENDTPSEFRLSQLEFGSQDSFISWGYGKAVN

SEQ ID NO: 256357 - protein, 97 aa, Glycine max
  Clone ID: PAT_MRT3847_73514C.1.pep
DAVIALEHHNLVQQKCSLVTTNSATTYHHQHQQHQHHQAAPPTQTTAFADGGLLPNADGSHILYPHCEAGARITQLEPAKPKRGRPRKYGTPEQALA

SEQ ID NO: 256358 - protein, 67 aa, Glycine max
  Clone ID: PAT_MRT3847_73515C.1.pep
SDTMNSIQSTSLCKLIYRQIYQDASQSMTLMKKRRERRPAYMGRRSEREGGKRRSSKLQFFLIFYRL

SEQ ID NO: 256359 - protein, 49 aa, Glycine max
  Clone ID: PAT_MRT3847_73516C.1.pep
TNDTIGAFSQPYVHLGKMIALYTNKGGLYTYIDRPSLSLSELGHNQTLT

SEQ ID NO: 256360 - protein, 39 aa, Glycine max
  Clone ID: PAT_MRT3847_73517C.1.pep
PRVRIISHSFDIVLLSDEGLLISLFHCIACVSCYTNKVI

SEQ ID NO: 256361 - protein, 68 aa, Glycine max
  Clone ID: PAT_MRT3847_73518C.1.pep
RTHALISFAFLIILINLGVVKLKGPKYFTIIHSITLTLSINHFILQIIHYTCLKTLYLTHMPITFLKI

SEQ ID NO: 256362 - protein, 81 aa, Glycine max
  unsure (1)..(81): unsure at all Xaa locations
  Clone ID: PAT_MRT3847_73519C.1.pep
RNFLHLTIFKPYQSNQSRFSSMNTGSSTFLAQICTSFISNSGSPXXPVTNRNNXXLTRLVXQXESTXXYXGXXPLLLXTXS

SEQ ID NO: 256363 - protein, 95 aa, Glycine max
  Clone ID: PAT_MRT3847_7351C.1.pep
MMKKKVQWFWTWVLGSVVLRLILLFFPKNLNLSSRPEVSTPLTSLRRLAEGYWLKQSSLSPYAGSMYHGSPLLLTLLGPLTVRRIEGQPDHLLCR

SEQ ID NO: 256364 - protein, 78 aa, Glycine max
  Clone ID: PAT_MRT3847_73520C.1.pep
MSSSNLTGFVLAVLSSAFIGSSFIIKKKGLQLASANGPRASVGGYGYLLQPLWWVGMITMIVGEIANFVAYIYAPAVL

SEQ ID NO: 256365 - protein, 58 aa, Glycine max
  Clone ID: PAT_MRT3847_73521C.1.pep
KLAIAARAPFPKRYLKYLTKKSLKKQQLRDWLRVIATNKTSTELRYYKIPEANEEDEE

SEQ ID NO: 256366 - protein, 379 aa, Glycine max
  unsure (1)..(379): unsure at all Xaa locations
  Clone ID: PAT_MRT3847_73522C.1.pep
GIPGSTTRPLSHNHLSIDTNFADVGLISSIPNMKIVELASCNLTEFPSFLRNQSKITTLDLSSNNIQGSIPTWIWQLNSLVQLNLSHNLLSNLEGPVQNPSSNLRLLDLHDNHLQGKLQIFPVHASYLDYSSNNFSFTIPSDIGNFLSSTIFLSLSKNNLSGNIPQSLCSSSSMLVLDFSYNHLNGKIPECLTQSERLVVLDLQHNKFYGSIPDKFPVSCVLRTLDLNSNLLWGSIPKSLANCTSLEVLDLGNNQVDDGFPCFLKTISTLRVMVLRGNKFHGXVGCPYSNSTWYMLQIVDLSVNNFSGVLPKNCFKTWKAMMLDEDDDGSKFNHIASQVLKFXGIYYQXSVTLTSKGLQXEFGNILTGFTSVDFLSNNF

SEQ ID NO: 256367 - protein, 48 aa, Glycine max
  Clone ID: PAT_MRT3847_73523C.1.pep
VLPGRRPRCRNPLTVRSRSSCRCRHSSRIHVQIVRKERYQSGFPGPLG

SEQ ID NO: 256368 - protein, 146 aa, Glycine max
  Clone ID: PAT_MRT3847_73524C.1.pep
VIPTFGRSCWELRKHSLPISNGLEQVQVFAYALLEGQVCPCLKSVRKYMSAPPESIMKREAFGQKRVGNLLSKLKSRLIDSSAMLRMVWKENPRELFSEILDWFQQSFHKHFEELWLQMLNEVLMEKQESPLHKSSKKKKGKYKPL

SEQ ID NO: 256369 - protein, 110 aa, Glycine max
  Clone ID: PAT_MRT3847_73525C.1.pep
PFGLSRGGAPRGNREDGDPGYPAAGFHLSPLFYFSRGPCKKGGNPRGIFCPGLLPPPVFSGFWGFWLRPEGFIALVSFLRGPEKCPSFLLVPLSFCRLFLGPLLSFGGPA

SEQ ID NO: 256370 - protein, 145 aa, Glycine max
  unsure (1)..(145): unsure at all Xaa locations
  Clone ID: PAT_MRT3847_73526C.1.pep
GGCFLLGXFRPRGFGPLFLLLALGAWLLWXPALPCXXLVSPPVGVFALLGGVRGSXXAFSGALFCSFXXFAPSVCLLLXSPFVKKKNFFFPPAPDLPFFLSSDAPVPPDLFLEYFFLAAFFGPFCGHAEKKKKKKKKKKKKKGKT

SEQ ID NO: 256371 - protein, 132 aa, Glycine max
  Clone ID: PAT_MRT3847_73527C.1.pep
EAANMMKKIGLLEAAKRKFLGEGLGACSIEELQWIEQQLERSLSNVRTRKIQVFKEQIEQLKEKEKVLLDENVKLTENGRLSEKHGINLQTETKKQNVNQPQYNAGSPSSDVETELIIGLPDTRTRRIVHQV

SEQ ID NO: 256372 - protein, 95 aa, Glycine max
  Clone ID: PAT_MRT3847_73528C.1.pep
ITGAPGVKAISPFFQRGFFFIQGNRAKRALKTPTKGGPGNRALKGPIAGGGSQKNAPWGPKGSKGLGTFFPQVFFFKKIGRKGGLTRGFKGFLGK

SEQ ID NO: 256373 - protein, 44 aa, Glycine max
  Clone ID: PAT_MRT3847_73529C.1.pep
SSGSGFLKHRCCLNTPRLMGGFAGGQRVFGVTGRGVNGFAGVSA

SEQ ID NO: 256374 - protein, 87 aa, Glycine max
  Clone ID: PAT_MRT3847_7352C.1.pep
MYLRIYGCQNHNGTRLMRDRQTHELVADKDIGLSHNSAEDVDRELITHRSLTHPNMITLDEETSTATHLAIENEDASWWRTIERKSL

SEQ ID NO: 256375 - protein, 112 aa, Glycine max
  Clone ID: PAT_MRT3847_73530C.1.pep
MASVSGNIKGFYRQKKTTATKKSSKKSPIPAAAQSPALISHGGKPDLEDEYKESEVALRQFDLNMAYGPCLGMTRLARWERAQRLGLNPPQEIDRLLKSGKVQTESLWDGRI

SEQ ID NO: 256376 - protein, 91 aa, Glycine max
  unsure (1)..(91): unsure at all Xaa locations
  Clone ID: PAT_MRT3847_73531C.1.pep
MFPFRQNGQGIKTTMVVIHNNXFNINSITNFGCIVHXSLCFICNSIHALTFSTTKISIQLINSTKAYFCKLKILNISNLIRKITLPTFLPC

SEQ ID NO: 256377 - protein, 69 aa, Glycine max
  unsure (1)..(69): unsure at all Xaa locations
  Clone ID: PAT_MRT3847_73532C.1.pep
XAGDVKASGKFRGFGGVSXGTISNVXXSKFLQIQQXGLSXPLLPLLXAPLILQXAFLXLXYXSXXCXXG

SEQ ID NO: 256378 - protein, 102 aa, Glycine max
  unsure (1)..(102): unsure at all Xaa locations
  Clone ID: PAT_MRT3847_73533C.1.pep
SSRHESHLATFRYWDTKQSCPVQTQLLAXRCYAMTVRHPLMAVGTADRYHTVYNLQKPQVDFKRNVSPLKYQIKCHAAFPEQQSFMARFIACTVGVDHLGHS

SEQ ID NO: 256379 - protein, 122 aa, Glycine max
  Clone ID: PAT_MRT3847_73534C.1.pep
IVAAIIDAVFDRDLETIGLVAAEYRLSVGASGIGLGLARALVSTGKVKSNAAGGESGAAVGGPAACLAGSCSQATLKQIASAEQVMPVFHLDPDRILTGADEAQRALDWARPRLAEGPVLIA

SEQ ID NO: 256380 - protein, 44 aa, Glycine max
  Clone ID: PAT_MRT3847_73535C.1.pep
NKYYPTLTLFFSSELPTTGCFLKKDYLQLPLSLPTIYITYYNHK

SEQ ID NO: 256381 - protein, 49 aa, Glycine max
  Clone ID: PAT_MRT3847_73536C.1.pep
MHSGTGLQNSSNCTKNNKVEKIEILQKYFILWSQEWEFKFNFAITDRNL

SEQ ID NO: 256382 - protein, 78 aa, Glycine max
  Clone ID: PAT_MRT3847_73537C.1.pep
VMRKLASRFLHRLSMDKSESEPFRKEVLFIVLAPFHGCPVSTIGPLQKTIANFVSLVLYPPRSVFNPPLLMQFVRRCD

SEQ ID NO: 256383 - protein, 43 aa, Glycine max
  Clone ID: PAT_MRT3847_73538C.1.pep
AFLILLVVPNDPRNDNDGYEVSRRRASYCHTKIKAVAARSRLI

SEQ ID NO: 256384 - protein, 68 aa, Glycine max
  Clone ID: PAT_MRT3847_73539C.1.pep
SPMRTVRRVGTSRVYSVSLPQQIPSHSAVALDNRGSIQCFGLMRGNLLRQGYRIVERGEGTTQCSTWD

SEQ ID NO: 256385 - protein, 77 aa, Glycine max
  Clone ID: PAT_MRT3847_7353C.1.pep
MSKVTILFFTVLFLCCMITHSTRPEPALYKESLVSTHPQDVEEVDESCEGFKEEECLMRRTLTAHIDYIYTQKHNNP

SEQ ID NO: 256386 - protein, 64 aa, Glycine max
  Clone ID: PAT_MRT3847_73540C.1.pep
ARIWLKGFVERQPNDLTSALGVRSERKHAERASACPAKGTMRGQKNENISKHEVKSQEENPQKT

SEQ ID NO: 256387 - protein, 122 aa, Glycine max
  Clone ID: PAT_MRT3847_73541C.1.pep
PRVRKGAQIFEALGLSSEVIERCFAGTPSRVEGATFEMLARDALKLHELAFPSRVFSAGSAEANALPNPGDYHWRKGGEIHLNDPLAISKLQEAARTNSIDAYEQYSKLIHELNKACNLRGL

SEQ ID NO: 256388 - protein, 21 aa, Glycine max
  Clone ID: PAT_MRT3847_73542C.1.pep
SFNIIKNMPYVLWCGHTLFKN

SEQ ID NO: 256389 - protein, 62 aa, Glycine max
  unsure (1)..(62): unsure at all Xaa locations
  Clone ID: PAT_MRT3847_73543C.1.pep
GKEGRSGRNDVEFVLGYKRCGIVGGGRLIVDDWGMMRKVGQSGGGGGGCGGCAMKMIKWCYX

SEQ ID NO: 256390 - protein, 56 aa, Glycine max
  Clone ID: PAT_MRT3847_73544C.1.pep
LKYVFHFKKNFSQKKIKIVNFVFNTKIVTIAPQKQWGFLLTVSFRYSNCYDDPDKI

SEQ ID NO: 256391 - protein, 37 aa, Glycine max
  Clone ID: PAT_MRT3847_73545C.1.pep
NLLKMVFQTDTSQKFRWKNCRYQSWPQKPEHTLTIKP

SEQ ID NO: 256392 - protein, 39 aa, Glycine max
  Clone ID: PAT_MRT3847_73546C.1.pep
DPNAVLGFFQNRKLNYSKFQLCFFNPGGHIVRSDVAFYD

SEQ ID NO: 256393 - protein, 41 aa, Glycine max
  Clone ID: PAT_MRT3847_73547C.1.pep
EVLREVVNLKYWGKYEEWVYGMYIKHPRMRLWKYIDKRLGG

SEQ ID NO: 256394 - protein, 89 aa, Glycine max
  Clone ID: PAT_MRT3847_73548C.1.pep
MATSVNKIGHWKRKELWFLVIYAILFYVIIINRSLQLSRDYYKQLHGLRPGWLIAHYLNDVSDAQWRNLRGNIPVLTLGLAIFTLLANS

SEQ ID NO: 256395 - protein, 134 aa, Glycine max
  Clone ID: PAT_MRT3847_73549C.1.pep
AILLENVEVHFAFKKKTEILAKARNLLLECDFSTPQEYTRDGSIWKSDETSAQSSNHVVDLLFLSQRCLVSKAAKQLMELVHQTLQDVCLSSTRVAFEFYHTARDAVLLYEVVVPATPNITDSRKYRFEAVSSC

SEQ ID NO: 256396 - protein, 63 aa, Glycine max
  Clone ID: PAT_MRT3847_7354C.1.pep
MEVLKVQVFVMSIVALALAYVAPSINAQVLPPAPAPTSDGIAVDQGIAYVLMLLALVLTYIIH

SEQ ID NO: 256397 - protein, 64 aa, Glycine max
  Clone ID: PAT_MRT3847_73550C.1.pep
AAWGCLSLSTSLRNPRKKAMPTTKTMGKMRAAMLLFLVHCQILLCPSPGGDKSPMKINMRHRGP

SEQ ID NO: 256398 - protein, 599 aa, Glycine max
  unsure (1)..(599): unsure at all Xaa locations
  Clone ID: PAT_MRT3847_73551C.1.pep
LLRKEWSQCFEERNSIWVCXIQEVLVNFMEKAVRFDGDLNQVEIKYHLEVENVNGIQLQTVLEAMDVVGILEYGLAKVADLMIKYVITPFVNHGRPLSFLEELHQELALLKIVPSPDSKFEYLDGEFLYSGILLFIKFIYRSICFQKSSWMRCFGRLTWPRISELIISSFLSKVVPTDASKLPDFQKIIACTSKFEMALKELMYISESDDKDNRLSNFAENVEVHFAFKKKTEILAKARNLLLECDFSIPQEYTRDGSVWKSDETSAQLSSHVVDLLFLSERFLVFKAAKQLMELVHQTLQLINANENLPXDVCLSSTRVAFEFYHTARDAVLLYEVVVPVKLERQLNGINQVAILLHNDCLYLSQEILGFAFEYRTDFPSSMKEHAVFVDLAPRFQLLAEEILQRQVHLVIYNLKEAIDGADGFQNTHQMKQFESAKFSIDQVVFILEKVHIIWEPLLLPSTYRRSMCTVLESFFSTIARDILLLDDIAAEETLQLQRLIYLMLENLSSLFESLAPGEQNLHEFPAESLEDLIPSLHKIRKLSELLDMPLKSITAYWENKELLSCGFTITEVEDFIKAIFTDSPLRKDCLWRIQNASI

SEQ ID NO: 256399 - protein, 65 aa, Glycine max
  Clone ID: PAT_MRT3847_73552C.1.pep
WIWLLDLWCYPFRKTELFNQDKSFPLFLRRIFCRYFALNICASLSVNMSRSVSGSIHSCMMSRCC

SEQ ID NO: 256400 - protein, 50 aa, Glycine max
  Clone ID: PAT_MRT3847_73553C.1.pep
VKLDLDSLPLTSCPSQMVGSGLTEYVMHIAVEYNNVLTQLKLRWKLSPTY

SEQ ID NO: 256401 - protein, 64 aa, Glycine max
  Clone ID: PAT_MRT3847_73554C.1.pep
MLCSNELSCSTDCHKKKKKKKKKKPKKKKKKKKKKKKKKKKKKKKKKKKKKKKKKKKKKKGAPF

SEQ ID NO: 256402 - protein, 75 aa, Glycine max
  Clone ID: PAT_MRT3847_73555C.1.pep
SCWIHFCGFSLRPFVWFESLIGSVLKSWALVHFLANHSFASCVFYYFFFILLIFFIGFFGISCWVFGLLGCWGLT

SEQ ID NO: 256403 - protein, 74 aa, Glycine max
  Clone ID: PAT_MRT3847_73556C.1.pep
KINIFQQNHHQIKTNKIFIASEQAKNDPRPNQGPSQNSHLFHKQKGATSNPPNYAHTYLNLVVYKTERKISDPV

SEQ ID NO: 256404 - protein, 69 aa, Glycine max
  Clone ID: PAT_MRT3847_73557C.1.pep
FIFKSIQTADTEPGLFKACMLLRFGLGSFVFPVAGVCLICVYCFLWTLKASCFDSFPVFCNFSFSVFQC

SEQ ID NO: 256405 - protein, 69 aa, Glycine max
  Clone ID: PAT_MRT3847_73558C.1.pep
LEDLVKWVRKGFDQESPLSEMVDPSLLQEVRVKKEVLAVFHVALSCTEGDPEARPRMKTVSENLDKIGT

SEQ ID NO: 256406 - protein, 108 aa, Glycine max
  Clone ID: PAT_MRT3847_73559C.1.pep
ARISVMGGAQAAGVLAQIEKGNKKRQGIQWSKEEEDKFKGKVVEAYEREASPYYSTARLWDDGIIDPADTRKVIGLCISASLNRAILNTPYFRINTIAVAGEEIRRRR

SEQ ID NO: 256407 - protein, 148 aa, Glycine max
  unsure (1)..(148): unsure at all Xaa locations
  Clone ID: PAT_MRT3847_7355C.1.pep
FSPVDHVPVGTGTVRXKEDIKLYQGGIRERVKPKINGGKVIKVEAHPIPEHPRPVRVRGRVALVGDAAGYVTKCSGEGIYFAAKSGRVCGNGVVRASEGGDRMIDECDLRREYLKPWDAEYANTFRFLDLLQRVFYGSNACREALVEL

SEQ ID NO: 256408 - protein, 145 aa, Glycine max
  unsure (1)..(145): unsure at all Xaa locations
  Clone ID: PAT_MRT3847_73560C.1.pep
KVLQMECNFKEQLKEIHDALDSVIIELDETICERNEKEFELQIWKSIVERLKNDLEENHVLRRXLITSLLAQVDFGEILKQEKVSLVYKLEEKERSLDYLQRHVELLERELRERGESEVSSESDNVRYLQIIAEKDKILEELQKE

SEQ ID NO: 256409 - protein, 44 aa, Glycine max
  Clone ID: PAT_MRT3847_73561C.1.pep
SQGVSRHYQLGLILMRFKKFKRMRKDWAKSENETNSKGVKDMCQ

SEQ ID NO: 256410 - protein, 52 aa, Glycine max
  Clone ID: PAT_MRT3847_73562C.1.pep
KKILGFRFLYMSSIIILKWKLTVSNYNYYAVLIIKSRMITTYSSSMSPKSYF

SEQ ID NO: 256411 - protein, 299 aa, Glycine max
  Clone ID: PAT_MRT3847_73563C.1.pep
MRIKGEEKKSICSYKKITLLICLFNIVVALYSLRSLYASLHIYSGSVARNIVVYRPDQIRKMEESNRIRKAYKPVELMKLVKEFEGEFSGETVVVELPRHLKQKIIDEVLQRLGSLNGSSKNISHSQVMAKEREAIENWRKEKLEEGKLAVVQGTSNSTIPHEEAGMLVRALESDWAVLSEEIGLWIPIEVANEEHNDKPEGASEIEEEVLPGRPLPPECNPELHTDYDGTAVRWGLTHHKDSAADCCQACLDQAKRAKEGENKCNIWVYCPSQFGCHSPDIYQPKHQECWLKYVRCPP

SEQ ID NO: 256412 - protein, 71 aa, Glycine max
  Clone ID: PAT_MRT3847_73564C.1.pep
ESNYELGIIIKFKLINISLILTQPLDENKLVLTRVEVKLSSLCRMESSSIIKTEDVKPCPQICFATHVMTK

SEQ ID NO: 256413 - protein, 247 aa, Glycine max
  Clone ID: PAT_MRT3847_73565C.1.pep
VKTLAKIRHKNVVKILGFCHSDESVFLIYEYLHGGSLEDLISSPNFQLQWGIRLRIAIGVAQGLAYLHKDYVPHLLHRNVKSSNILLDANFEPKLTDFALDRVVGEAAFQSVLNSEAASSCYIAPENGYTKKATEQLDVYSFGVVLLELVSGRQAEQTESNDSLDIVKWVRRKVNITNGVQQVLDPKISHTCHQEMIGALDIALHCTSVVPEKRPSMVEVLRGLHSLESRTCIANLHEPNEEPSIPV

SEQ ID NO: 256414 - protein, 69 aa, Glycine max
  unsure (1)..(69): unsure at all Xaa locations
  Clone ID: PAT_MRT3847_73566C.1.pep
DELKVGLGVDKDXNGLVSRMELKXKVDHSFNDENINSRSLELKDKVMKNITNGGRSLENLNRLVNWLKE

SEQ ID NO: 256415 - protein, 52 aa, Glycine max
  Clone ID: PAT_MRT3847_73567C.1.pep
NIQTYTPSTSLTARSARPQSDACDIHLKHTTMQLLLRPHGRRSLPHLSQLKA

SEQ ID NO: 256416 - protein, 232 aa, Glycine max
  Clone ID: PAT_MRT3847_73568C.1.pep
MDLDDFRSVLDTAGVDVWMFIDAAIAVASADSAGELKRRRDGIVERLYAATAATPKCRICDDGGNDLNGHQIKKQSSPSPERQPHQRRAAAIAAAASPATPQSLENDNDGEEDLDPYGGLFDDEQKKILEIKEQLEEPDQSEDSLVELLQSLADMDITFQALKETDIGRHVNRLRKHPSNDVRRLVKLLVRKWKEIVDEWVKLNPQGRSNTLMADGDSPPVQKTTQNGHHHQ

SEQ ID NO: 256417 - protein, 100 aa, Glycine max
  Clone ID: PAT_MRT3847_73569C.1.pep
IKTTRKKKRFMEKNSTGMMNRVWDLTYIRTPPTRLFYTQNGTNNGKTCIIIIVITITSAFPENHHHHHHLCSSQRRHYSWVLTSVTHGCPSPESFFAFWL

SEQ ID NO: 256418 - protein, 236 aa, Glycine max
  Clone ID: PAT_MRT3847_7356C.1.pep
RRNRGRSQMLSTMTKKQKKHLRDFGEEHPFYDRVSKKEAKPQICQLPESSDSSHSESESESEQEHVSGYHRLLATLKNVSEEEEEEEEEEEEEEEEEEEEEDDSAVGDAEMNEEAGSEDGSVGEAAVSEAAEEAAETQEHMSLADNSKEKDGEEPPGVSQKSSEEFTDVKHESLFSLETNFLEEDSGGSCSQRPSQDPFQQHVNKELKEKEIQAAASSPPATQQLKWPVLGHLVFS

SEQ ID NO: 256419 - protein, 356 aa, Glycine max
  unsure (1)..(356): unsure at all Xaa locations
  Clone ID: PAT_MRT3847_73570C.1.pep
MDLDDFRSILDTAGVDVWMFIDAAIAVASSDSAGDLKRRRDGIVERLYAATAAPPWCRNCDEGGHRLNGHRIKKQSRHSPSPERQPHRSTATASPATPAVSXNGEDEDNDEDLDPYGGLLDDEQKKILEIKEQLEEPDQSEDSLVELLQSLADMDITFQGLKETDIGRHVNRLRKHPLNDLRRLVKLLVRKWKEIVDEWVKLNPRGGSNTLMADGDSSPVQKTTQNGHHQQIPDFAYSPNPHNGSSGSDRNNSEAERKPKVVPRSEPRPKHAPSPSVSTPASATQNRQRESSFDAERLASARRRLQENYKEAEIAKRQRTIQVMDIHDLPKSKPKNNAFFGKNKGGGGGGSQGRHW

SEQ ID NO: 256420 - protein, 46 aa, Glycine max
  Clone ID: PAT_MRT3847_73571C.1.pep
SESAAVVFSLNDDIFILTVEGARPSTYMYFSTSGTLLSIYKYISLL

SEQ ID NO: 256421 - protein, 39 aa, Glycine max
  Clone ID: PAT_MRT3847_73572C.1.pep
TEVHFYDPNAQLIEPDAKKTRPDFYISERGHETDRSFRL

SEQ ID NO: 256422 - protein, 51 aa, Glycine max
  Clone ID: PAT_MRT3847_73573C.1.pep
YFESQSLYFPFIFFIWEVLCSRVITYNLCREKYDLKVKKETQITMQYLLTQ

SEQ ID NO: 256423 - protein, 183 aa, Glycine max
  Clone ID: PAT_MRT3847_73574C.1.pep
MVMGQQKIALAPPSSSFRLRSRSLNSLRLRRIFDMFDKNGDGTITVTEISQALSLLGLDADVAELESMTKLYIRPGNEGLTYEDFMALHESLGETYFGLVQDEEEQQQDSDLWEAFKVFDENGDGYISAKELQMVLGKLGLVEGNLMDNVHRMIGSVDTNHDGRVDFDEFKEMMRATIVPASA

SEQ ID NO: 256424 - protein, 133 aa, Glycine max
  unsure (1)..(133): unsure at all Xaa locations
  Clone ID: PAT_MRT3847_73575C.1.pep
SRSRGAVWREGRIKLLLKSLQEELLTAWSTXVRPATTXLLADGCPYLYGMAHDSSVDTIPGDFVXGVKMATINNFCAYVFITGIFRILSFGXTIPYAISLXTVWNTIATGSTPLYLCFYSSRCFLSISLLDLS

SEQ ID NO: 256425 - protein, 90 aa, Glycine max
  Clone ID: PAT_MRT3847_73576C.1.pep
RVPTQDNDTVFWEPTIGSSIGDYRDVDGVLIAHQGRSIATVFRFGELSMQHSRTRMEEIWTIDDVMFNVPGLSMDHFIPPADIFDNINSP

SEQ ID NO: 256426 - protein, 89 aa, Glycine max
  Clone ID: PAT_MRT3847_73577C.1.pep
FGSSDRRHPISPSSIHIKMSLAASRAVLRQSTFAVRRAGIRNASTTAEATNTVKETASKAQSKASEGLTKVTSSASSAASGAGQAVNNA

SEQ ID NO: 256427 - protein, 110 aa, Glycine max
  Clone ID: PAT_MRT3847_73578C.1.pep
RVLLPLALGPECFFPLLFWSTFFFLQSCFLFSLQRKQFHPCGLFFALFFLYSHLKLFFGGVFIFSPHFCFFGFWVKSFPNFIEALYACYISHTYNYEVLSMQNTLCSSCN

SEQ ID NO: 256428 - protein, 88 aa, Glycine max
  unsure (1)..(88): unsure at all Xaa locations
  Clone ID: PAT_MRT3847_73579C.1.pep
KRHRPFWTLLRAKEESMSRRFRQKQPVLKKTPCHNKELXARTMHFRVKAQLWQRRAKVQEPTSAAIQEQMQQGIMLRDGENGRGEGLL

SEQ ID NO: 256429 - protein, 56 aa, Glycine max
  Clone ID: PAT_MRT3847_7357C.1.pep
VTFQFELIHFHFFRKSCNYFLRKKVSKLKKSRETIIPGNGLGKCKEILLGDNCPPY

SEQ ID NO: 256430 - protein, 37 aa, Glycine max
  Clone ID: PAT_MRT3847_73580C.1.pep
FMFGKRREDIQRLLEPICRSGTYLQQRNQKNALDIIY

SEQ ID NO: 256431 - protein, 70 aa, Glycine max
  Clone ID: PAT_MRT3847_73581C.1.pep
QKKTFISAHCSTRSIMIIFKIQAAILESIFQNNHKYRKENAVLIMWNNSWIDINTTTCSQLIGIIVGLTF

SEQ ID NO: 256432 - protein, 53 aa, Glycine max
  unsure (1)..(53): unsure at all Xaa locations
  Clone ID: PAT_MRT3847_73582C.1.pep
KFSTGSTELFFGLLNILNAFSLPQVLLEXLKXXPLPRLYWGXSHNSFNEHVLS

SEQ ID NO: 256433 - protein, 32 aa, Glycine max
  Clone ID: PAT_MRT3847_73583C.1.pep
IHVRSLANFIEKRASQAPAPLGKPPDNSPFLT

SEQ ID NO: 256434 - protein, 50 aa, Glycine max
  Clone ID: PAT_MRT3847_73584C.1.pep
SGTKLKDFLATIESSSTFQSEIAKLRLDVEEYAKQFPTIGFDKATMKHKN

SEQ ID NO: 256435 - protein, 111 aa, Glycine max
  Clone ID: PAT_MRT3847_73585C.1.pep
KKKKKKRKKKKKKKKKKKKKKKKKKKKKKKKKKKKKGGAVLGVPTFLPRACAVFLFFWGPLISFPGPGFSTGMGKPRGFPNLFPLGPFPFSPVGFLGKGPPPFPFPNICPP

SEQ ID NO: 256436 - protein, 107 aa, Glycine max
  unsure (1)..(107): unsure at all Xaa locations
  Clone ID: PAT_MRT3847_73586C.1.pep
FCVVHRQPINMSEGNYDALLDGSIEYEVCTISNDCGSLGVGQDGSHKQIVGVHVAGSKXGRLRYASLIPYVEPVVQAQRAEVYFDLFPVEVDSQEGGVYMGELKSGA

SEQ ID NO: 256437 - protein, 51 aa, Glycine max
  unsure (1)..(51): unsure at all Xaa locations
  Clone ID: PAT_MRT3847_73587C.1.pep
XXPXRXRXLXNSAXXHPLAXXXRLVXFXRHGQLIXXXVTCQXYPXFPLIVS

SEQ ID NO: 256438 - protein, 71 aa, Glycine max
  Clone ID: PAT_MRT3847_73588C.1.pep
KPKGKPIFKLDLINFFHFAPLSMGISIGVLEGGLVSFCLTSFLINAQPKLKNPGNPVPEGVGIIKGDPKIL

SEQ ID NO: 256439 - protein, 67 aa, Glycine max
  Clone ID: PAT_MRT3847_73589C.1.pep
AVSLALSGPKLIALTNKLKTVVLLGPLFHTARWVSILKRLHYSMWNLYCCGQRHSHFKVTHNVLECP

SEQ ID NO: 256440 - protein, 52 aa, Glycine max
  Clone ID: PAT_MRT3847_7358C.1.pep
LTEYLRMAPTQYYRDHHYSYPPCSYPISLFYDTATYLTLIVRIITSYAERLD

SEQ ID NO: 256441 - protein, 58 aa, Glycine max
  unsure (1)..(58): unsure at all Xaa locations
  Clone ID: PAT_MRT3847_73590C.1.pep
EQWSPALPLFKGLLFIWSLLAGPNPDDPLVPGIAPMFKTGRAQYXAPARSWAPKYALG

SEQ ID NO: 256442 - protein, 77 aa, Glycine max
  Clone ID: PAT_MRT3847_73591C.1.pep
SPLIPPGGDSQGWDCPLQSWICKVGPKLFPFYIKSGAQKGLGFLWLSRNFFVLKKIPPGISGRIFPQFFPPPCTPIV

SEQ ID NO: 256443 - protein, 52 aa, Glycine max
  Clone ID: PAT_MRT3847_73592C.1.pep
FYTLSVARSSPPDIRPVLASYQGCDIPSEFIRRSKEHQRRMQEQKNRGRFWK

SEQ ID NO: 256444 - protein, 76 aa, Glycine max
  Clone ID: PAT_MRT3847_73593C.1.pep
FSASSYSSFLNDPIYPGIRIGHLLNVLGTKVPCLNHLHVTAPAGLPNFSGPFCSYPLITFNCMPFYFGGLRAVLSR

SEQ ID NO: 256445 - protein, 160 aa, Glycine max
  Clone ID: PAT_MRT3847_73594C.1.pep
MSECGCSESDPSCGCWSSSSSRSVASTELKLYRAFIFCVPIFFTLILLFLFYLFYLRPRTRLHWISHFRLPSNNNRNNAISTLGLGLNKELREMLPIIVYKESFFVKDTQCSVCLLDYQAEDRLEQIPAWGHTFYMSCIDSWLATHTTLFFWRFSLLTTC

SEQ ID NO: 256446 - protein, 95 aa, Glycine max
  Clone ID: PAT_MRT3847_73595C.1.pep
FLFTQNSHSPQRLFGNQLGATIENKKRPLTLSKNWTLFFCTNLLKLKSTPLSRRHKSCCSSNKKCPRRMNACPKKSVPNHPGERILPPQICNQEF

SEQ ID NO: 256447 - protein, 49 aa, Glycine max
  Clone ID: PAT_MRT3847_73596C.1.pep
SISRIWHTSFYRALTEGPGLSLASFFLPPVCSYDPPPSLCIRVMLFANL

SEQ ID NO: 256448 - protein, 61 aa, Glycine max
  Clone ID: PAT_MRT3847_73597C.1.pep
CEKDLLKVVDREYTFSYIGDPCRGTYPFIAKLKQVLVGYALANGENEKNTNTSIFQKIATF

SEQ ID NO: 256449 - protein, 53 aa, Glycine max
  Clone ID: PAT_MRT3847_73598C.1.pep
MCYLIDTFPPSKVKYYRFRIDNHFHQHLQAQFLFFNFLFALIIFFVVLSRYLH

SEQ ID NO: 256450 - protein, 298 aa, Glycine max
  unsure (1)..(298): unsure at all Xaa locations
  Clone ID: PAT_MRT3847_73599C.1.pep
MSAYGHQMERMYSTRSLSGGGSELRRSSFVLESGFYITSFVATIFVAALAATGLLLITLLVSLAMMLQSCQSSHAGIIELQNINDEYNYCKLYSLHAKLNNLEGHNFPSLCKDLAMKYIKGGQYARDLDSTKSVIEDYFNSVRPSDDGLDVVLIDIDGIFPPNPHSSNLFKSINNFVLXAKNLKRMLVLRLYMNLQAGGWSIILLSREHGTRQNVTINHLLSAGFRDWSSLMMSEENEESPKGNECFVRQRNVIQKKGFRIISIMSSQMDALTVADKGIRIFLLPDPIFAKFKQQRRA

SEQ ID NO: 256451 - protein, 62 aa, Glycine max
  Clone ID: PAT_MRT3847_7359C.1.pep
FFFFFFFFFFFFFFFFFFFFFFLKKQGGEGTCYKQFFQGITKRTREPLSKFQGRIYGKEKPN

SEQ ID NO: 256452 - protein, 109 aa, Glycine max
  unsure (1)..(109): unsure at all Xaa locations
  Clone ID: PAT_MRT3847_735C.1.pep
RTRGGEVEVAASFNIIPSSTGAAKAVGKVLPALNGKLTGMAFRVPTVDVSVADLTVRLEKEACYYEIKNAFKEESXGKRKGILVYTEHDVEYTLVADSKAINNYGLLMP

SEQ ID NO: 256453 - protein, 55 aa, Glycine max
  Clone ID: PAT_MRT3847_73600C.1.pep
KKPKWRSIRRSKTCALTLMALFSLSSSSSCTQPEVRNLEAPQARTESKLQNPLTS

SEQ ID NO: 256454 - protein, 255 aa, Glycine max
  unsure (1)..(255): unsure at all Xaa locations
  Clone ID: PAT_MRT3847_73601C.1.pep
MMLQSCQSSHAGIIELNMQRINLAIIVLIIYILKLTFFLSGLIFFLKHKSKSKSXKFNLPPGPPGWPIVGNLFQVARSGKPFFEYVNDVRLKYGSIFTLKMGTRTMIILTDSKLVHEAMIQKGATYATRPPENPTRTIFSENKFTVNAATYGPVWKSLRRNMVQNMLSSTRLKEFRSVRDNAMDKLINRLKDEAENNNGAVWVLKDARFAVFCILVAMCFXGLEMDEETVERIDQVMKXSVLITLDPRIDDYLPI

SEQ ID NO: 256455 - protein, 529 aa, Glycine max
  unsure (1)..(529): unsure at all Xaa locations
  Clone ID: PAT_MRT3847_73602C.1.pep
MATLPSCLNLLQFPKMATLSSYDHFIFTALAFFISGLIFFLKQKSKSKKFNLPPGPPGWPIVGNLFQVARSGKPFFEYVNDVRLKYGSIFTLKMGTRTMIILTDAKLVHEAMIQKGATYATRPPENPTRTIFSENKFTVNAATYGPVWKSLRRNMVQNMLSSTRLKEFRSVRDNAMDKLINRLKDEAEKNNGVVWVLKDARFAVFCILVAMCFGLEMDEETVERIDQVMKSVLITLDPRIDDYLPILSPFFSKHRKKAXLFRREQDELLGPIIKQSTEETENTFSYQATILCLYLETFYEATFEGDKKSTAVAELVSLCSEILNGGXRDTTATAVEWGIAQLIANTNVQTKLYEEIKRTVGEKKEDEKDVEKMPYLHAVVKELLRKHPPTHFVLTHAVTEPTTLGGYDIPIDANVEVYTPAIAEDPKNWLNPEKFDPERFISGGEEADITGVTGVKMMPFGVGRRICPGLAMATVHIHLMMARMVQEFEWGAYPPEKKMDFTGKWEFTVVMKESLRATIKPRGGEKVKL

SEQ ID NO: 256456 - protein, 65 aa, Glycine max
  Clone ID: PAT_MRT3847_73603C.1.pep
GSGKRLWITRFPSSVGCFRSFRHVFYQEGVSFLAWIQSKLYVDLIVQSLLGVQDGKFFGLSVNFH

SEQ ID NO: 256457 - protein, 93 aa, Glycine max
  unsure (1)..(93): unsure at all Xaa locations
  Clone ID: PAT_MRT3847_73604C.1.pep
SGELEKKVSGNDVILIATSRIGGPPNKGSAVQRHSTRTLTDAHDAMLDDIALPAEIVGKRVRYIIDGSKXIIKASLYPNERNNTEYTWKTCAA

SEQ ID NO: 256458 - protein, 55 aa, Glycine max
  Clone ID: PAT_MRT3847_73605C.1.pep
GLTTKKFTFFLWDLGGGLITKMGTRSKILIVFGGIEPKKKLGGENWKILSGEETS

SEQ ID NO: 256459 - protein, 107 aa, Glycine max
  unsure (1)..(107): unsure at all Xaa locations
  Clone ID: PAT_MRT3847_73606C.1.pep
FTFYFGRQGPVAPATLYKALXTNTNPPIPKALDSFKSVENVEGNGGPGTIKKITFLEDGETKFVLHKIESIDEANLAYSYSVGGGASLPHTGLKSIRLQLGVCPHGG

SEQ ID NO: 256460 - protein, 96 aa, Glycine max
  Clone ID: PAT_MRT3847_73607C.1.pep
ICGRRSCTTIRAMFPVTVLKNLTCFVYKDAQRPDLPFFHFISFLFNTFFFLIVIILSIFYIEYSQMSVSEVLYKLKMGLGQNLCGTCEKLAFQLLP

SEQ ID NO: 256461 - protein, 86 aa, Glycine max
  unsure (1)..(86): unsure at all Xaa locations
  Clone ID: PAT_MRT3847_73608C.1.pep
IQFLHFPSNLKLDPELCPHWQLRSEVYHQLLFKGLAVNPXPCXGAWPGSAAYLVGGWGTAWXGPWAXXXXXXXXXXXXXXXXXXXX

SEQ ID NO: 256462 - protein, 175 aa, Glycine max
  Clone ID: PAT_MRT3847_73609C.1.pep
TNNFLKMLSRFSKITVRGYAKDLKFGSEGRKAMLSGVDMLADAVAVTMGPKGRNVVIEQSWGSPKITKDGVTVAKAIDFKDKFQNMGAKLVQDVANKTNEEAGDGTTCATVLARAIAKEGFENISKGANPVEVRKGLMNAVDELVKELKAMSKTVTTPREIAQVATIAANGDKTI

SEQ ID NO: 256463 - protein, 126 aa, Glycine max
  unsure (1)..(126): unsure at all Xaa locations
  Clone ID: PAT_MRT3847_7360C.1.pep
MGKGKIGINGFGRIGRLGGRGGLXRDDVELVAVNDPFITTEYMRYMCKYDSGHGAWERHDGTGKGEKTLLFGDKPSTGFGHRDPEKIPWEXTWAGMIGESTGGFTDKGXGAAHLKGGAKKGIISGP

SEQ ID NO: 256464 - protein, 79 aa, Glycine max
  Clone ID: PAT_MRT3847_73610C.1.pep
RVIRPRIGWGRLRTSPSGRWYRIIMMVRSCRQSAKDTEYRGPKVNAQICYQLIDVVQGGRLRRQDVIFAMTGAARERKR

SEQ ID NO: 256465 - protein, 120 aa, Glycine max
  Clone ID: PAT_MRT3847_73611C.1.pep
HEPMFHTQQDVTTFLSVSIMRFIYVHIRPSIAMPYPKLKSFTAIICISSSLFNYNLSPLHIRGSQHSNNHSIAQGSSMSSNFSHSPPKYQVIHSKLIILAPSSIYTALPRLTSGSQSGKL

SEQ ID NO: 256466 - protein, 117 aa, Glycine max
  Clone ID: PAT_MRT3847_73612C.1.pep
HEPMFHTQQDVTTFLSVSIMRFIYVHIRPSIAMPYPKLKSFTAIICISSSLFNYNLSPLHIRGSQHSNNHSIAQGSSMSSNFSHSPPKYQVIHSKLIILAPSSIYTALPSLTSGLYS

SEQ ID NO: 256467 - protein, 59 aa, Glycine max
  Clone ID: PAT_MRT3847_73613C.1.pep
KFNASKSTIPLLKRGRGRKKEMPEGTKNPTQSTYYNLNKKKYLHLITINRGATLSPIKV

SEQ ID NO: 256468 - protein, 75 aa, Glycine max
  unsure (1)..(75): unsure at all Xaa locations
  Clone ID: PAT_MRT3847_73614C.1.pep
AXXKXXRISKGXXGGKXXAXXPFAKKDWYDIKXPSLXQVXXIXRXLVSRTQGXKIXSEXLXHRVFEVSLADLQGD

SEQ ID NO: 256469 - protein, 105 aa, Glycine max
  Clone ID: PAT_MRT3847_73615C.1.pep
YEPMFPTSCCSSIVHIRPSIATPYHKPQSLSLPSFVSAPHCSIITLVPFTGSQHSNSHNIAQGSSMSSNFSHSPPKYHVIYSKLILLAPSSIYTALPSLTSGLYS

SEQ ID NO: 256470 - protein, 141 aa, Glycine max
  unsure (1)..(141): unsure at all Xaa locations
  Clone ID: PAT_MRT3847_73616C.1.pep
MGLCHGKPIETSQSEGGHHAFPGGEKDAVVVSAASPKTATKGSKFPFYSPSPLPSLFKNSPANSSVSSTPLRLFKRPFPPPSPAKHIRALLARRHGSVKPNEASIPXRSECEVGLDKSFGFSSHFQAHFELGPEVGRGHFG

SEQ ID NO: 256471 - protein, 75 aa, Glycine max
  Clone ID: PAT_MRT3847_73617C.1.pep
VWCWPGFLLGSHLIRSFAVFHIYISPDWNTSTWQSCVQRIISMCSPTDVYQQDVSPCVRLLMGIQFPHPPCSKMN

SEQ ID NO: 256472 - protein, 129 aa, Glycine max
  unsure (1)..(129): unsure at all Xaa locations
  Clone ID: PAT_MRT3847_73618C.1.pep
EFPFDYASGFFSRKYPEDXWGPIFVNWLYLSSQLPSEAVVANDTCGSGRGGIPTTARIXLAGNNGSSDINKRIRTELGKGKKIVXLTRVDPSPVAVLAVLTGRKNEILSYNATNPMLTRLLENWKSLKY

SEQ ID NO: 256473 - protein, 90 aa, Glycine max
  Clone ID: PAT_MRT3847_73619C.1.pep
EKDADRAEKQTEINPFEIFPFLSFLCLKREEEENKEKEKESVCIVFREWDPSMEEIYKVEFLNMRRLNPSTSASVPRTVALWLGCSSRIP

SEQ ID NO: 256474 - protein, 306 aa, Glycine max
  unsure (1)..(306): unsure at all Xaa locations
  Clone ID: PAT_MRT3847_7361C.1.pep
MSSLAAARADNFYYPPEWEPSQGSLNKFHGQHALRERARKLDQGILIIRFEMPFNIWCGGCNSMIAKGVRFNAEKKQVGNYYSTKIWSFAMKSACCKHEIVIQTNPKNCEYVIISGAQKKXEDFDIEDAETFELPADEEKGKLADPFYRLEHQEEDLKKKKEAEPVIVRLQRQSDARHSDDYSLNKTLRAQLRGQKKRVAQEENASKKRGLGIRLLPATEQDSATAKSVKFPAKFERNRKDKRALINSESIFSGVSSYSISDKRKQELESKRRKICATSASNLLAGRVKPSSWSQSSTKQKGTMRR

SEQ ID NO: 256475 - protein, 57 aa, Glycine max
  Clone ID: PAT_MRT3847_73620C.1.pep
GCIIFRIGGLHDEGSILKGNWNIRRVNLISFAHLRIRVQIRNVHRVSFVYSHLVLCK

SEQ ID NO: 256476 - protein, 94 aa, Glycine max
  unsure (1)..(94): unsure at all Xaa locations
  Clone ID: PAT_MRT3847_73621C.1.pep
NPPAKPFSFKNLFPLWKEKIGKTFXKIYFPKKQLLKQIKKSPPPVNVILSINPFFFVKGGQPTFKNESFFGVEASPLNPNVKNTPGDKALKQFV

SEQ ID NO: 256477 - protein, 87 aa, Glycine max
  Clone ID: PAT_MRT3847_73622C.1.pep
CMWRENKATSPMAARLRTRNAPPKVSEKYIQSNSNSSPEVHHPDSRNRDLSGFPIDRGFSPMVIIRERAPSAYAMNNERYGVCGCTD

SEQ ID NO: 256478 - protein, 141 aa, Glycine max
  Clone ID: PAT_MRT3847_73623C.1.pep
QHSAAKPPPRLRPRRLRTRPLSETCGGGARSKMFCESLTTTTTASNNNNNSLHDTIPCALSLLSSSQTHTPGGNGLNQMVQQPPPPSMSLMMQPLGLSLQDNNNNSLESVDHCSSIYSLASDHHGSHCNEAAPQLFPFQWE

SEQ ID NO: 256479 - protein, 60 aa, Glycine max
  Clone ID: PAT_MRT3847_73624C.1.pep
VEHKMFFEAETAWAQREWSIQHVLFPSMRLFFKPPAFMATDGTFVQVTSLEKLYKIFERC

SEQ ID NO: 256480 - protein, 59 aa, Glycine max
  Clone ID: PAT_MRT3847_73625C.1.pep
KVANPLACNFPQRILTSIMQCPQFLIVFKQMILFVIKLPLSPPFFRQKNGVPFFYSPGN

SEQ ID NO: 256481 - protein, 61 aa, Glycine max
  Clone ID: PAT_MRT3847_73626C.1.pep
IIIIYAASERDWIFNLHFMPPLDNQTCGRPPATRITHVWTIELTEAMISAPRPLVGLHSYN

SEQ ID NO: 256482 - protein, 79 aa, Glycine max
  Clone ID: PAT_MRT3847_73627C.1.pep
HGSMQNSYCRPLQCLCECMGSWPWCQSISLLCSSTDEAGSGCYPMALDGCRTATARYYEDLGVLRLRDFNHATNPVTEL

SEQ ID NO: 256483 - protein, 97 aa, Glycine max
  unsure (1)..(97): unsure at all Xaa locations
  Clone ID: PAT_MRT3847_73628C.1.pep
MARSAKGHHDEFDEDDEEELLTGNISSTVKVDEPTTGKRGNPHSSKHSXTVQRRRSTINERGSVLRDLIPSNDPKRDKAPSLFEGIEYIKFPPKKNK

SEQ ID NO: 256484 - protein, 48 aa, Glycine max
  Clone ID: PAT_MRT3847_73629C.1.pep
IFNKPPSVLSFFYHYFYVKGVIWLCTCGFYSQLGWFAPSVGKKKSKLN

SEQ ID NO: 256485 - protein, 147 aa, Glycine max
  Clone ID: PAT_MRT3847_7362C.1.pep
FVISGWGGSMLSALFIQSHIFVGASGALLGVLGRMLSELITNWSIFRNKLAALPPLGFLLVFILTGGILPPVGGSAHMGGLLAGFLVGFVFVIRAPPVWVNQCCAPFDLSPGLLDPGFQKDHLILWVFCLFFSLLGLLVGWYGLLRG

SEQ ID NO: 256486 - protein, 332 aa, Glycine max
  Clone ID: PAT_MRT3847_73630C.1.pep
LFELLCNIEPWEAHSTAMLDLCQRILPPKFLAENPKEAGFCLWLLHPEPSSRPNARMILESEVMRESEESNSVDDVGISDDEAETEQLLDFLILIKEAKKKREAKLEEELNLLNEDIKEVEKSYSFVTDSVFPLVQMNNPEVRGDNLYFQDSSGSDISRSIRRLFGYEERFMSNINQLENSYFSSRFRVLPKEASSVSSNDKNVMESRWRLPQVENVNKESRRIQSSVGCLGSFFEGLCKFARYSKFEECGRLRNRDLLSSANVMCALSFDRDEDHIAAGGVSKKIKIFDLNAISSDSVDIQYPVVEMSNKSKLSCVCWNPYIKNHLASTDY

SEQ ID NO: 256487 - protein, 78 aa, Glycine max
  Clone ID: PAT_MRT3847_73631C.1.pep
HWRRPPVFFFFFKEKLPFFISKRRNMDRLGMREPRITLCVKIIYRLFAVGQDCKMTLVYRITFQVSENPGKHQRTQPE

SEQ ID NO: 256488 - protein, 84 aa, Glycine max
  Clone ID: PAT_MRT3847_73632C.1.pep
GTHYTRGHNFFTRFFTLKKRHLNLWFFYSLLFTWANTRWSPKGQKGGGTCKKGFLNHKFPLKPLRGNQKTERGGGLYLPGPVAF

SEQ ID NO: 256489 - protein, 33 aa, Glycine max
  Clone ID: PAT_MRT3847_73633C.1.pep
GFRVSPGTMVRFLLVTSFRFKYFHKETFMVIIS

SEQ ID NO: 256490 - protein, 44 aa, Glycine max
  Clone ID: PAT_MRT3847_73634C.1.pep
NRVRLYFSHSARGYQEAKSNHSGDRSIVDIKNVCMHGSIACHCA

SEQ ID NO: 256491 - protein, 151 aa, Glycine max
  Clone ID: PAT_MRT3847_73635C.1.pep
RGGAPPFFLAGRAGFAQGWFSKGLGPRCSAVTLVRLRIKWVVFSPPQRGAPFLPPPPLELKGRSQFGAPFFSPGDSVPKFPLSFVPGALGWGGPQKFWGGVGDFLPPQFWFENGFCLTKKTEEKKKKKKKKKKKRKKNKTRKSQTARRQSN

SEQ ID NO: 256492 - protein, 77 aa, Glycine max
  Clone ID: PAT_MRT3847_73636C.1.pep
MLMNNGLDKRGLKGFLADDIQRLLNLQILNLSKNNIHGAIPSLLGTITSHEVLDLYYNLFTGSIPESLGQLTSLQRL

SEQ ID NO: 256493 - protein, 86 aa, Glycine max
  Clone ID: PAT_MRT3847_73637C.1.pep
MDSFSNQSRGSSSQLSAQDLKNQLKNQLAIEYAQQLLETVGRKCFEKCVTKPGSSLGGSESSCISRCVDRYIEATGIISKALFSSQ

SEQ ID NO: 256494 - protein, 143 aa, Glycine max
  unsure (1)..(143): unsure at all Xaa locations
  Clone ID: PAT_MRT3847_73638C.1.pep
MSGEEVVVAVEPAAAIPGEPMDIMTALXQLVLRKSLAYGGLAXGLHEGAKXVLRSHAAQLCVLAEDCDQPDYVKLVKALCAEHNVSLLTVPSAKTLGEWAGLCKIDSEGKAWKRLLVATCVVVKDXGEEHEAYNVVXEHVKSQ

SEQ ID NO: 256495 - protein, 60 aa, Glycine max
  Clone ID: PAT_MRT3847_73639C.1.pep
MDSRFSRSYRYARVRDWLILNSVCEMTVESRTDMHGIKSCETTTFDYFYVYDDYIYSYFY

SEQ ID NO: 256496 - protein, 50 aa, Glycine max
  Clone ID: PAT_MRT3847_7363C.1.pep
PSFERTNCPSVVDVGLCKPVFGRFLGRSFKGRDRRKMISWKDMKLNSSCI

SEQ ID NO: 256497 - protein, 193 aa, Glycine max
  Clone ID: PAT_MRT3847_73640C.1.pep
GRSGDDGLRRHCLVLRGGPVDGSKAALPLGHSVPSICSSRGVPFDWVRGPFAGGLHWRIREGARLWPCPPGQDPACCCLRPVAAFLQRLTVQLLLCVDMGTSLQRRLGLRCGWRKPQEHSRRYPALCLRTSPRAGVLLTGSWGCLSSPVDRGSAAVPLLSISSPAGPWAALVGGRSGGWAALPWPVAEEREKK

SEQ ID NO: 256498 - protein, 92 aa, Glycine max
  Clone ID: PAT_MRT3847_73641C.1.pep
KPPPRVFPEKKKGIKTGGGKKKTPKKKTRFVHFKKGTPVLKPGKTKKKLRGSFGERGKIFQTPGKITLQGRGEGPPPRDQKGGAPKRKRAGG

SEQ ID NO: 256499 - protein, 56 aa, Glycine max
  Clone ID: PAT_MRT3847_73642C.1.pep
KSKFLFYDPNAKILNTMSKVTKTQFLILGFWRSRFILTNIENVEGAKTLYVLSLRF

SEQ ID NO: 256500 - protein, 75 aa, Glycine max
  Clone ID: PAT_MRT3847_73643C.1.pep
SYGCEKTTEGDHTCFSCFHFHSTMPSNDLKHGVTTTTGSTNDFYRTSCGKRMLRVERGLKSLGIGVGLHLSLTVL

SEQ ID NO: 256501 - protein, 103 aa, Glycine max
  unsure (1)..(103): unsure at all Xaa locations
  Clone ID: PAT_MRT3847_73644C.1.pep
VXXTETTXTYXPSPPPXPXXXXNPXPPPXXTPPXXKXKXQXXXKHHHXTIPXXXTDXXXXLXXXTXRHKXSTSXXQDXIXIHIISEXKXXXLXDXCSKQDDXI

SEQ ID NO: 256502 - protein, 126 aa, Glycine max
  Clone ID: PAT_MRT3847_73645C.1.pep
GPEFPARPTRPLHAGAEVKVDCMFKALSEKTSEQISLSVNRTTNKYGMYKLEIPSVDGVKCAEDSAVVSSCQASLIGSSSSACNVPGYKTTSNVIAIKARRANLCIYSFNALTFRPSKRDITLCGN

SEQ ID NO: 256503 - protein, 64 aa, Glycine max
  Clone ID: PAT_MRT3847_73646C.1.pep
SQNTIIYIYSNVHFAESLLNTILSVCHLGCVLNIIASCNCSNESSDTSDLKITRLNRYNDPLVY

SEQ ID NO: 256504 - protein, 85 aa, Glycine max
  Clone ID: PAT_MRT3847_73647C.1.pep
ASTAYMAFSASSTRVYVIKINRVDSTDSRSVIILASYKVRPFHIASGSVCLASRTCNTSFATALCLEQINTLQYSLITRSVLSRV

SEQ ID NO: 256505 - protein, 72 aa, Glycine max
  Clone ID: PAT_MRT3847_73648C.1.pep
PCASHGALQSATNPSSPSSAATPLPFSSLASAASSSSPNAAITNDPRSAAPKASSAFTPSAISSSTSIPSVM

SEQ ID NO: 256506 - protein, 55 aa, Glycine max
  unsure (1)..(55): unsure at all Xaa locations
  Clone ID: PAT_MRT3847_73649C.1.pep
MMKLWALMSQXXELIGWLDSDRSERTVISVVGIGGQGKTTLAKKVFDKVAEKFKR

SEQ ID NO: 256507 - protein, 294 aa, Glycine max
  unsure (1)..(294): unsure at all Xaa locations
  Clone ID: PAT_MRT3847_7364C.1.pep
MENSYKANGNGPTENGYSVARHSYQPSLKGSLPWLDIKVFYVRVCKCELDDSTPGSLTLNHVPLNPDTLLEINGVRTSIYSDGMSTLLKRDRVDRKSEEVTFVSTDSIRMSGSVKFEVFDKDVLLLSGALELCNTNGVVGEIKLXMDKGGNMNCESYIIPGTSFFKGKQFAVARLXSLXTIEVYIAGSFSSTPIILTKTLQLSQKKHTKKGVLDAIPEHEASENGKDISSAHALQVISACSAMFLVCFLYYPLLLCQFIGRVNFMPFRPVFAMSDFAFTALMHLQLSHLKIEIV

SEQ ID NO: 256508 - protein, 142 aa, Glycine max
  Clone ID: PAT_MRT3847_73650C.1.pep
LLVILPILTFAFHKFCQRRFEPAFRKYPLEEAMSKDLLEKSTEPDLNIEAYLADAYLHPIFRSFEVDDELVEVRVDNHQTNVADSQPSEPSSPSPPHHVQQPSPPHHIHEPSPPQYSEYQTSPPSYYYQYHPPSPPHYVYQY

SEQ ID NO: 256509 - protein, 41 aa, Glycine max
  Clone ID: PAT_MRT3847_73651C.1.pep
YYHMVAGDDVPQVNTCPTFWCPLGSRQGVVRSLGVSHYAGF

SEQ ID NO: 256510 - protein, 145 aa, Glycine max
  unsure (1)..(145): unsure at all Xaa locations
  Clone ID: PAT_MRT3847_73652C.1.pep
ERKDPXGDRAGKPGATHSARIKHGNRTQKERGPTKEETHRHPPGKRRQTTDPNAHKKAGNTQKKGSTGTNRREPDEKERERKQAEDRKKATGEKPTTKRRPPTPTRTPPHEHKDQENAKKQPSKQEHKTGNGEAPAEETKAEGEK

SEQ ID NO: 256511 - protein, 228 aa, Glycine max
  Clone ID: PAT_MRT3847_73653C.1.pep
GLECLGEQLNLAEGMNDLQEPEGVDMSKGFKHSTSSSTQGSRWKSMLNSVAKQVSQVPLSLAIRVASLKGTLRLQIKPPPSDQLWFGFTFMPDIEFSLESFVGEHRITNSHIALFLVSRLKAVIRETLVLPNCESICIPWMLAEKDDWVPRSVAPFIWVHPELGNETSTSVDTNNQACGGLKASASTLSDDGPELQHPPKCPKSSQEPARKSDSVALTPISSSSVTLR

SEQ ID NO: 256512 - protein, 108 aa, Glycine max
  unsure (1)..(108): unsure at all Xaa locations
  Clone ID: PAT_MRT3847_73654C.1.pep
WLPIFVNCLYPVGQLPSEAVVVNVTCGSGRGGIHNTCCMSVSLYXHVPTVPQRTRSRHWHGHLVVRRTRGVAFSRCLLSRLVGVNSGRLGCNSTNSILTRLSTNCKSP

SEQ ID NO: 256513 - protein, 123 aa, Glycine max
  Clone ID: PAT_MRT3847_73655C.1.pep
GVHTFYGLKISFSIPVHCEQHYQIAMATLTQRTVASSIFHSHTLPRKPCFFLRFRFPSTFCNFTFSPSNFAVKSSSRLAVISASSSSEHHHNSSSSPDIAVLLEVDGVLMDSHRVGNRLAFNK

SEQ ID NO: 256514 - protein, 53 aa, Glycine max
  Clone ID: PAT_MRT3847_73656C.1.pep
AYEISVKRSSVSRCFPPPCWVGSNRVCDSLGIRFRGIAWNRYIEKVFGFSSSR

SEQ ID NO: 256515 - protein, 289 aa, Glycine max
  Clone ID: PAT_MRT3847_73657C.1.pep
IIIFVYVDFLSFLRREIIYIFSKNRSLLFKISQTSRQQNYHIFLYPKWSFSILTYIIIPGVDPFHCKMRIEQESDGVSASTKHLVFAYYVTGHGFGHATRVTEVVRHLILAGHDVHVVTGAPDFVFTSEIQSPRLIIRKVLLDCGAVQADALTVDRLASLEKYSETAVKPRAQILAQETEWLNSVKADLVISDVVPVACRAAADAGIRSVCVTNFSWDFIYAEYVMAAGLHHRSIVWQIAEDYSHCEFLIRLPGYCPMPAFRDVIDVPLVVRRLHKSAKEVKKELGVTD

SEQ ID NO: 256516 - protein, 47 aa, Glycine max
  unsure (1)..(47): unsure at all Xaa locations
  Clone ID: PAT_MRT3847_73658C.1.pep
VVRHLILAAHDVHVVTGAPDFVFTSEIQVSRLIIRKXLLDCGAVQAD

SEQ ID NO: 256517 - protein, 76 aa, Glycine max
  unsure (1)..(76): unsure at all Xaa locations
  Clone ID: PAT_MRT3847_73659C.1.pep
SLDGNHLVLPTNKSDCPAPKSPRINGIPILLYHISKVESIPSYLVNPLRKFXVDFILLPGYLKLFPLXNDPSFQKI

SEQ ID NO: 256518 - protein, 133 aa, Glycine max
  Clone ID: PAT_MRT3847_7365C.1.pep
MQLPKYIAASFFCLICSSIIYYGKAEAHQVNFYVHNKCPFPIWPATAPNSGQPVIADGGFYLAPGQTQRVIAPWTWNGRIWARTGCNFASNWKPACETGDCDGRLACNGLIGTPPATLVEVSLQRRNPNFYDG

SEQ ID NO: 256519 - protein, 40 aa, Glycine max
  Clone ID: PAT_MRT3847_73660C.1.pep
TDNRAGAGMGEPYTGPKYMAGYPKRKTNKDTTTIASNGGR

SEQ ID NO: 256520 - protein, 52 aa, Glycine max
  Clone ID: PAT_MRT3847_73661C.1.pep
IFNADLYYAYYQVKTPILNTKKHLRNYIIVSKFCPKNKPMKTKKSTSKLASL

SEQ ID NO: 256521 - protein, 29 aa, Glycine max
  Clone ID: PAT_MRT3847_73662C.1.pep
EEEKSGMVVVISLPFIIFCFHLGFGCYFF

SEQ ID NO: 256522 - protein, 40 aa, Glycine max
  Clone ID: PAT_MRT3847_73663C.1.pep
ISHDHTISILPLVSRQPGFDPARDFVPVAGFADFVNALAL

SEQ ID NO: 256523 - protein, 51 aa, Glycine max
  Clone ID: PAT_MRT3847_73664C.1.pep
ILAYAICTKLRSSDHCAWHCTTSSGSMVSMTQRSHSNIGKGFLGVILNLII

SEQ ID NO: 256524 - protein, 69 aa, Glycine max
  Clone ID: PAT_MRT3847_73665C.1.pep
FPSQYNLTYKSRHVQIIEKSTRTLRNKTIPLVKVVWEGLTRKRLLGSLRKALDINIQTSLIMVHSLSNC

SEQ ID NO: 256525 - protein, 72 aa, Glycine max
  Clone ID: PAT_MRT3847_73666C.1.pep
SHQNRQRQLIEIPIRNSGGGRPGEATHPDTLKAAVAECISTCIFVFASSSSGIAYNKLTGNVAATHAGLVSA

SEQ ID NO: 256526 - protein, 49 aa, Glycine max
  Clone ID: PAT_MRT3847_73667C.1.pep
PQIHHTHNISPHIHQLTYFLTTPLVHPLFFLIFSNFFNIQPTLFLIDSP

SEQ ID NO: 256527 - protein, 311 aa, Glycine max
  unsure (1)..(311): unsure at all Xaa locations
  Clone ID: PAT_MRT3847_73668C.1.pep
MSSSNALRSSKLVSWNRTGRLQQTLADCVERQGKALHSGKVSTVRLCPERASRGRYFDFRSNFVPASVEFAQVSPLCTTLYKGGFRIRTVEHLLSALEASGVDNCRIEIEDSDTQGHDAEIPIFDGSAREWVAAVEEVGLTVATDLDGKSVEKMAPHVNEPVYAWRNDSFVAAFPSEVVRITYGINFSQAPVIGCQWFSTPPLDNLXYSMQIALSRTFCIYEEXVEQMRNAGLIKGGSLENAIVCSASKGWLNPPLHFSDEPCRHKILDLIGDLSLFAQFGNQGLPVAHIVAYKGGHALHTDLARRLIGMI

SEQ ID NO: 256528 - protein, 72 aa, Glycine max
  Clone ID: PAT_MRT3847_73669C.1.pep
FNTPHPPLSLSLVGQNFHFYHSLHSPKTFFIFTHQHKSIQTKGRAPDEITVSGTHQMSLSFSISWLGVNGGQ

SEQ ID NO: 256529 - protein, 288 aa, Glycine max
  Clone ID: PAT_MRT3847_7366C.1.pep
RLYCSVPPRWPFPWLDIKVFYVILYKCELDDSTPGSLKLNHVPLNPDILLEINDAFVLEDIRWESTLLKRDRVDRKSEEVTFVSTDSIRMSGSVKFEVFDKDVLLLSGALELCNTNGVVGESSYNGQRWSMNCESYIIPGTSFFKGKQLLLPDSSLPTIEVYIAGSFLSTPIILTKTLQLSQKKHAKKGVLDAIPEHEASENGKDTSSTLSLQAPDYLYDKHEDEDYNSVYPGTAYADGEDGELSWFNAGVRVGVGIGLSVCLGIGIGVGLLVKTYQGTTSHFRRRLF

SEQ ID NO: 256530 - protein, 152 aa, Glycine max
  unsure (1)..(152): unsure at all Xaa locations
  Clone ID: PAT_MRT3847_73670C.1.pep
MYKEFSKRTFLSSFDAFMQTGRLQQTLADCVERQGKALHSGKVSTVRLCPERASRGRYFDFRSNFVPASVEFAQVSPLCTTLYKGGFRIRXVEEVGLTVATDLDGKSVEKMAPHVNEPVYAWRNDSFVAAFPSEVVRITYGINFSQAPVIGC

SEQ ID NO: 256531 - protein, 58 aa, Glycine max
  Clone ID: PAT_MRT3847_73671C.1.pep
MDIRKATCAVLIAAASMSAALATTEVSAPAPGPSSGASAATVGSLVGASVLSFFALFH

SEQ ID NO: 256532 - protein, 107 aa, Glycine max
  unsure (1)..(107): unsure at all Xaa locations
  Clone ID: PAT_MRT3847_73672C.1.pep
XLXXXVXFVGXXFXFVCXXVFWXXWXLCXXXXXXGFXGXXXXWXXVXLXVYVXLXXXXXXXXXXXXXCXXXXXXXLXXCCGXXFXCXXXXXVVXXXXXVCXFXXVXX

SEQ ID NO: 256533 - protein, 63 aa, Glycine max
  unsure (1)..(63): unsure at all Xaa locations
  Clone ID: PAT_MRT3847_73673C.1.pep
SYDESEAHLFFFTDNPDYTVTTYNTTGGIYIEGXGLVNVMMSXXHDEYMHLGAKENCTILTPL

SEQ ID NO: 256534 - protein, 58 aa, Glycine max
  unsure (1)..(58): unsure at all Xaa locations
  Clone ID: PAT_MRT3847_73674C.1.pep
RRYKHPNEEIMKDKPDMCAYMVPTLDARRYMEVVEVPXLGKEAAAKVIKEWGHRKKRI

SEQ ID NO: 256535 - protein, 66 aa, Glycine max
  Clone ID: PAT_MRT3847_73675C.1.pep
KLPFPVSVTIQHSRFKVQTSLQILSTGWEIKWYWILMLRLLAEFQKESVQRIQSIHETQWQQTHSC

SEQ ID NO: 256536 - protein, 85 aa, Glycine max
  Clone ID: PAT_MRT3847_73676C.1.pep
FFLVQSSVLFPLPPRSLSPDPHSLFNTSSETNAKFPNNRTTLLITTTLHSHSSHIKFTVPCHGPPQPQILSTSIYIGTTWGSTTH

SEQ ID NO: 256537 - protein, 67 aa, Glycine max
  Clone ID: PAT_MRT3847_73677C.1.pep
ITKVFSNGADLSGVTEEAPLKLSKAVHKAVLTIDEKGTEAAGAMFLEAIPMSIPPEVKFNKPFVLPK

SEQ ID NO: 256538 - protein, 60 aa, Glycine max
  Clone ID: PAT_MRT3847_73678C.1.pep
KKKIVANLLKLEGGLFRNQSQPPSFRVFMWSHPFNPPQGEKLKPAQALKLINQGSLNVNK

SEQ ID NO: 256539 - protein, 131 aa, Glycine max
  unsure (1)..(131): unsure at all Xaa locations
  Clone ID: PAT_MRT3847_73679C.1.pep
DPLSWELFFPKREGGPKKGFKRGGSRGANQIXGHLGFLIANPNRFPVFNIFWGIFQDFEIAGKIFSPVFFVPQVIASFFENGESSACLGIYVFFRWLVGLIQKRKLGMPLLLSMLCLFENFHPSFNCRNDV

SEQ ID NO: 256540 - protein, 78 aa, Glycine max
  Clone ID: PAT_MRT3847_7367C.1.pep
GKKGRREKKKETGENKVRPPTRRGKRGHQKDNNGHPRKRPAGHSTEGRIFVLSMIVASFCFCFLKFSLFFFFFFRTRN

SEQ ID NO: 256541 - protein, 67 aa, Glycine max
  Clone ID: PAT_MRT3847_73680C.1.pep
LFVPFSLYFFSLDLCFESEQMVLFSRSNISPPLFDGKQSDLCFRSHSLKLVGFGFKLHNLGEGTQDL

SEQ ID NO: 256542 - protein, 59 aa, Glycine max
  Clone ID: PAT_MRT3847_73681C.1.pep
SYTTKKERNKYREVKKQWTNNLKSLFYTSSAQRAIDKHPLTLFLYLLRSTTEKEYHSEL

SEQ ID NO: 256543 - protein, 105 aa, Glycine max
  Clone ID: PAT_MRT3847_73682C.1.pep
NELDKGIGTIISSPLRVAVIAEGHPLSISFGFFPVMPSCIPLTGDWGIVDGLPEGPAVELAEYKNLGDGGFKIEKAHPLGYKLLLCPLLDASTCGDIVILTDIDH

SEQ ID NO: 256544 - protein, 195 aa, Glycine max
  Clone ID: PAT_MRT3847_73683C.1.pep
MATTITEQEASSRAPHVLDYATTTSDDDTEKEEEELVHEQNESSGGGRWFPAACGGGTRRSGGGALGRVLDPRAKWVQEWNRVFLLVCAAGLFVDPLFFYALSVSDSCMCVFVDGWLAVTVTVLRCMTDALHVWNMVIRCKMAKRTFGLGASTTSSGRGTSSSSVGLRDTRPRFGAMGYLMSRTGFFFDLVGIFL

SEQ ID NO: 256545 - protein, 224 aa, Glycine max
  Clone ID: PAT_MRT3847_73684C.1.pep
MPHPFILIKPKDEPVDDIPDYEIPLAVIPPDSPMGAVEKQDVHDTVVSQCRDEDVEHEDVFPSSNEEATSNVYVALSSMGEEQSVKITQTDDVSKESETNDSSIVRGNKDSVIANGSISVKSSSAVAELQVPSSIPSPSDPDDAVLAPKKVAMNGFLQSDGGKELEDPISPNSCTLVVVQKHQLTTDDVRAVHDVNDLTKGEERVKISWVNNTTNDFPPLFHYI

SEQ ID NO: 256546 - protein, 142 aa, Glycine max
  unsure (1)..(142): unsure at all Xaa locations
  Clone ID: PAT_MRT3847_73685C.1.pep
XEAVVILHKGKLPYPQRLLFPSEVNHGTHVAEGHASKCFQPFLLPKDLKGRPEELKNKLLVDFDPSKCFIRDLKQEFSTTFQVWHDYLGGDVIGLTWGESYPSKKRKREDVVDPCKVLKAVGEVGKGFVRSIYFLKPPKLMN

SEQ ID NO: 256547 - protein, 57 aa, Glycine max
  Clone ID: PAT_MRT3847_73686C.1.pep
MWTRCKHLVSSINLFKISLYKKRKHDGDDDVNDVHKHKKSKHKSSKIDELGAIKVAG

SEQ ID NO: 256548 - protein, 44 aa, Glycine max
  unsure (1)..(44): unsure at all Xaa locations
  Clone ID: PAT_MRT3847_73687C.1.pep
TPPXNPTRFLKFPMALHPSLYLHSKHTKINKTITSTTYIYKNNP

SEQ ID NO: 256549 - protein, 49 aa, Glycine max
  Clone ID: PAT_MRT3847_73688C.1.pep
ESIIQIRNTIIIQDPTSSSTINSLLSITLLALIAFYHHCHYIQQVYEEK

SEQ ID NO: 256550 - protein, 62 aa, Glycine max
  unsure (1)..(62): unsure at all Xaa locations
  Clone ID: PAT_MRT3847_73689C.1.pep
LDKTSLKKAKLSHYFFSSLFVCSSLFSYINQQPRSVGSSSQXRXRKSSGSEPREYPDTGTCR

SEQ ID NO: 256551 - protein, 337 aa, Glycine max
  Clone ID: PAT_MRT3847_7368C.1.pep
MLETVKYLLGSAGPSGFGSKTTAEQVTENHADLRSITAIITGATSGIGTETARVLAKRGARLVLPARSMKAAEDAKARIVSECPDSEIIVMALDLSSLNSVTNFVAHFHSLGLPLHLLINNAGKFAHEHAISEDGVEMTFATNYLGHFVMTNLLVKKMVETAKETGVQGRIVNVSSSIHGWFSGDAISYLALVSRNKRHYDATRAYALSKLANVFHTKELARRLQQMGANVTVNCGLPRVVRTRLTREREGLLTDLVFFLASKLLKTIPQAAATTCYVATHPRLLNVSGKYFADCNETSTSKLGSNSTEAARLWAASEFMISRGPKAAFDLLNHLEF

SEQ ID NO: 256552 - protein, 51 aa, Glycine max
  Clone ID: PAT_MRT3847_73690C.1.pep
RITIFHREQLLPLFSPGFKRLLIREIWNPLGTGSEINSGFERLIKGGRPFF

SEQ ID NO: 256553 - protein, 89 aa, Glycine max
  unsure (1)..(89): unsure at all Xaa locations
  Clone ID: PAT_MRT3847_73691C.1.pep
NFEAAIDRIIGGLXIMNKAIXLLERCIVAYHEPRHDKNXWFLEHAEPLLKVTIGPRGTXASLGKDQNVLIDNLLVTGEQLFDMTCMALG

SEQ ID NO: 256554 - protein, 114 aa, Glycine max
  Clone ID: PAT_MRT3847_73692C.1.pep
NIRFTEAKKLRECRKDNNPHKRGKRRVIWSYTTPMPSIPHRLLKGITNNAKPDCSHAWGLKPKSKLTHNTCPCPSQVTIAHAHPLSLPLLNNTILNLFFFSLIITFLNHQLEIN

SEQ ID NO: 256555 - protein, 95 aa, Glycine max
  Clone ID: PAT_MRT3847_73693C.1.pep
QHWGPSLLSEALCSCHCPCLESSLSRCYLSSSFLSFASLLKCHFKEPASEQPALRIRGRSRWRFLGFFVINAINKYLWYYLTKLQIFITLVNVYI

SEQ ID NO: 256556 - protein, 135 aa, Glycine max
  Clone ID: PAT_MRT3847_73694C.1.pep
HCNPPNKHFVLPIEAFEKIAIWKAGNMPVQYRRIPRVREGGMRFTVTGSGIFISVLISNVAGHGDIGEVKVKGSRTGWLSMGRNWGQNWHVNALLQNQPLSFEVKASDGKTVTSYNVAPKDWTFGQTFEGKQFET

SEQ ID NO: 256557 - protein, 270 aa, Glycine max
  Clone ID: PAT_MRT3847_73695C.1.pep
MLALTLSILIIATLSSSPLVTSHYSSSTLESPPSSLEASPTFSEWRSARATYYVAADPRDAVGGACGYGDLVKGGYGMATVGLSEALFERGQICGACFELRCVEDMRWCIPGTSIIVTATNFCAPNYGFTSDGGGHCNPPNKHFVLPIEAFEKIAIWKAGNMPVQYRRIKCRKEGGMRFTVTGSGIFISVLISNVAGHGDVVEVKVKGSRTGWLSMGRNWGQNWHVNALLQNQPLSFEVKASDGKTVTSYNVAPKDWTFGQTFEGKQFET

SEQ ID NO: 256558 - protein, 45 aa, Glycine max
  Clone ID: PAT_MRT3847_73696C.1.pep
QNKSTINPLVIFAIQIPTIKLEYNLMSRNMQHMSQLSLTIKRSFH

SEQ ID NO: 256559 - protein, 171 aa, Glycine max
  Clone ID: PAT_MRT3847_73697C.1.pep
NRLRNLAQSLKDKASVIAAALSTKRHVSSVRVHVLRATTHALAAPPSEETISAVLVVGSHQKRHPRACIDALMDRLHSTRSATVALKCLYTLHNVVVKGPFILKDQLSCYPSYGGHNFLNLSTFRDGSDLESLELSSWVRWYAGVLEQSLTVSRILGYYLNHSCESQEKKK

SEQ ID NO: 256560 - protein, 129 aa, Glycine max
  Clone ID: PAT_MRT3847_73698C.1.pep
MVTYISNYSLLFVMLALTITGLIEVKGNTCSQPLGGCGPMGQCDQRCKALHIDGQGSCDLGLCTCYYGCAGPPPSPTPPKICNNGLGVCTLQCGDACCNANCARKYNQGTGMCSTIGNNNLCTCQYRCG

SEQ ID NO: 256561 - protein, 39 aa, Glycine max
  Clone ID: PAT_MRT3847_73699C.1.pep
CNNFRCFCSRRVYRDYFLYRELCPYDNQRPFFATPVIAS

SEQ ID NO: 256562 - protein, 123 aa, Glycine max
  Clone ID: PAT_MRT3847_7369C.1.pep
APGRGARACVTRGMRLSLVWFPRVGRVARRRWYSLWCRGCSSYNYNYYYRYYSLCVPYFRLYVPYDDFPYVPYDYLPYVPYDYLPYVLYPTLGVLPGLLNLLPPFYHLLTTMQAHQSAQRFQA

SEQ ID NO: 256563 - protein, 41 aa, Glycine max
  Clone ID: PAT_MRT3847_736C.1.pep
LVEDNWKFEGPRSRIHLVSHRGGHLYRPTEISKNWNLTPPK

SEQ ID NO: 256564 - protein, 56 aa, Glycine max
  Clone ID: PAT_MRT3847_73700C.1.pep
VTYKLGPIMQLIFGSSIFKLDPFQKPLRMINLLVATFHPTYLNVTYICMHWRFPTF

SEQ ID NO: 256565 - protein, 102 aa, Glycine max
  unsure (1)..(102): unsure at all Xaa locations
  Clone ID: PAT_MRT3847_73701C.1.pep
SVPPLNFPPGHPPFATGGFEGAFNFWEKASNQRLKAMQRGGQPPPSRPFKKKGSQFAXPVCYDWSKGAENPHPAPPKNSIFLPFPPEFGVKGHPPAGAPGKK

SEQ ID NO: 256566 - protein, 83 aa, Glycine max
  Clone ID: PAT_MRT3847_73702C.1.pep
IREILKHRCLLKQSMLHSNHSYSAWNGRCFRSYTASVKELLLKQSLQLLSTILYLSTILSSSQHFLSFLSLFIVLSFLFLKLK

SEQ ID NO: 256567 - protein, 99 aa, Glycine max
  Clone ID: PAT_MRT3847_73703C.1.pep
VQSIPNNYIKGCYAVLVVRYAQFHITFPFQVCWSWCSTCKILISSSKKKKKKKKNKKKKTKKKKKKKKKKKKKKKKKALFFFPFLPPIGVGSKKKGMES

SEQ ID NO: 256568 - protein, 139 aa, Glycine max
  Clone ID: PAT_MRT3847_73704C.1.pep
MSESEAELPTAFVGDVLLWKRWHVSLGVIVVATVAWVLFEWTSLPFLTICSDVLLILIVLLFLHANYASLRNKQPPTLPELVVSEEMVNNVAASFRVKINNMLLIAHDITIGKDFRIFFKVVICLWLLSVIGSAFSFFT

SEQ ID NO: 256569 - protein, 48 aa, Glycine max
  unsure (1)..(48): unsure at all Xaa locations
  Clone ID: PAT_MRT3847_73705C.1.pep
PLNXSWQTXXKFLALNRIKLHXLGELSXLXVXXLXXNXAXXXPNLHXL

SEQ ID NO: 256570 - protein, 100 aa, Glycine max
  Clone ID: PAT_MRT3847_73706C.1.pep
LNGGESRHQHSSSPSQLVLVKQPNDAAGMRSQNPPVVGWTIPSTGPRQPYDRSYQTGYLDPVPHNLSEHRIKPHARAEASCTNNLSRDNIIFHLKPSQMC

SEQ ID NO: 256571 - protein, 68 aa, Glycine max
  Clone ID: PAT_MRT3847_73707C.1.pep
LLLHFLLPTVYLSVGDLTLRLEKHPLSFTIKNTINDESDRNFNGILCYTQDDVVSTDFLNKHFYNILP

SEQ ID NO: 256572 - protein, 52 aa, Glycine max
  Clone ID: PAT_MRT3847_73708C.1.pep
LEGNGDSHFNIARRTYIIRSTKDHVVSDTMLIAYMRPMLCIITMLRMSHIFI

SEQ ID NO: 256573 - protein, 68 aa, Glycine max
  Clone ID: PAT_MRT3847_73709C.1.pep
CNIGLIRKQHNLNGLLHKLGRVLIEKGHFGFSLEIHSYSLGYRDGPFKKRFFLLPLLTFLPSEWLGST

SEQ ID NO: 256574 - protein, 89 aa, Glycine max
  unsure (1)..(89): unsure at all Xaa locations
  Clone ID: PAT_MRT3847_7370C.1.pep
MKGGKNNTESKRAYAELAEDKKGAATNTTKSAGXANAAKDPNKPYRPPSAFFVFMEEFRKAFNXEHPGYKAKSAEGKSAGAKXKTMSDA

SEQ ID NO: 256575 - protein, 197 aa, Glycine max
  Clone ID: PAT_MRT3847_73710C.1.pep
NSARAAACRPRVDNLGMGNCWIEGRSCSTSNSCDEDNEEYTAETFPWRRQTRDLSRGDSFSQKTMTMGRNSMKFGMIDNSFYTSDYQYSPQSNNNNVQDMAYKFMKGIPNFVKIVEVGPRDGLQNEKNIVPTDVKIELIHRLASSGLSVIEATSFVSPKWVPQLADAKDVMQAVHNLGGIRLPVLTPNLKGFEAAIA

SEQ ID NO: 256576 - protein, 68 aa, Glycine max
  Clone ID: PAT_MRT3847_73711C.1.pep
KQLPNYSHLKFVYHTFSIFPTLSSNKNLFQLHALSFHVIRTCKSLISLPSNDIIATVLSSPSKCYYLN

SEQ ID NO: 256577 - protein, 91 aa, Glycine max
  Clone ID: PAT_MRT3847_73712C.1.pep
MKLEKSHHLIPIQTKHRNKYSISISYPPPFLSIKPNYPKGSRFLLENRNKKLNFNSTTQVPAFVNSKLNNCIFKHDLPHSVFHPVPIISNL

SEQ ID NO: 256578 - protein, 594 aa, Glycine max
  Clone ID: PAT_MRT3847_73713C.1.pep
SERGDVNCRERGRGNGSRVRVVVDAPAPGGNYSYIAAGFRHACVISGDGSLHCWGDMEEGQKPPQAGSFISLALGEKRSCALGDDRRVVCWGSNNFSMPRRLQDTYFESIVAKRTVFCGVLSSDYSLLCWGSKIFESNNKVFDDVLPGPCRNECPCGPQSNSAKLCNSPGGVICQPCSPRVVQSPSPPSNQSGGWSSQMVAFLVVGCVGCSSLLLVTAFFLNRYCNSKRRGSRVHDSGRLDDDPQAQDGSRVLQKRLSHAISMGNGSPLEEFSLETLLQVTNNFCEDKRIGLGSFGAVYHSTLEDGKEVAIKRAEASSSTYTVLGGQGQVDKDNAFVNELESLSRLHHKNLVRLLGFYEDSKERILVYDYMDNGSLSDHLHKLQSSALMSWAVRIKVALDAARGIEYLHQYATPPIIHRDIKSANILLDAKWTAKVSDFGLSLMGPDPEDEDAHLSLLAAGTVGYMDPEYYRLQHLTPKSDVYSFGVVLLELLSGYKAIHKNENGVPRNVVDFVVPFIFQDEIHRVLDRRVAPPTPFEIEAVAYVGYLAADCVRLEGRDRPTMSQVVNNLERALAACLAKPILSRSTTDSISSQ

SEQ ID NO: 256579 - protein, 139 aa, Glycine max
  Clone ID: PAT_MRT3847_73714C.1.pep
EEYAGTSWHELNYIRQAIGFLVIHQKRKKSLEEIRQDLCPVLTVRQIYRISTMYWDDKYGTQSVSNEVVSEMREIVSKDNQNLTSNSFLLDDDLSIPFSAEDIDMAIPAIDVDEIDLPEFMSEYSCAQFLSSHQKSTIS

SEQ ID NO: 256580 - protein, 149 aa, Glycine max
  unsure (1)..(149): unsure at all Xaa locations
  Clone ID: PAT_MRT3847_73715C.1.pep
AFHLFHNMQATDAFRVNDFTLSILLIASTLLMEGQQVHAHAIKLGLXNVDDVEWLFEGMKVKDVITWTEMVMAYMEFGLVNLALKVFDEMPDKNFVSYNTILAGFCQNEQGLEAMRLFVRMVEEGLELTDFNSTSVVDACGLLGDYKVS

SEQ ID NO: 256581 - protein, 55 aa, Glycine max
  Clone ID: PAT_MRT3847_73716C.1.pep
QLTPKSDVYLFGILLLEMGQPPLLVGLKKLVQNRFPLNWPLRNFIKGGWGNLWIL

SEQ ID NO: 256582 - protein, 305 aa, Glycine max
  Clone ID: PAT_MRT3847_73717C.1.pep
MLLQTRQFGTACPWVRLTPASKRNSSVSLRRSNCGPKCSVSQLELKSESESKTKPYPAEASRTIMELAKVGTLCTLTQEGLPLGTGVRFAVDPEHGTPLFCFNSTDNTNIPSSLHVQFEQFGLRTPQCTIQGTLTKPQDPKRLVSVWRKRFGEEVDRDFIYIIAVDRVLQLEDIQEDGIWVTSSDYKNAQPDPLRDSAHNLVTEINTNNMEDITRFCNVYVDLDFLVSEAKMLWVDRLGFDMRLSSPHKGVFDVRIPFPREVTDEKGAKSTFNCMSQLAWEVERNFQHPDFSKVKELKPVKSPFL

SEQ ID NO: 256583 - protein, 50 aa, Glycine max
  Clone ID: PAT_MRT3847_73718C.1.pep
IYEKTRPGREEIKNKHFMFKLRSKANFKSIPSNIKLNLGHIRDSSSIFKN

SEQ ID NO: 256584 - protein, 118 aa, Glycine max
  Clone ID: PAT_MRT3847_73719C.1.pep
LQKNVLISITYVQIQSVDQLLSKLSYIPSTLFLSEVSYVEFLDRVHVSENKLRAQGLWEVPHPWLNLLIPRSEIHDFAEEVFGNILKDTSNGPILIYPVNQTRCVLYMDTTTQTNEFN

SEQ ID NO: 256585 - protein, 76 aa, Glycine max
  Clone ID: PAT_MRT3847_7371C.1.pep
FIFWKKVKSVLNSAYLEAIHVEFLNFTVFLLPFLTSNNLIFKEAPKLLVIIHYHSTTFSYLLELSLYFRESKYNDY

SEQ ID NO: 256586 - protein, 228 aa, Glycine max
  unsure (1)..(228): unsure at all Xaa locations
  Clone ID: PAT_MRT3847_73720C.1.pep
MNKVHILAFPYPAQGHILPLLDLIHHLALRGLTVTIIITPKNVPILNPLLSSHPNTVQTLVLPFPPHPNIPAGAENVREVGNRGNYPFINALSKLQPEIIHWFATHSNPPVALVSDFFLGWTQQLASQLSIPRITFYCSGASLIAILQRCWKNLHFYNSQGDNNIINFPEIPGTPSFKREHLPTLFLRYKESEPESEFVRESMLLNDASWXCVFNTFRAXGGFLFWIT

SEQ ID NO: 256587 - protein, 61 aa, Glycine max
  Clone ID: PAT_MRT3847_73721C.1.pep
TTYKPHIIASLVTSCRKIALSGPIGPNYLCLVLQNQIISEIETTLLGHFLWCCRHNGVQLQ

SEQ ID NO: 256588 - protein, 218 aa, Glycine max
  Clone ID: PAT_MRT3847_73722C.1.pep
MPIRCILHWQPNQGSVVNSQVLNEISQCVESLNGVKEGRCKASLTFYRPNLRDQSVTIDFPRDFLGISMLEQPNKYYLIIRGQKIVLEADSSILLIMEKLQSYKSKVALHFEGVLYKLGDFQIRVIKVVPSQAESLRGIMIEIEYLPISSVEKSKQILEEFIDIWKEVVSKKSLAGQFMHTEPNYAEYGLSDNYTSQHTAVQYAAALAQLIQSAQLRN

SEQ ID NO: 256589 - protein, 66 aa, Glycine max
  Clone ID: PAT_MRT3847_73723C.1.pep
QYRTISRFNTRTMEYVEATSSFILFWRDVYGWCPCSLNLLAGWVGLVRVPRYDSLIYVTLNLSWGV

SEQ ID NO: 256590 - protein, 61 aa, Glycine max
  Clone ID: PAT_MRT3847_73724C.1.pep
MIIHTCNPNNNPYHNTTFSLYPCNHKHNALIRPTYTHIPQYTYIQQCKDIYCIIIPTFPNT

SEQ ID NO: 256591 - protein, 132 aa, Glycine max
  unsure (1)..(132): unsure at all Xaa locations
  Clone ID: PAT_MRT3847_73725C.1.pep
LLRPSPRSGGLVVFFAALPLSFFLGPRRRPXXVXXCXXSGGGGXPPPRCWGSPVCXXPKKKSFLSPFXVLCGPPGCXCPPAFVVVXSCFRLAPAPVFFFVPXLPPLPCFLVCXXPPGPPGRPLPRSLSFVRV

SEQ ID NO: 256592 - protein, 43 aa, Glycine max
  Clone ID: PAT_MRT3847_73726C.1.pep
PLIKSGFPLTMRVTFGAIGACSCYTYSPEVSFNAPPSVVFSQP

SEQ ID NO: 256593 - protein, 40 aa, Glycine max
  Clone ID: PAT_MRT3847_73727C.1.pep
STFCNLATEIAYTTISLSSSTIFPSRISAREDLMIPHLPY

SEQ ID NO: 256594 - protein, 80 aa, Glycine max
  Clone ID: PAT_MRT3847_73728C.1.pep
QNLEAPESGEMDPSTVPVNIGQSYLSGSLKSSCVKANPLLFSSHEFILSHGRFTYFTFYLSIESPCNSLTHCSENIHYAW

SEQ ID NO: 256595 - protein, 83 aa, Glycine max
  Clone ID: PAT_MRT3847_73729C.1.pep
VTEGSTQDCHKKFILTYPITGCHIKLESNDDLKLRAVRDKRFPHKVPGDALSEELNGDVIWITSGCDRYRFPMSQGILITSRF

SEQ ID NO: 256596 - protein, 207 aa, Glycine max
  unsure (1)..(207): unsure at all Xaa locations
  Clone ID: PAT_MRT3847_7372C.1.pep
VFEGDIVIERSTNLDWYXGPTLLEALDQINXPKRPSDKPLMLPLQDVYKIGGIGTEPVIRVETVVFISDLEVTFGPTXLTTDVKYVEMHHEALTEALPSNNVGFNVKNDAVNDLMRGSRASNFYDDPDNEAANFTYQVIIMNHPVQIGSGYAPLLDCHTSHIAMIMSEILTXLTGNSGMELDNEPKSLNNGDAGMDKMVPTNPMXGE

SEQ ID NO: 256597 - protein, 67 aa, Glycine max
  unsure (1)..(67): unsure at all Xaa locations
  Clone ID: PAT_MRT3847_73730C.1.pep
MHLPGLIMTIRMMDSYXXTFAAVGGPYIGAEHVXXNYKTKRDSVNXPVAGFAAGAAIXXYRGRSILT

SEQ ID NO: 256598 - protein, 107 aa, Glycine max
  Clone ID: PAT_MRT3847_73731C.1.pep
EKNPSPKRGKKRRQKKGAKPKKGGRVPSLPTEKKGGKTLQKQNHLGLGDLAPQNQHGTGQIGGQGKKQRALGFQKGAFYFKNGGAQFWETFFKAPNPGSAKGGTLTV

SEQ ID NO: 256599 - protein, 47 aa, Glycine max
  Clone ID: PAT_MRT3847_73732C.1.pep
KQHPNALKDPHEPLILQLYLLIKRLSTTTADNLKTIERWYQTPMREP

SEQ ID NO: 256600 - protein, 79 aa, Glycine max
  unsure (1)..(79): unsure at all Xaa locations
  Clone ID: PAT_MRT3847_73733C.1.pep
SFSGIVPFNCFRQVPIHLPSSHLPNPVWRAPDGESVVLDGAAGRSVVPPPVHAPVRSSRAVGANAXGLGRRXGPRAASG

SEQ ID NO: 256601 - protein, 112 aa, Glycine max
  Clone ID: PAT_MRT3847_73734C.1.pep
RPLIMATATRATNHTSSKRPRPTFLCARCYIPRTWYPVTVVCCLVYSQSRSHNFRSLLSGLLCDTRTLVGATLPLAALVLDVGLGIKCELRLGDRTLDSSIEIARRCSVLSH

SEQ ID NO: 256602 - protein, 99 aa, Glycine max
  Clone ID: PAT_MRT3847_73735C.1.pep
IKGQEAERGAFIICIRGQRVNVLGPGVCIHKTPSFFGRGNKDSGARNKGLHWGTLIGPLPFFFPLSLFGRFFFFFKGQSKLKLQIGEPGKFYFVARILI

SEQ ID NO: 256603 - protein, 156 aa, Glycine max
  unsure (1)..(156): unsure at all Xaa locations
  Clone ID: PAT_MRT3847_73736C.1.pep
FLLLSQHYTVKLSDFGLAKSVNSPDHSHISTRVVGTHGYAAPEYVATGRLYVKSDVYGFGIVLVDXLTGKRIRDILDXVSEXSLRDWLKTNLLSRAKIRSTMDAKLEGKXYPNNLALQLAELALKCIQTDXKVRPXMXGKLVETLEQIEAANEKPA

SEQ ID NO: 256604 - protein, 90 aa, Glycine max
  Clone ID: PAT_MRT3847_73737C.1.pep
EVKWQKLEIPIFDGDDAFGWTNKVERYFEIKGVEEEDRIQAAMVAMEGKALTWYQWWEFCAKSPHWTDSNQAVIQQFQPSMNQSPYELLL

SEQ ID NO: 256605 - protein, 50 aa, Glycine max
  Clone ID: PAT_MRT3847_73738C.1.pep
EKDDQNRWPWEHFQKRYRFSIIHIIGTLSLKILEHWRFVGGGGHHWMYPP

SEQ ID NO: 256606 - protein, 58 aa, Glycine max
  Clone ID: PAT_MRT3847_73739C.1.pep
VCKYHFSTSYFLSFLSSPLRKLPPSFGWGVSVMFLDPSQRQKINTHGLVNMLCELHCL

SEQ ID NO: 256607 - protein, 44 aa, Glycine max
  Clone ID: PAT_MRT3847_7373C.1.pep
THTLSFDYGEVLHSRLDSTQQSQGLRDLIDMISLKIQHAHVMLL

SEQ ID NO: 256608 - protein, 90 aa, Glycine max
  Clone ID: PAT_MRT3847_73740C.1.pep
TRVFRSSMLNEVVPGIAAQVRHHKAMSCPTLSIPSSSRKVMLIYRVAAISSSRRSAPLIDTVNFTVRAETTCDRTFNAIVDVPSYTVDEV

SEQ ID NO: 256609 - protein, 26 aa, Glycine max
  Clone ID: PAT_MRT3847_73741C.1.pep
SVPRIVLLPPPLPPPPPPPPPPPPPP

SEQ ID NO: 256610 - protein, 70 aa, Glycine max
  unsure (1)..(70): unsure at all Xaa locations
  Clone ID: PAT_MRT3847_73742C.1.pep
FVQVEQKLGFKPEKMKAPKNVFSEYGNMSRGWVFFFLDKKRRKFFEKGLXTPGEGLXWGVLFGFGPGLTI

SEQ ID NO: 256611 - protein, 187 aa, Glycine max
  unsure (1)..(187): unsure at all Xaa locations
  Clone ID: PAT_MRT3847_73743C.1.pep
LDLSDRSSLSGNFPPDICSYLPQLRVLRLGHTRFKFPIDTILNCSHLEELNMNHMSLTGTLPDFSSLKKSLRVLDLSYNSFTGQFPMSVFNLTNLEELNFNENGGFNLWQLPADIDRLKKLKVMVLTTCMVHGQIPASIGNITSLTDLELSGNFXXGQIPKSLGQLKNLXQLELYYNYQPLGTYLRS

SEQ ID NO: 256612 - protein, 79 aa, Glycine max
  Clone ID: PAT_MRT3847_73744C.1.pep
RNLCFPLSNLFWQDNIRMLLDVASEQVNRELLLQKHFFALLSSVWKVASHVDHRRNPSPSCNGLYFDQSFYTFIGHPSQ

SEQ ID NO: 256613 - protein, 266 aa, Glycine max
  Clone ID: PAT_MRT3847_73745C.1.pep
MVNVMEWQKQRWQPNGNAEMMYVKVMTDEQLETLRKQIAVYATICEQLIEMHKNISSHQDLAGIRLGNMYCDPLLGSGGHKIASRQRWTPSAMQLQILERIFDQGTGTPTKEKIKEITNELSQHGQISETNVYNWFQNRRARSKRKQQNVAPSANAESEVETEVDSKDKKTKPDEFQSPPSVSAVPADDNLGFQNHGSLQYLNPESNKPDSVFPSDASLRSTRNFNHVPVFDGLLSNSTSDYLTGKMEAPENYDLYQPAGDFNMAG

SEQ ID NO: 256614 - protein, 262 aa, Glycine max
  Clone ID: PAT_MRT3847_73746C.1.pep
MVNAMEWQKQRCWQPNRNAEMMCVKVMTDEQLEILRKQIAVYATICEQLIEMHKNISAHQDLAGIRLGNMYCDPLLGSGGLKIASRQRWTPTAMQLQILERIFDQGIGTPTKEKIKEITNELSQHGQISETNVYNWFQNRRARSKRKQQNVAPSANAESEVETEVDSKDKKTKPDEFQAPPSVSAGPADNLGFQNHDSLQYLNPESNKPDSVFPSDGTRNFHHVPAFDGLLSNSRSNYLTGKLETPENYELYQPAGDYNIAG

SEQ ID NO: 256615 - protein, 81 aa, Glycine max
  unsure (1)..(81): unsure at all Xaa locations
  Clone ID: PAT_MRT3847_73747C.1.pep
MEYRRSGISLTILLSLALEGESHVLAXWGDEDHCKAVXPFSPIPTVLRELLVPLPEEREIEELPSQIEDTLHPKIFLYRED

SEQ ID NO: 256616 - protein, 42 aa, Glycine max
  Clone ID: PAT_MRT3847_73748C.1.pep
DHRRGHSLILNTWKENIVAHFFHYLIFYYIGMMKPCILYSKI

SEQ ID NO: 256617 - protein, 65 aa, Glycine max
  Clone ID: PAT_MRT3847_73749C.1.pep
QYFKHKYNSSSYQVKLPLFKSPRRLRSPSNSSEWGSSCFTNTPAARDSFISSIMHAMIQLVSTPP

SEQ ID NO: 256618 - protein, 79 aa, Glycine max
  unsure (1)..(79): unsure at all Xaa locations
  Clone ID: PAT_MRT3847_7374C.1.pep
LRPPPFLLSPVGCRRPPXSLSPVPAPLPXSLGVSLXXCLXSFPPPRXGLVPAASLPXVAFSSLFRXXAPGSXVFXAPFL

SEQ ID NO: 256619 - protein, 74 aa, Glycine max
  Clone ID: PAT_MRT3847_73750C.1.pep
VISFIELNKRTSVRKREFQIMRRIQTFSEDLSVSSVEQKQAAHKEYYLAHFNNLEEIREEIYQKTCRRVSDLVT

SEQ ID NO: 256620 - protein, 232 aa, Glycine max
  Clone ID: PAT_MRT3847_73751C.1.pep
MMANPSGNHQEHTHVVSSSAPETSGAALAMKHNPGISLDWTAEEQAILEDGLSKYASESNIVRYAKIALQLQQKTVRDVALRVRWMNKKENSKRRKDDHNLTRKSKDKKERVSDPAVKSSNFVARSNVSPYAPPMIAMDNDDGISYTAIGGPTGDLLEQNAQALNQISTNLSAFQVQENINLFCQTRDNILKIMNELNDSPEVMKQMPPLPVKVNEELANSILPRTNLPPQS

SEQ ID NO: 256621 - protein, 213 aa, Glycine max
  unsure (1)..(213): unsure at all Xaa locations
  Clone ID: PAT_MRT3847_73752C.1.pep
MREQPCHGEDSVKNASHTDKTGEPSHNCLIHNEDQHILKDCQGVSIIVDSRGPYPVATTTDQELEKSLLLPCEAIENVSCNDIMKKIGEHQPQFDLPVNSAEENTVDLNLGAEKYPLHLRMRTLGAKLESTSSSSAIAEDQVSELDFLNSRNTQLISEGKAIDGVCSSSTQPQLMMSEERMNVQHTKTDQPKLMPVISLSLVXXYLWSTQLDA

SEQ ID NO: 256622 - protein, 126 aa, Glycine max
  Clone ID: PAT_MRT3847_73753C.1.pep
LSYNVLLQAFIINNIIIIIIIPMKLSMIQVLQLCSHHRPLLLLWLCLINSRLEMTRVLLPKGENIMTLAFLEGMIFMTRIEHYVKCKYDVFCSKPTFFLSMVFIIQIILLKLQVNSHFFTSEVICF

SEQ ID NO: 256623 - protein, 82 aa, Glycine max
  Clone ID: PAT_MRT3847_73754C.1.pep
VWHHGNTMAHATTSHVPSCMMTNVNDLLLVSMASLKACEGLIKQWILKNNARDLVESGIDNIDGDKITLNTWTHFEYTCAYA

SEQ ID NO: 256624 - protein, 74 aa, Glycine max
  Clone ID: PAT_MRT3847_73755C.1.pep
AWWNLPIWINGVRHLHCEWHAPSRMVKGGVYAIWRIRSTMLLETHGVYHDKSNFHSYCVDPGSHPRVYDDPPCA

SEQ ID NO: 256625 - protein, 91 aa, Glycine max
  Clone ID: PAT_MRT3847_73756C.1.pep
VQNQRQMDEENGYSGSISINVETTIAERSVWHRKCPLAVDTSCEDHPHSIVIALVVPNPHGILGKSSSNPALMSTPRVLALSIVGDDVAFP

SEQ ID NO: 256626 - protein, 199 aa, Glycine max
  Clone ID: PAT_MRT3847_73757C.1.pep
IASGLLFFDEFDSIAPKRGHDNTGVTDRVVNQFLTELDGVEILTGVFVFAATSRPDLLDAALLRPGRLDRLLFCDFPSLHERLEILAVLSRKLPMANDVDLDTIANMTEGFSGADLQALLSDAQLAAVHDVLDSVDASRPEKTPVITDALLKFTASKARPSVSEEEKRRLSNIYHQFLDSKRSVAAQSRDTKGKRATLA

SEQ ID NO: 256627 - protein, 67 aa, Glycine max
  Clone ID: PAT_MRT3847_73758C.1.pep
LPVGLARQQGKPLVQSINSINCPDPIQILVFMNRSPHCLLKTPKLCLTYENKRLSTPTKLWVEATTI

SEQ ID NO: 256628 - protein, 42 aa, Glycine max
  Clone ID: PAT_MRT3847_73759C.1.pep
KYAGGHVKSMIRIRVSFVRRSNSSNVCYDLKSLDLFLIDWNA

SEQ ID NO: 256629 - protein, 149 aa, Glycine max
  Clone ID: PAT_MRT3847_7375C.1.pep
TARLLDPDSSNQTLVAGTYGYIAPELAYTMNVTEKCDVYSFGVVTLETLMGRHPGELISSLSNSTAQNMLLKDILDARLPLPNLGKDTHDIMLAVTIALACLCLKPKFRPSMQQVVGQFSNFKLPLSLPFHEILIHQLMTPDMLSFIQV

SEQ ID NO: 256630 - protein, 70 aa, Glycine max
  Clone ID: PAT_MRT3847_73760C.1.pep
TLFSYIISDTTHTLTITSTFKIFRRHPPTISLIPYGLFMPSKATYFNTTGPTADHERTSPRNILTQDTSA

SEQ ID NO: 256631 - protein, 85 aa, Glycine max
  Clone ID: PAT_MRT3847_73761C.1.pep
QKKKEGKRDAMRGRGRELLGLSFALKHNPVAKSASPSSSFCRSSITFSTSSSSVAPPIKEPKTSTSASKSQRDSLIFEGFKQRKL

SEQ ID NO: 256632 - protein, 233 aa, Glycine max
  Clone ID: PAT_MRT3847_73762C.1.pep
MEWRKCYLDVILVPLGFLTSIGYHFWLWHKVRTQPHTTIIGINASGRRNWVNGMMKDNDKKNILAVQSLRNTIMGATLMATASILLCSGLAALISSTYSVKKPLNDAVYGAHGEFMVALKYVTLLTIFLFSFFCYSLSIRFINQVNILINTPQDPMSLVTPQYIKEILERGFILNTVGNRLFYAGLPLLLWIFGPVLVFLCSLTMVPVLYNLDFVFTSGKGKVDANEINRDFV

SEQ ID NO: 256633 - protein, 45 aa, Glycine max
  Clone ID: PAT_MRT3847_73763C.1.pep
GHVLQVNIPLCSSGSMGSLRACSPPSYMAPPYGTWSVVHQAERVG

SEQ ID NO: 256634 - protein, 68 aa, Glycine max
  Clone ID: PAT_MRT3847_73764C.1.pep
MYSNAGALACLLGVLNETVSYSATNRMLTRPVENWQSVKCPVDECTFAYEKLVCDTFSYLNKAHYYVQ

SEQ ID NO: 256635 - protein, 76 aa, Glycine max
  Clone ID: PAT_MRT3847_73765C.1.pep
WDSPLTYPARDAIKTSLFLMNESSINQPPAGRGPSTAPHPQHDLHPPNPGPKKPFFFKRQDCVSPTPSNDCLIPCL

SEQ ID NO: 256636 - protein, 91 aa, Glycine max
  Clone ID: PAT_MRT3847_73766C.1.pep
MEWPACTDEYEKLVIRMSTPRVVIDNAVCSTATIVKVDSARKHGILIDAVQVLSDLNLSIKNADISSDGRWSMDVVHVTDENGDKLTDKSV

SEQ ID NO: 256637 - protein, 57 aa, Glycine max
  Clone ID: PAT_MRT3847_73767C.1.pep
MNIPVESEAHAPTPSINEMEPSILINEFPEADACQRLTESRIWYVQNLRSWGFEYHN

SEQ ID NO: 256638 - protein, 118 aa, Glycine max
  Clone ID: PAT_MRT3847_73768C.1.pep
EDHRRGLNIVLLILCISIIINSDREDRLLLIIKHLSDTTEEYDDKEGATRYSSEVLDDESGTLNKEDELSDSGEDGPKPNGGDTPLLTRDGPPRESEHEVVTHHDSPVAPIPLSSHPP

SEQ ID NO: 256639 - protein, 77 aa, Glycine max
  Clone ID: PAT_MRT3847_73769C.1.pep
SDVLAKRAHDFEKHVAHESLKDQIPAGAKLNCTYVDRLAKIMNLKHSVVGDLKLITDGQLHYGKHIAESNITAGENQ

SEQ ID NO: 256640 - protein, 125 aa, Glycine max
  Clone ID: PAT_MRT3847_7376C.1.pep
YCLYGLAEGLNIIGQIEFYYSQFPKTMSSIAVSLCALGIGMGNVLGSLIVKVVKDGTKRGGEASWLASNINRGHYDYYYALLFILNLVNLLCFFIWSRIYGSTRDIKNWEEEVDTRVLEKELDTK

SEQ ID NO: 256641 - protein, 316 aa, Glycine max
  unsure (1)..(316): unsure at all Xaa locations
  Clone ID: PAT_MRT3847_73770C.1.pep
MSEESHSKVEAMDLLRQLEDILESDALIDELGFIHPSQFSLLKEESDISSNLSDEAIHQSADRVVISEESSKQDNLYFWNRDHKLGISTHVLLPLYRAAKXHAFMTTFKQYRMCDNQSDKVGMCLPAFSSSCDHLESILMRHSKSLLLLSCDXMTAWNCRKLIVSKKKKLSMFVDELLLSELVLSYSPKSEQAWNHRRWVIKSISANCSNFKEILGKESELVEKIAESSKMNYRAWNHRCWLISYMTNKQVLYELKKSISWAALHVADNCCFHYRRRLLLKFMENQNSVEETISCGHNADIVQALKDELDWNEALI

SEQ ID NO: 256642 - protein, 99 aa, Glycine max
  unsure (1)..(99): unsure at all Xaa locations
  Clone ID: PAT_MRT3847_73771C.1.pep
YYRRFLITGCFFCSLSVCFFSHLKISCCGDNCRCSSPFXFSNCFPCCNMYPHLIYTXSTTTDTLVIVMAPPNAQFQKSQMGVPPRNHGCKFLSYFTFNP

SEQ ID NO: 256643 - protein, 115 aa, Glycine max
  Clone ID: PAT_MRT3847_73772C.1.pep
IRVIVSSFAVKMLLLPCKWGIKYFWDTLLDADLESDILGWQYISAGLPDGHELERLHNPEIQGVKFDPEGEYVRQWLPELARMPTEWIHHPWDAPLTVLRAAGVELGQNYSKPII

SEQ ID NO: 256644 - protein, 88 aa, Glycine max
  Clone ID: PAT_MRT3847_73773C.1.pep
PWMLPNDTQLASPNITTKKQQLKKKKKKKKKHNNNNSMTKKKKKRIIITNQTILLPKTNSKYVFEELLEIRKEAQCPIRLGFIKKTRT

SEQ ID NO: 256645 - protein, 562 aa, Glycine max
  Clone ID: PAT_MRT3847_73774C.1.pep
FVLIKTHSTAVALVECVKAIQATKVVFNHLYDPVSLVRDHNIKEKLVEQGISVQSYNGDLLYEPWEVNSESGRAFTTFNAFWKKCLHMQMDIVSVVPPWQLIPAEGKIEECSLEELGLENESEKPSNALLGRAWSPGWRNADKALREFVELHLLHYSKKRLKVGGESTSLLSPYLHFGELSARKVFQVTCMKQILWTNEGNSAGEESANLFLRAIGLREYSRYLCFNFPFTHEKALLGHLKFFPWNPDADIFKNWRQGRTGFPLVDAGMRELWATGWIHNRIRVIVSSFAVKMLLLPWKWGMKYFWDTLLDADLESDILGWQYISGGLPDGHELERLDNPEIQGAKFDPEGEYVRQWLPELARMPTEWIHHPWDAPLTVLRAAGVELGQNYPKPIIDIDLARERLTEAIFKMWESEAAAKAAGSEPRDEVVVDNSNSLENLDTRKVVVLGKAPCATISANDQKVPALQDSKNEPPTRKRPKHMVEEGQNQDNSQNHNKDTGMSSIDQDICSTADSSSCKKQCASTSSYSFSVPQQCSSSSNLKWPWQDQTDMEQSSSKDGAM

SEQ ID NO: 256646 - protein, 63 aa, Glycine max
  Clone ID: PAT_MRT3847_73775C.1.pep
WFHRLLRVDAWLLLAIYSPTADNALVSVHAQISLYKVHQLESLVQIGVLRRVCSPKSAMIFTL

SEQ ID NO: 256647 - protein, 77 aa, Glycine max
  Clone ID: PAT_MRT3847_73776C.1.pep
PLYCGVPIIQWGVLWFFWFRGHPYGLHVGWLTKIGCFFWPKLSSQLGSCRTFYSMCVNRRITGSRFFDDYFALCKNL

SEQ ID NO: 256648 - protein, 47 aa, Glycine max
  unsure (1)..(47): unsure at all Xaa locations
  Clone ID: PAT_MRT3847_73777C.1.pep
MPRPGPRPYECMRRAWHSERHQPXRGSIIRQIFRVVAEAHSAGTKSN

SEQ ID NO: 256649 - protein, 93 aa, Glycine max
  Clone ID: PAT_MRT3847_73778C.1.pep
MKLSLHLGALLFFLFFLVSSSKLSARPLTTEQGRNRSKLNEVSGEDFVLELEGGESLKLLGVEGCKSGDEECLQRRMTIEAHLDYIYTQHHKP

SEQ ID NO: 256650 - protein, 55 aa, Glycine max
  Clone ID: PAT_MRT3847_73779C.1.pep
YAYSITVKVHDVLRAIIDFFGKYLRCVQAYINDLANITLTCSDNIIQAMAFCVHD

SEQ ID NO: 256651 - protein, 80 aa, Glycine max
  unsure (1)..(80): unsure at all Xaa locations
  Clone ID: PAT_MRT3847_7377C.1.pep
PLSGRKLRVKKERAPXWRTXDXTXVXAXAEPDRPLWFPGXTPXPWXDGXLXGXFGFXPLXLGXXPESLRWHVXAXLXSLQ

SEQ ID NO: 256652 - protein, 144 aa, Glycine max
  unsure (1)..(144): unsure at all Xaa locations
  Clone ID: PAT_MRT3847_73780C.1.pep
MHGTQIKRDIALESQGQIPILEAXSHARWANITVKFQDLYGYTVEVNAYYINVLNEIRXRLGNSDLSIXTFEASIGANYYLQPSAHELISLKSCIKLSTLANAITSEYXLLPRGIPTDTRSKIGFSLSVSAKNKLTVTDHYYND

SEQ ID NO: 256653 - protein, 57 aa, Glycine max
  Clone ID: PAT_MRT3847_73781C.1.pep
MKTFDPWPVFFRREWKRNWPFLTGFAITGFIITKMTANFTEEDLKNSKFVQEHKKKH

SEQ ID NO: 256654 - protein, 55 aa, Glycine max
  Clone ID: PAT_MRT3847_73782C.1.pep
VLYIKICNKTLLLVYEFNHQGLTRQVLAHIAMSKTSSTVCTKIKFFFWGHAPWGG

SEQ ID NO: 256655 - protein, 139 aa, Glycine max
  unsure (1)..(139): unsure at all Xaa locations
  Clone ID: PAT_MRT3847_73783C.1.pep
TAQVPPHSVQXHTSALRYKAGIEPLRSPLLTXRYEAGVGAPSIYSFEKGPSAFHVLGRLTGLPVGGILLLLAGLTLAGTLTGLAIARPICRLFSPMLVPAMVAISLSEIRFQTYGAFRLTALAFFSWILNYIRETQQPG

SEQ ID NO: 256656 - protein, 69 aa, Glycine max
  Clone ID: PAT_MRT3847_73784C.1.pep
GILEGYASIGLCGSNITPIGAAYDEHPFEVRTYRAVLSEQDLFVIQQVFHVCGNANLTLTFYASGLMAN

SEQ ID NO: 256657 - protein, 294 aa, Glycine max
  Clone ID: PAT_MRT3847_73785C.1.pep
NADGIIESCFTPGRYCMEISCGAYKNGWSFDMEGLPADLMRRGMAVPDPTQPNGVKLLIEDYPYATDGLLIWSAIENWVRTYVNHYYRHASLICNDKELQAWYSESINVGHADLRHQRCWPTLNNSEDLVSILTTLIWTVSAQHAAINFGQYPYGGYVPNRPPLMRRLIPFPEDEAEYANFLADPQKYFLNALPSVLQATKYMSIVDILSTHSSDEEYLGERRHSSIWSGDADITEAFCSFSAEIRRIEKEIERRNLDPSLRNRCGAGVLPYELLAPTSRPGVTCRGIPNSVST

SEQ ID NO: 256658 - protein, 85 aa, Glycine max
  unsure (1)..(85): unsure at all Xaa locations
  Clone ID: PAT_MRT3847_73786C.1.pep
IFAANQLKDGRTWADXNFKMESTFHLVXRLGGGIIKPSHRALAGKYNQDKIICGKCYARLHPRAVYCRNKKSGHSNQFRPKKKIK

SEQ ID NO: 256659 - protein, 209 aa, Glycine max
  unsure (1)..(209): unsure at all Xaa locations
  Clone ID: PAT_MRT3847_73787C.1.pep
DDLYSDGLPLQDEILKKIPLLQVLTKIQECSQGLLKYDTPKIISKDKFSWLRDDEFSRQAIAGVNPVNIEGLKVFPLVSKLDPETYDHQDSALKKEHILGQLNGMTVQQAIVENKLFMVKXRDVYVPFLDGINALYGRKSYATRTIFFLIPLGTLKPIAIELSLGPSFGXKRVVTPPVDATTNWKWQLAKAHVCANDAGVHQLVNHCTS

SEQ ID NO: 256660 - protein, 558 aa, Glycine max
  unsure (1)..(558): unsure at all Xaa locations
  Clone ID: PAT_MRT3847_73788C.1.pep
GVRVEDDLYSDGLPLQDEILKKIPLLQVLTKIQECSQGLLKYDTPKIISKDKFSWLRDDEFSRQAIAGVNPVNIEGLKVFPLVSKLDPETYDHQDSALKKEHILGQLNGMTVQQAIVENKLFMINXRDVYVPFLDEINALDGRKSYATRTIFFLTPLGTLKPIAIELSLGPSSGWKRVVTPPVDATTNWKWQLAKAHVCANDAGVHQLVNHWLRTHACMEPFILSAHRQLSAMHPVFKLLDPHMRYTLDINALARQKLINADGIIESCFTPGRYCMEISCAAYKNLWRFDMEGLPADLIRRGMAVPDPTQPNGVKLLIEDYPYATDGLLIWSAIENWVRTYVNHYYHHSNSSLICNDKELQAWYSESINVGHADLRHERWWPTLNNSEDLVSILTTLIWTVSAQHAAINFGQYPYGGYVPNRPPLMRRLIPEAEVESTSTEYANFLADPQKFFLNALPSVLQATKYMAIVDILSTHSSDEEYLGERRHSSIWSGDAEIIQAFYSFSTEIRRIENEIEKRNRDPTLRNRCGAGVLPYELLAPTSQPGVTCRGIPNSVST

SEQ ID NO: 256661 - protein, 39 aa, Glycine max
  Clone ID: PAT_MRT3847_73789C.1.pep
ANIIKSLHFLRLFYKKTILEKIILLRRFLTKNYLRKIPF

SEQ ID NO: 256662 - protein, 35 aa, Glycine max
  Clone ID: PAT_MRT3847_7378C.1.pep
KILFFWEQVKKNKKGVWNRKNKGQVGKMLTKSFKA

SEQ ID NO: 256663 - protein, 91 aa, Glycine max
  unsure (1)..(91): unsure at all Xaa locations
  Clone ID: PAT_MRT3847_73790C.1.pep
TELDCIGAVVAFEQKKKKKSRGGAXXRCGRIWCSVNRANWRSVYITMTGKAXXIPNLITWAQISLSRDGGFPKRXVPIRLLRTHXHTERET

SEQ ID NO: 256664 - protein, 131 aa, Glycine max
  Clone ID: PAT_MRT3847_73791C.1.pep
PQVPPGQAGPRALFSPTVEIFPPPPLWGSPPLWGPLCGPFPRGIPQAWGPPAGVPFSKPPPSGPPPHSPPLFFPQNMGYGPLGGVFFEGVAGVETVCPRVLLFRRGVGSLGCLFLQKGALFFFFKRKFPPF

SEQ ID NO: 256665 - protein, 120 aa, Glycine max
  Clone ID: PAT_MRT3847_73792C.1.pep
TLKACLWEMGSPFLPCKTRQGILVAKAHSLRMWLKDSPFCLDLELKDAPSLPELNSMRLIEGCFIRRGLVPAFKEITEKLEIVSPKKFSKLALLPDDQRSKTIQAYKEGRKEKLEKSKKV

SEQ ID NO: 256666 - protein, 42 aa, Glycine max
  Clone ID: PAT_MRT3847_73793C.1.pep
MDEQIMSSNILVQCRICHDEDEESNMDTPCSCCGTLKVGLPC

SEQ ID NO: 256667 - protein, 135 aa, Glycine max
  Clone ID: PAT_MRT3847_73794C.1.pep
CTYFLKQAGGASFLLDLGGLTSWRPTVSFVPLCHPYQSMLLILESLYIMVLPKLRKPHPVTGYQILINQHAQNLDVESDSSNAVSSFNSKDGVAACYLVNRKREIFNDGMLVIDSLDTFFSPHIILYWLKFMRIS

SEQ ID NO: 256668 - protein, 55 aa, Glycine max
  Clone ID: PAT_MRT3847_73795C.1.pep
MHGERWHLLKRNLKLQSVSATNRFQTVSIFFLYIYFVALIIVSTNFLLFGDLLHM

SEQ ID NO: 256669 - protein, 159 aa, Glycine max
  Clone ID: PAT_MRT3847_73796C.1.pep
MALETWLIKVKTALSHSLTKKPSFSSSKPKRVAVLSFEIANVMSKLLHLWQSISDANVVRLRNDAVSLEGVRKLISNDESFLLSLAVAEFADSLRLVADSVSRLSKNCHDPTLRSFHRVFTEFANSGLDPHAWTLTTPKDIETKHRKLRHYGILTGTLH

SEQ ID NO: 256670 - protein, 352 aa, Glycine max
  Clone ID: PAT_MRT3847_73797C.1.pep
MYITTVSSLLRATRPKLFFPSPSPSRTFASRTSSFSAAPSLLRCSVPRWSHRLHSTSPLSPRPPITAVAPVVERFHRQIATMANENPFKGNLTSLPKPGGGEFGKFYSLPSLNDPRIDRLPYSIRILLESAIRNCDNFQVKKEDVEKILDWENNSTKQVEIPFKPARVLLQDFTGVPAVVDLACMRDAMNKLGSDSNKINPLVPVDLVIDHSVQVDVTRSDNAVQANMELEFQRNKERFAFLKWGSTAFLNMLVVPPGSGIVHQVNLEYLGRVVFNNEGLLYPDSVVGTDSHTTMIDGLGVAGWGVGGIEAEAAMLGQPLSMVLPGGNFIVVGFKLSGKLHNGGTATDLVLT

SEQ ID NO: 256671 - protein, 48 aa, Glycine max
  Clone ID: PAT_MRT3847_73798C.1.pep
FPHIALHLHSSGTYLTSIGSPELWNRSPMEAAVHQNPFLLESSDGASI

SEQ ID NO: 256672 - protein, 95 aa, Glycine max
  Clone ID: PAT_MRT3847_73799C.1.pep
TRPLQFRCASFFFCFSAFVMWHSRIQRCRYHHLLKSLEEYLVKLLVVFLIVEFGQENHHYHYLTRDTDHPPTVQPSCPVLQPSSCPVSWVLSELV

SEQ ID NO: 256673 - protein, 106 aa, Glycine max
  unsure (1)..(106): unsure at all Xaa locations
  Clone ID: PAT_MRT3847_7379C.1.pep
MVETFLFTXYFVIEGRPDKLXEGISEDVLDACLGQDPYRPFACGGGTTTPLXMGGGYFTSGARGDYXKIVCDTRLNIRGGWKDVGLDAENCPVLGGKEHQRGVFAG

SEQ ID NO: 256674 - protein, 317 aa, Glycine max
  Clone ID: PAT_MRT3847_737C.1.pep
MAGLVVSSQCFLKLLLVVSVFHVSFAARRLNELVQDQSQLLHYHNGPLLYGKIAVNLIWYGNFKPSQKAIITDFVTSLSSPASQSSQPSVATWWKTTEKYYHLSPRKASLSLSLGDQILDETYSLGKSLTGKNLVQLASKGGQRNSINVVLTSADVAVEGFCMSRCGTHGSSASHLKKNSKSYKFAYIWVGNSETQCPGQCAWPFHQPIYGPQSPPLVAPNNDVGLDGMVINLASLLAGTATNPFGNGYFQGPAEAPLEAASACPGVYGKGAYPGYAGDLLVDSTTGASYNVKGANGRKYLVPALYDPSTSSCSTPV

SEQ ID NO: 256675 - protein, 102 aa, Glycine max
  Clone ID: PAT_MRT3847_73800C.1.pep
GIRHEGIMKSTVGVCFLFFLLLEAIRCEGCWKEERDALLGLHSRFVNPYYTSDGPDCCQWGGVKCNSSTGRVAQLYISLPEYRTLNYSDFVVFKDLKCILIS

SEQ ID NO: 256676 - protein, 60 aa, Glycine max
  unsure (1)..(60): unsure at all Xaa locations
  Clone ID: PAT_MRT3847_73801C.1.pep
TPENLTFLLVEXMWSNTSXVXVHGXLHXXYNXXRXHLXRQDNIXXVXXICVXSXXXIITK

SEQ ID NO: 256677 - protein, 131 aa, Glycine max
  unsure (1)..(131): unsure at all Xaa locations
  Clone ID: PAT_MRT3847_73802C.1.pep
KPEPKEGAEPEDEALRLLPLISLEMITRSKMIFYDWKXLYSTTTFIFGVGAIPGFWNMSHPEGYSLGLGLNLFIVNETHLALNIGSAWRSSTHDGSDWHALSELMLDIGFRATIRAACVVVLPWPIDESFG

SEQ ID NO: 256678 - protein, 93 aa, Glycine max
  unsure (1)..(93): unsure at all Xaa locations
  Clone ID: PAT_MRT3847_73803C.1.pep
MASRKEGTGSTATSSSSTAGAXGKGKGKGGSGDSAVKQVQIDGLVVLKIIKHYQEEGQGTEVVQGVLLGLVVEDRLEITNCFPFPQHTEDDAD

SEQ ID NO: 256679 - protein, 55 aa, Glycine max
  Clone ID: PAT_MRT3847_73804C.1.pep
RPRDPSFGWAGAGERHHTAGLQLCPEGRARPPTPPSTLISMSSLISQDQAPPGAR

SEQ ID NO: 256680 - protein, 298 aa, Glycine max
  Clone ID: PAT_MRT3847_73805C.1.pep
MPQRKGCSSLNEPRLVARKFLARPQIEGVGTVVRRSIGGFELKYFDPFIVLDEFSVTAPAGFPDHPHRGFETVTYMLQGAIMHEDFEGHKGTIEAGDLQWMTAGRGIVHSEMPAAQGTQKGLQLWINLASKYKMIEPRYQEVLSKDIPEAEDDGIKVRVIAGEALGIKSPIYTRIPTMFLDFSLKPGGHLQQPIPNSWNAFVYILEGEGIFGNMISQPSNSHHILLLGPGDGLEAWNKSSKLLRFILVGAEPLGEPLVQFGPFVMNSQEEIDQTIDDFENFANGFEKARHWTSESQIN

SEQ ID NO: 256681 - protein, 81 aa, Glycine max
  unsure (1)..(81): unsure at all Xaa locations
  Clone ID: PAT_MRT3847_73806C.1.pep
AKPDHQAPXRXKRKKAREDQHGQKRRSPEKEEDQPTXRTKKHHTHPGEERTERKXXKTRQKEHDENAKKGXKRXKQRXPPK

SEQ ID NO: 256682 - protein, 46 aa, Glycine max
  unsure (1)..(46): unsure at all Xaa locations
  Clone ID: PAT_MRT3847_73807C.1.pep
KPFAMXRGTXIGXGXXXXXVLXFSXXXGXXXSREXLSAAXLWAXXX

SEQ ID NO: 256683 - protein, 84 aa, Glycine max
  Clone ID: PAT_MRT3847_73808C.1.pep
FLFLIHVKDGFGPTAQMLNSKTLSTSICVFTRIRSRRFCFFVLSFSYRAHAACKTGTHKFNAAVFLFLLLPRFLFASEYIHFFV

SEQ ID NO: 256684 - protein, 75 aa, Glycine max
  Clone ID: PAT_MRT3847_73809C.1.pep
MAHANTMIFVEGIIGNLVSFCRFIAPIPTFYRVQQKNTTEGFQSLTYVDALFTIMRWIWNAYIQTGEIVSMTITH

SEQ ID NO: 256685 - protein, 79 aa, Glycine max
  Clone ID: PAT_MRT3847_7380C.1.pep
FISSQPSHACICSPRHLSICNHYEHPSARHYHVSCVYFMPSVGCYRSYQCHSSINRPYFILIDHHTSEVNPQGLPQPGA

SEQ ID NO: 256686 - protein, 96 aa, Glycine max
  Clone ID: PAT_MRT3847_73810C.1.pep
DHGTLICHERELIGMETLHIISFRRIYQYPLCSAIIEFAPFIHNAARLLLGWAEDINLREHTLFSILKEGPSPALPGVVLRQIHARVAVFYMCSYG

SEQ ID NO: 256687 - protein, 134 aa, Glycine max
  unsure (1)..(134): unsure at all Xaa locations
  Clone ID: PAT_MRT3847_73811C.1.pep
THSQLTTKVSLSLSLSLGVSLSHSRCSNGLATRCIDNPWVLLLPKSPSSSPTKTTMLPNLTVSVSASPRRRLRRRTSSSTSFLSSLSSASSSSTSSPTLPLHRMXXSQFGSILDVNLYVHSTISFCYGLAAMIF

SEQ ID NO: 256688 - protein, 42 aa, Glycine max
  Clone ID: PAT_MRT3847_73812C.1.pep
ERTLPSPTDSPRPTPWGLGLGLASGLASRFAVWCLHHLCCVW

SEQ ID NO: 256689 - protein, 65 aa, Glycine max
  Clone ID: PAT_MRT3847_73813C.1.pep
KECKNLLMNLFSKKVHKVEIYGYSYGCKNLEKMCVFVIGDVHEILVELEGMGGGGKVQLEVCFFY

SEQ ID NO: 256690 - protein, 153 aa, Glycine max
  unsure (1)..(153): unsure at all Xaa locations
  Clone ID: PAT_MRT3847_73814C.1.pep
KEKQERKEKGKKRVEEISQDEREKIREEERRKIEELSDYYRGPHSSHTKHHSQRREKDRRPQEVNISLPYFHGKDNVEAYLDWXMKVERLFVCHHISEERKVPLATLGFQGYALYWWTSLVRERRIHGDPPVEYWNDLKSALRKRHIPSYYET

SEQ ID NO: 256691 - protein, 139 aa, Glycine max
  Clone ID: PAT_MRT3847_73815C.1.pep
MKEMKRKKHASYSSHDSCKSLSEELSDYYRGFHSSHTKHHSQRREKDRRPQEVNISLPYFHEKDNVEAYLDWEMKVEQLFACHHISEERKVPLATLSFQGYALYWWTSLVRERRIHGDPPVEYWNDLKSTLPFCRLLAA

SEQ ID NO: 256692 - protein, 87 aa, Glycine max
  Clone ID: PAT_MRT3847_73816C.1.pep
RHEPLRPAYSTLFSTLRITTTVHVVEWEECLESEDPVEAEFSCMTSCKPFKLCASASSFLKGGLISMFTSSSDSGILIHRTWVLGWN

SEQ ID NO: 256693 - protein, 69 aa, Glycine max
  Clone ID: PAT_MRT3847_73817C.1.pep
TTFPKGTDLTFTYKLKHHLNTNSCLKRQRHQPFTPHQHSRHQTYYTTASHYKNIYLNHFNSIQLLSSST

SEQ ID NO: 256694 - protein, 100 aa, Glycine max
  Clone ID: PAT_MRT3847_73818C.1.pep
SIFTHYVYILLSFISFSVPTFSRINNFSFPQSFDFLFILYLFLFKLSLLSFPKGLVSGFGNLSSYHGEVIFTLSLLFPTSTPIIFFQSILQEDFSFHHPI

SEQ ID NO: 256695 - protein, 207 aa, Glycine max
  Clone ID: PAT_MRT3847_73819C.1.pep
MASRRRMLLKVIILGDSGVGKTSLMNQYVNRKFSNQYKATIGADFLTKEVQFEDRLFTLQIWDTAGQERFQSLGVAFYRGADCCVLVYDVNVMKSFDNLNHWREEFLIQASPSDPENFPFVVLGNKIDVDGGNSRVISEKKAKAWCASKGNIPYFETSAKEGFNVEAAFQCIAKNALKNEPEEEMYLPDTIDVGGGGRQQRSTGCEC

SEQ ID NO: 256696 - protein, 424 aa, Glycine max
  Clone ID: PAT_MRT3847_7381C.1.pep
SSTTLSVLLWTKSWEKTMDCHSPGQGLMPASFKVRTVPLDGDDSATEEVLDPDFGEAAIGRVAPVDSGLWWIILLRAYGKCSGDLSVQERVDVQTGIKMILRLCLADGFDMFPTLLVTDGSCMIDRRMGIHGHPLEIQALFYSALLCAREMLTPEDGSADLIRALNNRLVALSFHIREYYWIDLKKLNEIYRYKTEEYSYDAVNKFNIYPDQISPWLVEWMPNKGGYLIGNLQPAHMDFRFFSLGNLWSVVNSLATEEQSHAILDLIEAKWSDLVAEMPFKICYPALDGQEWQIITGSDPKNTPWSYHNAGSWPTLLWQLTVACIKMKRTHIAAKAVEIAERRILRDRWPEYYDTKRSRFVGKQSRLYQTWSIAGYLVAKLLLADPSKANTLITEEDSELVNALISANPRGKRGRKNLRQTYIV

SEQ ID NO: 256697 - protein, 94 aa, Glycine max
  unsure (1)..(94): unsure at all Xaa locations
  Clone ID: PAT_MRT3847_73820C.1.pep
MSAAEEANVPAVEKPVEEVKAPKLAKEKKPKAPKEKKPKQAKTASXSSISPDDQKKKKKKKKKKKKKKRKKKKKKRGKQKKKKKKRKKKIKKQG

SEQ ID NO: 256698 - protein, 239 aa, Glycine max
  unsure (1)..(239): unsure at all Xaa locations
  Clone ID: PAT_MRT3847_73821C.1.pep
MGRGWWWKVAVLAVVVAVVWRGWQVGGLEKESAFNFVREWSEKLGIWAIPLYVSLHTVSIALCLPSAIFFETAAPLLFGFLPSVFCVFSAKILAASLSFSIGRLVFRSSSSAMEWAQRNRYFHLISRGVERDGWKFVLLARFSPVPSYVINYTLAATDVRFLLDFXLPTAIGCLPMILQNTSIGSLAGAAVASASGSKKSQIWSYFFPVVGILSSVVISLRIKKYSTQVSVSEIPPKQN

SEQ ID NO: 256699 - protein, 70 aa, Glycine max
  Clone ID: PAT_MRT3847_73822C.1.pep
LLTSRSKSKIYNTQSLLHNILKLFSFIRRMRAARIKLKTSRSKSEIGFDYKLHFPICISKCLCMCTTHDQ

SEQ ID NO: 256700 - protein, 40 aa, Glycine max
  Clone ID: PAT_MRT3847_73823C.1.pep
APRNIHFTIILSKPKAIFLGIPYGLKGKKDGTDQMVNKSS

SEQ ID NO: 256701 - protein, 93 aa, Glycine max
  unsure (1)..(93): unsure at all Xaa locations
  Clone ID: PAT_MRT3847_73824C.1.pep
MQILVKTLIGKTITLEVESSDTIDNVKAXIQDKEGIPPDQQRPIFAXSTSRTVVPISDYKIHNESILHRVLRHLGGRQIFVKTLTGSTITLYV

SEQ ID NO: 256702 - protein, 103 aa, Glycine max
  unsure (1)..(103): unsure at all Xaa locations
  Clone ID: PAT_MRT3847_73825C.1.pep
MAPLTALSSLACRNSHAHHGPTTATYESNALPTGLMPLKQTCAHRGLIICHPPDDLLNRPPVWTNALRAIKNGPLGYNAXPKRLITWTLTFMIISTDVAPWCK

SEQ ID NO: 256703 - protein, 115 aa, Glycine max
  Clone ID: PAT_MRT3847_73826C.1.pep
VKIKNSPKLNSPRNPRKIPLSSPGKPNLSNSYAIENKSRGDRSTSFLRRKKKPATQCKDSVSQFETLTRQLSLAHSLTLSNLLLLLPPSASVFGYTENQTPSRAAALNKILFFFS

SEQ ID NO: 256704 - protein, 35 aa, Glycine max
  Clone ID: PAT_MRT3847_73827C.1.pep
AKATALKCILRISYWRIWVTNKLLITTSYTYLLNC

SEQ ID NO: 256705 - protein, 201 aa, Glycine max
  unsure (1)..(201): unsure at all Xaa locations
  Clone ID: PAT_MRT3847_73828C.1.pep
HDEFEMKSKTDLKVLIKXVKSLRNSELTAARRRQKGMKEKLDLERILQKEKQRMENSHNANTKLLHECAILQKRLRECSVNFLVEEEDKLNIDTLPSDALDLLATSDNRIGLLLAEAQLLAQDVEDTVVAVEETRDITTDNTGKTHDELRKMLAHMFVDNASLRKQINSVIRCALNANINSEEDGEEIHLQKTVLSKFLER

SEQ ID NO: 256706 - protein, 39 aa, Glycine max
  Clone ID: PAT_MRT3847_73829C.1.pep
TRIESNHDRQLHQTLLIKQRPYFLSATLYNPHRCERKVL

SEQ ID NO: 256707 - protein, 98 aa, Glycine max
  unsure (1)..(98): unsure at all Xaa locations
  Clone ID: PAT_MRT3847_7382C.1.pep
IXXXXXXXLXXXXXXXYXXXXXXXSXXXPFXXXXXXXXXXXXXXXSYLXSNXXXITISHIKXLXPXLXQSLILLTIXKXXTPXXXXSLIPILLTLXFY

SEQ ID NO: 256708 - protein, 174 aa, Glycine max
  unsure (1)..(174): unsure at all Xaa locations
  Clone ID: PAT_MRT3847_73830C.1.pep
GSRLDMMRERFSKLLLGEDMSGGGKGVCTAVTISNSITNLYATAFGQNLKLEPLKPEKKGMWRREMNCLLSVCDYIVEFSPTAQYLEDGTIVEWCLXMMTSKPRSDIYINLPALQKLDTMLIEILDSFQDTEFWYAEQGSISGNSTRSRXGSFRRIVQRKDEKWWLPVPCVHTG

SEQ ID NO: 256709 - protein, 86 aa, Glycine max
  Clone ID: PAT_MRT3847_73831C.1.pep
ELAGIAVGATVMLNILIAGARSGRSGNPVRTLGPAIAANNYKGIWVYLIAPILGTLCGAGAYTVVKLPEEEATKTPSSAPNGSFRR

SEQ ID NO: 256710 - protein, 2627 aa, Glycine max
  unsure (1)..(2627): unsure at all Xaa locations
  Clone ID: PAT_MRT3847_73832C.1.pep
MATASQARAVKSLNKSPGGRRFVSFSDRVDEIDINVYRSLDKVKAEPSEGSSFFRDCLIEWRELNTAEDFISLYEEIMPYTQTLPLVLLHKESLISKLLSRLHIKARLSLEPILSLLPRIVDSLVSLLESGGDREPDIIEQXIHVMVIHYDVSAKISCTQSIRGAQGHVKIEVLSKRICPTIHGXAMSFVLRNAPDEQLKRGIRRVIDDAVKKPSLCRESGVEALVFNIMKGHSSRFHSKAERVLQLLTSEAIYPIGDKADQDSMIILKIVKSVFKKLCEKMESKELDLVWNCIYKEVNECLNTGNSRHLRHILSVLVSAIKVQNGQKVSDYKPMLELVLLLVQTFIKPCGVIDSQEDIYLVVDKILKLMLAILKGLCNCNTSMISECAFKWAPIFESPPIFKSASSSLLRFIRELLQENLCLLHFRRNVISAMNDLMEISEEEVIHLLRSFCEKMQLDKQNSDFVDGTRVLALLWGAVSCYAHMCIVGANPSLMVELVDAVDNFLTVKSDCIGDMSKKAWESIIGAALSSFNRLYSNSNHGADETGKFLSLAKRYKSSPQVLFAVAGYLEFKHGSLLEDAVYRIYHPELEEKTADAVATFSDNLHHSDKEIRISTLKILCHYKPLGWENSSVDQPVAKKRKTEVSPTLNVECTENNALLLLLSIETTPISISSSRSIQLFISKIQMELSAGRIPNVYVPLVLNGLFGILNNRFSYLWNPVLECIAVLISLHFLRVWDSLVAYLERCQTIFDTPSNLHGSVNGALFDQPAGLVDCFKLFVYHASDSTPSVTILALLLQALQKIPTVIEPRSRQFIPLFLKFLGYPDLVSVGLFDSHACKGKEWKAILKEWLNLLKLMKNPKSFYCGQFLKDVLQHRLLEENDTEIQMRVLDCLEELTTWSLSRESEIIEECHRAYLVPLVIRLLMPRVRKLKGLASRKKASICHRKSILSFIAGLDVVELPLFFALLIKPLQIVKKTDGPANLFWTSDKVSIDEFQADALLEYFTLDNIANLSWKKKYGFLHVIEDIIGVFDELHIRPFLDLLVGCVVRLLESCTSSLHANLNGLPSDQHNCSTSSNSLGEDSVPTNQTQINGTLNQLKDMRSLCLKIISLVLNKYEDHEFSSDLWDRFFSAVKPLVDKFKQEAASSEKPSSLLSCFLAMSANNKLVALLYRKESLVPDIFSIISVNSASEAVIYCVLKFVENLLSLDNEFNDEDNSAQRVLLSNIKVLMDSMCCLFGSDNAIKRKLIKSPGETVIRILEFLPKYISEAELAKQFVDILLLFLENKTQNSDVRVEALQVIQNIIPILGHGSTAKILSAVSPLYISAELDMRLRICDLLDALVASDASLLSVAKLLRQLNATSTLGWLDHDAILNAYGIINTDFFRSVQVEHALLILSHCVHDMSSEETTFMFSAYSSLLSFVDFSAHILCQEGNSEEQLSVMRNTDSCWTKSCIQRTAKKFLLKHMADAMDGSLSVIKGWIKLLHQMVLKLPEVSNLKSLMVLCNEDGEVNFFDNITDSVIRKRVKALSWFRNVISVNKFSEFITEKVFMRLFFNMLYDEKEGKAEHMKNACIETIASVSGQMGWKSYYALLIRCFWGASRSPDKQKLFIRLICSILDKFHFSEVPHNKEPKESLGGVSDMDITDTDVNKEIQTCLYKVVLPKIQKLLNSDSEKVNVNISLAALKLLKLLPGDVMDLYLPTIVHRISNFLKSHLESIRDEARSALATCLKELGLEYLQFILKVLQSTLRRGYELHVLGYTLNFILSKCLSSPVAGKIDYCLEDLLSVIENDILGDVAEQKEVEKIASKMKETRRKKSFESLKLVAQNVTFKSYALKLLAPVTAHLKKHITPNVKGKLENMLQHIATGIESNPSVDQTDLFIFVYGIIEDGLNDEIGWHENKLLKLEGKDSRINAKRISTGHVVANGLLCSHLITVFGLRIFHKRMKSMKQDVKDENTLSLLDPFVKLLCDGLCSKYEDILSTSLGCLAILVKLPLPSLQQHAERVKAALLDIAHGSVNSISPLMQSCLTLLTVLLRNTKISLTSDQISLLIHLPIFLDLEKNPSLVALSLLKGIVSRKMVVPEIYDLVTTVAELMVTSQMEPVRKKCSKILLQFLLDYRLSEKRLQQHLDFLLSNLRQIDFSRVDVLILYRYEHSTGRESVLEMIHAIIVKFPRSVLDEQSHILFVHLVACLANDNDNIVRSMSGAAIKKLISSVSPNSLKSILEYALSWYLGGKQQLWGAAAQVLGLLIEVKKKGFQEHINCILPVTKHILHSAVDAVTNRQEGFSAESAIPLWKEAYYSLVMLEKMINQFRDLCFAKYLEDIWEAISEMLLHPHSWIRNRSVRLVALYFARATDVSRETNGSSLRSYFIMSPSRLFLIATSLCCQLKMPFINDADSSLMTQNIVFAICGVHSLMGQNACIDPPAFWSTLEQQEKDRFLKAFDLLDSRKGRSMFMSSSFSSIYEDNNQLNVDNAQRALVSLLLRKMGKIALQMDVIQMGIVFNSFGNIMAQISQDDCQHYAHVILLPLYKVCEGFAGKVVTDNVKKLAEDTCKKLENILGTQNFVQVYNLIRKNLKLKRNKRRQEEKLMAVINPMRNAKRKLRITAKNRANKKRKITTIKMGRWMR

SEQ ID NO: 256711 - protein, 2834 aa, Glycine max
  Clone ID: PAT_MRT3847_73833C.1.pep
MATASQARAVKSLNKSPGGRRFVFKSFSDRVDEIDINVYRSLDKVKAEPSEGSSFFRDCLIEWRELNTAEDFISLYEEIMPYTQTLPLVLLHKESLISKLLSRLHIKARLSLEPILSVIIFVLNVNNQLLPINLKALFYRLIAALSRDLLEEFVPLLPRIVDSLVSLLESGGDREPDIIEQIFMSWSYIMMYLQKYLVRNPSEVLNFNRLNYSSCPLAGTSKNEKRDVPPRVVKHFTWNLQKIIPTKLARLEGQLIDYIVYFILQPGTELKSDFSNFGVVFLDIDSSRVTSKLRYYPKEYVQQFMAEAMSFVLRNAPDEQLKRGIRRVIDDAVKKPSLCRESGVEALVFNIMKGHSSRFHSKAERVLQLLTSEAIYPIGDKADQDSMIILKIVKSVFKKLCEKMESKELDLVWNCIYKEVNECLNTGNSRHLRHILSVLVSAIKVQNGQKVSDYKPMLELVLLLVQTFIKPCGVIDSQEDIYLVVDKILKLMLAILKGLCNCNTSMISECAFKWAPIFESPPIFKSASSSLLRFIRELLQENLCLLHFRRNVISAMNDLMEISEEEVIHLLRSFCEKMQLDKQNSDFVDGTSEEAPLTRICSRLQEIICCWKGKINDIAHADVLCQIDEGVLALLWGAVSCYAHMCIVGANPSLMVELVDAVDNFLTVKSDCIGDMSKKAWESIIGAALSSFNRLYSNSNHGADETGKFLSLAKRYKSSPQVLFAVAGYLEFKHGSLLEDAVYRIYHPELEEKTADAVATFSDNLHHSDKEIRISTLKILCHYKPLGWENSSVDQPVAKKRKTEVSPTLNVECTENNALLLLLSIETTPISISSSRSIQLFISKIQMELSAGRIPNVYVPLVLNGLFGILNNRFSYLWNPVLECIAVLISLHFLRVWDSLVAYLERCQTIFDTPSNLHGSVNGALFDQPAGLVDCFKLFVYHASDSTPSVTILALLLQALQKIPTVIEPRSRQFIPLFLKFLGYPDLVSVGLFDSHACKGKEWKAILKEWLNLLKLMKNPKSFYCGQFLKDVLQHRLLEENDTEIQMRVLDCLLIWKDDYILPYVEHLRNLISSKNLREELTTWSLSRESEIIEECHRAYLVPLVIRLLMPRVRKLKGLASRKKASICHRKSILSFIAGLDVVELPLFFALLIKPLQIVKKTDGPANLFWTSDKVSIDEFQADALLEYFTLDNIANLSWKKKYGFLHVIEDIIGVFDELHIRPFLDLLVGCVVRLLESCTSSLHANLNGLPSDQHNCSTSSNSLGEDSVPTNQTQINGTLNQLKDMRSLCLKIISLVLNKYEDHEFSSDLWDRFFSAVKPLVDKFKQEAASSEKPSSLLSCFLAMSANNKLVALLYRKESLVPDIFSIISVNSASEAVIYCVLKFVENLLSLDNEFNDEDNSAQRVLLSNIKVLMDSMCCLFGSDNAIKRKLIKSPGETVIRILEFLPKYISEAELAKQFVDILLLFLENKTQNSDVRVEALQVIQNIIPILGHGSTAKILSAVSPLYISAELDMRLRICDLLDALVASDASLLSVAKLLRQLNATSTLGWLDHDAILNAYGIINTDFFRSVQVEHALLILSHCVHDMSSEETTFMFSAYSSLLSFVDFSAHILCQEGNSEEQLSVMRNTDSCWTKSCIQRTAKKFLLKHMADAMDGSLSVIKGWIKLLHQMVLKLPEVSNLKSLMVLCNEDGEVNFFDNITDSVIRKRVKALSWFRNVISVNKFSEFITEKVFMRLFFNMLYDEKEGKAEHMKNACIETIASVSGQMGWKSYYALLIRCFWGASRSPDKQKLFIRLICSILDKFHFSEVPHNKEPKESLGGVSDMDITDTDVNKEIQTCLYKVVLPKIQKLLNSDSEKVNVNISLAALKLLKLLPGDVMDLYLPTIVHRISNFLKSHLESIRDEARSALATCLKELGLEYLQFILKVLQSTLRRGYELHVLGYTLNFILSKCLSSPVAGKIDYCLEDLLSVIENDILGDVAEQKEVEKIASKMKETRRKKSFESLKLVAQNVTFKSYALKLLAPVTAHLKKHITPNVKGKLENMLQHIATGIESNPSVDQTDLFIFVYGIIEDGLNDEIGWHENKLLKLEGKDSRINAKRISTGHVVANGLLCSHLITVFGLRIFHKRMKSMKQDVKDENTLSLLDPFVKLLCDGLCSKYEDILSTSLGCLAILVKLPLPSLQQHAERVKAALLDIAHGSVNSISPLMQSCLTLLTVLLRNTKISLTSDQISLLIHLPIFLDLEKNPSLVALSLLKGIVSRKMVVPEIYDLVTTVAELMVTSQMEPVRKKCSKILLQFLLDYRLSEKRLQQHLDFLLSNLRQNHSSRVDVLILNRYEHSTGRESVLEMIHAIIVKFPRSVLDEQSHILFVHLVACLANDNDNIVRSMSGAAIKKLISSVSPNSLKSILEYALSWYLGGKQQLWGAAAQDCHRNLSPQSKKLEERLALVLGLLIEVKKKGFQEHINCILPVTKHILHSAVDAVTNRQEGFSAESAIPLWKEAYYSLVMLEKMINQFRDLCFAKYLETFQDIWEAISEMLLHPHSWIRNRSVRLVALYFARATDVSRETNGSSLRSYFIMSPSRLFLIATSLCCQLKMPFINDADSSLMTQNIVFAICGVHSLMGQNACIDPPAFWSTLEQQEKDRFLKAFDLLDSRKGRSMFMSSSFSSIYEDNNQLNVDNAQRALVSLLLRKMGKIALQMDVIQMGIVFNSFGNIMAQISQDDCQHYAHVILLPLYKVCEGFAGKVVTDNVKKLAEDTCKKLENILGTQNFVQVYNLIRKNLKLKRNKRRQEEKLMAVINPMRNAKRKLRITAKNRANKKRKITTIKMGRWMR

SEQ ID NO: 256712 - protein, 95 aa, Glycine max
  unsure (1)..(95): unsure at all Xaa locations
  Clone ID: PAT_MRT3847_73834C.1.pep
NLPNRFDLVYVEDLVMQVQGALFSSLSEFNGDVKNXSALESLFSLPFWALQKAFKIPPKGLKGGFLVSKKFLFFFRAGKLGPFLLNNVPDVKPVS

SEQ ID NO: 256713 - protein, 248 aa, Glycine max
  unsure (1)..(248): unsure at all Xaa locations
  Clone ID: PAT_MRT3847_73835C.1.pep
MDAQAKKKALFRAKLNAQKKKKRIESPLVRYNEFDLPVCRVCDVVLKSESLWDAHQVSRKHREAISNLKANAAGLTQHNIAKPVADTMLIMRKVNILWTHNPKRXKTSVKSXDTEIQQVKGILPEGFFDNKEADLRARGIKLVKPDVKDEYKEFEKLIQEDLQEVDDRLEEEEIDAAEMIEEEEVVEQKMLSEKVKMLKKRRLELKAANAAKRSKSSEIVAKESRQEESSSDDESEENFAVDWRAQHL

SEQ ID NO: 256714 - protein, 67 aa, Glycine max
  unsure (1)..(67): unsure at all Xaa locations
  Clone ID: PAT_MRT3847_73836C.1.pep
MFASLICSGDNWFTETSIFYGSRFGTTRMLYYTIPTHVRKFQPHNIGWYLNTXLIYNLPSGITAEIK

SEQ ID NO: 256715 - protein, 400 aa, Glycine max
  Clone ID: PAT_MRT3847_73837C.1.pep
MKVFVKTLKGTHFEIEVNPSDTLSEVKKNIETVQGADVYPAAQQMLIHQGKVLKDGTTLEENKVAESSFIVIMLSKTKSSSGEGSTTSTAPSAKPSATPTSTSVSTAPQAPASTGASATPVTAPTAAPAPAPAPAAPAPAPAPIFSGSSVPESDIYGQAASNLVAGSNLEGTIQQILDMGGGSWDRDTVVRTLRAAYNNPERAVEYLYSGIPEQAEAPPVTGVPASAQPSNPPADTPQAAQPASVPSSGPNANPLDLFPQGLPNVGSGAAGAGSLDFLRNSQQFQALRAMVQANPQILQPMLQELGKQNPHLMRLIQEHQVDFLRLINEPVEGGEGNILGQLAGAMPQAVTVTPEERQAIERLEAMGFDRATVLEVYFACNKNEELAANYLLDHMHEFDE

SEQ ID NO: 256716 - protein, 50 aa, Glycine max
  Clone ID: PAT_MRT3847_73838C.1.pep
VPSSLLLSRVGRVVPVSAVASVWILRCGVLCSGLCNVLPVWFWLAAGLEP

SEQ ID NO: 256717 - protein, 95 aa, Glycine max
  Clone ID: PAT_MRT3847_73839C.1.pep
LDPSQDEIQVCKYLRLLFLPYRTRKTEAFTCKSLDTFSLTSGSGIGTSSTYNLGKVHFLLDRVYLTGTSHIVQHDNRYRHVQGQQHSTGFTRSVY

SEQ ID NO: 256718 - protein, 45 aa, Glycine max
  Clone ID: PAT_MRT3847_7383C.1.pep
SPCGRILQKKRELEGWTLPEKDDGFDHADDLTARFPTRILTKGPR

SEQ ID NO: 256719 - protein, 392 aa, Glycine max
  Clone ID: PAT_MRT3847_73840C.1.pep
MKVFVKTLKGTHFEIEVNPSDTLSEVKKNIETVQGADVYPAAQQMLIHQGKVLKDGTTLEENKVAENSFIVIMLSKTKSSSGEGSTTSTAPSVKASATPTSTSVSAAPQAPASTGATPTPVTAPAAPASAAAPAPISSGSAVPESDIYGQAASNLVAGSNLEGTIQQILDMGGGSWDRDTVVRALRAAYNNPERAVEYLYSGIPEQAEAPPVTREPASAQPANPPAAAPQAAQPASVPSSGPNANPLDLFPQGLPNVGSGAAGAGSLDFLRNSQQFQALRAMVQANPQILQPMLQELGKQNPHLMRLIQEHQVDFLRLINEPVEGGEGNILGQLAGAMPQAVTVTPEERQAIERLEAMGFDRATVLEVYFACNKNEELAANYLLDHMHEFDE

SEQ ID NO: 256720 - protein, 83 aa, Glycine max
  unsure (1)..(83): unsure at all Xaa locations
  Clone ID: PAT_MRT3847_73841C.1.pep
RSQRSTPRQERETKAPNTDKQQRDSRDTKNEHGXERTAPRVERRDKVPQRKRERASTGRAAKRHARPSCQGPQQHNITTQEDG

SEQ ID NO: 256721 - protein, 70 aa, Glycine max
  Clone ID: PAT_MRT3847_73842C.1.pep
QGGVHVLCDEVGISKGAPLLLPESPRSEDPICCQRQVEYQKIIKSDSTGFQGQNLLWRRRYICKHTTNKL

SEQ ID NO: 256722 - protein, 516 aa, Glycine max
  Clone ID: PAT_MRT3847_73843C.1.pep
MAIAAPGHLNVNESPIWGSRSVDCFEKLEQIGEGTYGQVYMAKEIKTGEIVALKKIRMDNEREGFPITAIREIKILKKLHHENVIKLKEIVTSTGPEKDEQGKPDGNKYKGGIYMVFEYMDHDLTGLADRPGMRFTVPQIKCYMRQLLTGLHYCHVNQVLHRDIKGSNLLIDNEGNLKLADFGLARSFSNDQNANLTNRVITLWYRPPELLLGTTKYGPAVDMWSVGCIFAELLQGKPIFPGKDEPEQLNKIYELCGAPNEVNWPGVSKIPYYNKFMPTRPMKRRLREVFRHFDHHALELLEKMLTLDPAQRITAKDALDAEYFWTDPLPCDPKSLPKYESSHEFQTKKKRQQQRQNEEMAKRQKIQHPQPHTRLPPIQQPGQHGQMRSGPNQPVHGSQPQVAAGPTHHYGKPRGPSGGPGRYPPNGNPGGGYNHPNRGGQGGGGYGSGPYPPQGRGAPYGSNSMPGGGPRGGGASGYVGAPNYPQQGGPYGGSAAGRGSNMMGGNRNQQQYGWQQ

SEQ ID NO: 256723 - protein, 38 aa, Glycine max
  Clone ID: PAT_MRT3847_73844C.1.pep
ATHAFTPSRNGLPLGPSISGKGSYYNDSNTLSAPFILI

SEQ ID NO: 256724 - protein, 88 aa, Glycine max
  Clone ID: PAT_MRT3847_73845C.1.pep
VKVTYNNGNPLPEFNNAAEVWNHDFFWESMQPGGGDMPKLGLLQQIEKDFGSFTNFREKFIGAALSLFGSGWVWLVLKREEKSEPPIL

SEQ ID NO: 256725 - protein, 153 aa, Glycine max
  Clone ID: PAT_MRT3847_73846C.1.pep
MAMAAPGQLNVNESPSWGSRSVDCFEKLEQIGEGTYGQVYMAREIKTGEIVALKKIRMDNEREGFPITAIREIKILKKLHHENVINLKEIVTSPGPEKDEQGRPDGNKYKGGIYMVFEYMDHDLTGLADRPGMRFTVPQIKCYMRQLLTGLHY

SEQ ID NO: 256726 - protein, 165 aa, Glycine max
  Clone ID: PAT_MRT3847_73847C.1.pep
FPGRPTRARRQKGKFLMEKNTTNALHGQVTIGTLILQDCAVGLLFALLPVLGGTSCVFQGVLSMTKLLVTLIAFLSVLSILSRTCLPWLLKLMISLSSQTNELYQLASVAFCLLVAWCSDKLGLSLELGSFAAGVMIATTDLAQHTLEQIEPIRNLFAALFLASI

SEQ ID NO: 256727 - protein, 148 aa, Glycine max
  unsure (1)..(148): unsure at all Xaa locations
  Clone ID: PAT_MRT3847_73848C.1.pep
MAIAAPGQLNVNESPIWGSRSVDCFEKLEQIGEGTYGQVYMAKEIKTGEIVALKKIRMDNEREGFPITAIREIKILKKLHHENVIKLKEIVTSQGPEKDEQGKPDGNKYKGGIYMVFEYMDHDLTGLADRPGMRFTVSXIKCYMRQLL

SEQ ID NO: 256728 - protein, 155 aa, Glycine max
  unsure (1)..(155): unsure at all Xaa locations
  Clone ID: PAT_MRT3847_73849C.1.pep
HASAYSFDHHALELLEKMLTLDPAQRITAKDALDAEYFWTDPLPCDPKSLPKYESSHEFQTKKKRQQQRQNEEMAKRQKIQHPQPHTRLPPIQQPGQHGQMRSGPNQPVHGSQPQVAAGPTHHYGKPRGPXSGGPGRYPPNGNPGGGYNHPNRGG

SEQ ID NO: 256729 - protein, 170 aa, Glycine max
  unsure (1)..(170): unsure at all Xaa locations
  Clone ID: PAT_MRT3847_7384C.1.pep
ELNDEAAEXAVEQVEADLLQDQEGYRWKGHERLAARSGPVRFEPGFQPFVLVQCQPPAVVTSLALHSEWRLVAFGTSHGFGLFDHQQRRQVFVKCTLHPSDQLALEGPLSRVKSLKKSLRQSFRRMRRSXRVSMRKRHPAGPPGEAQXGSAKAERPGLQNMELAPVQRKI

SEQ ID NO: 256730 - protein, 61 aa, Glycine max
  Clone ID: PAT_MRT3847_73850C.1.pep
MLQQRSVPAPFLTKTYQLVEDPGTDEVISWGESGNTFVVWKHADFAKDLLPKYFKHNNFSS

SEQ ID NO: 256731 - protein, 57 aa, Glycine max
  Clone ID: PAT_MRT3847_73851C.1.pep
PISQLIGLPLVLCEQLSKDSTNPERDPYFLIMAIRAPFIFVPWGGPDTITDYSLKDT

SEQ ID NO: 256732 - protein, 65 aa, Glycine max
  Clone ID: PAT_MRT3847_73852C.1.pep
TAYNCRRNKDTWGILGLRELEPQKCNLNQWQTHSLGSWVHKLTSLGIKGKRSWPIKDVSLFVWSY

SEQ ID NO: 256733 - protein, 97 aa, Glycine max
  Clone ID: PAT_MRT3847_73853C.1.pep
GRKNKQIAQAEVGRSVTCGCGLRREKITGGKERGERGLYDGCYNRIGGMRKLVRLSKEASSLTCYLFFYFSSCKEPVSNRYPSFISLNFLKFQHCKL

SEQ ID NO: 256734 - protein, 224 aa, Glycine max
  unsure (1)..(224): unsure at all Xaa locations
  Clone ID: PAT_MRT3847_73854C.1.pep
MWWMMGETGGNYCCKKSDDLCTNVCGQESSQVSGMSRIRCILRGLDVKTYIFMFAVIPMCVFGFYIHGQKISYFLRPLWEKAPKPFNVIPHYYNENVTMENLCRLHGWGVREYPRRVYDAVLFSNELEILTLRWKELYPYITEFVVLESNSTFTGLPKPLVFNSNREQFKFVEPRLTYGTIGGRFKKGENPFVEEAYXACSMDHLLKIGWITDDDLLIMSDVDE

SEQ ID NO: 256735 - protein, 55 aa, Glycine max
  Clone ID: PAT_MRT3847_73855C.1.pep
YHYNFLFGTKTIFSYNKHIIFYYIISFSKPITYHFNLTFLFFIMTTKPYSHILYN

SEQ ID NO: 256736 - protein, 54 aa, Glycine max
  Clone ID: PAT_MRT3847_73856C.1.pep
NKNGVRSIYEMNEDVFIIRLVAAPAILFVSNMRCKRCVNKSQEREAVVAILGYS

SEQ ID NO: 256737 - protein, 37 aa, Glycine max
  Clone ID: PAT_MRT3847_73857C.1.pep
FFIYFPPPYLYLSIRLPSSSFFYRYIHYVNTLLTSSS

SEQ ID NO: 256738 - protein, 107 aa, Glycine max
  unsure (1)..(107): unsure at all Xaa locations
  Clone ID: PAT_MRT3847_73858C.1.pep
MDSPSRPSVIIVGAGISGIAAAKVLAENGIEDLVILEASDRVGGRIRKESFGGVSVELGAGWIAXVGGPQPNPVWELGVQFGLRTCFFDYSNARYNIYDRSGNIIPS

SEQ ID NO: 256739 - protein, 90 aa, Glycine max
  Clone ID: PAT_MRT3847_73859C.1.pep
LAVFLQRYNWKNPVFPQFNPFGKNPFFPALINTKKAQTNGLSKNFATLIGNWNPPFCAPLTAGLLVFTPKVTINFAISLTPVLFFFSLSF

SEQ ID NO: 256740 - protein, 44 aa, Glycine max
  unsure (1)..(44): unsure at all Xaa locations
  Clone ID: PAT_MRT3847_7385C.1.pep
MQIFLKTLTGKTITLXVESSYTIHNVKAKIQDKECIPSDQQRLI

SEQ ID NO: 256741 - protein, 188 aa, Glycine max
  Clone ID: PAT_MRT3847_73860C.1.pep
MKLAWSPERASKAYIDTVQSCQVFRESGVAEFISAMAAGWNSQLIVETWSQGGLIATSVGLALARSHTCGRHVCVVPDERARSEYAERMGEAGVTAEIVVGEPEEVMEGLVGVDFLVVDSRRKDFTRVLRLAKLSNKGAVLLCKNANSNSKGFIWRSLVAKGSSRRLVRSAFLPVGKGLDMAHVSASG

SEQ ID NO: 256742 - protein, 92 aa, Glycine max
  Clone ID: PAT_MRT3847_73861C.1.pep
MELPMPFYFAIPTGFYGSQLGSHTMALFLIYKSNSCYTLAYVHWLDKITQNTEPTQNSIPDLNRLLLATKLTCFKPITSALHALIQCTTTSE

SEQ ID NO: 256743 - protein, 99 aa, Glycine max
  unsure (1)..(99): unsure at all Xaa locations
  Clone ID: PAT_MRT3847_73862C.1.pep
IKYKRNLSNIXXXGLFYXGXXKFWTKHDXNLALXEEXKMXXIXNRXXXADVLANRAHXFXEHVAHXSLKXDQXPAVDKXXSTXVNKXXXIMDLRXXVLV

SEQ ID NO: 256744 - protein, 130 aa, Glycine max
  unsure (1)..(130): unsure at all Xaa locations
  Clone ID: PAT_MRT3847_73863C.1.pep
LKVGGGWGGGHRLSFTRSVEYEEHIXARKDHGMPIISTKVRLDRXKNITRLVEXYLLGPLVRELLNLGDVACDRTKESIDLTEKDELCKMIHLIDTYKLNRQFIWISSHRNRGRNGQSVRVSCDTKGGLV

SEQ ID NO: 256745 - protein, 99 aa, Glycine max
  unsure (1)..(99): unsure at all Xaa locations
  Clone ID: PAT_MRT3847_73864C.1.pep
MSALRVLKYVLFEGVKEIWLILDGTGAYGRDIGENIATLLNASVAELPADARTMLRIGMTYAPXILEHLMEIAEIARHSCVDSVLHVPDQSGSDTILSA

SEQ ID NO: 256746 - protein, 106 aa, Glycine max
  unsure (1)..(106): unsure at all Xaa locations
  Clone ID: PAT_MRT3847_73865C.1.pep
MHTSDLCYICHLSSIHMAVVLXSRYWEKPVVFQLRRFESLALFTIWRFTDYALFDRCSHQLHALNVNWYAPFTGSLGAAGVLVTRTLTAAVVRVLPLVPFTFVTSF

SEQ ID NO: 256747 - protein, 83 aa, Glycine max
  Clone ID: PAT_MRT3847_73866C.1.pep
FSARASSSFGSIYKPIHSSLYQNWSFRTMATVADPKHALETSGETEPVWIHSDPRSRRPQFPTLNHLLKIDICVIGSGISGIQ

SEQ ID NO: 256748 - protein, 87 aa, Glycine max
  Clone ID: PAT_MRT3847_73867C.1.pep
FFFFFFFFFFFFFFFFFFFGNLERNPQVFLAGYKNYTPLFPNILLGKSQKREKKKKKKKKPHLFFQNIKNGRDFKGDQPLGNPLTLP

SEQ ID NO: 256749 - protein, 62 aa, Glycine max
  Clone ID: PAT_MRT3847_73868C.1.pep
KIKYDHILITIHYNLIQPNLKPIYNITEFLKQIHLHILKIKRSKNIHIIIETISHIIIPILQ

SEQ ID NO: 256750 - protein, 58 aa, Glycine max
  Clone ID: PAT_MRT3847_73869C.1.pep
TKKGTILTGYNINNSSLRVPKKNKTRGLGSPFYFFTAFLKIRGKTLLGTNRFNFPQKH

SEQ ID NO: 256751 - protein, 211 aa, Glycine max
  Clone ID: PAT_MRT3847_7386C.1.pep
MVRRKIPIKKIDNVTARQVTFSKRKSGLFKKARELSLLCDSEIALIVFSPGGKLFDYASSSMQKVIERHILWSELNLEKLDQSCPTEQLRCNYADLNKEFGDRIREMRQLNGEELQGLALRELQKLEERLVSSLNRVYKAKVENFTREIDILKQKGNKLMEDNRLMKQRIKPRNEICSVQRHEHEQGRSFDTSLTLGLSFPAGSKYRVSEQ

SEQ ID NO: 256752 - protein, 188 aa, Glycine max
  Clone ID: PAT_MRT3847_73870C.1.pep
MRSSNGTSSSRASNGNTGRHPVYRGVRRRSSGKWVSEIREPKKPNRIWLGTFATPEMAAIAYDVAALALKGKDAELNFPNSASSLPIPASSAAHDIQMAAALAATAVGAANDALEGSQGGNVSVSLAEEFSGGNLNHFVDEDLIFDMPNILVNMAEGMLLSPPRFDNFAATDYEYMDEDPNLWGFPNY

SEQ ID NO: 256753 - protein, 110 aa, Glycine max
  Clone ID: PAT_MRT3847_73871C.1.pep
SAPGLCCQLLLLWANPAHTCPDGTHSNLTFSSCTTCRQPVNLPISGFSVSRSSHTGLQFCGTTRTLNADNNAPCLRSTTTTTKFYSSTVHVFTTRTPQLTTHTHTHTKTP

SEQ ID NO: 256754 - protein, 188 aa, Glycine max
  Clone ID: PAT_MRT3847_73872C.1.pep
MRSSNGASSSRASNANTGRHPVYRGVRRRSSGKWVSEIREPKKPNRIWLGTFATPEMAAIAYDVAALALKGKDAELNFPNSASSLPVPTSSAARDIQMAAASAAAAVGAANDALEGSRGGNASVSLTEEFSGGNLNHFVDEDLIFDMPNILVNMAEGMLLSPPRFDNFAATDYEYMDEDPNLWGFPNY

SEQ ID NO: 256755 - protein, 72 aa, Glycine max
  unsure (1)..(72): unsure at all Xaa locations
  Clone ID: PAT_MRT3847_73873C.1.pep
QTETQLRMTVASGDPTXLTFELKEFIKDQLVSIPTAATHVPTQPAPTFPPVAQPGSAPTALTDPGAMLAALL

SEQ ID NO: 256756 - protein, 280 aa, Glycine max
  Clone ID: PAT_MRT3847_73874C.1.pep
HASAERFHALCVKDSGVLYEDPYIQIGIKAEWRAHQGHLVLFLGNKNTSPLVSVQALILPPTHLKMELSLVPETIPPRAQVQCPLEVINLHPSRDVAVLDFSYKFGNDMVNVKLRLPAVLNKFLQPITISAEEFFPQWRSLPGPPLKLQEVVRGVRPLPLLEMANLFNSYHLTVCPGLDPNPNNLVVSTTFYSESTRAMLCLVRIETDPADRTQLRMTVASGDPTLTFEMKEFIKDQLVSIPAIATRVPTQPAPTSPPLAQPGSAPAALTDPGAMLAALL

SEQ ID NO: 256757 - protein, 83 aa, Glycine max
  Clone ID: PAT_MRT3847_73875C.1.pep
APRGVVFSNPPSLHPFSQRGVKLKRPYLGGPSPVYILTWAEKSNPPPFYKGGTHIWARPVYHIDPFKTPNNVYQEVFFFCQTK

SEQ ID NO: 256758 - protein, 54 aa, Glycine max
  Clone ID: PAT_MRT3847_73876C.1.pep
TFNVRVYRTHVQRIPFNCWYLWCLRCVSWLIFLPFHGLLSSCLQFRKNKICFHF

SEQ ID NO: 256759 - protein, 113 aa, Glycine max
  Clone ID: PAT_MRT3847_73877C.1.pep
TGHHTYPVRSEIDWKAAYQTLLWLQIPRRLLLQVPDRLTGTTISIKPQIFITKQNHFNLQVRTVTIFSTPNCQMHPQKSESVVVTKLRCHRPPTRCSTTTFFLGHQCKASPEF

SEQ ID NO: 256760 - protein, 70 aa, Glycine max
  unsure (1)..(70): unsure at all Xaa locations
  Clone ID: PAT_MRT3847_73878C.1.pep
KGLSFLDTSALKATTLEKAFHTXLSEIYHIVSKKALAAQETAVGTTLPGQGPPINVGDASGNTKRECCSP

SEQ ID NO: 256761 - protein, 118 aa, Glycine max
  Clone ID: PAT_MRT3847_73879C.1.pep
VRARSLRVTTLLFFDGTHKRSTSELKKELTPASRPVSKSTQVGVLISTTKLSLGGITGFEQEDNVVEQVNKLAEIIAFSTSSGKRLMEQFVNIPVPSKIQIENLERENPRKKRAKGGQ

SEQ ID NO: 256762 - protein, 206 aa, Glycine max
  Clone ID: PAT_MRT3847_7387C.1.pep
MVRRKIPIKKIDDVTARQVTFSKRKSGLFKKARELSLLCDAEIALIVFSPGGKLFDYGSSSMQKVIERHILRSELNLEKLDQSCPTEQVRCNYADLNKEFADRTREMRQLNGEELQGLTLRELQKLEERLDSSLNRVYKAKVENFIKEIGILKEKGKKLMEDNMLIKQMIKLPRNEICSVQRHEHEQGQLFDTSLTLGLPFPAGSK

SEQ ID NO: 256763 - protein, 51 aa, Glycine max
  Clone ID: PAT_MRT3847_73880C.1.pep
FQTILQKIYHIVSKKALAAQETAVGTTLPGQGTPINVGDASGNTKKGCCSP

SEQ ID NO: 256764 - protein, 70 aa, Glycine max
  Clone ID: PAT_MRT3847_73881C.1.pep
GDMHDLFSVQNWLPRGTIRLLCHKSPYSDFCWDGICAYKTNSNYILKLLYPKFHVSYLKPLDFNATAMTH

SEQ ID NO: 256765 - protein, 191 aa, Glycine max
  Clone ID: PAT_MRT3847_73882C.1.pep
MVERCTSPIVLLCLFSFSALTLAFSPCPLTGLPLVRNISEIPQDNYGRAGLSHMTVVGPLLHGMKEVEVWLQTFSPGTHTPIHRHSCEEVFIVLKGSGTLYLASDSHGRYPGKPQEHFIFPNSTFHIPVNDAHQLWNTNEHEDLQVLVIISRPPVKVFVYEDWSVPHTAAKVKFPYYWDEQCYQEPPKDEL

SEQ ID NO: 256766 - protein, 56 aa, Glycine max
  Clone ID: PAT_MRT3847_73883C.1.pep
LCHWYPLLLIDTVPCCPEPPSSPVTAVFTTDTAACTNFQGLTLHVHPYRSCHRMSY

SEQ ID NO: 256767 - protein, 57 aa, Glycine max
  Clone ID: PAT_MRT3847_73884C.1.pep
HSTEGKHIPESNISAGENHEDQTPQMAQEETLPSSARDNRTATASKNSKHQATATQD

SEQ ID NO: 256768 - protein, 148 aa, Glycine max
  Clone ID: PAT_MRT3847_73885C.1.pep
MSGRVSGKVKWFNDQKGFGFISPDDGSDDLFVHQSQIKSDGFRSLAEGESVEFAIESESDGRAKAVDVTGPDGASVQGTRRGGDGGRSYGGGRGGGGGGYGGGGGYGGGGGYGGGGGYGGGGRGGGGGSCYSCGESGHFARDCPSSAR

SEQ ID NO: 256769 - protein, 108 aa, Glycine max
  Clone ID: PAT_MRT3847_73886C.1.pep
MAKIVDAAAPLSIHVHPDDSYAYEHEEGQYGKSECWYIIEADEGAKITIGTYAKSRDEFEEQLEQDGQGKLIVDGDIYEISKGSNFVLTSEDLDSVFEGDFKLIISYI

SEQ ID NO: 256770 - protein, 37 aa, Glycine max
  unsure (1)..(37): unsure at all Xaa locations
  Clone ID: PAT_MRT3847_73887C.1.pep
DGGGRYVGGGGCGVGGXSCYSCGESGHFARDCPSSAR

SEQ ID NO: 256771 - protein, 55 aa, Glycine max
  unsure (1)..(55): unsure at all Xaa locations
  Clone ID: PAT_MRT3847_73888C.1.pep
MECHMQHSLADILIGQTASRGLVTXIRVTRLEDQNGYIMRDVKGPDIEGDMMTLL

SEQ ID NO: 256772 - protein, 202 aa, Glycine max
  unsure (1)..(202): unsure at all Xaa locations
  Clone ID: PAT_MRT3847_73889C.1.pep
MSGRVSGKVKWFNDQKGFGFISPDDGSDDLFVHQSQIKSDGFRSLAEGESVEFAIESESDGRAKAVDVTGPDGASVQGTRRGGDGGRSYGGGRGGGGGGYGGGGGYGGGGGYGGGGGYGGGGRGGGGGACYNCGESGHLARDCSGGGGGDRYGGGGGGGRYGGXGGGGRYGGGGGGGGGGGGSCYSCGESGHFARDCPSSAR

SEQ ID NO: 256773 - protein, 49 aa, Glycine max
  Clone ID: PAT_MRT3847_7388C.1.pep
YSKIFSKKYLKSTVELIVCHMHIMLKKLIQYIFYSNETLQKLIYNILFK

SEQ ID NO: 256774 - protein, 201 aa, Glycine max
  Clone ID: PAT_MRT3847_73890C.1.pep
MSGRVSGKVKWFNDQKGFGFITPDDGSEELFVHQSQIKSDGFRSLAEGESVEFAIESESDGRAKAVDVTGPDGASVQGTRRGGDGGRSYGGGRGGGGGGYGGGGGYGGGGGYGGGGGYGGGGRGGGGGACYNCGESGHLARDCSQGGGGDRYGGGGGGGGRYGGGGGGRYGGGGGGGGGGGSCYSCGESGHFARDCPSSAR

SEQ ID NO: 256775 - protein, 55 aa, Glycine max
  Clone ID: PAT_MRT3847_73891C.1.pep
HSSELMHWHSLVSILNMFNVNCEFTRMMCFSPIVFGKYVLDIWSERITDQNLRLS

SEQ ID NO: 256776 - protein, 86 aa, Glycine max
  unsure (1)..(86): unsure at all Xaa locations
  Clone ID: PAT_MRT3847_73892C.1.pep
LNYFFQSLNEYVRLFPFHFAAGTRICTYFLLTQTPEVIRHYASXKKDRRQIGIXIVLIQTVKLDYSKXPKRFYQXQIXLRPGIRNX

SEQ ID NO: 256777 - protein, 84 aa, Glycine max
  Clone ID: PAT_MRT3847_73893C.1.pep
KLKKMVTKNKREKRKGGLFVFPLHSRVTGAPYSYVWMSMAQEHGWRVLLDVCGLKPKEMGTLGMSLFKPDFMVCSFYKVFGENP

SEQ ID NO: 256778 - protein, 124 aa, Glycine max
  Clone ID: PAT_MRT3847_73894C.1.pep
MSHPSVSFRLALFLSFSLTASSSLPPLPVFSKRYAPSSSLIPKATPSDLLSLLGSKPQSSAVNPEVARDLKSCFKFLVPFSPVHPRHRKLGLGRPKLTSPTRRDKNKLIWWPPEPVLELARLAV

SEQ ID NO: 256779 - protein, 106 aa, Glycine max
  Clone ID: PAT_MRT3847_73895C.1.pep
RPISSPIPALSTFITKHFLYSCCRTSCFSTLVHIQLIAFSFMTLWLPLSSSNCSLTSSKKILGVWISTAGSLCSPPGYLPFLFKALSSCVPSPLGSLFGFKLPLLL

SEQ ID NO: 256780 - protein, 34 aa, Glycine max
  Clone ID: PAT_MRT3847_73896C.1.pep
WCPDIHTEHWTGSELMTHLIQRLLPCNRTVFSFG

SEQ ID NO: 256781 - protein, 70 aa, Glycine max
  Clone ID: PAT_MRT3847_73897C.1.pep
TVNEVTEQCISSKASSGHGSVHANTSTNVIVVACSVTLIIITKELSHGLSTSVNTNMNSTECVQSHLLEP

SEQ ID NO: 256782 - protein, 66 aa, Glycine max
  Clone ID: PAT_MRT3847_73898C.1.pep
LLLGVGNFSTHLIIIPKIIASKASASKDDTLASGIAQEGFSEVKRVSADVMAKLYVKAVSQVDLNK

SEQ ID NO: 256783 - protein, 74 aa, Glycine max
  Clone ID: PAT_MRT3847_73899C.1.pep
SGKSAAVYACAEEQRFEILELNASDCRNGTAVRNYFGDTLGSLGFKRASEITSSSQKKTTKLSPASALQSGKAA

SEQ ID NO: 256784 - protein, 58 aa, Glycine max
  Clone ID: PAT_MRT3847_7389C.1.pep
VNDHRLCLPFGRPFWRQIPSCVNTVYVYINAFLFLFLCVSSNLVLKKGGKGGSSLVSW

SEQ ID NO: 256785 - protein, 395 aa, Glycine max
  Clone ID: PAT_MRT3847_738C.1.pep
MAGLVVSSQCFLKLLLVVSVFHVSFAARRLNELVQDQSQLLHPTRPPTRSQKLQHQSHPFQKKAVSVTIRKMATLVLYQFFLKLLLLISVFQLSFAARRLNQLVQDQSQLLHYHNGPLLYGKIAVNLIWYGHFKPSQKAIITDFVTSLSSPSSQSSQPSVATWWKTTEKYYHLSPKNKKAASSLSLSLGDQFLDEGFSLGKSLTSKNLVELASKGGQRNAINVVLTSADVAVEGFCMSRCGTHGSSSSASHVKKNNNGKNYKFAYIWVGNSETQCPGQCAWPFHQPIYGPQSPPLVAPNNDVGLDGMVINLASLLAGTATNPFGNGYFQGPAEAPLEAASACPGVYGKGAYPGYAGNLLVDSATGASYNVEGDNGRKYLVPALYDPSTSSCSTPV

SEQ ID NO: 256786 - protein, 93 aa, Glycine max
  Clone ID: PAT_MRT3847_73900C.1.pep
RKNVHCKQRHFCLSYSSFHSNCYLSTFHSSQCYQRSSSHCQPLCARGCKAVDALHSEFRAVDNLVACNTTRVLKAFQNARVGSHHFGGSTGMV

SEQ ID NO: 256787 - protein, 277 aa, Glycine max
  unsure (1)..(277): unsure at all Xaa locations
  Clone ID: PAT_MRT3847_73901C.1.pep
KLIISMGSFKGHALPGTLFLLVGVWHVWGSVVRYVRNPMAFQVRVWNPVPGFDGRLKHLELYVIAIGAFVDMCIELLYSPHLKIFVGGVLNPAHMNDFEHSGMLLMFFIFGVVALLSQKTRFLPLPEGALCLLAASAFTAEYLLFYFHSTTHKGLEGYYHTLLVFVVGLCILSSIAGALLPTSFPVDLCNGIAXLQGLWFYQTAFVLYGPMMPSGCKLRENSVMCHSIDSEVRGELLANIQLFVAVLVVLVGTVASYGFAASRYGNSEVHELACNSG

SEQ ID NO: 256788 - protein, 46 aa, Glycine max
  Clone ID: PAT_MRT3847_73902C.1.pep
VPSLNFVKSCFVYLSYLSYLPVTSMFLLLSVFVNCLILILLHKFQS

SEQ ID NO: 256789 - protein, 91 aa, Glycine max
  Clone ID: PAT_MRT3847_73903C.1.pep
YPVVAPIGAGNPPKVMNTGLAAPNSSMQRYVKHIKTGVYYENVEIKKKKWTLMMVGQGMDPPIIFGNTSFIYGWTTFRSATFGKNTTPLSP

SEQ ID NO: 256790 - protein, 85 aa, Glycine max
  unsure (1)..(85): unsure at all Xaa locations
  Clone ID: PAT_MRT3847_73904C.1.pep
DEQILSHPPRRPSHGKREHDEDDDEDEDKPRPSRPILGKREQDQDQDDDEDEDEDQPRKSRDWRSNXTQPIRPRQDALRERGCET

SEQ ID NO: 256791 - protein, 95 aa, Glycine max
  Clone ID: PAT_MRT3847_73905C.1.pep
ESGSGRHVPSAKPEREGGLIKPPSCPPPTSVLPCRYMECPRNPGTEPVRFLIPPTTAQVPINSWNPKENGAPADCYALRLMPKETGPVLESMTKC

SEQ ID NO: 256792 - protein, 126 aa, Glycine max
  unsure (1)..(126): unsure at all Xaa locations
  Clone ID: PAT_MRT3847_73906C.1.pep
GGVGGPPLFKPPLKKTRARGQGFRQKVFFFWGGKIRKEAPFTPKALFPGQWKKPRAPFFFLWRGVXQGPLWGWGGKKENFKKAPEPLLVKAQAPLRGSLGPSKGISKLFYGASKSLLVWGPKVCSF

SEQ ID NO: 256793 - protein, 45 aa, Glycine max
  Clone ID: PAT_MRT3847_73907C.1.pep
AGIEDGGAMCRLGFCVHTLILLIGSWFSSRYNHLSMPVGSVKLCK

SEQ ID NO: 256794 - protein, 72 aa, Glycine max
  Clone ID: PAT_MRT3847_73908C.1.pep
VCTSVILGRNDDLSEEESSGDMSSSTSPDEGTIPSKEFRKRQIKFSDRINQLSLEDSVRKSTKMCFYSWRII

SEQ ID NO: 256795 - protein, 72 aa, Glycine max
  Clone ID: PAT_MRT3847_73909C.1.pep
CLLLFLFLLNVSHMYFVVIYLIGLGFFYRFSVYILFGRHGCDVELGFCLPYKLSLISIVGRFDVIQIDRKIA

SEQ ID NO: 256796 - protein, 93 aa, Glycine max
  unsure (1)..(93): unsure at all Xaa locations
  Clone ID: PAT_MRT3847_7390C.1.pep
ECSAATLQSHELCAMTFEYSTKCGRNSDMYALSDLSGAYVETPAHAVFFECKHLFXLDDGSEIVGGRTQWRPKPLSRCLGHVLRQVPVPTNST

SEQ ID NO: 256797 - protein, 123 aa, Glycine max
  Clone ID: PAT_MRT3847_73910C.1.pep
GSSSNLRITIESNPPESRLAELNIKYWPKWGCSPGKYQLKFDAEETCYLLKGKVKAHPQGSSQFVQFGAADLVTIPKGPNCTWNVSVTVDKYLQIRVTKFFLKINIIIVFWITHHSSFILGYC

SEQ ID NO: 256798 - protein, 225 aa, Glycine max
  Clone ID: PAT_MRT3847_73911C.1.pep
MSRQAPGVVKTRLRGVVFDMDGTLTVPVIDFPAMYRAVLGDEEYLRLKAENPSGIDILGHIDGWPPHKQRKAFDAIAEVERQGLERLQIMPGCTELCAMLDSKKIRRGLITRNTKSAVDLFHERFGITFSPALSREFRPYKPDPGPLLHICSLWEVQPNEVIMIGDSLKDDVPCGRQAGAFTCLLDQTGVYDSPEYADVEFKPDFKVTSLDEVHSVLKENFDLSP

SEQ ID NO: 256799 - protein, 38 aa, Glycine max
  Clone ID: PAT_MRT3847_73912C.1.pep
GNLPGSFFLPVSQNPAKLRHQCIHRLGKFCGCGVGNTS

SEQ ID NO: 256800 - protein, 196 aa, Glycine max
  unsure (1)..(196): unsure at all Xaa locations
  Clone ID: PAT_MRT3847_73913C.1.pep
MKKQCCEESETNAGSWECWFDDACIVDMDYFVKTLSSIKQKGVRADLIGSIITHYASXDLSPLPKMVSPLTSNPESDTNSWMKKSFFVETXVSVLPPEKESVPCNFLLRLLRTAIMVRVDATYRVELENRISWQLDQASLKELMIPSFSHTCGTLLDVEFGXDGAALLKVAKLVDCYLDEAAVDANLTLSEFITLA

SEQ ID NO: 256801 - protein, 419 aa, Glycine max
  Clone ID: PAT_MRT3847_73914C.1.pep
MEMKKPCCEESETIVGSWECWFDDACIVDMDYFVKTLSSIKQKGVRADLIGSIITHYASIWLPDLSSSAENGVTTHFQSPESVTNSWMKKRFFVETLVSVLPPEKDSVPCNFLLRLLRTANMVRVDATYRGELENRISWQLDQASLKELMIPSFSHTCGTLLDVELVLRLVKRFMSLDRDGAALVKVAKLVDCYLAEAAVDANLTLSEFIALAGALPSHSRATDDGLYRAIDTYLKAHPDVSKQERKGLCRLLDSRKLTTEASLHAAQNERLPVRAVIQVLFSEQTKLNRHIDWSGSFSSLRSPNGGLDPPGRCLSKRETNAQQMEIRKLKEDVYRLQSQFNAMQGQMERMAAKKKGLFKWRKFGMPTFSRNVGEVEKIEEQEEEEEAEREVGFGRQTPMDMKTSLVKRTPHKWRKSMS

SEQ ID NO: 256802 - protein, 71 aa, Glycine max
  Clone ID: PAT_MRT3847_73915C.1.pep
EKKSPSSPGGRGVQWGAPRGFLFSGSKTRGFTKKVGSTKNLFKGLGIFLEQKFFFFTLCFPRVKKIFPTPG

SEQ ID NO: 256803 - protein, 204 aa, Glycine max
  unsure (1)..(204): unsure at all Xaa locations
  Clone ID: PAT_MRT3847_73916C.1.pep
TRPLYAEERKQRWNRTESPLVRCAMERSNSKKVLKSRLLNENVPPLQIDSEERRGRYLQPTAMSPRFQPFAENVDAGSPLTRYLFAGSPLSGKFAAASEAFVSPKFGARTAKALQYCGTSSGGSSSFGSRGRLTPSPLSSLENMEFAPLLSPPVYRTPSTXDDDVIVMDAILVRPVSGGKSGRSSSSFGRGSFSSSSSTGKNVF

SEQ ID NO: 256804 - protein, 154 aa, Glycine max
  Clone ID: PAT_MRT3847_73917C.1.pep
MLQEDILLDENYKALVADFGLSTLVGKDVSQVMTTMRGTRGYLAPEWLLERGVSEKTDVYSYGMVLLEIIGGRRNVSRVEDPRDRTKKKWEFFPKIVNEKVREGKFMEIVDRRLVERASVVQESEVTRLVYIALRCIPEKPWVRPNMAHVVDML

SEQ ID NO: 256805 - protein, 153 aa, Glycine max
  unsure (1)..(153): unsure at all Xaa locations
  Clone ID: PAT_MRT3847_73918C.1.pep
MEATLCYRAPPLLLWKKQLSTAFDMWSLGYITAELLPKESVFNGKTPPDQLDETLRILXTPYETIWPVFYKIPXAKIIFMKHPPQCSCHKKFPRHXYTGTLVVSDSXITMLVNKLLTYDPVKQNTAEAALNHQRVRQLSIPISNRINCLHFLC

SEQ ID NO: 256806 - protein, 58 aa, Glycine max
  Clone ID: PAT_MRT3847_73919C.1.pep
LNFHVKNSSKQIHRLKQLFYARKIYHMLLFNYYYCIGKPEEEVSPLGLITIPFFFFLL

SEQ ID NO: 256807 - protein, 68 aa, Glycine max
  unsure (1)..(68): unsure at all Xaa locations
  Clone ID: PAT_MRT3847_7391C.1.pep
SFQNIVDPVIKNTMDPKRTXXVAAVAVLCVQPEPSYRPLIADVLHSLIPLVPVELGGTLKVSQLPQQV

SEQ ID NO: 256808 - protein, 553 aa, Glycine max
  Clone ID: PAT_MRT3847_73920C.1.pep
MAEEQGEFRIYNSMTQQKEIFKTKVPGKVSMYVCGVTAYDFSHLGHARAAVSFDILFRYLKHLGYEITYVRNFTDVDDKIIKRANETGEDPLMLSNRFCDEYNADMADLQCETPSREPRVSEHLNEIKDMITQIINNGYAYEVDGDVFYAVDKCPNYGMLSGQRLEHNRAGERVAVDSRKRHPADFALWKAAKPGEPSWDSPWGPGRPGWHIECSAMSACYLTHKFDIHGGGIDLIFPHHENEIAQSWAADHDSHVSYWMHNGHVTNNNEKMSKSLGNFFTIRQITERYHSLALRHFLISAHYRSPLNYSISQLENSSDAIYYIFQTLQDCKDAVSPLLQGETEKNEKVPQINEAAKECIKKLNVEFQTKMSDDLQTPVILTGALQEALKFVNTSLKMLKKKMQKRAQLQLIQSLLEVEKEVGKVLDVLGLLSSKSYAEVLHQLKDKALNRAGLTEDEVLHLIEERTQARINKDFAKSDKMRADLATKGIALMDVGNEIIWRPCIPSEPLVAEVVHRDQRAPTVEEKQSSSSVNQKVDEIPGGREGNDLHTTT

SEQ ID NO: 256809 - protein, 106 aa, Glycine max
  unsure (1)..(106): unsure at all Xaa locations
  Clone ID: PAT_MRT3847_73921C.1.pep
XXXSQQHNXAKHESXXXLXLPPNXXXXXICXXPXXXVCHVSXXHERRXGXRSXLDRXXLXTLCXSXXPGINKRQQISCXFXXXXXXXXSVXXXSRXXEXTXRXXAD

SEQ ID NO: 256810 - protein, 95 aa, Glycine max
  unsure (1)..(95): unsure at all Xaa locations
  Clone ID: PAT_MRT3847_73922C.1.pep
LYVDLCFELLCTTASPLVHCGGCTAGWSRQTPLXTNSTATGCTVTSCRPGIGHLSTRHSGSFSRIPLSPGLTRFPPHSQTHVVQLNFKAVRIICA

SEQ ID NO: 256811 - protein, 134 aa, Glycine max
  Clone ID: PAT_MRT3847_73923C.1.pep
KGQFHCDECGICRVGGRDKFFHCKKCCACYSVSVQNNHSCVENSMKSFCPICLEYQFDSIKAPPILKCGPPMHMECYREMATQNQYRCPICLKTIVNDMNWEYLDREVCGTIIKFCFEIFFVGLCMTMFYVFEL

SEQ ID NO: 256812 - protein, 94 aa, Glycine max
  Clone ID: PAT_MRT3847_73924C.1.pep
QGHKFVEITRIIKINLNVLVLFVAPVLVTYVCYGSDYHPFPLHITTGFGGHYSTHVACVISRLGVLHSTSSPGCPFLHPPHSTSLTTFYDTNIS

SEQ ID NO: 256813 - protein, 76 aa, Glycine max
  Clone ID: PAT_MRT3847_73925C.1.pep
FGCFFLFYILGGFFSSCIPALYCSHMPNLSKPLAKIDNDRPDIDKNSLGPIAHWVSPKGAHGEDIHRGHTPTPCWV

SEQ ID NO: 256814 - protein, 81 aa, Glycine max
  Clone ID: PAT_MRT3847_73926C.1.pep
FFLASLLHHHRGSHIVTMGVFVVILKPHQHNNLYPISRLPPLSFVRFLVCSRTRFMTVYKGCYIMSGIIYYIDGPYQTCHT

SEQ ID NO: 256815 - protein, 329 aa, Glycine max
  Clone ID: PAT_MRT3847_73927C.1.pep
MASASDFALAVSSELESVLRLKTVNYFVTRRPWLDLYGVNVRPVAPVGSASRRPYVDPALIHRSLPDELLFEVFARMTPYDLGKASCVCRKWKYTIRNPVFWRNACLKAWQLSGIVENYRILQSKYDGSWRKMWLSRPRLRTDGLYVSRNTYIRAGVAEWKITNPVHVVCYFRYLRFFPSGRFLYKNSSQKIKDVAKCMNFRSSKADCVFGGHYTLSDDKVEAAVLYPGMRPTVLRIRLRLRGTTTGANNRMDLISLVTSGVNSSEASAPEEDILGVVEGWQDDETHNPDVPAVSHKRGMTPFVFVPFEEVETSVLNLPVEKMDYFVPG

SEQ ID NO: 256816 - protein, 78 aa, Glycine max
  Clone ID: PAT_MRT3847_73928C.1.pep
RRHRRIWFLVKYITCSSNSFNRDIVSTYMDHVSATSLARISTSLFVLHIRQALPPLQILSIVSVQVRHHKHTHPFSVT

SEQ ID NO: 256817 - protein, 46 aa, Glycine max
  Clone ID: PAT_MRT3847_73929C.1.pep
IGPNVWRPLYDSSKGVAQKLPLAPLRFFSQLPKEPGVEVVNGWGSQ

SEQ ID NO: 256818 - protein, 451 aa, Glycine max
  Clone ID: PAT_MRT3847_7392C.1.pep
MKTKLLLMLLMLLLILHKPTWILASAYPLAPSPQVPPFSPFPTSMSASSPGIVMGAEQQHMDSHKKMVIAVAVASTSLGAVILCVLCIWIYYTKYPSKSKGKNVQRSDAEKGLASSPFLSKFSSIKLVGKKGCVPIIDYKQIEKTTGNFEEINILGEGGFGCVYKAHLDDNLDVAVKKLHCENQYAEQEFENEVDLLSKIQHPNVISLLGCSSNDDTRIIVYELMHNGSLETQLHGPSHGSALTWHLRIKIALDTARGLKYLHEHCYPPVIHRDLKSSNILLDTKFNAKLSDFALAITNGSQNKNNLKLSGTLGYVAPEYLLDGKLTDKSDVYAFGVVLLELLLGKKPVEKLAQAQCQSIVTLAMPQLTDRSKLPNIVDPVIKNTMDPKHLYQVAAVAVLCVQPEPSYRPLIADVLHSLIPLVPVELGGTLKVSQLPKQVLPADPPEDSSQ

SEQ ID NO: 256819 - protein, 146 aa, Glycine max
  unsure (1)..(146): unsure at all Xaa locations
  Clone ID: PAT_MRT3847_73930C.1.pep
PRVRPNAVLSMWRYFDGELALEETTITSPYIKCADSIFIAFGNXGDDTINHEAFLHKLVQTGEIHVKGVLKFSQEESLTGWTTQVLSASTLKADGWPYPDAMEHDSSVTTIPGDXVLGVKEGTVHNMCAYRLNPGVLRYRLLGTIP

SEQ ID NO: 256820 - protein, 79 aa, Glycine max
  Clone ID: PAT_MRT3847_73931C.1.pep
LLGLLLLAYQTGTILYNLEYPTPKNIRNSAAKKVSKPIKIQLTYLSYMSLPNLLFSIQCPLFLQFSQSETKRRVRNQSP

SEQ ID NO: 256821 - protein, 57 aa, Glycine max
  Clone ID: PAT_MRT3847_73932C.1.pep
HIYLIWQDPAETEEIWNFWNPILWTFEHCILSHNVSFCVVCQQMCLLVSLQFCFSFS

SEQ ID NO: 256822 - protein, 60 aa, Glycine max
  Clone ID: PAT_MRT3847_73933C.1.pep
NPFTLTKIIVFFFFNLGFQSWWPVELFPRGHSGKAFERLPLGGFNLLILVGNWSPPWNWN

SEQ ID NO: 256823 - protein, 343 aa, Glycine max
  unsure (1)..(343): unsure at all Xaa locations
  Clone ID: PAT_MRT3847_73934C.1.pep
MEALVEVCEPAEVRIEFALNCKCRATVRIRSLTQTTPVAFKIQTSSPNKFLVNPPSGLIQPLSSATFQVILKPQSHLPHSYPRSPSDRFLVKTAEFCANSQSTRGSPSAPTGXTLDIKLKVAFVGPILLNDAVTRGDLDAVRNLIKRQRSMLAELSPTQAETLLGAATKLLNPDDMVHLLLEAGLRIIPNPNNAPDQVHVADTNTNINEGEEIFEASRNGHVAEVESLLRRCGGSVKYRDQYGLTAVHAAAFKGHKDVLMVLSELSDLDLECEDREGHVPLHMAVESGDVGTVKVLVEKGVNLNAVNKRGATPLYMAKIWGYDDICQLLVSRGALYSLTSTSG

SEQ ID NO: 256824 - protein, 134 aa, Glycine max
  unsure (1)..(134): unsure at all Xaa locations
  Clone ID: PAT_MRT3847_73935C.1.pep
YATPMMPLDEEILSKAAQDMVEEWFDRVDEEDFFEEVFLIAALNGVEGLDYMARIPIATSSXYPDVLLRKNGXEKGIRRSVSLDGEQMTLIPGTSVDXDYNMLIRELGKNVPTLIVIERPKDEKLPIAKNCDIP

SEQ ID NO: 256825 - protein, 84 aa, Glycine max
  Clone ID: PAT_MRT3847_73936C.1.pep
RSDELVLYLTQKKKNPRCFFEKKFTQKCPPLFFFTPLFVTYLLPPLFNRTDTLVPGDIPLLRGHSSQQIDLGDHGGGLWLFIGL

SEQ ID NO: 256826 - protein, 48 aa, Glycine max
  Clone ID: PAT_MRT3847_73937C.1.pep
PIQFTQPHYIHFLQFSYHSHSYIPLNSNIKSITPNDSCQSYNNYLHPS

SEQ ID NO: 256827 - protein, 50 aa, Glycine max
  Clone ID: PAT_MRT3847_73938C.1.pep
FLILSRSRHVVSVDLMFPQRSESGKQCIFRPCLLASIALVIIGLTWVTIE

SEQ ID NO: 256828 - protein, 120 aa, Glycine max
  unsure (1)..(120): unsure at all Xaa locations
  Clone ID: PAT_MRT3847_73939C.1.pep
HLIRGIYLVFWWVIQNPKVEEKIIHESGTVLMESRGNDDIAKLXDRXHLAFEEVDSMGHLKASXSETLLLYPSVPDESNHVTIDHLLLYRTYVPAGWSDIYHIYYAGRGDATSREECMEF

SEQ ID NO: 256829 - protein, 114 aa, Glycine max
  unsure (1)..(114): unsure at all Xaa locations
  Clone ID: PAT_MRT3847_7393C.1.pep
MEPVSRANFFSFQRFWLPFQGQGGMRQQVDPSAHTIKSHGASLARKHARDWLILLLLIVIEIVLFVIHPFKRFVGRDMMEDLRYPMKENTVPVWAXPLYAVLLPMAVFLLFYMR

SEQ ID NO: 256830 - protein, 266 aa, Glycine max
  Clone ID: PAT_MRT3847_73940C.1.pep
MALKDTFYISHGSPTLSIDESIQARKFLQSWKKDVFPQRPSSILVISGHWETAVPTVNVVDSINDTIYDFYGFPKQMYQLKYPAPGAPQLARRVKELLKKSGFSHVDEDTKRGLDHGAWVPLFLMYPEADIPVCQISIQSQQDGTYHYNLGKALAPLKDEGVLIMGSGSAVHNLRALEPHSTVAPWALEFDNWLKDALLEGRYEDVNHYEQKAPHAKKAHPWPDHFYPLHVAIGAAGEDAKAKLIHSSIELGSLSYASYQFTSAAS

SEQ ID NO: 256831 - protein, 58 aa, Glycine max
  unsure (1)..(58): unsure at all Xaa locations
  Clone ID: PAT_MRT3847_73941C.1.pep
KTMLSFSSLKTVNYATRVEMVYIPKRRPLIVKACPVFTALLPGQLRSCGGAQLEFXRA

SEQ ID NO: 256832 - protein, 264 aa, Glycine max
  unsure (1)..(264): unsure at all Xaa locations
  Clone ID: PAT_MRT3847_73942C.1.pep
MALKDTFYISHGSPTLSIDESIQARKFLQSWKKDVFPQRPSSILVISGHWETAVPTVNVVDSINDTIYDFYGFPKXNLKYPAPGAPQLARRVKELLKKSGFSHVDEDTKRGLDHGAWVPLFLMYPEADIPVCQISIQSQQDGTYHYNLGKALAPLKDEGVLIMGSGSAVHNLRALEPHSTVAPWALEFDNWLKDALLEGRYEDVNHYEQKAPHAKKAHPWPDHFYPLHVAIGAAGEDAKAKLIHSSIELGSLSYASYQFTSAAS

SEQ ID NO: 256833 - protein, 104 aa, Glycine max
  unsure (1)..(104): unsure at all Xaa locations
  Clone ID: PAT_MRT3847_73943C.1.pep
MGSTVCACAEPDRPLWIPSCTCPTWVDGSXLPGDFCFNPLGIXICPXSLKWNVQAXLTHCTWEMLSAAGICISKLLTETDVLNTPLWHSGXELIYCTDTTTMYI

SEQ ID NO: 256834 - protein, 134 aa, Glycine max
  unsure (1)..(134): unsure at all Xaa locations
  Clone ID: PAT_MRT3847_73944C.1.pep
MYKMILTLVWSINLSMLYLYHTFVVDLSVSYYTRPNGPAGYLCMSPRKVTEDDLFYSGLGTVGNTSNIIKPAGTPAIDTQFRRVNGLGISIARLDLAYAGVIPLHTHPGALXLLVVGHGTICTDFLAWDNTAYL

SEQ ID NO: 256835 - protein, 72 aa, Glycine max
  Clone ID: PAT_MRT3847_73945C.1.pep
HLLEDNLESTLQSTYTYANTLDPEFSLEMTLPSYNTGNNHTLGHQNYLHSFFAPDFAGDKRGFSEIICVSMC

SEQ ID NO: 256836 - protein, 131 aa, Glycine max
  Clone ID: PAT_MRT3847_73946C.1.pep
RLIGKIPASLGKPDMKIVDLSRNMLEGDASVLFGSEKHTERIYLANNLFAFDLGKVRLSKTLGLLDVGHNLIYGTLPKGLTSLKDLYYLDVSYNNLCGEIPRGGKLQEFDASLYANNKCLCGSPLPSCKRF

SEQ ID NO: 256837 - protein, 57 aa, Glycine max
  unsure (1)..(57): unsure at all Xaa locations
  Clone ID: PAT_MRT3847_73947C.1.pep
MLVRDWIYGTLASLGLWRKEAKSXLVGLDYGGKTTLLHMLKDEGPLQSLSPYCWDPN

SEQ ID NO: 256838 - protein, 42 aa, Glycine max
  Clone ID: PAT_MRT3847_73948C.1.pep
DKTPLSSNYGVATMKTSMDTISLGYATFSKINFQFSIHFTIK

SEQ ID NO: 256839 - protein, 63 aa, Glycine max
  Clone ID: PAT_MRT3847_73949C.1.pep
CTASAQVSQASRLAPLVSRLSMHHRQPSYLHQGALPGQHVHGVYTHPCGADEHLSAPHQNNLF

SEQ ID NO: 256840 - protein, 53 aa, Glycine max
  Clone ID: PAT_MRT3847_7394C.1.pep
KVFAEDGENAIGVFVGALEVEELKLIEIEEVLVGEEVLGTVVKIILLLIRLVV

SEQ ID NO: 256841 - protein, 70 aa, Glycine max
  Clone ID: PAT_MRT3847_73950C.1.pep
NHSRRGMWWIALSITIWQHRNSLLFQGTPFEPQKVLEDALFLVWSWIKVGDKGFNTSFNHWSTNLVEALG

SEQ ID NO: 256842 - protein, 113 aa, Glycine max
  Clone ID: PAT_MRT3847_73951C.1.pep
QTLIAQNQSQTGEVTTVTAKTCISPKTGISSLLFDSSFVTEKTMYKRLPSSCEFTYMPWALPTLSRTGSSAFETTSATTATVPKCRMLDAGPLFTSTVSANEMYPLKFAHLIT

SEQ ID NO: 256843 - protein, 101 aa, Glycine max
  Clone ID: PAT_MRT3847_73952C.1.pep
DFEDLETGEKHENHRTDAAFAATTHKGDDLEAEERRLKKLALRAKFDSQYPFISLCIPYLIWTVTSNNPTPLFCKKTSFSWNKGECHIYCFKVLTLVESWL

SEQ ID NO: 256844 - protein, 42 aa, Glycine max
  Clone ID: PAT_MRT3847_73953C.1.pep
LLNTSGTISSTSWHANANGNESWFLNSNVSVNQKQRKVSVLS

SEQ ID NO: 256845 - protein, 32 aa, Glycine max
  Clone ID: PAT_MRT3847_73954C.1.pep
QVQEKQIREELCLNLVFIVIANNLLIARTNQF

SEQ ID NO: 256846 - protein, 88 aa, Glycine max
  unsure (1)..(88): unsure at all Xaa locations
  Clone ID: PAT_MRT3847_73955C.1.pep
MIHVLFLFAIVSFTFYAYVNDSCDAHLKGPDXPLMLXCKSPNTVTADDYVFSGFAAGNTTNPLNVALTLLFATDLPSVNGHGVFRERL

SEQ ID NO: 256847 - protein, 246 aa, Glycine max
  Clone ID: PAT_MRT3847_73956C.1.pep
FPVGLERKIEFCIDCKLSIILDRASEDLEIIRSERKRNIEILDSLLKEVSSQIFQAGGIDRPLIVKRRSRMCVGIRASHRYLLPDGVVLNVSSSGATYFMEPKDAIDLNNLEVRLSSSEKAEESVILSMLASEIANSESDINHLLDKILKVDLAFARAAYAQWMNGVCPIFSLGNFEGRDSVEDDDDTLVTQEDDDLTVNIVGIRHPLLLESSLENISDNLTLRSGIAPEFGIGMEQWLLIYATGI

SEQ ID NO: 256848 - protein, 175 aa, Glycine max
  unsure (1)..(175): unsure at all Xaa locations
  Clone ID: PAT_MRT3847_73957C.1.pep
VHPQKKQKGQSPRKKNGGGDQKKPGPQKKKTYATHLQAKKKKDPPPKKPKRGGPAEKMRPKEQKAPPGXKKKNPPRRGKNPNGKKLSSHPGPTKKRSGNPPGGEKKVPTQKRGGPPTPRQREERNPPPRGGEGAPPPLGGHGKKRGMGGKKTRPPPPGWHKKKEVPTQKKKKRGG

SEQ ID NO: 256849 - protein, 129 aa, Glycine max
  Clone ID: PAT_MRT3847_73958C.1.pep
TPCSILTGSFIYYNSFVLWGISVLICWWESMRWNQMVGPIAPSPASHFAQFCEGFVAGQNQSHRYGWWVALTSSVWQHRNQLVFEGNHFQPSKVMDDALFLIWSWLKTREKNFSISFNQWSSNLVEYFS

SEQ ID NO: 256850 - protein, 224 aa, Glycine max
  Clone ID: PAT_MRT3847_73959C.1.pep
IPQLKIFTLSVTKLFLQEDIRGFPRNRTVLSGDVDLVVESIEAPCRNKEYGCNETVDCMTSNDHEVTCIYSPCVCPFQDCNYVGPFEQLALHFSSKHWDSGRQFKYNHPLAISLQMDEQFLVLQAEEDGVLFLLNKGTETNGNTVMITCIGPNSSKEGFIYEIVSCRGRSSLRLKSVAENFPGRMEDFPPVDFLLIPFNFLVSFRELNVDICIWNSTEHNVDCS

SEQ ID NO: 256851 - protein, 53 aa, Glycine max
  Clone ID: PAT_MRT3847_7395C.1.pep
EKAMVESRFRERLLHSRWVLKKKWVFGRLDDFSKKQLPHNVTWGLSLRGAMEH

SEQ ID NO: 256852 - protein, 83 aa, Glycine max
  Clone ID: PAT_MRT3847_73960C.1.pep
MCRIKYQQHMTFRKNTFAHFMFDKKSNQKVQHQQILSNTLNSRQLQKSINPPHLHNHIIEEKGVCLFFSICDTKKYDTCALYK

SEQ ID NO: 256853 - protein, 85 aa, Glycine max
  Clone ID: PAT_MRT3847_73961C.1.pep
HITLKLEPLFKRSITYLTKNDSDLGDQAASFGQQHEFADIIWYPNQHKAVYRVDDRVPMYTSRNGVYDFIPFSSTPSLELTLIKT

SEQ ID NO: 256854 - protein, 62 aa, Glycine max
  Clone ID: PAT_MRT3847_73962C.1.pep
QSQPSKHLTNGSEVPKFGSGCIGRRVANKNPLQEQHDIYVIKHAYRKGITCFDTADVYGANA

SEQ ID NO: 256855 - protein, 66 aa, Glycine max
  Clone ID: PAT_MRT3847_73963C.1.pep
SSLISLTFSCVVTFIPPFNGCLVRYASIICVFHFYKSIIHRSNVVSPKLNLFFIFLFSLCSQFIFW

SEQ ID NO: 256856 - protein, 257 aa, Glycine max
  unsure (1)..(257): unsure at all Xaa locations
  Clone ID: PAT_MRT3847_73964C.1.pep
NSARGKNEISPNLNGNICPNPFPSIRILQLRRPRFPDPALIGSPGKRMMDCGVGSIVWVRRRNGSWWPGQILGPDDLSASHLTSPRSGTPVKLLGREDASVDWYNLEKSKRVKAFRCGEFDDCIEKAETAQGGPLKKREKYARREDAILHALELEKQISKKPGKSSASSLNAVKKVAVAVASPPETLGNDNENHANLNVYCENETGGGSFPSEVAKDGNQLHVEVDYSETTPRMRDLQDXGLRIALRKDLSSSGDPT

SEQ ID NO: 256857 - protein, 76 aa, Glycine max
  unsure (1)..(76): unsure at all Xaa locations
  Clone ID: PAT_MRT3847_73965C.1.pep
RSGGLGMPGGPYLFGGDLVGGLEKKPASGTYXNLIFYLGACGSGGIFGGLLSGDFNIYATPAFNAEERRWGTYWPW

SEQ ID NO: 256858 - protein, 85 aa, Glycine max
  unsure (1)..(85): unsure at all Xaa locations
  Clone ID: PAT_MRT3847_73966C.1.pep
AETSEDLLEWKTALDKALTQAPSAALVMGHNGIFRSDASASIEGSFHQWRDKRPIKSLVVGRPILLALEDIDGXPSFLEKALRFL

SEQ ID NO: 256859 - protein, 75 aa, Glycine max
  Clone ID: PAT_MRT3847_73967C.1.pep
LKHKIQFKTGVLNKTGEGPPHLLCWEFLMKSLPLNQKKTQAFDHGFNKISFRLKKLESLLLIASIKKLKFTLPAI

SEQ ID NO: 256860 - protein, 190 aa, Glycine max
  unsure (1)..(190): unsure at all Xaa locations
  Clone ID: PAT_MRT3847_73968C.1.pep
MYSLLSLSNVDEDEDHLRLENVGRGDSPRYTNTGCLSDHLERIHRRVRDRLENKLAEIHQRPFWHACLLDLLXHERGRRITSDMAXLWEPASPKYYXTPTDASAPTYVITYTIYSRHPSTDCAGSTIASTTCLLXAGISPQVQTHSHAPLAFTLAVTXMIGMLMNMDATTSNYATASDDEIAKEGSFYLI

SEQ ID NO: 256861 - protein, 292 aa, Glycine max
  Clone ID: PAT_MRT3847_73969C.1.pep
MQEAGLGMGMGMMSGEVSAAGDHHRQVKAEIANHPLYEQLLSAHVSCLRVATPIDQLPLIDGQLSQSHHLLRSYASHHSHSLSPHDRQELDNFMAQYLIVLCTFKEQLQQHVRVHAVEAVMACRDIESTLQALTGVSLGEGTGATMSDDEDDLQMDGSLDQSSADGHDMMGFGPLLPTESERSLMERVRQELKIELKQGFKSRIEDVREEILRKRRAGKLPGDTTSVLKAWWQQHAKWPYPTEDDKAKLVEETGLQLKQINNWFINQRKRNWHSNSQSVNSLKSKRKREYAH

SEQ ID NO: 256862 - protein, 148 aa, Glycine max
  Clone ID: PAT_MRT3847_7396C.1.pep
MEQPPDTTTNLFDHLSKELLYTILDHLNDDPFARKSLSQSCKSFHALEATHRTSLKPRRLEFLLPKTLHRYRSISHLDLTLCPCVDDATLKSLSLAWHSSLRSIDLSKSRLFSHVGLSALAVNCTCLVEIDLSNRPDLTDLARQSRRL

SEQ ID NO: 256863 - protein, 220 aa, Glycine max
  Clone ID: PAT_MRT3847_73970C.1.pep
MQEAGLGMGMVSGEVSAAGDHHHHHRQVKAEIATHPLYEQLLSAHVSCLRVATPIDQLPLIDGQLSQSHHLLRSYASHHSHSLSPHDRQELDNFMAQYLIVLCTFKEQLQQHVRVHAVEAVMACRDIESTLQALTGVSLGEGTGATMSDDEDDLQMDGSLDQSSAEGHDLMGFGPLLPTESERSLMERVRQELKIELKQGFKSRIGRMWEGIFRKRRAGK

SEQ ID NO: 256864 - protein, 145 aa, Glycine max
  Clone ID: PAT_MRT3847_73972C.1.pep
MAEPKYLTGDKPAIEEFLSKFDTFLFDCDGVLWSGDHLYDRVPETLEMLRSKGKQLVFVTNNSTKSRADYKQKFDKLGIPAQVDEVFGSAYSAAVYISRILKLPEGKNKVYVLGETGIEQELQAENVPYIGGTDPSLRRDMEPAD

SEQ ID NO: 256865 - protein, 57 aa, Glycine max
  unsure (1)..(57): unsure at all Xaa locations
  Clone ID: PAT_MRT3847_73973C.1.pep
FFFFLILFFFFFXDATFANDILYNAACNSLAVSIASWRDKSSWRCICCILLKLGYTF

SEQ ID NO: 256866 - protein, 52 aa, Glycine max
  Clone ID: PAT_MRT3847_73974C.1.pep
ARPPLPLYFKHPRRHGCKNITGGGATHCILPSGDESMHYQYRISFKSNTHHL

SEQ ID NO: 256867 - protein, 59 aa, Glycine max
  unsure (1)..(59): unsure at all Xaa locations
  Clone ID: PAT_MRT3847_73975C.1.pep
SKRNKKNQQPRLVASPRXIYIYIYIYIYIYIYIYIYIYIYIPSPTKRLCMSHDYMHCVF

SEQ ID NO: 256868 - protein, 76 aa, Glycine max
  unsure (1)..(76): unsure at all Xaa locations
  Clone ID: PAT_MRT3847_73976C.1.pep
LSYSHVGDNDGMITXNRQALRSTEIAKSYGRDDIGSSSCMMYQHLKHTDHATTITYGHXVAHSKTDMDDDTIEILM

SEQ ID NO: 256869 - protein, 51 aa, Glycine max
  Clone ID: PAT_MRT3847_73977C.1.pep
SLNKKPDICQIIESCFFLFHQETAKGLLAFGLRFMSIALRLNKFNFERCAV

SEQ ID NO: 256870 - protein, 87 aa, Glycine max
  Clone ID: PAT_MRT3847_73978C.1.pep
FFSLIGVCLVAQIHSFFTRGCFFFSVSYKFEGLEDPLLIFGFERCFWGGVISSLLMFYFQSLFQISPANYLSSRPPFSYSIPMFFSP

SEQ ID NO: 256871 - protein, 91 aa, Glycine max
  Clone ID: PAT_MRT3847_73979C.1.pep
NPGTKMLGKTLLSPLEDFVKVPPCLVSFFVTYTTIKEFSVPYMFKNNFGNTPHHSQLSKYIIFPNRIVMGFGFFLFGPLIGLSGLRKEQVS

SEQ ID NO: 256872 - protein, 86 aa, Glycine max
  unsure (1)..(86): unsure at all Xaa locations
  Clone ID: PAT_MRT3847_7397C.1.pep
KVIYTGKQVEWNSPINNTQKSENKTSQFEAIQSIVPARIYLALKGDVFNEYLSXLRQISRAEAFRSSQGVEKKRRGRVRXFHHYLN

SEQ ID NO: 256873 - protein, 78 aa, Glycine max
  Clone ID: PAT_MRT3847_73980C.1.pep
TILVGLWFPELGRCADNLCLPFSYTVGHLHFGGLIEFDKMICRIIIIYISYIYIYVHVVCALYFTYVLSEWVGFMFSY

SEQ ID NO: 256874 - protein, 80 aa, Glycine max
  Clone ID: PAT_MRT3847_73981C.1.pep
TYGSEDECLLDSHENCTQLHYCRNLTYVFSVITAQQRDTQNTVMCDILIVYVLVRLSLSLSLSLSYTHTQTETQTQTQTH

SEQ ID NO: 256875 - protein, 163 aa, Glycine max
  unsure (1)..(163): unsure at all Xaa locations
  Clone ID: PAT_MRT3847_73982C.1.pep
WLLKRPLFSLFLAGSLPVDPSAHEALLLTYESEKEGHPGLLXVQMLLAILRACSQHDPRSNVRXDKXTMTNEALVFGEHDNHGLRELRQYVIARGRHIGFFLHDVGKNADXVMFLKTTVQLRPVMAQGVNGQLIRSFRQLXAGDQGNMDLPAYEWTPKLMPWG

SEQ ID NO: 256876 - protein, 85 aa, Glycine max
  unsure (1)..(85): unsure at all Xaa locations
  Clone ID: PAT_MRT3847_73983C.1.pep
QLNXLXSGVVISSEVVVVXWRTXEGXVYXSLXXSXKNFXXHXXXIGNASPSXXSSSSTPPPSSLAAQAIKXXASRRXPSXSVACX

SEQ ID NO: 256877 - protein, 106 aa, Glycine max
  Clone ID: PAT_MRT3847_73984C.1.pep
RTRTPTLPFTTPFFFIHDHNPLGSVFTRQRPILITLTLSQNYYLRIFMLNHLKKDNQPMILETSNTPSVVKIFHYNFSMKDHQQQHSLSIPHNKIISMRKLSPPPI

SEQ ID NO: 256878 - protein, 118 aa, Glycine max
  unsure (1)..(118): unsure at all Xaa locations
  Clone ID: PAT_MRT3847_73985C.1.pep
ICITLNSLDGEAFEVEEAVSVKSQTIKHMVKDKXPDNEIPLPNVTNKILGKVIEYCKKHIEANCADEKPNEDELRXWDVDFIKVDQATLFDLILGSVFPSMVLLFFWYFMGFFYGLGV

SEQ ID NO: 256879 - protein, 105 aa, Glycine max
  Clone ID: PAT_MRT3847_73986C.1.pep
FPVVFLWGFFFPPPPPLRNFLWGGGRETISGAPETFLDRCPKLESPHCCQNSPSFSAEDNMRGPSCVKNIYFFCAHRDIVGAFLKRVEGGVLNFYYYEYYEGFSV

SEQ ID NO: 256880 - protein, 54 aa, Glycine max
  unsure (1)..(54): unsure at all Xaa locations
  Clone ID: PAT_MRT3847_73987C.1.pep
VVRPDYTSSAQIGEIQVGDGSPLPQEELHTAWSTQVRHATTLFADGXPYSYAMV

SEQ ID NO: 256881 - protein, 44 aa, Glycine max
  Clone ID: PAT_MRT3847_73988C.1.pep
KSWSKSVKQCLKISLLITGFSSLFVVAMFTIHCTHNLSMVKSGR

SEQ ID NO: 256882 - protein, 54 aa, Glycine max
  Clone ID: PAT_MRT3847_73989C.1.pep
PLYCAVKIRLLDSNDYLILRLHRSYETSYTIHVAVEQVEFATAFLLVTARYPVT

SEQ ID NO: 256883 - protein, 41 aa, Glycine max
  Clone ID: PAT_MRT3847_7398C.1.pep
HGLFAELRKSVRTASIAFYACLAYSMQFFSSRTVLPFLVVS

SEQ ID NO: 256884 - protein, 74 aa, Glycine max
  Clone ID: PAT_MRT3847_73990C.1.pep
NLCRMAFCFYQLFFLGILFVALALSSGLTTGLSEISSYRCLGLGLCNKFEECQSACINVGLHAVYCEKGVCCCK

SEQ ID NO: 256885 - protein, 127 aa, Glycine max
  unsure (1)..(127): unsure at all Xaa locations
  Clone ID: PAT_MRT3847_73991C.1.pep
RLIKALSTSRGRRRGPYXTVPXHIXXGFLFHXMPSPPMLHGTGWGSXXCXXXXXXXXXXXVWXXXXXXVXXXXRVGXLCXGEXWCCLGSXGVVGXGWLFLLGGFPFLXFRXPXLPXKPGSGMKGPIS

SEQ ID NO: 256886 - protein, 48 aa, Glycine max
  Clone ID: PAT_MRT3847_73992C.1.pep
NQHRTADTGAIICKLLRGNILISRTKEKMSSLILPKKELKFCMMRCLN

SEQ ID NO: 256887 - protein, 55 aa, Glycine max
  unsure (1)..(55): unsure at all Xaa locations
  Clone ID: PAT_MRT3847_73993C.1.pep
PIGCPKSQFLYKQLYVLLNIFGKKGWNFILAKKTKGEVAKRRGLFAPTPLXPGXR

SEQ ID NO: 256888 - protein, 67 aa, Glycine max
  unsure (1)..(67): unsure at all Xaa locations
  Clone ID: PAT_MRT3847_73994C.1.pep
VXXARXQXXAVIRXSXCXXXGCXFRLXRXXXXWXLXFXXXXXXXXXXXXXEXCGSSRIXSLRTRXXD

SEQ ID NO: 256889 - protein, 85 aa, Glycine max
  unsure (1)..(85): unsure at all Xaa locations
  Clone ID: PAT_MRT3847_73995C.1.pep
SSSLAARLLAQLLLDLRKIGQEKVHISIAVIGHVNSGKSTTTGHLXYKLGRIDTRVIARFEKEAAXMNKKSTKYSWVLDKLKAAR

SEQ ID NO: 256890 - protein, 136 aa, Glycine max; identical to SEQ ID NO: 143601
  Clone ID: PAT_MRT3847_73996C.1.pep

SEQ ID NO: 256891 - protein, 95 aa, Glycine max
  Clone ID: PAT_MRT3847_73997C.1.pep
KRDQKNIGYRTFQKLFSYEKEKKERLQVVEKLNDPMVTILIPYTEPFYFQGCSTRANNFQGLDEFQYSKQSYCAFGIEWTLRQDQFYGFLLGLDS

SEQ ID NO: 256892 - protein, 177 aa, Glycine max
  Clone ID: PAT_MRT3847_73998C.1.pep
MKESGRKQGTMSPCAACKLLRRRCTRDCVFAPYFPADEPQKFGSVHKVFGASNVNKMLQELPEHQRSDAVSSMVYEANARVRDPVYGCVGAISSLQQQVDVLQTQLALAQAEVVHMRMRQFSPPSEQQQPSVLPEASNSSSENLYHSSRLLSSQTKSVFGMDMVVDQANMGQSLWSY

SEQ ID NO: 256893 - protein, 74 aa, Glycine max
  Clone ID: PAT_MRT3847_73999C.1.pep
ILCPFSPSPSTHLLLPSSSYPWLPMVVSLLLTHLLLEAASPITFLLLHSATIKLQEAKDSIDEEDPSPTSSTWS

SEQ ID NO: 256894 - protein, 112 aa, Glycine max
  Clone ID: PAT_MRT3847_7399C.1.pep
RRVMAKSEMKFIGVVILMMIIVGSTQADNNSPDLTGCEVKCGFKCIAYFYSKKKFDECCLPCIRKCHHEMSIDVVYDCITGCRLTKSIDDNIDARVLTVHAMDSCVQECKNK

SEQ ID NO: 256895 - protein, 133 aa, Glycine max
  unsure (1)..(133): unsure at all Xaa locations
  Clone ID: PAT_MRT3847_739C.1.pep
RKRFLSIPPAPSFNNIPNSEAINAPNHNHATQNKSSEQPKTPINRRRPKSPMALYLFWHHKLXRSPPHGSNKQNQATLSKNAKTKFQHPTQQQRTKLLFFMTTLQKGALKAQKYNLSPERNKKKNWGYSQVWF

SEQ ID NO: 256896 - protein, 46 aa, Glycine max
  unsure (1)..(46): unsure at all Xaa locations
  Clone ID: PAT_MRT3847_73C.1.pep
FSTYIIIFYXLEPYEDKTSYTFLGGGCIIYLSXRAEFRAXVRCXRX

SEQ ID NO: 256897 - protein, 60 aa, Glycine max
  Clone ID: PAT_MRT3847_74000C.1.pep
RSKVHYTIFCMFYLYHIHISKLLIFLGQLLSTNVAYMGICRVSYFDTMLQIFEKIWAHLY

SEQ ID NO: 256898 - protein, 105 aa, Glycine max
  Clone ID: PAT_MRT3847_74001C.1.pep
PKRPPTRPDGDIEKKSRAIDEEKAKEEEDADAEMQLNINQESDEFRLPTKEELDEEALRPPDLSNLQRRTKEIVRVLSNFKALRQDGSTRKEYVEQLKKDLCTLL

SEQ ID NO: 256899 - protein, 90 aa, Glycine max
  Clone ID: PAT_MRT3847_74002C.1.pep
EKSQSMLLLNMFLKRHTKSFSLLWLRLLLILLSIASVNGNEQKNFYIVFLGAHTESRGNALDTYLNVLSAVKESFLEAKESMVYSYTKTL

SEQ ID NO: 256900 - protein, 65 aa, Glycine max
  unsure (1)..(65): unsure at all Xaa locations
  Clone ID: PAT_MRT3847_74003C.1.pep
GNVKNESALESLIDPQFRALQKALKIPPKAXKGGLMVSKKFLPLFRTGKLGPFIFDNVPKVKPVL

SEQ ID NO: 256901 - protein, 70 aa, Glycine max
  Clone ID: PAT_MRT3847_74004C.1.pep
ERGVIMKATGVRHTWDAWYMAGTHRCSAEYSWSFPWIRGDFLLIRPMESHWSKKDYIGLRLQRVIYKGRI

SEQ ID NO: 256902 - protein, 71 aa, Glycine max
  unsure (1)..(71): unsure at all Xaa locations
  Clone ID: PAT_MRT3847_74005C.1.pep
YMAXATLXVXKPXLQANGKGFSEFXGLRRSSXSXPXXXNLXRISSLSLPSIXRXVXTXGVXRRGLTXXXXG

SEQ ID NO: 256903 - protein, 111 aa, Glycine max
  Clone ID: PAT_MRT3847_74006C.1.pep
ASLGQVFLSNSNSTEHFDACKWTQSEPHWWQLIFPIEVCGPNNGSEMWSSQWAHQSSGHLSFLIDNPKQSTVLDSLLGISQDIESAGHTIMPAFSVPQATARSSENAGSSA

SEQ ID NO: 256904 - protein, 304 aa, Glycine max
  Clone ID: PAT_MRT3847_74007C.1.pep
MASISCLSSFSLSNFSAPLPISICSSSSTFLTSQIPCKPTKRSKPKRHHVSKVTCNSNQNTPTPNPEEERPSYNILGKYRRDVLLGIGGLYGASALSNTNPLAMAAAPILQPDLEHCCITDDVPPKGVIEAQVYCCPPRSSSPPIDFKLPKGTPLRVRPPAQFVTDEYLEKYKLALKRMRELPSDDPRSFKQQADIHCAYCDGGYKQLGFPTELDFKVHFSWLFFPFHRWYLYFYERILGSLIDDPTFALPYWNWDNPDGGMVIPLIYRDEDSPLYDPRRNPDITPDTLVDLNYGSGQGPRFKF

SEQ ID NO: 256905 - protein, 59 aa, Glycine max
  unsure (1)..(59): unsure at all Xaa locations
  Clone ID: PAT_MRT3847_74008C.1.pep
SNKVWNLVELPNGAKTIGYKQIFKXKKDSLNNIKRYKTRLVNXGFTQKEGINYTDFFSF

SEQ ID NO: 256906 - protein, 620 aa, Glycine max
  unsure (1)..(620): unsure at all Xaa locations
  Clone ID: PAT_MRT3847_74009C.1.pep
MAYISSLSSFSLSNFSAPLPISICSSSSAFLTSQIPCKPTKRSKPKGHHVSKVSCNSNQNTPTPNPEEEKPSSYNILGKHRRDVLLGIGGLYGASALSNTNPLAMAAAPILEPDLEHCCITDDVPPKGVIEAQVYCCPPKSSSPPIDFKLPKGTPLRVRPPAQFVTDEYLEKYKLALKRMRELPSDDPRSFKQQADIHCAYCDGXYKQLGFPVELDFKVHFSWIFFPFHRWYLYFYERILGSLIDDPTFALPYWNWDNPDGGMVLPSIFADEDSPLYDPRRNPDITPTTLVDLNYGSGKEPSVEQNLGVMYTSVVSGAKRASLFHGKPFLAGKQPELGGGTVELGPHTAVHRWTGDPRQPNKEDMGRFYSAGRDPAFYSHHANVDRMWNIWKTIPSGKRRDFKNRDWLETSFFFYDENKNLVSVKVKDSLDSKKMGYVYQDVDIPWLEKRTKPKRTRKAKQVAFTQQFGGIGAAMAAETGPSSKFPLTLLDSKVTLLVKRPKQLRSKRDKEEDEEVLVIDGIEFDGDDDVKFDVYITDEDVEEIGPENTEFAGSFSTLGHSHSNMNMDKKIKTSLTLGITDLLEDLDAENDDSILVTLVPRSENVSITIQNIKIEFEKEE

SEQ ID NO: 256907 - protein, 70 aa, Glycine max
  Clone ID: PAT_MRT3847_7400C.1.pep
KLGRFSPPGPELLQRRPSQPNFKSREDPNVPSCRCSHINSQRVSGGNNSKCKIKHRSTHHLNSGFLPGTK

SEQ ID NO: 256908 - protein, 105 aa, Glycine max
  unsure (1)..(105): unsure at all Xaa locations
  Clone ID: PAT_MRT3847_74010C.1.pep
XXXXXXXXXXXLXXXXXGXXXXGXGXGSXVFFXFFLCXXVXCXLXLSVXXXXWXRXXWLLXXCXXXXRXXXXXXVXXCXVVXXXVXFXXVWXRAXFRAXVXVRAI

SEQ ID NO: 256909 - protein, 80 aa, Glycine max
  Clone ID: PAT_MRT3847_74011C.1.pep
GKKKPFISLGKISNPPYPKRGGSKPTNPQTNSPRITTQIPPLFFSLINIKARGEKKKKTHPSLLWPHTPYKIYRGPTRGK

SEQ ID NO: 256910 - protein, 88 aa, Glycine max
  Clone ID: PAT_MRT3847_74012C.1.pep
MADEAKDKGSAAFYFGDYAVDIHDYCDASALDPYNQDLYSNRSAAYAFLKNYAYALVAAKKTAELEPDWSKGHSQIGAAHNGLCQYEE

SEQ ID NO: 256911 - protein, 70 aa, Glycine max
  Clone ID: PAT_MRT3847_74013C.1.pep
VMSLWDAHYSNMLWLDSTYPTDKNPETDLGSGRGECEVTSGVPADVESKSPDATVVYSNIKFGVLNSTFG

SEQ ID NO: 256912 - protein, 78 aa, Glycine max
  unsure (1)..(78): unsure at all Xaa locations
  Clone ID: PAT_MRT3847_74014C.1.pep
LSTLWLASITRPPPLLTKQAEXHHHPXXXPASXXXAXXXPARRXAXXRXEXXFXTXRSLSARASLGXHLPSTWPSTSS

SEQ ID NO: 256913 - protein, 47 aa, Glycine max
  unsure (1)..(47): unsure at all Xaa locations
  Clone ID: PAT_MRT3847_74015C.1.pep
YMHAYXXXXSAXSSRSXXXADXVRSXTRXXYSAIGHLTXRTQLYPIV

SEQ ID NO: 256914 - protein, 72 aa, Glycine max
  Clone ID: PAT_MRT3847_74016C.1.pep
KSLGGFLSMKCCFLKSQDIIGRVVCVLKMWGVPCPFSNYLFFLSLPSCSPQTNGFFFPPLINLLVKGPPFLI

SEQ ID NO: 256915 - protein, 50 aa, Glycine max
  Clone ID: PAT_MRT3847_74017C.1.pep
SLGFFFSTKRIRFFLFHKFTHRQFICCTRKEKPLHNTGNSNLEKQAKHFY

SEQ ID NO: 256916 - protein, 57 aa, Glycine max
  unsure (1)..(57): unsure at all Xaa locations
  Clone ID: PAT_MRT3847_74018C.1.pep
YSQNYAGQQQPHQPPXYHMDDYAKFPCIYVPSILVLLHLVYSPYYHYLCLLFNSLFI

SEQ ID NO: 256917 - protein, 102 aa, Glycine max
  Clone ID: PAT_MRT3847_74019C.1.pep
SQHSETKTEGWQVPGQPGSTFTCAGVYSHAVCSEEGFRKPWIDFLGPCLSSPYTATERVLCATCIITTKEFEVLCSPDPGGSWFLTRVTTLFYFVLSSKLLL

SEQ ID NO: 256918 - protein, 101 aa, Glycine max
  Clone ID: PAT_MRT3847_7401C.1.pep
LLFLVRWPFPGGKSLSLEPGGIKQAPVLNNDLLARAPPPLEYSTPSQDMHFGPEQNGRELDYVTNKGQTQVSGPLMATTTLYPSVMPPGGATYFALNQGLG

SEQ ID NO: 256919 - protein, 49 aa, Glycine max
  Clone ID: PAT_MRT3847_74020C.1.pep
FALKGRIYSPNDINISNVVDVASQVAGCGYEYGTGWGKQVLKINILESF

SEQ ID NO: 256920 - protein, 83 aa, Glycine max
  unsure (1)..(83): unsure at all Xaa locations
  Clone ID: PAT_MRT3847_74021C.1.pep
VVLKMNAGEAEIKFLSGIFXNGALCSVDEVFFRCSESGNGESETFSPRGPCLDFFQGFRSNGGFVPPWWKAKLPPGGLVSFVQ

SEQ ID NO: 256921 - protein, 49 aa, Glycine max
  Clone ID: PAT_MRT3847_74022C.1.pep
GVKKFLSKSLFKVQTWGGGKMLSKTPGWNFFLKKAKVKGNFWLDLGKKI

SEQ ID NO: 256922 - protein, 179 aa, Glycine max
  Clone ID: PAT_MRT3847_74023C.1.pep
FSFSSPGPRRGLNRKIFSLGGTPFILRGFSSPPLLVGRQWCFFFCTNSPNNEGGWGPVVLFCPSVKVSLGLGAVPSPLGQKGPPVLWFFRINLFPGVNTVLFGLCYEGDPFYPFVFPGVLAEIFFLGVPLFCVFVCPLYIYNSSIAALKVSRVTPLSCLRLGMNKKGSSAILGNNKTKT

SEQ ID NO: 256923 - protein, 132 aa, Glycine max
  unsure (1)..(132): unsure at all Xaa locations
  Clone ID: PAT_MRT3847_74024C.1.pep
PYISTHFLHYFFSNFTSNFFLLFSIIFLFLFLNYFLFILYLFYIFIIFFXYYFYNLFLFFLYLFFYFIYIFSQFFLFIFPTFFIILFFFFSSFSFHFFIKYFFLXFLIHFLYFFFIFFYYLXNILFFFFIYF

SEQ ID NO: 256924 - protein, 100 aa, Glycine max
  unsure (1)..(100): unsure at all Xaa locations
  Clone ID: PAT_MRT3847_74025C.1.pep
PPASNDPGGPYFRPREGGPPPQKGVLTRKKARPPLQNPEEPGFSPXPPMIRAPYSVAVGFPIRVGPPLQSRKEKGSAGPKNPGGPPPPRMTPAGGVGGGF

SEQ ID NO: 256925 - protein, 217 aa, Glycine max
  unsure (1)..(217): unsure at all Xaa locations
  Clone ID: PAT_MRT3847_74026C.1.pep
PASAQAAADCSYKAGGDLVKDYGEMKKLLARPGAIWIGKKVKPRCLRSIDLYPVVHAWSSWMHHTVLPCANESNVTVVRSQFLIATILNEPLDIGRIISSDIHQVAQTNKPKATLSHPSLICFLCERAGVGIPWDEPTATIPRPITAAWIDSRLDGPMGAPPQPQEQQPQPQPQQEQEQHAQEDQPPAPSSLDQCLMLLVQTQTQLSQDIHRLXTEA

SEQ ID NO: 256926 - protein, 82 aa, Glycine max
  unsure (1)..(82): unsure at all Xaa locations
  Clone ID: PAT_MRT3847_74027C.1.pep
VVDSMVVERARGESQSTSGSLQSLCWGSSAFGGIVSSYFSGSLLDAYGVRFVXFGVTSLLXLITSVVAVLVKDNLCLVQQEG

SEQ ID NO: 256927 - protein, 28 aa, Glycine max
  Clone ID: PAT_MRT3847_74028C.1.pep
MPSFPIFLCELYKNVQCCCGYLDFNFNL

SEQ ID NO: 256928 - protein, 66 aa, Glycine max
  Clone ID: PAT_MRT3847_74029C.1.pep
FGSRADLNKPPEMISGNMTGAMCVYSALFMRFAWMVQPRNYLLFACHASNETVQLYHFSRWAKAQG

SEQ ID NO: 256929 - protein, 71 aa, Glycine max
  unsure (1)..(71): unsure at all Xaa locations
  Clone ID: PAT_MRT3847_7402C.1.pep
TRTPELAKTRYTIIAQHIKGGLPXMRARITALLVTIANGHASYGEMTKCKAGQGAVLLNILSKYCDAFSSM

SEQ ID NO: 256930 - protein, 86 aa, Glycine max
  Clone ID: PAT_MRT3847_74030C.1.pep
GKPPLPPVEMVYTIIFFFIAIVPPFAFPVYAKRVFNHLKMAELNDEVPFVFVKMEKLPLERPKQFSLSKFSCQCKLVYFQVALGFQ

SEQ ID NO: 256931 - protein, 177 aa, Glycine max
  unsure (1)..(177): unsure at all Xaa locations
  Clone ID: PAT_MRT3847_74031C.1.pep
MPPLTSWLVLPILVLLAAPATTPPARASPVASSFDGQREFDYFKLALQWPGTYCKRTRSCCPTNGCCRGSNSPAVFTIHGLWPDYNDGSWPSCCSGSSFDPKEISTLTNALEQYWPSLSCSKPSLCHGGKGTFWAHEWEKHGTCSYPVFSXEYDYFLTVLNVYLKYNITSVLNDAGY

SEQ ID NO: 256932 - protein, 70 aa, Glycine max
  Clone ID: PAT_MRT3847_74032C.1.pep
TSTSKCTMKTHVCKTGLKEPALLMNGFHGANTDLDQHPDGQHHTANGKPYRTSRPHHHEPNTNPIEKGNC

SEQ ID NO: 256933 - protein, 41 aa, Glycine max
  Clone ID: PAT_MRT3847_74033C.1.pep
EDVENLPKSQLTREKKLRRKNRLGFSHNKFKLLMHLKLWRS

SEQ ID NO: 256934 - protein, 44 aa, Glycine max
  Clone ID: PAT_MRT3847_74034C.1.pep
TTRLEQYRTIKYPIQGTAKKDAHHHRRGRYDSGKHSLEITYLFQ

SEQ ID NO: 256935 - protein, 65 aa, Glycine max
  Clone ID: PAT_MRT3847_74035C.1.pep
YQLSTRKFQLGPSVPCSISVYSGVKPVKVEHYRGYSSYVIDSFNNQKHGLIFCFNPKHPISKAAC

SEQ ID NO: 256936 - protein, 67 aa, Glycine max
  Clone ID: PAT_MRT3847_74036C.1.pep
RLNPNIKDESESIALAGLFDSKPRMDLSKPLKNVYIISTGPPKHQRKINKRNPDTRLHNFTGRGCHP

SEQ ID NO: 256937 - protein, 124 aa, Glycine max
  unsure (1)..(124): unsure at all Xaa locations
  Clone ID: PAT_MRT3847_74037C.1.pep
ARWKKRGGGGGVSNSNYGGPVDNMGNSSCVTRALAEILRGLNKRMRGTIGKHDRFIPWDHANRVLXFYAPGWCGEIRDGIFSDNGSGTVGYRVTGRGSDGEASLFLSYFSSRISNFYHPLIGSS

SEQ ID NO: 256938 - protein, 219 aa, Glycine max
  unsure (1)..(219): unsure at all Xaa locations
  Clone ID: PAT_MRT3847_74038C.1.pep
IFSFISATLSFHVSTLFIYEFGTLFFILLLLFPIPFSLMFPSPNSLAKGLNSLPNPLISQSSHSAISSNMWRHAAKHVCRGIIRQNFHPPRLLALSHGSVFSPKREVLLSSVAKLNCIARGDFQFQFGAKGYSGVAEAVSSTDVEEDGGTAVDEIQQLLWQEMNDEVESQLGEEEGAPIDEIQQLLLQEMNGEEKNDXVGGEAAPVDGIQELLQGMKKE

SEQ ID NO: 256939 - protein, 107 aa, Glycine max
  unsure (1)..(107): unsure at all Xaa locations
  Clone ID: PAT_MRT3847_74039C.1.pep
YIFNNNKPYPKSHFYHFIPYPNIIIYYLSINNNVVNXFPFYIHLIYFKXENFSKYSLQSSPISFNKYISXFLEIILFTFXIIFHPFHISNINKILLYYFNNIFFTFN

SEQ ID NO: 256940 - protein, 42 aa, Glycine max
  Clone ID: PAT_MRT3847_7403C.1.pep
RLEYIVHLASKSDANPCHRFTHIYLVGVGLVTSAPFRWAHNT

SEQ ID NO: 256941 - protein, 85 aa, Glycine max
  unsure (1)..(85): unsure at all Xaa locations
  Clone ID: PAT_MRT3847_74040C.1.pep
EYIKIINGLFMRDDLHRGGTFNRVGLAKDAVPAAFINVXQIKNGSLAMATKLGFYIQAYATVEGPVDDLAQHPSTPFGNTLLTVS

SEQ ID NO: 256942 - protein, 27 aa, Glycine max
  Clone ID: PAT_MRT3847_74041C.1.pep
KICNISCHSQYEAQHNLKRRNQYSRSL

SEQ ID NO: 256943 - protein, 55 aa, Glycine max
  Clone ID: PAT_MRT3847_74042C.1.pep
YVSLHQHNICLLLTQYSPIPQNNQFQLVIAEMINRLKYFICQELKKTESILSIVS

SEQ ID NO: 256944 - protein, 81 aa, Glycine max
  Clone ID: PAT_MRT3847_74043C.1.pep
LVTFSFHVLGSFRCIIVLIVIFYQTICSIMTCPYKILLHGRHIKIGSGYFTLYISLYEKKNDNFEALAKKNILKTKFRTRG

SEQ ID NO: 256945 - protein, 101 aa, Glycine max
  Clone ID: PAT_MRT3847_74044C.1.pep
VSAVTPVNRNVPDMSVVCTGVMGIGSPQRRRYTRTPLSRVSDWSSAPLTSSSRHATPDTENPVGGPGRRAAPAGSHPALLHHKNKFSHTIAKKNRTRGRTR

SEQ ID NO: 256946 - protein, 113 aa, Glycine max
  unsure (1)..(113): unsure at all Xaa locations
  Clone ID: PAT_MRT3847_74045C.1.pep
XRAXPXXGPXAXXXGGWXXXXGXXXPXXVXGXXXXVVPXXWPPXCXXXXXWGXXXXXXARXXCEPXXXPWXAAAXXXXGVXXXGXVGXXXXXXXXGAXVCXXXXXXGXXXXRX

SEQ ID NO: 256947 - protein, 149 aa, Glycine max
  unsure (1)..(149): unsure at all Xaa locations
  Clone ID: PAT_MRT3847_74046C.1.pep
GTYSNSNFXXVDEQEENHKASTRKDKHLIIKSHMCTRFSPNEDPITLNQCKVLAGPQAPSTSKNKRMMDNRRLTRNKSLIDTRSQLLHRSLVEEVNKRRLFNTVGAVENIGFVTPYEVTNKKSHPACGAFDVNSSRSSKRENFNREKFF

SEQ ID NO: 256948 - protein, 79 aa, Glycine max
  Clone ID: PAT_MRT3847_74047C.1.pep
IRVFLFIFIFCFLYKNRKNKPFSGACIFLKANIFIQLCVATFLKLLPTSHTFFPYLKDQNLKTHTSSTIFLNYVPDESL

SEQ ID NO: 256949 - protein, 61 aa, Glycine max
  Clone ID: PAT_MRT3847_74048C.1.pep
VSSLLMNLLVRRRVSRQLPSAHGIVNVFLWYGNTDREMLVPESESHFKLRLVYYLCVRISI

SEQ ID NO: 256950 - protein, 52 aa, Glycine max
  Clone ID: PAT_MRT3847_74049C.1.pep
TRLYSVRFIVPFYRLEILSIVRGPCSRLCCRCMRTKEAYLLYFKEIKSCARY

SEQ ID NO: 256951 - protein, 82 aa, Glycine max
  Clone ID: PAT_MRT3847_7404C.1.pep
TRVFSSLFLSLNRRVEMEDLIRVRYHEVGLFILCARARVHVFLSFFLMLLILMVNILYADQVCPFKTLTLQDDTRKCTFLSQ

SEQ ID NO: 256952 - protein, 99 aa, Glycine max
  Clone ID: PAT_MRT3847_74050C.1.pep
PPLPSSSSHTSTHSSTNTFTLLNHLAIKNRNVYKQQLLLASNPLTLTNLFTHHQQQHLQHFLPSLIQLSIINPSSYLQQQQLLSSTPLILTNSPTYHPQ

SEQ ID NO: 256953 - protein, 79 aa, Glycine max
  unsure (1)..(79): unsure at all Xaa locations
  Clone ID: PAT_MRT3847_74051C.1.pep
GGFAWENDRVGELVICGCGDPAVXYSLAELLQASAETLAXGIVRTTYKAVIESGFIVTVKRLKDARYPALEEFRAHIQV

SEQ ID NO: 256954 - protein, 175 aa, Glycine max
  Clone ID: PAT_MRT3847_74052C.1.pep
LEEKRAKENCSTPGALCVLPLYAMLPAAAQLRVFEEVGDGERLVVVATNVAETSLTIPGIKYVVDTGREKVKNYDPSNGMETYEVQWISKASAAQRAGRSGRTGPGHCYRLYSSAAFSNEFPEHSPAEVEKVPVHGVVLLLKSMHIKKVANFPFPTSLKDSSLLEAENCFEALEA

SEQ ID NO: 256955 - protein, 109 aa, Glycine max
  Clone ID: PAT_MRT3847_74053C.1.pep
EKRGIVGYVDDEYWSERRGGVATKESDVYGLGVVLLELLSGKGCEGGLLVKWALPLIRETRLSVFFYPTTAIPPDMNSLATLTQAGSACVANPRKRTTPVGQEAPVMNN

SEQ ID NO: 256956 - protein, 68 aa, Glycine max
  unsure (1)..(68): unsure at all Xaa locations
  Clone ID: PAT_MRT3847_74054C.1.pep
FLPAFSLWEYFRIWQTLALTVFLGPAWSDIFLISRWNWARCFLALIGNRYSFLGPLMLPPXXXXXXXX

SEQ ID NO: 256957 - protein, 70 aa, Glycine max
  unsure (1)..(70): unsure at all Xaa locations
  Clone ID: PAT_MRT3847_74055C.1.pep
THLLXPDGEPIAXXXXXXXKVQIDQLXAXXGVXXWNVDEGFLTGXEMXQRQXYYXXPSXTLGXXXQXPXT

SEQ ID NO: 256958 - protein, 92 aa, Glycine max
  unsure (1)..(92): unsure at all Xaa locations
  Clone ID: PAT_MRT3847_74056C.1.pep
AGGGICVWLTFMISSVKANTIRGQHVAVEHSKGYPAYSRAMSYSSGAASFDHVLTHKDTXLSNKADIGNGGNLLAXLGKLMFNYLYLEPRAT

SEQ ID NO: 256959 - protein, 94 aa, Glycine max
  unsure (1)..(94): unsure at all Xaa locations
  Clone ID: PAT_MRT3847_74057C.1.pep
ISVGYIVVRQPTREGLSSIHPGVVSDPSRLGDSSXTNSKMKVKEFKQGWVAMFNMFGQVVEDTVTCKVPSQNPCAPASDPVSSNAWAYYSNFVP

SEQ ID NO: 256960 - protein, 87 aa, Glycine max
  unsure (1)..(87): unsure at all Xaa locations
  Clone ID: PAT_MRT3847_74058C.1.pep
ATERXRXEVRXVVGSVFXCVVXGVKDXVXLQEQXHPPFSFVXHSXRTGMVIXGGXQHHITIPAXPENQXCPTXXALPRSRRFPXIPR

SEQ ID NO: 256961 - protein, 75 aa, Glycine max
  Clone ID: PAT_MRT3847_74059C.1.pep
YDPLSEPSNFHSNNSNQNFRFASVLSTPSSSPTPLNSNSTIINGSNTEDERDQSYDSSNMLKFEIPDILDVNEFM

SEQ ID NO: 256962 - protein, 439 aa, Glycine max
  Clone ID: PAT_MRT3847_7405C.1.pep
MGLTALKAENLKPVILLKAGVPLAASFAGLIYAWIVARKNLSTKVFSSPEKECVSPKITCHQGTKHEESFLHNLSSFEDEESSFSPMNSSVLSGSLVIHEYNNPCLEQEITSLRSQIEGLQMRELALRLQFELYCEMKEQESLLLDVKNMLSLENDRAEFLSKEISSIETETKRLGSFVVQYMSVVEEHQYWKSQNRVLQRRVQRLLRDSKAKSRLIKCQALKIKEKEAVILRNHDALQTRVSVINKLKGEIIELQRILDQLEDEKNEVAKKLETAEGYVSKSDKEKIHRKPLKYYLEVESRDVSKEDYNKVLNELEEVKKERVTEVEELIHLRRVNACLREELMRHYEEQHEQDRDHVEVYESEHELHHSLLEHRNGSAHGDHASSKRRKLLKRLKRWVEGSEKVRVKPEIKCLDMHSGSYGSKKPQVPPSARFCSSA

SEQ ID NO: 256963 - protein, 136 aa, Glycine max
  unsure (1)..(136): unsure at all Xaa locations
  Clone ID: PAT_MRT3847_74060C.1.pep
KDXXXRVLXRXITGNSLLXDCVVXGXXXLVSXHXCAQRTAFXKXRXXVLXXARLPSRIQMITXCQFSPPDTGXXVYIWLXXXXLASXWXTTAGXGRXVVIXXGACGXXXXXIXTRXVXXAXVPSXHXXATRNEGXX

SEQ ID NO: 256964 - protein, 43 aa, Glycine max
  Clone ID: PAT_MRT3847_74061C.1.pep
METQHQQPTIKSRFRRICVYCGSSPGKNPSYQLAAIQLGKQLV

SEQ ID NO: 256965 - protein, 320 aa, Glycine max
  Clone ID: PAT_MRT3847_74062C.1.pep
GCEKTTEGGIESGPARKQVDHTELFKYKQMAEKLKQDEKETKKLQDSLQIMQLRLAAREHHCRTLQEKVRELENQIAEERKTRLKQESRSLAAVTVQPSSAAAHKTMTDKKPPLNPSKLRMPLGRITNSLPPRSPLRSKSYTAFMSGKENSVRRNSVVTSAVRPASSSTTAQFLQARRRVSVAVRPPAPSTTQVLQPRRRVSIATLPSHTISDITTPLRTSALRVTGGSSQQSRIRSQRKDRYSSLFAPLPELRTSVETTPMTVRRSSKFMMSSPVRADSREGSARHPTLLALQRKPVVWSPLRGLKSNRKSSLLPYRPT

SEQ ID NO: 256966 - protein, 201 aa, Glycine max
  unsure (1)..(201): unsure at all Xaa locations
  Clone ID: PAT_MRT3847_74063C.1.pep
PRVRENWCFQKLLLDICRIPYPCGGAEIYRSLIKVLKFYNIENRILSCTHDNSTSAMHACHTLKEDLDGQKIGPFCYIPCAARTLNAIIDDGLRSAKQVISKIREFAIELNASPVISEDFIQLSTAYQEGIWKFPLDVSARWSGNYQMLDLVRKAGKSVDAVIRKYEEVLGSRMLLGXLLTKGAVSIMHQYLEPFTKPQQH

SEQ ID NO: 256967 - protein, 66 aa, Glycine max
  unsure (1)..(66): unsure at all Xaa locations
  Clone ID: PAT_MRT3847_74064C.1.pep
LQTGGERXXXEXPYRGREGTCKFDKTKVAGTGDNEREVFLDEEERAAKIVKNGPLENARNFFFMKR

SEQ ID NO: 256968 - protein, 65 aa, Glycine max
  Clone ID: PAT_MRT3847_74065C.1.pep
IASRQTLSGEMTMSTLDHIRMNEITINAVTVVQGMDITHHEIITTLGPILHLDYTTAKASQPTAH

SEQ ID NO: 256969 - protein, 103 aa, Glycine max
  Clone ID: PAT_MRT3847_74066C.1.pep
RFFPQPKCLGGSSKFRGGAFTLGEGGLPANFAVVERKNLLNPPPFNPPNPIMKGGVRPRLKKPFTPSAFGDSNQKMGALGNALFPFQKSSFRKKKMCKIYDPF

SEQ ID NO: 256970 - protein, 146 aa, Glycine max
  Clone ID: PAT_MRT3847_74067C.1.pep
MGKLWTLIIQLHSIAGPVVTLLYPLYASVVAIESQSKLDDEQWLAYWIIYSFLTLAEMVLQPILEWIPIWYDVKLLTVAWLVLPQFAGAAYLYERFVREHIRKYITERQYLYGNHQQQSKKSPNNGGKAKKFVEFVTPKKGDQEAY

SEQ ID NO: 256971 - protein, 145 aa, Glycine max
  unsure (1)..(145): unsure at all Xaa locations
  Clone ID: PAT_MRT3847_74068C.1.pep
MGKVRTLIIQRHSIAGPAVTLLYPWYAWGVAIESXKLDDEQWLAYWIIYSFLTLTEMVLQPILEWIPIWYDVKLLTVAWLVLPQFAGAAYLYERFVREHIRKYITEKEYLYVNHQQQSKKSPNNGGKAKKFVEFVTPKKGDQEVY

SEQ ID NO: 256972 - protein, 189 aa, Glycine max
  Clone ID: PAT_MRT3847_74069C.1.pep
SSRFGSSGSSNRIANGDTSPILCSKPISEFLTSSGTSGGERKLMPTIEEELGRRSLLYSLLMPVMSQFVPGLEKGKGMYLMFIKSEAKTPGGIVARPVLTSYYKSSYFKDRPYDPYTNYTSPNETVLCPDSYQSMYSQLLCGLCQHKEVLRVGAVFASGFIRAIRFLEKHWPLLCHDIRTGTINNTITD

SEQ ID NO: 256973 - protein, 34 aa, Glycine max
  Clone ID: PAT_MRT3847_7406C.1.pep
NIHTFELQFGDRDTDPTPPWTPSTNSGLIDSLFS

SEQ ID NO: 256974 - protein, 121 aa, Glycine max
  Clone ID: PAT_MRT3847_74070C.1.pep
EDISSLKDQLKAHPLVGDPNRVLLLTCHGSMATSEQKLIFEKPPPNIRKVILATNMAEASITINDIVFVVDCGKAKETTYDALNNTPCLLPSWISQASARQRRGRAGRVQPGECYHLYPKC

SEQ ID NO: 256975 - protein, 91 aa, Glycine max
  Clone ID: PAT_MRT3847_74071C.1.pep
LRLHPTPCRIRAITLTQTTSETRRDRDDDCENSGMDLGLGTSSTDAYVVVKLGALITCGQLYDIVGEHNCKRTEEHARSLSMPLSALDDNP

SEQ ID NO: 256976 - protein, 80 aa, Glycine max
  Clone ID: PAT_MRT3847_74072C.1.pep
FLSRRGRQFLSWRIYCLYGSCGTCFLICSFIIPSRSSALVHVMIQAPSIIFSRPCPLSSLSRPALIISHDQPSSSSDLQH

SEQ ID NO: 256977 - protein, 91 aa, Glycine max
  Clone ID: PAT_MRT3847_74073C.1.pep
PQVLLAGYKNYTTLSPNILLGESKKREKEKKKKKKPKLSIQDIKNRQGSKGDQHLGNPLTLHTNSTWATCSNWNLQVLGRPAYPKTTPTSP

SEQ ID NO: 256978 - protein, 41 aa, Glycine max
  Clone ID: PAT_MRT3847_74074C.1.pep
NGPPKFFFNNQINNLLILFGRVHKFSERFTILELIRPQHKK

SEQ ID NO: 256979 - protein, 70 aa, Glycine max
  Clone ID: PAT_MRT3847_74075C.1.pep
QFMERVLQDNELVRSHHLVQLLHKTAYHHQPRASEAVEIHQAELAMQLYCESYCNVGKLQYLFIHAPRRA

SEQ ID NO: 256980 - protein, 81 aa, Glycine max
  unsure (1)..(81): unsure at all Xaa locations
  Clone ID: PAT_MRT3847_74076C.1.pep
PWMGHLHLLGAKTPLARIFASLADKYGPIFXIHLGAYPALVICNQEAIKECFTTNDKVLASRPKSSHGVHLSYNFAGFGFA

SEQ ID NO: 256981 - protein, 123 aa, Glycine max
  unsure (1)..(123): unsure at all Xaa locations
  Clone ID: PAT_MRT3847_74077C.1.pep
IVEIVKIQMQELSIHAKCSSGNTISSKNKPYNLRSAYRIYSNKLGELLEITPEREPXLRTRMSCSEGGDINKGXAVSVAHFKAKAIMGLVMKEGEANIELGGMKEQRAGRRRGERPWEVRRCK

SEQ ID NO: 256982 - protein, 181 aa, Glycine max
  unsure (1)..(181): unsure at all Xaa locations
  Clone ID: PAT_MRT3847_74078C.1.pep
MTCFPFSFGKKVRFVATHDPDIDEVLSGIQNVRIYTYKELKVASDNFSPANKIGQGGFGSVYKGLLKDGKVAAIKVLSAESSQGVKEFMTEINVISEIEHENLVKLYGCCVEGNQRILVYNYVENNSLAQTLLGSGHSNIIFDWKTRSRICIXIARGLAYLHEEVXPHIVHRDIKASNILL

SEQ ID NO: 256983 - protein, 83 aa, Glycine max
  Clone ID: PAT_MRT3847_74079C.1.pep
HWSPGEAVQWSTMSGNRAGGWVDPNTWSDAYKATRLHRQKILRRNHIGRSRLPRRAVSPSCISANYTRLRYRPVGDCVSSRIG

SEQ ID NO: 256984 - protein, 96 aa, Glycine max
  Clone ID: PAT_MRT3847_7407C.1.pep
SYRHTLTSGTSMVQTTSIYSRISLIHDKIDRILRAFLAIGLDGMVACGDGNWGRVRLIIEAMITYIKCSLYFAERKTWLSECQASSTPARAYFAPF

SEQ ID NO: 256985 - protein, 142 aa, Glycine max
  unsure (1)..(142): unsure at all Xaa locations
  Clone ID: PAT_MRT3847_74080C.1.pep
MTCFPFSFGKKVRFVATHDPDIDEVLSGIQNVRIYTYKELKVASDNFSPANKIGQGGFGSVYKXNLNNIMVDDQGLLKDGKVAAIKVLSAESSQGVKEFMTEINVISEIEHENLVKLYGCCVEGNQRILCYNYVENNSLAQT

SEQ ID NO: 256986 - protein, 109 aa, Glycine max
  Clone ID: PAT_MRT3847_74081C.1.pep
SKNLRFFWHWPKLCLLFTRASNNPLQKKPRPVFLPKRKGPLGGRLKCYYPKLAPGWVGPKKWVWEKKKGYPPQWVCPKKNFWMAKIMVELSGEKDKKKPPSFFFPAIGG

SEQ ID NO: 256987 - protein, 77 aa, Glycine max
  Clone ID: PAT_MRT3847_74082C.1.pep
EHKAQLLIETSHRPNHYWALILSAQSLSALTLCFTVRHLLHNTSCLAEGCVLDSWLLASCLAESYVGIGLLLGLYFC

SEQ ID NO: 256988 - protein, 124 aa, Glycine max
  Clone ID: PAT_MRT3847_74083C.1.pep
LEISQSKNPRHVPRTRHTPSSSAPDHAPIVFIHHYSCHDAVSSIFPHQTQQESLHGHAHTRFHFKLSLSTDTFAPYSYVCAFSISFPKRRHVYLIIIIFTVLRIPYAPSGDGKNPPRHEPTHLT

SEQ ID NO: 256989 - protein, 78 aa, Glycine max
  unsure (1)..(78): unsure at all Xaa locations
  Clone ID: PAT_MRT3847_74084C.1.pep
INSDFXDLSVAANXLAGHAVRLGGMGFGASFFGWLAXVAAIYLLILEGTNWRTEVLTXVVVPCVVVXWASLICRLLRG

SEQ ID NO: 256990 - protein, 99 aa, Glycine max
  Clone ID: PAT_MRT3847_74085C.1.pep
DVKFLYALLFKGCARILPEGRLDNLCNPQLIQAQSILASWAVQVVLIVSVNCHRIDRRPLGDRRHPLYPGGAFESPGTADESRSFSEFYVTEVKNGPLA

SEQ ID NO: 256991 - protein, 307 aa, Glycine max
  unsure (1)..(307): unsure at all Xaa locations
  Clone ID: PAT_MRT3847_74086C.1.pep
MYRSGAGMAWNVFRFCTALRGLGSIMILMVLGVVGVTYYAVVLTNFGPALFLGGLDTLISFVVLILFHCLLVMLFWCYFAFVFMDPGTVPPNWKPAADEERGEVDPLNGVELSNLQSDPANQRFSVGRKCTLXLAPPCLLCSGCGRCVLKMDHHCVWVVNCVGALNYKYFLLFLVYTFLETTLVTISLLPHFKTYFSDGEIPGTPGTLATTFLTFVLNLAFSLSVLGFLVLHMSLVASNTTTIEAYEKKTTSKWHYDLGRRKNFEQVFGMDKGYWFIPAYSEEDIRRMPVLQGLEYPSTPDFNAQEF

SEQ ID NO: 256992 - protein, 242 aa, Glycine max
  unsure (1)..(242): unsure at all Xaa locations
  Clone ID: PAT_MRT3847_74087C.1.pep
MWKPRAVPRAFSLLHLLFHSVLVLVSAQGSNRTTWNTLTGSPPLVIARGGFSGIFPDSSEFAYNLAAVTSLKNLIVWCDVQLTIDGEGICIPNIKLENATNIDNVFQNRSKTYSVNGVQTSAYFAVDFTFEELYSKVFLVQGDFTRSDKFDNNLFQILTVNDLVKNEAPPGLWLNIQHDAFYEQHNLSMKNFVLSVSRTVNVNYISSPEAGFLRTIRARINPRITKLVFRFLEXDEVDPSTN

SEQ ID NO: 256993 - protein, 160 aa, Glycine max
  Clone ID: PAT_MRT3847_74088C.1.pep
LTLGQDLPDGNLGALQKKGNVAKDKFSKVLWYAITNYRTWVFALLYGYSMGVELTTDNVIAEYFYDRFNLKLHTAGIIAASFGMANLLARPFGGYTSDVAARLFGMRGRLWNLWILQTLGGVFCIWLGRANSLPIAVLAMILFFIGAQAACGATFGIIPF

SEQ ID NO: 256994 - protein, 68 aa, Glycine max
  Clone ID: PAT_MRT3847_74089C.1.pep
PLICATKFSKVLNFLLIPPFRMLHHEPSSFLAQHKDFPIAPRIGAFILVLELVPDFTINKSIVALEST

SEQ ID NO: 256995 - protein, 84 aa, Glycine max
  Clone ID: PAT_MRT3847_7408C.1.pep
ANYVYAETSDTFIRSCLSPNFTFQKCSSVDLCNSTTVDRNLMPELQVEDERVAEGVLVLEKGKKAKIVHQDELLLMLEEQKHDA

SEQ ID NO: 256996 - protein, 162 aa, Glycine max
  unsure (1)..(162): unsure at all Xaa locations
  Clone ID: PAT_MRT3847_74090C.1.pep
CFLVDKTGDWIRLIQNSPVSYSLREAARKKGCLMDKIERSGNAATKRSDWASLVQVFLTNSTSTEHFDACEWTKSAPHSWELILPIEVCGPNNGYDTWSXKWAKQTSWHLRSLIDNPKQSXTDFDILLGLSQDTEIGANTLMPALSDPQATARSSESAESSA

SEQ ID NO: 256997 - protein, 67 aa, Glycine max
  unsure (1)..(67): unsure at all Xaa locations
  Clone ID: PAT_MRT3847_74091C.1.pep
FPPFAGLFPLPVFFVLXGGFGCFXWGLLCLFCXGCGAVSCGVACGSCGLLAPPLVKKASRVPLLLFF

SEQ ID NO: 256998 - protein, 76 aa, Glycine max
  unsure (1)..(76): unsure at all Xaa locations
  Clone ID: PAT_MRT3847_74092C.1.pep
EWLPRVVIFRAVFCVSALSLSRCLAEDHGLIMXFYAESCPQVVDIIIXQVKLLYKRHKNSAFAWVRNIFQVCAVQS

SEQ ID NO: 256999 - protein, 50 aa, Glycine max
  Clone ID: PAT_MRT3847_74093C.1.pep
DNPSCNNRYVVVLKFLFPSPWVVSFQIGNLSPNWLSFARSPCNPKRFLKN

SEQ ID NO: 257000 - protein, 52 aa, Glycine max
  Clone ID: PAT_MRT3847_74094C.1.pep
LARIGMDTPWEWHDDKNLRRTTPQKLPILVGELIPYKPHIKILNPLLLHLDP

SEQ ID NO: 257001 - protein, 131 aa, Glycine max
  unsure (1)..(131): unsure at all Xaa locations
  Clone ID: PAT_MRT3847_74095C.1.pep
RAKSPRALTNAMADASYPASIXETRITATGRGLAHTRAVXMAGGRIHMMALFDMVMITNNHIXAAAGVAYALNAHDLSLXKHNLQQAEETTTIEEVIEVTHYXSQTKTPLTLILYDTMDVPLPNGDVDISM

SEQ ID NO: 257002 - protein, 89 aa, Glycine max
  Clone ID: PAT_MRT3847_74096C.1.pep
FPPFVSVIIVLCWAIYNCYVTFTTIFMWQIEQLFCFSALHILNGMMLKGVLHNFLKFTKLYQGLSLTYVNSCYLLSHYFGLKIHHNPSC

SEQ ID NO: 257003 - protein, 81 aa, Glycine max
  unsure (1)..(81): unsure at all Xaa locations
  Clone ID: PAT_MRT3847_74097C.1.pep
KIFFSMEKGKTVSKYVQDGTVDLKGKPVLKSKRGGWKAXSLLLVYEVFERMTYYGISSNLVLYLTRKLHQGTVTASNNVNN

SEQ ID NO: 257004 - protein, 95 aa, Glycine max
  Clone ID: PAT_MRT3847_74098C.1.pep
YTSSSPQQQQEVDAVQFSDDKHFALHGKILLLVFLTAFFLLFVFVLMIPWLKRRAWGSHDSGTDEDSIEVQNNSTPSYNWFRGRMKEDANTMQHQ

SEQ ID NO: 257005 - protein, 49 aa, Glycine max
  Clone ID: PAT_MRT3847_74099C.1.pep
GVEVQASLHSDQFVIVASIIRLYSCYHRSLSSLRIGIATLSLQCPRCWQ

SEQ ID NO: 257006 - protein, 57 aa, Glycine max
  Clone ID: PAT_MRT3847_7409C.1.pep
RPGLTGRTHPRVRLPWLCMCMHTWSTTATYRHLRAWTMKLYDKEALWMGWLCRHANV

SEQ ID NO: 257007 - protein, 234 aa, Glycine max
  Clone ID: PAT_MRT3847_740C.1.pep
MVIGGAFPRFDPITKCSTQDRSNQTIASDLDGTLLVSRSAFPYYFLVALEAGSVFRALLLLTFVPFVYFTYFVLSETLAIKTLIFITFAGLKLKDVELVSRSVLPRFYAEDVHPTTWRVFNAFGGRRCIVTASPRVMVEPFAKTFLGADTVLGTKLVVTASGRVTGLAKEPGVLVGVHKKEVILKEFGTNLPDLGLGDSVTDMNFLSICKVGITVIYYAYTPPNHFIINFYISI

SEQ ID NO: 257008 - protein, 92 aa, Glycine max
  unsure (1)..(92): unsure at all Xaa locations
  Clone ID: PAT_MRT3847_74100C.1.pep
TNEFKQISLAVLMASMNNQKEIELFEGQSLLYMQLYGNLRTMCLEWVVQLGIPDIIHXHGKPITLSELVSTLQIPPPKAXXVQRFMRFLVSM

SEQ ID NO: 257009 - protein, 85 aa, Glycine max
  unsure (1)..(85): unsure at all Xaa locations
  Clone ID: PAT_MRT3847_74101C.1.pep
KKFSKEKKPPIGXNPLFRHAFKRIKKEKLFKXIPKLSNPRKKSESNAPIGMAKETSHFSSQAKKGEILGGVKMTFAQKATGLSKF

SEQ ID NO: 257010 - protein, 493 aa, Glycine max
  unsure (1)..(493): unsure at all Xaa locations
  Clone ID: PAT_MRT3847_74102C.1.pep
CSLRAKRRWCLSGTPIQNTIDDLYSYFRFLKYDPYAVYKSFYNTIKVPISKSTIQGYKKLQAVLRAIMLRRTKGTLLDGKPIINLPPKTIELSKVDFSIEERAFYTKLESDSRLQFKAYAAAGTVSQNYANILLXLLRLRQACDHPLLVKDFDSDPVGKDSVEMAKNLPRDMLINLFNCLEATFAICLVCNDPPEEPVITMCGHVFCYQCVSEYLTGDDNMYPSVNCKELIGDDLVFSKATLRSCISDDGGSLSSANSHLCDYSLVQQRDYTSSKIKAVLEVLQSNCKLKISSSDLLNSSGGCRDSPSSDNLYVEDCDSDVRVTKHTIKYSESTTEGPIKAIVFSQWTSMLDLVETSLRQFSIQYRRLDGRMTLGARDKAVKDFNTEPEIAVMLMSLKAGNLGLNMVAACHVILLDLWWNPTTEDQAIDRAHRIGQTRPVTVTRITIKDTVEDRILALQEDKRKMVASAFGEDHAGGTGTRLTVDDLKYLFMV

SEQ ID NO: 257011 - protein, 74 aa, Glycine max
  Clone ID: PAT_MRT3847_74103C.1.pep
FSCDERMKKNYSTIILVSLFTIPGFPTVTEIVIGNKRISTLANKKIQGEIIRLTGKGRGRCGFKSYSLTQKKKK

SEQ ID NO: 257012 - protein, 84 aa, Glycine max
  Clone ID: PAT_MRT3847_74104C.1.pep
VLDPVVLSSSIHHLHVPIRTVCIRSITPSICLAVTAANHREIVCLAVTCLSYYGKPYIFHTGAYLSLFIWWSPPPPPKKEDVIQ

SEQ ID NO: 257013 - protein, 215 aa, Glycine max
  unsure (1)..(215): unsure at all Xaa locations
  Clone ID: PAT_MRT3847_74105C.1.pep
RGSRFIFQFLLLLPPTLRCFSKFPFPQTASSLTRAFSQSTSMSINLHSHAFSGNPLLSKFPLPGNPLSPSAALEALNARISLNNTHSSPSPSFKVLPFRNGRPLASSSAGSGDSPPIWDLGWLGLDDLRGIFENSGAQLSVDLLVYLNSSSEDDAVYWAIDVSDKVPELGSNNERLCFVDLRTLMVATDWXDLHVMGNLAIAGHAKALLEWHNIS

SEQ ID NO: 257014 - protein, 52 aa, Glycine max
  unsure (1)..(52): unsure at all Xaa locations
  Clone ID: PAT_MRT3847_74106C.1.pep
KSQISGXXXXCAXFLEVNASHRHVRFQGQTDYPKSTHPSSRIPSLRTRACDX

SEQ ID NO: 257015 - protein, 46 aa, Glycine max
  Clone ID: PAT_MRT3847_74107C.1.pep
KTYPSSLLLRSTTRIIFNNCCLQAALVLRNSFFSLVEHVGSQKEGV

SEQ ID NO: 257016 - protein, 74 aa, Glycine max
  Clone ID: PAT_MRT3847_74108C.1.pep
MHAYSSEFGSSFGHFWQLFNALTLYNLARDPECKEWQVLMCGLPFLLLFLGNFFTTLRVVHQKFHSQQHGSKKD

SEQ ID NO: 257017 - protein, 146 aa, Glycine max
  unsure (1)..(146): unsure at all Xaa locations
  Clone ID: PAT_MRT3847_74109C.1.pep
ANPAPLFYVVGPPLXFPEFPPVNFFSRGFVRGFFFKKPPNSPAYXRGAPGIKPPPLFFNVYWGLVPCANPPQVSKPALKAXPLKRGLGLNPLGTFLKLVFFGFKGGFFPWNNFPFFFWGGWPRVFPLFKKMVLFFFPLSKVGIVPY

SEQ ID NO: 257018 - protein, 185 aa, Glycine max
  unsure (1)..(185): unsure at all Xaa locations
  Clone ID: PAT_MRT3847_7410C.1.pep
MQVSEQIVVTHINLLWVVVLNRQLMVNVSISSRDSFCIDVVPRCLAIAGVGLETHDRKDGGILGTILAAGFKGELPRFQAGVTMEMSXCLDAWYSDRDGTLECPATYIVKGLCRRCCLPEVILRCMQVSVSLMGSGVLPDCHDTLIELVGSPETDFLHLFSQQQLQEFLLFEREYSICKMEITEE

SEQ ID NO: 257019 - protein, 159 aa, Glycine max
  unsure (1)..(159): unsure at all Xaa locations
  Clone ID: PAT_MRT3847_74110C.1.pep
XXXXXXXXXXXXXXXXXXXXXXXXXXXXXXXXXXXXXXXXXXXXXXXXXXXXXXXXXXXXXXXYHNAPGLHPPAHRPPQTANPKTPTHSRDHRTPSICTTTTNGTPFELGTRGSSRVDLQECMDIPRSPGSNVIRLVVHDILPILGSSCESSGDWKGCI

SEQ ID NO: 257020 - protein, 208 aa, Glycine max
  Clone ID: PAT_MRT3847_74111C.1.pep
MCPNSESEFDSRKSNDNNGYGTEAGDLLWNYNPAYQPPQVWDFQLQKSRDCHEPRVVTFDGLEVPKLFQDEHNMKYSTIGDDIDILSRNNQSDQSSSSHAKKKEENNKKAKGGLSSESKLFESIPYNGTNNVVVMEHLVGGNENVGTLTARVSLEELAKNRGDAMLRYKEKKKTRRYDKHIRYESRKARADTRKRVRGRFVKASDVQA

SEQ ID NO: 257021 - protein, 108 aa, Glycine max
  Clone ID: PAT_MRT3847_74112C.1.pep
KSPLPKSHKVPRSLQRGKRLPTLQGGVPPQEGGGGVPPNLPGNIFFFPKAFLRLIPCHRTEILVFKKCPIPLPASLYITGEHWTLGIFPIFPKKKTKPDQKKKKQSRD

SEQ ID NO: 257022 - protein, 104 aa, Glycine max
  Clone ID: PAT_MRT3847_74113C.1.pep
LSSPSESKLCFLPHFNPCVLRVDRNTLSTTSLSYVKARYYGCRCGPSRSPNDSRFRKSYDSDDDDKAFRHSPDLRSDTGRLIDHSQNLVGVVSTDDAIQIAEYV

SEQ ID NO: 257023 - protein, 73 aa, Glycine max
  Clone ID: PAT_MRT3847_74114C.1.pep
SISERTHTHSRVSGCLLQRCSPTEAREASRRKSRGTCTDTQQLPESQGMQRPTNRLLRESEGTNCRYTPSQWN

SEQ ID NO: 257024 - protein, 124 aa, Glycine max
  unsure (1)..(124): unsure at all Xaa locations
  Clone ID: PAT_MRT3847_74115C.1.pep
LTHFAAEAEALHSQLKQQIQDQEKLPFVGVNIGTDVSNLPSASDLVAFLQLQKITHVRIYDANSDILKTLSGTKIRVIISVPNNQLLAIGSSNSTADSXIDRNVGAYYPETLISGICGGDEVLT

SEQ ID NO: 257025 - protein, 63 aa, Glycine max
  Clone ID: PAT_MRT3847_74116C.1.pep
HQARYMVSITVLSWPPSDRCGLCQLSQFLRLIMGDPTRATAWIHRTCQTIKICSMKRIRYMCR

SEQ ID NO: 257026 - protein, 59 aa, Glycine max
  Clone ID: PAT_MRT3847_74117C.1.pep
CLFQNIYKKKKLMQYRAPMANLYQVFVGGHIKYSIIFHNWCLPSDLKKCNWHCFKSYLI

SEQ ID NO: 257027 - protein, 121 aa, Glycine max
  Clone ID: PAT_MRT3847_74118C.1.pep
MACARPLISVYSEKGESSGKNVTLPAVFKAPIRPDIVNFVHTNLRKNNRQPYAVSELAGHQTSAESWGTGRAVARIPRVRGGGTHRSGQGAFGNMCRGGRMFAPTKTWRRWHRRVNTTQKR

SEQ ID NO: 257028 - protein, 116 aa, Glycine max
  unsure (1)..(116): unsure at all Xaa locations
  Clone ID: PAT_MRT3847_74119C.1.pep
XXXXXIXXTNXTXXXXXXXXXXXXXXXXXXTXXYXXXXXXXXXXTXXLXXXXXXXXSXLRXGXXXXLEXXXXLXXXPPXXXARXXXIXXXXXXXXXXCXXRXXXXXXXGXIXEXXX

SEQ ID NO: 257029 - protein, 83 aa, Glycine max
  unsure (1)..(83): unsure at all Xaa locations
  Clone ID: PAT_MRT3847_7411C.1.pep
FIVNQXXXXPGTTPLTTPRPTFFFFFERRFLHSLMFMAQRGLNASYLNLFSRNLKLHSHSPNDMQTTVHSNLTLYTHKTRQAS

SEQ ID NO: 257030 - protein, 81 aa, Glycine max
  Clone ID: PAT_MRT3847_74120C.1.pep
LSGHIFLMPCSNQHLVPVTQTDSHVGQGPAAVYNRRKPECCIRCFRCYQRTRSSTLEVVQNQAITLRMVLSHLRVVPTYQA

SEQ ID NO: 257031 - protein, 75 aa, Glycine max
  unsure (1)..(75): unsure at all Xaa locations
  Clone ID: PAT_MRT3847_74121C.1.pep
DIGVDAKKAFPFRTYHFYAEPRAAKAKLGWQSTTNLPEDLKERLEEYVKIGXDKKSIQFELDDKILEALKGPVTV

SEQ ID NO: 257032 - protein, 84 aa, Glycine max
  Clone ID: PAT_MRT3847_74122C.1.pep
KLQSSFLFSSLWCVTVSGDGGGEEPHLLLLHQSADIYLDPLLYLMVSVFVIMGEEAQERHFRSEVSFFLLKFFPEVKGSGTFWI

SEQ ID NO: 257033 - protein, 158 aa, Glycine max
  Clone ID: PAT_MRT3847_74123C.1.pep
PPFIKKRVRCGGLFSGFMKTSFFWASFFSSEWVFFFPKKTAPVNGKSTPVALFYNKSRNWGWAFSSPMKAFNGKPFFKKSNPRGFLKNAHYKNSPPNLFAIPSLLAVKGLELKKAQGAKKKKAKKKNPSRALTWFFLPLSTMMLITVFYSFVYFVDGG

SEQ ID NO: 257034 - protein, 320 aa, Glycine max
  Clone ID: PAT_MRT3847_74124C.1.pep
MKNMKLCSVMLCLSLAFLLGATAEQCGTQAGGALCPNRLCCSKFGWCGDTDSYCGEGCQSQCKSATPSTPTPTTPSSGGDISRLISSSLFDQMLKYRNDGRCSGHGFYRYDAFIAAAGSFNGFGTTGDDNTRKKEIAAFLAQTSHETTGGWASAPDGPYAWGYCFINEQNQATYCDGGNWPCAAGKKYYGRGPIQLTHNYNYGQAGKALGLDLINNPDLVATDATVSFKTALWFWMTAQGNKPSSHDVITGRWTPSSADSSAGRAPGYGVITNIINGGLECGHGQDNRVQDRIGFYRRYCQMMGISPGDNLDCNNQRPFA

SEQ ID NO: 257035 - protein, 92 aa, Glycine max
  unsure (1)..(92): unsure at all Xaa locations
  Clone ID: PAT_MRT3847_74125C.1.pep
XTVVAPRERGLASSLVVGAREXKGLLXLQXXXXXXXXIIDILDXRVILEXSEXCIXIXVQQRTSRTAXSNSXTGCRXXRDAPXXAGXAGMKS

SEQ ID NO: 257036 - protein, 382 aa, Glycine max
  unsure (1)..(382): unsure at all Xaa locations
  Clone ID: PAT_MRT3847_74126C.1.pep
RVIHSGNDYEGLDEKCCSDFPYNIEIRPPEDESHLVSWKSQLEEDLKMIQVQDNKNHIMEVLAANDLDCDDLDSICVSDTMVLSNYIEEIIVSAISYHLMKNKDTEYRNGKLVISSNSLSHALNIFHKGKSSRRDTSKLEDQAVKSEKQIEEGTAMKPEAKSENAAPVKKAEAETLSSVGKTDGEKSVPAPKAAEVPPDNEFEKRIRPEVILANEIDVTFSDIGALDETKESLQELVMLPLRRPDLFTGGLLKPCRGILLFGPPGTGKTMLAKAIAKEAGASFINVSMSTITSKWFGEDEKNVRALFTLAAKVSPTIIFVDEVDSMLGQRTRVGEHEAMRXKIKNEFMTHWDGLLTKQGERILVLAATNRPFDLDEAIIKRF

SEQ ID NO: 257037 - protein, 106 aa, Glycine max
  Clone ID: PAT_MRT3847_74127C.1.pep
NFRVDPRVRVSCKKVLAKALPGAPNEILLVLDGTTGLNMLQQAREFNDVVGVTGFILTKLDGTARGGCVVSVVDELGIPVKFIGVGEGMEDLQPFDAEAFVEAIFP

SEQ ID NO: 257038 - protein, 106 aa, Glycine max
  unsure (1)..(106): unsure at all Xaa locations
  Clone ID: PAT_MRT3847_74128C.1.pep
SSSSFPXEMRFFPSSLGTVCDRFVVGTGGQRIGLGSHLLVTGTNLGHILTSSRSIAASPDHSAIPRSVCPADCVLAASLRTRPDSLSKECSCSSAFNAASVLFHNK

SEQ ID NO: 257039 - protein, 63 aa, Glycine max
  Clone ID: PAT_MRT3847_74129C.1.pep
FKDELRGSKGLYHVSCNYKECREYIFSSKFKCCWLMLFVVSLYWSHRNCMYIIKNIIAIHLTM

SEQ ID NO: 257040 - protein, 35 aa, Glycine max
  Clone ID: PAT_MRT3847_7412C.1.pep
NSNPSIIKFDGNFDVAIAHVLPLKSKYQFKFSSYL

SEQ ID NO: 257041 - protein, 58 aa, Glycine max
  Clone ID: PAT_MRT3847_74130C.1.pep
MATTAALFGTMASTSFMRKQPMTTKSLMTFPNALFGLKGGRGGRASCMGSHKVNLITP

SEQ ID NO: 257042 - protein, 146 aa, Glycine max
  unsure (1)..(146): unsure at all Xaa locations
  Clone ID: PAT_MRT3847_74131C.1.pep
EDGSLDAEVLNFMAVXKEHFHTVLGPGNQFVLQEMVVGVPKVSWGVLGGLEIVRRGLQETVKYPGGHLEKFGRLGLXPLKGVFFFGPPGGGKTLLAKAMVNECQANLIRVGGPEWLTMGLGEGEAIVREYFARAKHSVQRCLFFDG

SEQ ID NO: 257043 - protein, 55 aa, Glycine max
  Clone ID: PAT_MRT3847_74132C.1.pep
GSSKHPSTDIIIGVIDTGIWPESPSFRDEGIGEIPSKWKGVCMEGRDFKKSNCNR

SEQ ID NO: 257044 - protein, 54 aa, Glycine max
  unsure (1)..(54): unsure at all Xaa locations
  Clone ID: PAT_MRT3847_74133C.1.pep
QTHNLVDYPINSEPIRXMSLXKITRASKKPQKXRXXXHKHHFNKIKIKELLSSS

SEQ ID NO: 257045 - protein, 51 aa, Glycine max
  Clone ID: PAT_MRT3847_74134C.1.pep
QYINAHFLFMSNAILKVVNLTTVHFLLIELLHALLHTLYGQAIIHNTHFFF

SEQ ID NO: 257046 - protein, 107 aa, Glycine max
  unsure (1)..(107): unsure at all Xaa locations
  Clone ID: PAT_MRT3847_74135C.1.pep
PLQMVYVSSNFMPFIPFPGGTLGMYYWPGVALPYIFPIIMCIRWALLGRFVGPPLVSGRPFFHFFFRFXGTPRGGEVVFQGKCNFLLVWWLIFNYSLNPDKGHKDFI

SEQ ID NO: 257047 - protein, 66 aa, Glycine max
  Clone ID: PAT_MRT3847_74136C.1.pep
IYLIDYHTLVVPICALQILNASLAMQAEHVHDRDVSVVPLGGCGGLLGRLLDYILRLLVFLSHWVF

SEQ ID NO: 257048 - protein, 47 aa, Glycine max
  Clone ID: PAT_MRT3847_74137C.1.pep
KPKMFCDTTASIQLAHCTTGVRAHLVSAHSENEQLVRVALLRCRKCC

SEQ ID NO: 257049 - protein, 75 aa, Glycine max
  Clone ID: PAT_MRT3847_74138C.1.pep
ELFMLQGGPQASLGVLGFLTSFVFVPTHHTSGGCGDQLSCAGSSRVTRGKQIFKSQILSIARRFYSVQKTKPDEG

SEQ ID NO: 257050 - protein, 125 aa, Glycine max
  unsure (1)..(125): unsure at all Xaa locations
  Clone ID: PAT_MRT3847_74139C.1.pep
TRPRGPQRGGILKRSHETHQSPTKXERXQTDATRATNEAQRGGEERKTPQPRRKNNRCQRHEEADRETNHNDHHHHKSGDAKTTVHKKRTSKVTRAETPTLEQQEGSPHRKDPRFKADYSHQKAI

SEQ ID NO: 257051 - protein, 97 aa, Glycine max
  unsure (1)..(97): unsure at all Xaa locations
  Clone ID: PAT_MRT3847_7413C.1.pep
MWVTTRMLMHVVVEEVLLGRVGLEHXRCDRNTFMGMNVNSMGKMLKCARDDDIRTMKADDGSDTVTLMCESPTQDKISDVEMMLMDIDSEHLGIQRQ

SEQ ID NO: 257052 - protein, 49 aa, Glycine max
  Clone ID: PAT_MRT3847_74140C.1.pep
PRKCGETVGGDGEGTPYWHRLDYILYGDQFLHKSRHEGEGSGVPNECEK

SEQ ID NO: 257053 - protein, 37 aa, Glycine max
  Clone ID: PAT_MRT3847_74141C.1.pep
KWLQLFLQFHAAYFNQIFPISRLIQLYQLPSKDRLVS

SEQ ID NO: 257054 - protein, 367 aa, Glycine max
  unsure (1)..(367): unsure at all Xaa locations
  Clone ID: PAT_MRT3847_74142C.1.pep
DAIARMERAAEXKGKAIAAAVEGVAIHWGTSDSNTSVIETLREQIFKPSLSTIIPENSKLVTVSPTDSVLTATKMMVEFRASCAVVTVNDKPRGIFTSKDILLRVIAQNLSPESTPVEKVMTPNPECVIIDTPIVDALHTMHDGKFLHLPVVDRDGSVVAVVDVIHVTHAAVATVSQVGNNEAATTLMQRFWDSAMALTPNDDDDDTRSEGSLKVASEGGETGRSIPYLSSSIANTFSFKIQDKKGRMHRFTCDTRSMMEVITSILQRLGDDIDPNNIPQILYEDEDHDKVVLASDSDLAAAVDHARTAGLKGLKLHLDYAGPRDNVKGSRSGSYAYSDAWASAYSAAAAGAALVAGLGILTYLKRV

SEQ ID NO: 257055 - protein, 63 aa, Glycine max
  unsure (1)..(63): unsure at all Xaa locations
  Clone ID: PAT_MRT3847_74143C.1.pep
PPGKAFLKLAPKKIKKVFFXTKKNAPLIPVFLKFSTSFSFFKCQSPRFLYIKGGTPKGGFAFF

SEQ ID NO: 257056 - protein, 106 aa, Glycine max
  Clone ID: PAT_MRT3847_74144C.1.pep
MVQKREVMAKKVAFGFWLSEVVPCLILFLVIAADKTHGWSGDSFDRYKEYRYCLSVNVITFVYAAFQAGDLAYQVVTGRRIINHHLRYHFDFFMDQASHKGLNLIF

SEQ ID NO: 257057 - protein, 63 aa, Glycine max
  Clone ID: PAT_MRT3847_74145C.1.pep
LPPPVPSLAPILSPTFPPLLCEPTQGMSPPLSFFPGATAASILGLCASPLRELSHVGKLVTCA

SEQ ID NO: 257058 - protein, 58 aa, Glycine max
  Clone ID: PAT_MRT3847_74146C.1.pep
MEAYIQLDVWDQPEFRDLDAAQWQKLTWVRQKYTIYNYCSDRKRYPQVSPECARDRDI

SEQ ID NO: 257059 - protein, 43 aa, Glycine max
  Clone ID: PAT_MRT3847_74147C.1.pep
NCISHMCKGKYMPSKNKLVAAPSSLESIFRKWFVNIFMLHSKI

SEQ ID NO: 257060 - protein, 445 aa, Glycine max
  unsure (1)..(445): unsure at all Xaa locations
  Clone ID: PAT_MRT3847_74148C.1.pep
KLEDDLKLCKGELRVTEETIKSLRSDKLILEQKLSELEKKSAEEINSLQWKLEQERKTLNSKVYDLERKLDVFRQELTVAESTLSVKDSELAALKNNLDELEELREMFPQXGSTAEEVGCILETTXLVEQVLRKRYFNVIEDMKGKIRVYCRLRPLSEKEIVEKEREVLTAVDEFTVEYPWKDEKLKQYIYDRVFDANATQESVFEDTKYLVQSAVDGYNVCIFAYGQTGSGKTFTIYGSDNNPGLTPLAIAELFRILRRDNNKYSFSLKAYMVELYQDTLIDLLPKNGKHLKLDIKKDSTGMVVVENVTVMSISTIEELNSIIQRGSERRHISGTQMNDESSRSHLILSIVIESTNLQSQSVASIQLSFVDLAGSERVKKSGSTGSQLKEAQSINKSLSALGDVISSLSSGGQHTPYRNHKLTMLMSDSLGGSSKTNMFFHVTK

SEQ ID NO: 257061 - protein, 40 aa, Glycine max
  Clone ID: PAT_MRT3847_74149C.1.pep
YTYDHTNGGIGIKIGRFSKRLINQKSLQTTGSFKKQFLLA

SEQ ID NO: 257062 - protein, 158 aa, Glycine max
  Clone ID: PAT_MRT3847_7414C.1.pep
ETAARRRQKGDEFEMTDIGRIAYFLGIEFVTTKSVIFLHQKKYAIDILKRFNMLDCNSATTPCEPGIKLSTGEDTNLVDSTLYRQLIGSLRYLCNSRLDITYGVGLVSRFMKKPCKDHLLAAKRILRYMKGTLECGILFLAAKENSEIEIVGYTDADW

SEQ ID NO: 257063 - protein, 34 aa, Glycine max
  Clone ID: PAT_MRT3847_74150C.1.pep
TGFNLRRVHSLVEEFLFYVLKQHTLQFQCPFNLL

SEQ ID NO: 257064 - protein, 67 aa, Glycine max
  Clone ID: PAT_MRT3847_74151C.1.pep
RPLGGARFFLFFFLRGGEGRRKKRAPRYTWTHDRESTFTDLAELRKKAGASDKAHLLAGGESVNHPI

SEQ ID NO: 257065 - protein, 144 aa, Glycine max
  unsure (1)..(144): unsure at all Xaa locations
  Clone ID: PAT_MRT3847_74152C.1.pep
VCTDVNRINIFKDKGSMMTVRDQNILVITFHNTLVTIRRKIMTGHDRRTAFTRESTDAKDLNLTLKRSSLFPFMTDFNVFMPNNTLXHVSDFQVIGXRLERSCTAXASESHNIXTQMHKKHTVQSISIVKDQLTVTVCPNIQYA

SEQ ID NO: 257066 - protein, 415 aa, Glycine max
  Clone ID: PAT_MRT3847_74153C.1.pep
MVGNKIPQMGGSPSGNSVHKQRRLYQVWRGGNKFFCGGRLVFGPDVASLFLTTFLIAGPAIAFCVKIYLKIKKTDGLIHDYWFPVLIVGSILTVLDLIFLLLTSGRDPGIVPRNSRPPEFDETCDIPTPSMEWINGTTPHLKLPRTKDVVVNGHIVKVKFCDTCLLYRPPRTSHCSICNNCVQRFDHHCPWVGQCIGIRNYRYFFMFISTSTSLCIYVFAFSCINIAHSGIWKTITHDYVSDFLIIYCFIAVWFVGGLTAFHFYLICTNQTTYENFRYQYDKKGNPFNRGSCRNLKETLCSSIPHSKNNFRSFVVEDELMMVGSLTPNIGDGILTPKEKIDIEMGSMRAEDGRMPVPELLRNFDFDNFDGDMKFADDDGQPSFDPFYSIEDDAKDSARTSIQTVLNFQSITEDPV

SEQ ID NO: 257067 - protein, 94 aa, Glycine max
  unsure (1)..(94): unsure at all Xaa locations
  Clone ID: PAT_MRT3847_74154C.1.pep
MLKVTLEQRAEYSPGAGIPQMYDSSVVIESELPLIKRIIWHGKICIFLWIXMMAFMMELLLVLVCCLPIIIPRTRQSSGAARVTGTQNNLQAPN

SEQ ID NO: 257068 - protein, 53 aa, Glycine max
  Clone ID: PAT_MRT3847_74155C.1.pep
LDIRHHVRNGSMELFPVFARGASTRIESIVCTHPQVGDEGMPFDVRKEHLSSS

SEQ ID NO: 257069 - protein, 44 aa, Glycine max
  Clone ID: PAT_MRT3847_74156C.1.pep
KIKHIIFKIRNFNKYNDDEFQTLFSIKINEPLEAYYLLIDWKDF

SEQ ID NO: 257070 - protein, 66 aa, Glycine max
  Clone ID: PAT_MRT3847_74157C.1.pep
MPREPKSLGVKILWIWTFGTAAILVTNVMRTRIREMETLMNAEQQQQQQQHDVATTDSSFISDNKD

SEQ ID NO: 257071 - protein, 49 aa, Glycine max
  Clone ID: PAT_MRT3847_74158C.1.pep
SLRSLNLSQHFQFVSSDGPFMPFDESVTLFIELNTSLYMQGIPQCFRLL

SEQ ID NO: 257072 - protein, 69 aa, Glycine max
  Clone ID: PAT_MRT3847_74159C.1.pep
LMCIDRGPAHLCCQSVFVSSFSPCICTLHSNPVRRLNLILLLPRLVVVVHKVLTMVLQSLERADLRSSC

SEQ ID NO: 257073 - protein, 85 aa, Glycine max
  unsure (1)..(85): unsure at all Xaa locations
  Clone ID: PAT_MRT3847_7415C.1.pep
RFWSFHFDFDLRSIRQDLANYAEVCFREFGDRLKHWITLNEPVLYNSGXMRCSKCFANCTAGDSTTEPYVVTHHLILAHVAVVKV

SEQ ID NO: 257074 - protein, 158 aa, Glycine max
  Clone ID: PAT_MRT3847_74160C.1.pep
VNLARIVPDGLLVFFPSYYLLDQIIACWKSSNENSTSIWDRICKHKKPVIEPRDSSSFPLSIKDYMTTLNDTSASGAIFFAVCRGKVSEGLDFADHAGRAVVITGLPFATSTDPKVRLKREYLDQQSRPQGELFKVLTGDEWYNQQASRAVNQAVGRV

SEQ ID NO: 257075 - protein, 55 aa, Glycine max
  Clone ID: PAT_MRT3847_74161C.1.pep
CLCTGVEVTLKGAFENSLVSANQKAFTTVQVCFRHSLCVTTHIASASICAPLFHS

SEQ ID NO: 257076 - protein, 169 aa, Glycine max
  Clone ID: PAT_MRT3847_74162C.1.pep
MGTRGKNEPRDSRWISNSMGSGSSPGICLESDNELENCGMGKPVENEPRDSRWTSNSRESGSSPHICLESDNELENCGMGERERHISWGNATQTEMPGDDLSNPASSQVQEENANNIKKSKVSAKNTTKAVGKTKMTKEERSRLMEEKKLQKEQEKLKKAALKAEAAEL

SEQ ID NO: 257077 - protein, 47 aa, Glycine max
  Clone ID: PAT_MRT3847_74163C.1.pep
HIKTQNHCTLHISSETERSNRSDRQGNANLSPALTLCSLSPKPRHST

SEQ ID NO: 257078 - protein, 97 aa, Glycine max
  Clone ID: PAT_MRT3847_74164C.1.pep
RPPFFFFFFETYTYMCMIRNIIMENILLFSYPYEEFYPHHTKTLLTVTSCDDDSNRETYLTLEFRSSYAYKPTGRGKNHHRVRSGIVIRTIVSTLEH

SEQ ID NO: 257079 - protein, 108 aa, Glycine max
  Clone ID: PAT_MRT3847_74165C.1.pep
CLFQVTEPRARFNNYPLYSAYSYTKPTCKATNVGGTARQVLFIKPRVTPNDGLSTWPLAPTWGVRLMVEVGNNFSRYFFCHIGIFQICFLPYWYLSYVFYCLCGVTVI

SEQ ID NO: 257080 - protein, 84 aa, Glycine max
  unsure (1)..(84): unsure at all Xaa locations
  Clone ID: PAT_MRT3847_74166C.1.pep
IGIDVKTDFIRVTLPPKEMCLCFHFASXLSHLLMIGSHNSTPWVCPNWXAXVDEQWVQQATVQVFCSILLPMFRLSNYPKIVFC

SEQ ID NO: 257081 - protein, 48 aa, Glycine max
  Clone ID: PAT_MRT3847_74167C.1.pep
NKLIIIQPRNCGNKEVSQHNLESISFVFIIYSYDILQLWLEYLFSNKP

SEQ ID NO: 257082 - protein, 83 aa, Glycine max
  Clone ID: PAT_MRT3847_74168C.1.pep
MGCSIPVGSQLPATMEALQLGYASFHVVSRAVLNMGISRLVLPVYRIIIAFLLLVPFAYFMEKKERPDITLNFLSQIVVVAID

SEQ ID NO: 257083 - protein, 197 aa, Glycine max
  unsure (1)..(197): unsure at all Xaa locations
  Clone ID: PAT_MRT3847_74169C.1.pep
VNMRACNAKVNVCMHIHLXLRHKXKVRESRGDWSLAIELISVFDVLIDAEARVPLTLADLLLALLSDLDLLAGLGDLAGNNTVEVEWLCLHLNASYLHLLDGSKGIGVAFLESSCELFVLVLELTLGKKHRVDGGAIVLLSGKSALLDVFNGNLEQGNGLGASVAHEPELGDLLLHLHHRLIILRLLLSIQSLQVLD

SEQ ID NO: 257084 - protein, 208 aa, Glycine max
  Clone ID: PAT_MRT3847_7416C.1.pep
LQYPAPFPGPFPFPARGVALPAVPIPDSQPPGVTPVGAAGGTSTPSSSHQLRGTTALQTEVISGPADDKKKLNSVDTLNEDAANNDQLDAWTAHKTEAGIIYYYNAVTGESTYHKPSGFKGESHQVSAQPTPVSMIDLPGTDWRLVSTSDGKKYYYNNLTKTSCWQIPNEVAELKKKQDGDVTKDHLMSVPNTNVLSDRGSGMVTLNG

SEQ ID NO: 257085 - protein, 80 aa, Glycine max
  Clone ID: PAT_MRT3847_74170C.1.pep
MEKAVRAYAEVLRLVRLLPKDSRAYYAKYARENFVNYRDVVDPSDFDDLFQRTYTHSLWVLHKYSIDKSAADKLRGICCT

SEQ ID NO: 257086 - protein, 80 aa, Glycine max
  Clone ID: PAT_MRT3847_74171C.1.pep
MEKAVRAYAEVLRLVRLLPKDSRAYYAKYARENFVNYRDVVDPSDFDDLFQRTYTHSLWVLHKYSIDKSAADKLKGICCT

SEQ ID NO: 257087 - protein, 52 aa, Glycine max
  Clone ID: PAT_MRT3847_74172C.1.pep
HFPPLTVAIHACSSLLCPSSHFSLFSLSLSLSNFSVIGFISNLHLFSVLSLF

SEQ ID NO: 257088 - protein, 165 aa, Glycine max
  unsure (1)..(165): unsure at all Xaa locations
  Clone ID: PAT_MRT3847_74173C.1.pep
RTAARRRQREDEEKKEKEKKRKRVNDMKKQQXEHEKILAKKEEIKIQRRATGEVLENKKIMDERENYKNLPVQDKRECNMEKISETEPLAMRDSANDKTKEPHPEYSESVNDCANNGQVMDNLIKAAEDDDLIIKDSLQEQSYEISPYRGSDDEDEDEDDLPNNK

SEQ ID NO: 257089 - protein, 97 aa, Glycine max
  Clone ID: PAT_MRT3847_74174C.1.pep
NLVFAPLRLNLHTHTPTPLYKTLAALGRYCALKLAFCTALVCPAPQFITRLIRTFVNSPPYYFPHSVNLLVPKRARVPTLPSFVVFVLLASLLSGVL

SEQ ID NO: 257090 - protein, 71 aa, Glycine max
  Clone ID: PAT_MRT3847_74175C.1.pep
GGSPRLGPFFGRPFPFYPSTNFFRGVAIKNAGHYPPFRLSPKGFETPNYGPVFPKPFFPPLKIFLKKNCFS

SEQ ID NO: 257091 - protein, 42 aa, Glycine max
  Clone ID: PAT_MRT3847_74176C.1.pep
TKKPILFYFPIQLHGNFKIWQRGILLIYTTYITIHLCEIKLK

SEQ ID NO: 257092 - protein, 82 aa, Glycine max
  Clone ID: PAT_MRT3847_74177C.1.pep
NSRKGAGYTSVKPLDAKTLRRLAQNREAARKSRLRKKAYVQQLESSRLKLTHLEQDLQRARSQDEFMGCGGAGGSISSGEFN

SEQ ID NO: 257093 - protein, 94 aa, Glycine max
  Clone ID: PAT_MRT3847_74178C.1.pep
KVKPKCKKKMLILLKIAVKDLRLLKIQILENIGRWNLLQMLKKTLTKILRHLLKKLLHLMKSIRYWRLLLIIWRLKTNMAFLLVDCVVMLQMKI

SEQ ID NO: 257094 - protein, 491 aa, Glycine max
  Clone ID: PAT_MRT3847_74179C.1.pep
MASQRIGETGLSESGPSSHHVPYGVLHGISTSSGLINQGSAFDFGELEEAIVLQGIKIRNDEAKASALFTGRPSATLEMFPSWPMRFQQTSRGGSKSGGESTDSGSGVNTLSTKNELRFETESPISIKASPSDHHQAFDQHLQQQQQQQQQQQETATAGTSSQNQSAAKSPQEKRKGAGSTSEKPLDAKTLRRLAQNREAARKSRLRKKAYVQQLESSRLKLTHLEQDLQRARSQGVFMGCGGAGGSLTRGAAMFDMEYARWLEEDHRLMGELRNGLQAPLSDSDMRVMVDGYLSHYDEIFRRLGVAAKSDVFHLINGMWTSQAERCFLWIGGFRPSDLIMMLIQQLEPLAEQQIMGMYGLKHSSQQAEEALSQGLEQLQQSLVDTITGGPVVDGVQQMVVAMSKLANLEGFVRQADNLRQQTLHQLCRLLTVRQAARCFIVIGEYYGRLRALSSLWASRPRETLINDDNSCQTTTEMQIVQHSQNYFSSF

SEQ ID NO: 257095 - protein, 49 aa, Glycine max
  Clone ID: PAT_MRT3847_7417C.1.pep
VFLTKYSLYILYAWFLKNGLSLQFKLQHKYFYSLIAIVSTVTSVIFVYT

SEQ ID NO: 257096 - protein, 257 aa, Glycine max
  Clone ID: PAT_MRT3847_74180C.1.pep
KFNIRIPRYQKLSDLVDEEDFDEQNAVEYTKVQYKNTTLPQTTLKTSVKELDLEAALAERELHVKLRKEAADRGEKYKITKLRRNVEMDEYDYMHWRRSFEERETLIRDISCRKALGLPLEEPGRYMDASFFGKDQYDPTSPLYRYDYWGEPKNSEKSMQERMTDLHNKKIVGKGNVWYEMSYEDCIKQQMESEAQSKEQENDEDTRQGQADEDEDDNDDDDFDFSILSSFGSNFSDQPHVNGTESSTISSGGMFED

SEQ ID NO: 257097 - protein, 35 aa, Glycine max
  Clone ID: PAT_MRT3847_74181C.1.pep
KEAPLILGAESHSRLVTVKVFVELFFPIMCVQIVA

SEQ ID NO: 257098 - protein, 131 aa, Glycine max
  unsure (1)..(131): unsure at all Xaa locations
  Clone ID: PAT_MRT3847_74182C.1.pep
LKNPPGSKPRARKKYQPPKKKKRKALKXKKKKKNIYKKKKKKKKKKKKIKGPKKKSSPPPPPKKKKQKKGASPKRPQTPGSYMGGKPPQPLKKPPPKGTTGARENPGAGAKKRKTNLAGDSCSIQNIGKTL

SEQ ID NO: 257099 - protein, 75 aa, Glycine max
  Clone ID: PAT_MRT3847_74183C.1.pep
FMNKCYFHFINDFVILFFFFPKASYIFKFEWDLWVPISWLGIVCKLSVRFNCTFHKATRSSAPIVVLTSYNKKFP

SEQ ID NO: 257100 - protein, 368 aa, Glycine max
  unsure (1)..(368): unsure at all Xaa locations
  Clone ID: PAT_MRT3847_74184C.1.pep
MATVMQKIKDIEDEMAKTQKNKATAHHLGLLKAKLAKLRRELLTPSSKGAGGAGEGFDVTKSGDSRVGLVGFPSVGKSTLLNKLTGTFSEVASYEFTTLTCIPGVITYRGAKIQLLDLPGIIEGAKDGKGRGRQVISTARTCNCILIVLDAIKPITHKRLIEKELEGFGIRLNKEPPNLTFRKKDKGGLNLTSTVTTTHLDLETVKAICSEYRIHNADITLRYDATADDLIDVIKGSRVYIPCFFLVNYVVNMILQIPLEXTGDLSXLPHNAHLEWNLDGLLEKIWEYLNLTRIYTKPKGMNPDYEDPVILSSKKRTVEDFCDRIHKDMLKQFKYALVWGSSAKHKPQRVGKEHELEDEDVVQIIKKV

SEQ ID NO: 257101 - protein, 192 aa, Glycine max
  Clone ID: PAT_MRT3847_74185C.1.pep
PNLTFRKKDKGGLNLTSTVTTTHLDLETVKAICSEYRIHNADITLRYDATADDLIDVIEGSRVYIPCIYVVNKIDQITLEELEILDKLPHYCPISAHLEWNLDGLLEKIWEYLDLTRIYTKPKGMNPDYEDPVILSSKKRTVEDFCDRIHKDMLKQFKYALVWGSSAKHKPQRVGKEHELEDEDVVQIIKKV

SEQ ID NO: 257102 - protein, 77 aa, Glycine max
  Clone ID: PAT_MRT3847_74186C.1.pep
TPLSHITSLGQYYSNLYLGNTHFMNKCRTLSEFLELNAFLRLPLSTRSLTLLPLDTCHYIFLGDYDTLIARNPVICA

SEQ ID NO: 257103 - protein, 70 aa, Glycine max
  Clone ID: PAT_MRT3847_74187C.1.pep
RQCSFSYVRNQEIIVCVPPCNVSVPCNSTHQARQLEKCQHTRLNFGMCQALVTSSHYFQASNCRIEYQRG

SEQ ID NO: 257104 - protein, 76 aa, Glycine max
  unsure (1)..(76): unsure at all Xaa locations
  Clone ID: PAT_MRT3847_74188C.1.pep
EIDVHHRIPSDQDTDTTIHDNESSVETSISHAASSHLLLEYFPERVGRAREFPVPELGMSHHAMVPPPPPPPXXPP

SEQ ID NO: 257105 - protein, 64 aa, Glycine max
  Clone ID: PAT_MRT3847_74189C.1.pep
MLGITMNVSARAKADGANYDLGPSQDDSVLKHRLLTLTTPTNCDPPFNNLYNKFTTFVPEASKY

SEQ ID NO: 257106 - protein, 158 aa, Glycine max
  Clone ID: PAT_MRT3847_7418C.1.pep
VKSSNVKEPVISPTSLVFGYLNLFSDGVHNFTDGMALGSAFLLYGSVGGWSRTLFLLAHELPQEIGDFGILIRSGFSIPKALFFNFLSALVALAGTALDPGQSSLIEGFTAGGFIYIAIAGVLAEMNNSGNTTLRNTVVQIISLTMGMAVALGISLVE

SEQ ID NO: 257107 - protein, 35 aa, Glycine max
  Clone ID: PAT_MRT3847_74190C.1.pep
VKGDLDQKNELRLLEFKFVILELTIDLVTMYVVAI

SEQ ID NO: 257108 - protein, 51 aa, Glycine max
  unsure (1)..(51): unsure at all Xaa locations
  Clone ID: PAT_MRT3847_74191C.1.pep
ACGVFIYVSVNHLXAKGYMPHRPTKVDSAYFKFLAVFLGVGVIAVVMIWDT

SEQ ID NO: 257109 - protein, 62 aa, Glycine max
  Clone ID: PAT_MRT3847_74192C.1.pep
IKNKISKSNVCDFESGGHLRTIDPNQHQLNLWCCKQTFYLNLNSNTLIIFVQISFLFLPFGL

SEQ ID NO: 257110 - protein, 48 aa, Glycine max
  Clone ID: PAT_MRT3847_74193C.1.pep
MFCGDYMYSETSGQVRKAGGNFKEKLREHGGLDAVFEVTMTCHSDLKV

SEQ ID NO: 257111 - protein, 79 aa, Glycine max
  Clone ID: PAT_MRT3847_74194C.1.pep
FGAQHLERVIQYLISGIYSLINKTLLQLETELIRLGKPIAADAGVNCLYSIMEICRLFDQIFKEHLDGVYVLTLFTSHV

SEQ ID NO: 257112 - protein, 188 aa, Glycine max
  Clone ID: PAT_MRT3847_74195C.1.pep
SGKGRKVCLTVTGVVIAIVLLIVILALTVFKAKHPVTTVDSTKLEDFHMGLDTPKLKVDLNVTLQVDVSVKNPNKVGFKYSDSTAHLNYRGQLIGEVPISAGEISSGETKGFNLTLTIMADRLLSNSQLLSDVTSGTLPLNTFVRMSGKVSILGFIKVHVVSSTSCDVAINLSNGTVGNQECQYKTKL

SEQ ID NO: 257113 - protein, 114 aa, Glycine max
  Clone ID: PAT_MRT3847_74196C.1.pep
PQKGVPGDAQKGFGQGLLEFGGFSTMLPLLAPGALLTPVGLFGGIKGFLRVLNLEFRFRPLLSRFPRGSWGVMTGFPGYGALFFGSDKGGNPFSVRPRPLVWAPLACCRAPFFG

SEQ ID NO: 257114 - protein, 56 aa, Glycine max
  Clone ID: PAT_MRT3847_74197C.1.pep
RGRVRISVLKQRSYYILEYKMRGAKEFKVMTRKYNEMDKDNNGNEEDDIYVQCFSL

SEQ ID NO: 257115 - protein, 46 aa, Glycine max
  Clone ID: PAT_MRT3847_74198C.1.pep
MDGPFCFNIETSPLSLYPPANLVLWTNIILASRCEPTVSGWFYHFD

SEQ ID NO: 257116 - protein, 106 aa, Glycine max
  Clone ID: PAT_MRT3847_74199C.1.pep
VCLVVAASLALAVFVSITVTGRPGYAGAGLSPARCLGPALLHGGPLWNGHWVFWLGPFLACIIYYSVSINLPKKGLNWVDGEYDVLRLALGSCRTISNNTDLNDLS

SEQ ID NO: 257117 - protein, 326 aa, Glycine max
  unsure (1)..(326): unsure at all Xaa locations
  Clone ID: PAT_MRT3847_7419C.1.pep
MATLNVPPLPPSPRDDAIQLYAAFKGFGCDTSVVINILAHRDATQRAYIQQEYKAMYSGDLLKRLSSELSGKLETALLLWMHDPAGRDAIILRQSLTLPKNLEAATQLICSRTPSQLHYLRQIYHSKFGVYLEHDIETNTSGDHKKILLAYVTTPRHEGPEVNREMAEKDAKVLYKAGEKRLGTDEKTFVQIFSERSAAHLAAITSYYHSMYGHSLKKAVKKETSGNFALALLTIVQCAENPAKYFAKVLRKAMKGLGTDDTKLIRVIVTRAEIDLQYIKAEYLKKYKKTLNDAVHSETSGHYRAFLLSLXVPTSSKKCSTMFCVE

SEQ ID NO: 257118 - protein, 27 aa, Glycine max
  Clone ID: PAT_MRT3847_741C.1.pep
MTMKLLVEFQTSSIKQFHLNSLNSYLL

SEQ ID NO: 257119 - protein, 72 aa, Glycine max
  Clone ID: PAT_MRT3847_74200C.1.pep
GFRVQKRSGKLKLIQEIRSQKSLSNLSFVAEVFEIRPLLHVVELKKSFGDSSAYRQVQDRTRLVQCLSILSA

SEQ ID NO: 257120 - protein, 66 aa, Glycine max
  unsure (1)..(66): unsure at all Xaa locations
  Clone ID: PAT_MRT3847_74201C.1.pep
PACAFPAGRTSKXNGSVKAIRRTPSGAGSMRFLRTVPRRFKRGFRAGTEAAPRKRGVAASPSALNR

SEQ ID NO: 257121 - protein, 142 aa, Glycine max
  unsure (1)..(142): unsure at all Xaa locations
  Clone ID: PAT_MRT3847_74202C.1.pep
ARGPVAIIGTDKLTALEARDQTIVNNPIEAHIIAEVAXESVKNGLGXQHIGIITTYKTQANLIRNAASMTSLETHTIDKYQCSYRDCILTSLGTPTAHPTSCAASMLGYWHRINAALTCANKTLIIVGSRRTLMRVPLLKLL

SEQ ID NO: 257122 - protein, 71 aa, Glycine max
  Clone ID: PAT_MRT3847_74203C.1.pep
CVDHVSFLFLKNQTFLHYHITLNFFTLTQIILSLDMPPNFFIRETHLSYIYIANNSNLKSYNSSFIFKRLS

SEQ ID NO: 257123 - protein, 112 aa, Glycine max
  unsure (1)..(112): unsure at all Xaa locations
  Clone ID: PAT_MRT3847_74204C.1.pep
PAIAGDPKXNWSNPEKFDPERFISGGEEADITGVTGVKMMPFGVGRRICPGLAMATVHIHLMMARMVQEFEWDAYPPEKKLDFTGKWEFTVVMKESXATIKPRGGGGEKVHL

SEQ ID NO: 257124 - protein, 70 aa, Glycine max
  Clone ID: PAT_MRT3847_74205C.1.pep
FSPLPLLTEFSDSGFCVQRRCLMFVLVCGSVTMSLQISPHTDQFTYAFHLISMHIFFTLSHYWSTRLCFF

SEQ ID NO: 257125 - protein, 103 aa, Glycine max
  Clone ID: PAT_MRT3847_74206C.1.pep
GAFCFYLGGGDRGGAVCDGDFARSCADRVFKDSSEDPSYDTSRTAANSMSPPNNTRGKSTSDSNSTSNERNVKQSNRRHPTPEAQVYRRHHPLLSSSHDHAST

SEQ ID NO: 257126 - protein, 40 aa, Glycine max
  Clone ID: PAT_MRT3847_74207C.1.pep
MCFSENEWDKDGERFFTKEVKQVIGSIIYIISKSRESCAE

SEQ ID NO: 257127 - protein, 66 aa, Glycine max
  Clone ID: PAT_MRT3847_74208C.1.pep
YKVLIQVHLDIGIFRNAMGYMNSFMTTCLRRSAIGLSICHRYNKKLTISSREILSAVRLVLSVDLC

SEQ ID NO: 257128 - protein, 38 aa, Glycine max
  Clone ID: PAT_MRT3847_74209C.1.pep
QYKLTNVALGGLFLYFNEGFEPPRFSLSYVCFKKMVVV

SEQ ID NO: 257129 - protein, 52 aa, Glycine max
  Clone ID: PAT_MRT3847_7420C.1.pep
THDSSHHIKVPLDKSSQMLGSTAENLGGRHALKHINLLDYLRIHNPNLNDCS

SEQ ID NO: 257130 - protein, 361 aa, Glycine max
  Clone ID: PAT_MRT3847_74210C.1.pep
MGLVTVTWTNYLKKRIPLRIRFLHTLKGNQIGQILMSPPLASLDLPDIWSPISSCRSIPAIHKSFNEQTTVVLDGKLISMEIRSKIAAKVRQMKKGLGKVPGLAVILVGQRRDSQTYVRNKIMACEEVGIKSLVTELPTDCAVTDVQNAIMRFNKDPSIHGILVQLPLPQHLDEEKVLDAVCLEKDVDGFHPLNMGNLAIRGREPLFTPCTPKGCIELLIRSGVEIMGKKAVVIGTSNIVGLPASLLLQRHHATVTVIHAFTQNPEQITSEADIVVSAAGVPNLVRGNWIKPGAAVIDVGTTPVEDPGCEDGYRLAGDVCYEEAVKVASIITPVPGGVGPMTVAMLLCNTLDSAKRMLNFS

SEQ ID NO: 257131 - protein, 81 aa, Glycine max
  Clone ID: PAT_MRT3847_74211C.1.pep
SGRTSRRSYRRWHGACHVASGFPAASTPAGTPRGPRICPRARSCGGSPGAPPCSSCSRCGSVCGAVTQASTNGSPAASPDA

SEQ ID NO: 257132 - protein, 62 aa, Glycine max
  Clone ID: PAT_MRT3847_74212C.1.pep
HGQWHSWPQKQPLQLVQVLMLRAGPGLDTKLKPKVQQKKRTYSNEGAGTMLINCRTRRSDAW

SEQ ID NO: 257133 - protein, 657 aa, Glycine max
  Clone ID: PAT_MRT3847_74213C.1.pep
MDLAQGFHQIRMVESDIPETTFCTHQGHYEYVVMPFSHNFDEHLDHLDQVLHTLQQGEFNLKLSKCVFGQHSIDYLGHIVLTNDVEPEPSKIQAMLDWSIPMITKISFHGPLMLKRPLIPSKGDDSGTDASNMGIGFVLMQMGHPIAYFSKQFCPKLLRSSTYICELHAITIAVKHHKSLRKLMTQPIQTPEQHIYIAKLLGYDYTIQYKAGHSNVVADALSRIREPSPEALWIMNVPHFQFLDDLKHELFQMEESISLLNVQTKYIPQRPAGLLQPIPPPPSPWEDMALDFITGLPNYQGATVILTIIVCKLHGFPKSLISDRDPIFMSRFWCELFKLNDTKLRMSMTYHPKVTASPRCLTAWCNNTWAASCTRNLSSGESFHVLLNGSSSMETIDFLLTSRQDMFIHLKRKIEHTQEKMKSSVGSHRWDISFHVDDWVYVKLRPYRQTSLAGNNYQKLGKCYYGPYQVIERVGLVAYKLALPASAKIHPMFHCLLLKPHSGPMASDYYHLEDKVILEAIGNDSNPESEANHMPKRIIKRPQRDKAHPFHEEECPYTMVQNYAKFNMSEHVALCNSYAKTQAYMQCGTMSVKNHPRALRRSQCFARMLQSYGINIGLKEHSNRVTPKAYTPKSPSGPLPPDSGPTPKIIFACRHCS

SEQ ID NO: 257134 - protein, 67 aa, Glycine max
  Clone ID: PAT_MRT3847_74214C.1.pep
SSRVVLHHTPIWPRHLRRLFLLLHIVSPKNPCRRLQGHLIVFNVENGGALQIMYTMFPNLVLRTVSC

SEQ ID NO: 257135 - protein, 95 aa, Glycine max
  Clone ID: PAT_MRT3847_74215C.1.pep
MRFVDDNKRKKNGINLRCFRYTQVFIICVLMIAFANLTSPSPSGGSRVWYPFPSLLWSFKFWLPSMFFGRAPSRSMKLTSVTTTQQRRNWYCWCY

SEQ ID NO: 257136 - protein, 44 aa, Glycine max
  Clone ID: PAT_MRT3847_74216C.1.pep
RRQRRLSSKCIYESQFSVMSTSDYSQSAQRNIFASKLATIYESR

SEQ ID NO: 257137 - protein, 122 aa, Glycine max
  Clone ID: PAT_MRT3847_74217C.1.pep
MPLAPLFSASRSLAAAAAFLRHCSTAATTNRRNLYSRISPLGDPSISVVPDLDEWIEEGNAVDGPHLHHIIKILRTRNRNTQALEGSEWMSSKGLPIFSRDQAVQLDLIGRVHGVESAQKDL

SEQ ID NO: 257138 - protein, 89 aa, Glycine max
  Clone ID: PAT_MRT3847_74218C.1.pep
ESLHLIEKLPYFHQVYHLEGYSDSVLVSDEPIEDRLGGNMVISQSRVGKSTPENIVDDGQPEHLMVDGELQPYKERINYDDVLLTGSCK

SEQ ID NO: 257139 - protein, 109 aa, Glycine max
  Clone ID: PAT_MRT3847_74219C.1.pep
FMSLFLLQTLGSRFSLTFSSLMALFDKKLDTGYKMGYVIAWILGGRGGILLTLCLSFASWVCGKTSSSVVALVVVALWVGSYLARYAPLPQGALLALLYMSIKLQSDLI

SEQ ID NO: 257140 - protein, 75 aa, Glycine max
  unsure (1)..(75): unsure at all Xaa locations
  Clone ID: PAT_MRT3847_7421C.1.pep
PXXFFSQSYSNSTQTXSQRTFLQKHIPPPXTILHHISNISINISYFIHFPISNFHTTTNSTLIYIKINFINSHIY

SEQ ID NO: 257141 - protein, 129 aa, Glycine max
  Clone ID: PAT_MRT3847_74220C.1.pep
MGRIFTVELEGRSYSCKSCKTHLALADDLISRSFYCQRGKAYLFNNVVNFTIGELGEDDRRAGLHTVADIFCCCCGQIVGWKYESAHERNQKYKEGKFVLERGRIVDEMDFSTEFRIESCVSMSDAENA

SEQ ID NO: 257142 - protein, 97 aa, Glycine max
  Clone ID: PAT_MRT3847_74221C.1.pep
VSQWVGCWSHSTCDCSVLRSLFLAVTLVGESLSKCSMALPIMILSWTVYASSFGGGFLFYTKTGNVFCLSSPIEMAGVRLSFLVVRIGIDYRERWET

SEQ ID NO: 257143 - protein, 87 aa, Glycine max
  unsure (1)..(87): unsure at all Xaa locations
  Clone ID: PAT_MRT3847_74222C.1.pep
IHKIDETVHVGGLMKEEHTGYHHGEHMGYHYXYRRGEHKSEHGXEHRYGEHKEGLVDEIKDKIRGDGHDKGGKYNKNDIKNMEHGHD

SEQ ID NO: 257144 - protein, 71 aa, Glycine max
  Clone ID: PAT_MRT3847_74223C.1.pep
SHGALLPALRAFSCLDLGAGSAEGRENDHIALPEDYFPSLGPALGLGCAAQRVFVFRCLSICMCVHVRKHA

SEQ ID NO: 257145 - protein, 152 aa, Glycine max
  unsure (1)..(152): unsure at all Xaa locations
  Clone ID: PAT_MRT3847_74224C.1.pep
SRSRSRRETSSSASRSPAPSSRTPQFRAALSFPARRGTSLSASRLRSAPSSLTQPSPAVPSSPARRRTSSSASRSSWAPSFXDPTXPGGSXSSPTQLSPAAPSSQTSLPSRLANWSPTTSREKLALTFCLRHVPNRQEQAQRGRAGSVPRHM

SEQ ID NO: 257146 - protein, 73 aa, Glycine max
  Clone ID: PAT_MRT3847_74225C.1.pep
PGGRFACCESAPGVRDFCFSPIKNVFVFQGVQKEPIVMFLPPLIIPQSKTPARSLTPLFYSQLIKAGNGCFCF

SEQ ID NO: 257147 - protein, 55 aa, Glycine max
  Clone ID: PAT_MRT3847_74226C.1.pep
YRIIGTNPTARGKQDKDEHYSQHTDPLIRKKGTIRMYRWTRSRHKYACRRRFRTC

SEQ ID NO: 257148 - protein, 47 aa, Glycine max
  Clone ID: PAT_MRT3847_74227C.1.pep
LESVKSVTIRRIPTVRATMPLYDSLTEFQNGHCHMAIVVKHCDKTRY

SEQ ID NO: 257149 - protein, 61 aa, Glycine max
  unsure (1)..(61): unsure at all Xaa locations
  Clone ID: PAT_MRT3847_74228C.1.pep
MKINVLAGLLSTTLGASQFHAYNMSHLPINTYFRAPTPXVNCTKXTLTLEAHNIFYFKTIH

SEQ ID NO: 257150 - protein, 102 aa, Glycine max
  unsure (1)..(102): unsure at all Xaa locations
  Clone ID: PAT_MRT3847_74229C.1.pep
WQFPHFYXXXXLIPDXXSLGXXXXXSLYPLSLHAXXYXLXSXSGLXEXLXXDXXADQSTXRPSQLXXMXDVXGXXDTERDHAWXRIKAIVQKPKXKRPXATT

SEQ ID NO: 257151 - protein, 131 aa, Glycine max
  Clone ID: PAT_MRT3847_7422C.1.pep
GLGGGEYQLVFEIHRGLLAPPKDIRYGGLQRNTGPCFCPGASFFNCRPGGQGHPFNRGCRALSRGRGGNFPFFKNFFFGCEMERGLVGVVVLLYKKGIFPRPLWEWESPSGCWWEKTPPWFFLKLGLVVFW

SEQ ID NO: 257152 - protein, 302 aa, Glycine max
  Clone ID: PAT_MRT3847_74230C.1.pep
PRVRPRVRTAARRRQKGRSASFFLSLSLSLSAPFFHNSIKKSISKVWWLSCPSINQSNQSRDQSSTEYKRTKKGGYPQRHPLSPHYHWSCILWLFLRRHLPPSEQLCYVHCNICDTVLAVSVPCTSLFKTVTVRCGHCTNLLPVNMRGLLMPSPTQFHLGHSFFSPSHNLLEEIPNPSPNFLMNQTNLSASNEFSMPARIAADELPRPPIMNRPPEKRQRVPSAYNRFIKDEIQRIKSVNPDITHREAFSAAAKNWAHFPHIHFGLMPDQTVKKTNVCQQDGEEVLMKDGFYASANVGVSPY

SEQ ID NO: 257153 - protein, 154 aa, Glycine max
  unsure (1)..(154): unsure at all Xaa locations
  Clone ID: PAT_MRT3847_74231C.1.pep
QRFPVRMKTGYGERTWKVKCSSFTLAGEAHNMQAFTTIPEXCIEPTKDYINGKQFRSHSKTVNQQSICYASEREVHHNDIFIYWIENTLLSNIPCCEXHAYGWEESNETSNDEXVDKAHAATLPDTLNDYEWMVYFGRTTVXLSGGYLYKMGIS

SEQ ID NO: 257154 - protein, 218 aa, Glycine max
  Clone ID: PAT_MRT3847_74232C.1.pep
IAQLNKIISSFFRYGYGDASLAIYENMVHRPFMNRSSLDESGAEFCGSRLTERIHGTNSNINWTRNRFQVDSSSSFNEPSTSKVQEPKHKFFSFGGNESSCTQIKMSQVDLHQSTQLQPGAQELMPNNKFATNEVELKTLKRKASDIDLDLNLSLKLNSRVNAENQGSMVDHEVVDSNLSLSLCSQSSSFSSNRLKNSQDHSKEQGEIIRASALDLTI

SEQ ID NO: 257155 - protein, 58 aa, Glycine max
  Clone ID: PAT_MRT3847_74233C.1.pep
SACRPKPHHPCFSHFFPVAFTPTGAPTPKCIHTCQILCRHLINFYSVMDHRLHLTSDA

SEQ ID NO: 257156 - protein, 63 aa, Glycine max
  Clone ID: PAT_MRT3847_74234C.1.pep
MICLQLFKKEIEASPGESSALSLFSRRVSSHGFPSISNEAQIQNIVRQLRTWRDLMARIHDES

SEQ ID NO: 257157 - protein, 55 aa, Glycine max
  unsure (1)..(55): unsure at all Xaa locations
  Clone ID: PAT_MRT3847_74235C.1.pep
ALKYTAKHTSMESLVXQLHEISAXKFXNXKLKFXMCLPMYVDLRLVICYACGLGV

SEQ ID NO: 257158 - protein, 77 aa, Glycine max
  Clone ID: PAT_MRT3847_74236C.1.pep
ALFYCLTVSYTCDNFLPPPASRARSTFFFFFFFFLKTSSKANDAYGGGCVGQKADKDLTKPGRDAAPARQSKMEGFI

SEQ ID NO: 257159 - protein, 100 aa, Glycine max
  Clone ID: PAT_MRT3847_74237C.1.pep
FMCLHGREKMIEGEYYGEVGGETQGLEVHARIKRIIQRSKLAGRIRSQSFNRSTRARRSTTKFQEQENEHRPRRTLTAQETRSQLIRAPRHLASSNKSSR

SEQ ID NO: 257160 - protein, 100 aa, Glycine max
  Clone ID: PAT_MRT3847_74238C.1.pep
RLIWQGRKKLVPHFFFRKCNPLDSSVVKLRALFFLFFKSVIIHYHNGLVSKELLPNDLSHVDGVHVAVEEIVVAIMKAQFFGVGMIVQEEISRHDHIVSL

SEQ ID NO: 257161 - protein, 56 aa, Glycine max
  Clone ID: PAT_MRT3847_74239C.1.pep
KKYIHYKPTTDIENMLLFFNFTPQHKHYRAPPRNGHLLTMVLFYYKTNTSLPFTTY

SEQ ID NO: 257162 - protein, 74 aa, Glycine max
  Clone ID: PAT_MRT3847_7423C.1.pep
NLSELCVNYQSLGELYQVNNDIPHPFLEHFFLGPVRSHCASKPISVQCCKSFGVEELNFQSIDSSPMNKQINNK

SEQ ID NO: 257163 - protein, 77 aa, Glycine max
  Clone ID: PAT_MRT3847_74240C.1.pep
LSKSNDILYKSTRGTVVQYRMHHSPLSQIPCWEKHIREANPKNASSAPTGEKLGSIAAENRELASKPCTTVTTLKSS

SEQ ID NO: 257164 - protein, 63 aa, Glycine max
  Clone ID: PAT_MRT3847_74241C.1.pep
FLNIPILFTCCNRRKRTPKMPLHLQNRRSHQLNHVTTYYGLKKKRPVMPYRDESQLTEKKSTL

SEQ ID NO: 257165 - protein, 332 aa, Glycine max
  unsure (1)..(332): unsure at all Xaa locations
  Clone ID: PAT_MRT3847_74242C.1.pep
VKDLIQFLXGNKSGCYVSIGRYISALENHSSQSKSITQADDFFFITASAITLAVRPFYLTNYDVEVPGALDVNHAAKQFFVYLLTIPWLVQHLPPVLLPALKHKSILFPCFRTLLILKEKVLMEMLEFVKSEILVSFKAIPPVGWALTNSICLATGNENESFNQGLEYALYVRVVITLAEALLACLDNIGWVKKKKKALQIDVESSTQPVDTVRHEGEATDESIIMSYMDQFRPVCQQWHLKNLLASIDRDANNKAATVISNDLACLGKLELCDVALFYSNLLRIFSVLSPIRGPLSVLNMLAFTPGFLVRLWGVLEDSFFSEDKNNSDNHT

SEQ ID NO: 257166 - protein, 86 aa, Glycine max
  Clone ID: PAT_MRT3847_74243C.1.pep
CSQATVLLLSHLSSGSKSNVEGFSQLLRLLCWCPAYISTHDAMQTGVFIWTWLVSAAPELGALVLAELVDAWLWTIDTKRGLFASE

SEQ ID NO: 257167 - protein, 68 aa, Glycine max
  Clone ID: PAT_MRT3847_74244C.1.pep
CNLEYHDVMGDSTVTDTFIIFLSIPSQLLIGCTVKIDQIYTLHGWLVLGSWEMQTLPLGDIDLKSYAW

SEQ ID NO: 257168 - protein, 534 aa, Glycine max
  Clone ID: PAT_MRT3847_74245C.1.pep
SALCFDPSGTLLVTASVYGNNINIFRIMPSFTCKSSGIPSSNWNSSHVHLYKLHRGITPAMIQDICFSNFSQWIAIVSSKGTCHLFVLSPFGGDTGFRIISSQGEEPFLLPVFSLPWWYTPASISYQQSLPPPAPVVLSVASRIKYSSFGWLNTVHNSSANVTGKVFVPSGAIAAIFHNSLSHSQQLVNSKAKPLEHILVYTPSGHVFQHELLASVGLGTTDNGLRNQSTSLLHMQEDEFRVKVEPIQWWDVCRRSEWPERGDTCCNTFDRQGGIERVQEKISYSDVHGLNFLGTRDTAGEKMVRSSNENMHDRFHWYLSNAEVQRNFGRLPIWQKSKICCYSMSCAGASFSATGEFEIEKVPVNEVEIRRKELLPVFDHFHSIRSSWNERGLAGDRYLSSTSPVLDQADDKETADVTVICHSKPASLSSTESSEGGSSRRIENLLDLDQVASSYQILGEICLERMGTINVEPCLQNQIVMSPSCLSGNLKHVDFNADHIASPIFQGRNITSERRDSIGVEISENSALVLEHAS

SEQ ID NO: 257169 - protein, 34 aa, Glycine max
  Clone ID: PAT_MRT3847_74246C.1.pep
NFLNLRYQTEKKMIHQNYILSFTFSIFQAFIKIY

SEQ ID NO: 257170 - protein, 39 aa, Glycine max
  Clone ID: PAT_MRT3847_74247C.1.pep
MSWGDNGRNPRSKLENSRIREQKTHRKKDKGTLYATDTL

SEQ ID NO: 257171 - protein, 83 aa, Glycine max
  unsure (1)..(83): unsure at all Xaa locations
  Clone ID: PAT_MRT3847_74248C.1.pep
VICQKVFLRWKHYSRQFYTYXQRQIPKLENFSKLGLQDQSEXSNTFFESSPEISTSSGTESDMSFSRYTPSMPHKQLFGRHTK

SEQ ID NO: 257172 - protein, 66 aa, Glycine max
  Clone ID: PAT_MRT3847_74249C.1.pep
YISMLMCQRLDPDTRRPKHRPTNCRSTHLTISSSRMCTHYCLLVSYGECLPFQRTFRPPRVCPWGH

SEQ ID NO: 257173 - protein, 190 aa, Glycine max
  unsure (1)..(190): unsure at all Xaa locations
  Clone ID: PAT_MRT3847_7424C.1.pep
EQRICRPESTCSIRTSEDDFLRIKRDNAHYTINPAXGNGFSKYVGSVKVGKLADLVMWKPSFFGAKPEMVIKGGVVAWADMGDPNASIPTPEPVKMRPMFGTLGKAGGALSIAFVSKAAVDQRVHALYGLNKRVEAVGNVRKLTKLDMKLNDSLPQITVDPDNYTVTADGEVLTSFATTFVPLSRNYFLF

SEQ ID NO: 257174 - protein, 129 aa, Glycine max
  Clone ID: PAT_MRT3847_74250C.1.pep
GNPGKAGAGATLRANYGIMICRLREGVGIATNNAAEYRAMILGMKYALKKGFTGIRIQGDSKLVCMQIDGSWKVKNENLSTLYNVAKELKDKFSSFQISHVLRNFNSDADAQANLAINLADGQVQEECV

SEQ ID NO: 257175 - protein, 56 aa, Glycine max
  unsure (1)..(56): unsure at all Xaa locations
  Clone ID: PAT_MRT3847_74251C.1.pep
RXSLXEISXLRRGRNQRKEKKTRTTKRXLSSLXXRKSKTRGGGFYNLFQXNNHSAH

SEQ ID NO: 257176 - protein, 393 aa, Glycine max
  unsure (1)..(393): unsure at all Xaa locations
  Clone ID: PAT_MRT3847_74252C.1.pep
MKLCIDLDPMDPKPNLNPVLTDATPLTRSRLGVPSGLSPYXSSVRTGLTFPHGNMLAIPRKKTGILDDFRSSGWLDAMKSSSPTHTKVSKDVSHGIGSPDSAYSTWLLKFPSALASFXQITNCAKGKRIALFLDYDGTLSPIVDNPDSAFMSVYMRAAVKIGAEYFPTAIISGRSLDKLYEFVGVSDLCYAGSHGMDIIGPSRQSXDNNCVARSFCGRRNFQAEYYKSCTVLLPFIHEVFVFFKESRVLIDLFTVVNYKFCVSVNYRIVDXKSWQIVGQRVYDVLKEYPRLRLTHGRKVLEVRPVIDWDKGKAVTFLLESLGLNCDDVLAIYVGDDRTDEDAFKVLKEANKGCGILVSRAPKESNAIYSLRDPSEVMEFLTSLAEWKSSIQAR

SEQ ID NO: 257177 - protein, 64 aa, Glycine max
  Clone ID: PAT_MRT3847_74253C.1.pep
ISTIGHAICHALSQESNLELYQAHNIRRVSGSLRKVHHIKRVNIVSQTRVNVLVFTVALLDSYT

SEQ ID NO: 257178 - protein, 89 aa, Glycine max
  Clone ID: PAT_MRT3847_74254C.1.pep
SRAIRLRKEGRNEKREVEELRQRKRQGSNKSKESVSVKKEKNQGKKNKKISKLKNEPRRVPSSKNGSKGRTRNHHGEVKDLSSVSSNSS

SEQ ID NO: 257179 - protein, 288 aa, Glycine max
  Clone ID: PAT_MRT3847_74255C.1.pep
MPLSSSSSSAVDSAVSGEIMLFGVRVVVDSMRKSVSMNNLSQYELPRDAANAKDDAAGYASADDAAPINSDKNRDRKRGIPWTEEEHKLFLVGLQKVGKGDWRGISRNYVKTRTPTQVASHAQKYFLRRTNLNRRRRRSSLFDITTDSVSTTPMEEGVQIQHQDNVSLFHPVYPVTPEGSNMNGFPKMSMYPKDVGSGVMSVQAGNPMETLTLGQGNVEKHNVPSTANKASTVSGIITPGSSSSAIDPPPTLSLGLSFSSDQRQTSSRHSALHAMQCFSNGDSIISVA

SEQ ID NO: 257180 - protein, 147 aa, Glycine max
  Clone ID: PAT_MRT3847_74256C.1.pep
MLLSSSCSAAGSAVSGEIMLFGVRVVVDSMRKSVSMNNLSQYELPRDAANAKDDVAAGYASADDAAPINSGKNRDRKRGIPWTEEEHKLFYLGLQKVGKGDWRGISRNYVKTRTPTQVASHAQKYFLRRTNLNRRRRRSSLFDITTD

SEQ ID NO: 257181 - protein, 123 aa, Glycine max
  unsure (1)..(123): unsure at all Xaa locations
  Clone ID: PAT_MRT3847_74257C.1.pep
NATPTRAEVSDIAIAVREGSDAIMLTGETAHGKFPLKAAKVMHTVAVRTEATTPGXQMPPNKGQVFXNHTSEKLAYHATMTANTTGTATVGITRSGIMASVKSHDRPSSTIIALTESKRIQQR

SEQ ID NO: 257182 - protein, 60 aa, Glycine max
  Clone ID: PAT_MRT3847_74258C.1.pep
VFSSSKSSFSFFFHVFPNSTLFYVILANVIRLFCMIINEKNPMDVWTYPKKKREGEIQLC

SEQ ID NO: 257183 - protein, 64 aa, Glycine max
  unsure (1)..(64): unsure at all Xaa locations
  Clone ID: PAT_MRT3847_74259C.1.pep
GXHGLVSPLSPPRGGFFFFFFTAKYFKLFFKWRVFRGGLLLKKRVKGRNKNPPPPFLPSQQPEN

SEQ ID NO: 257184 - protein, 47 aa, Glycine max
  Clone ID: PAT_MRT3847_7425C.1.pep
NKENSSLQLIRSSGRSHNGEFNRSKHNKLNHQETSLPVLSRDIPKCE

SEQ ID NO: 257185 - protein, 72 aa, Glycine max
  Clone ID: PAT_MRT3847_74260C.1.pep
LKFQFNLVGRLLGPRGNSLKRVEATTGCRVFIRGKGSIKELDKEELLRGRPGYEHLNEPLHVLIEAELPVNG

SEQ ID NO: 257186 - protein, 39 aa, Glycine max
  Clone ID: PAT_MRT3847_74261C.1.pep
SMSTSRNWALLCETWMVRSGICYVPVYYFAFILQDNKMK

SEQ ID NO: 257187 - protein, 39 aa, Glycine max
  Clone ID: PAT_MRT3847_74262C.1.pep
FLSLIPRKLEGVKITLELGKDNTSTFEGMKVKVENLEYY

SEQ ID NO: 257188 - protein, 113 aa, Glycine max
  Clone ID: PAT_MRT3847_74263C.1.pep
NRGRPPWGGKLPSGKKKPFLLVKAPRGFGFQMGSKCPPTTKFMGPFWFGNFYSFAGEGKVRFFFFVFSPGKIWRGRIYFFEIQGGQFPFARGPNFFCLSRLSHGLKPRGLFFG

SEQ ID NO: 257189 - protein, 221 aa, Glycine max
  unsure (1)..(221): unsure at all Xaa locations
  Clone ID: PAT_MRT3847_74264C.1.pep
NFDAERSLEKFQVGQIWAFYGDEDGLPKYYGQIKRVKSSPDLELQVTYLTNCWLPEKCVKWEDKDMLISIGRFKIKAGARSCTYANTYSVSHQVQVITDGKKKEYEIFPREGEIWALYRNWTTKIKRSDLLNLEYDIVEVVGEHDLWMDVLPLELVSGYNSVFKRKSNAGSARATKIXWKDLLRFSHQIPAFKLTEEQDGTLRGFWELDPGAVPLHYFNNK

SEQ ID NO: 257190 - protein, 67 aa, Glycine max
  Clone ID: PAT_MRT3847_74265C.1.pep
PQDTVVNTLQKAEAQSRFITSFLRETGMASPIKITLKSSDGEEIYVQDVAGGESHTITHMIDENCAY

SEQ ID NO: 257191 - protein, 151 aa, Glycine max
  unsure (1)..(151): unsure at all Xaa locations
  Clone ID: PAT_MRT3847_74266C.1.pep
MCIQAALEKEKNVSEVEDSGKQESLEALTSQVNRLALQDSPQAQDIDKRIRALKKKISDMVAIAKIIXATLVLPTLDHDSFWTDSSDFKQIFYXKNFIEVLKDDVQIVESLPPEFATIKPVLKAPVSWSKAGYYAGEVLQLLKKHKVIKFT

SEQ ID NO: 257192 - protein, 132 aa, Glycine max
  Clone ID: PAT_MRT3847_74267C.1.pep
PPQRRGEPVPPGLLGKGLAGQPFWFVPPAQEHGKALGGPGPLKISKAPRENPCVFLRGRAPPPFRKGGKKSGGVSRKKGGPTRALLLWFHFMENFPPQFFSGPFLPPGGAFLKAFCPQNCSYRELRFFFTFF

SEQ ID NO: 257193 - protein, 196 aa, Glycine max
  Clone ID: PAT_MRT3847_74268C.1.pep
MSDDERKKQIAELSKSLKEGERLVGPTRRPDGTLRKPIRIRAGYTPQDEVAIYQPKGALLKKEMGSAGPPGYEPDADSKPKTKSVKRNERKKEKRIQAALEKEKNVSEVEDSGKQESLEALTSQVNRLAVQDSPQAQDIDKRIRALKKKIRLTEALEQKSAEQDLKPEQLEKLAKLEDWRRELKLLEDEKGETTVS

SEQ ID NO: 257194 - protein, 96 aa, Glycine max
  unsure (1)..(96): unsure at all Xaa locations
  Clone ID: PAT_MRT3847_74269C.1.pep
QRGDWKNPGVPQLNRLEKNPLFASWGKTKKARTNAPSKKLPTLNGKGDPPCRGPXSAGGGGVPPRGTVTFARALRPGLFVFFPSFMARLAGFPRKV

SEQ ID NO: 257195 - protein, 86 aa, Glycine max
  Clone ID: PAT_MRT3847_7426C.1.pep
GGPTSSSPTSSAGTLASFQADRVFPTSTVVPLHYQLPLPEESSVHAFVLAPSKERETEEADRATPDNNKRHPPPAAPATAGRGATR

SEQ ID NO: 257196 - protein, 99 aa, Glycine max
  Clone ID: PAT_MRT3847_74270C.1.pep
LIGCYLKNYLDGDSCRLIVLIFLLIGRGTSVPSCMLGAARLGVQFSVLPLCIIVIHLDYREFVQVVEREGEGKGTSLCNFFSFFLLRAELLFLIENENV

SEQ ID NO: 257197 - protein, 262 aa, Glycine max
  Clone ID: PAT_MRT3847_74271C.1.pep
MLCRYNLKSLIHTIVGVGKQVHTPNSISKLHQLQRSSKSLKEGERLVGPMRRPDETLCKPIRIRAGYTPQDEVTIYQPKGALLKKEMGSVGPPGYEPDADSKPKTKSVKRNERKKEKRIQAALEKEKNVSEVEDSGKQESLEALTSQVNRLTLQDSPQAQDIDKRICALKKKISDMVAIAKIMKATLVFPTLDHDSFWTNSSDFKQIFDWKNFTEVLKDDVQIVESLSPEFATIKPVLKAPAGYNAGEVLQLLKKHKVIKFT

SEQ ID NO: 257198 - protein, 197 aa, Glycine max
  Clone ID: PAT_MRT3847_74272C.1.pep
MSDEERTKQIAELSKSLKEGERIVGPTRRPDGTLRKPIRIRAGYTPQDEVAIYQPIGALLKKEMGSAGPPGYDPDADSKPKPKTKSVKRNERKKEKRIQAALEKEKNVSEVEESGKQEFVEALTSQVNELAVQDSQAQDIDKRIRALRKKIRLTEALEQKSTEQNLKPEQLEKLAKLEDWRRELKLLEDEKGETTVS

SEQ ID NO: 257199 - protein, 52 aa, Glycine max
  Clone ID: PAT_MRT3847_74273C.1.pep
SRCSISFIDLGSVSFLLSCTPMVALYGFFWASPINKPSRLYLLALLSTLLVW

SEQ ID NO: 257200 - protein, 48 aa, Glycine max
  unsure (1)..(48): unsure at all Xaa locations
  Clone ID: PAT_MRT3847_74274C.1.pep
GSNANDSIVFXSYLLLSHLIGCNRLADSDLCQXCFFFLIHYVHCAQWN

SEQ ID NO: 257201 - protein, 97 aa, Glycine max
  unsure (1)..(97): unsure at all Xaa locations
  Clone ID: PAT_MRT3847_74275C.1.pep
FSFSCKWTKLEXHIHWELIFPIEVCGPNNGFEMWSFEWENITLWHWSYLIDKFKQSPLFDILLGISQDFEIAGNTIMPAFYVPQAIDRFSENAESFA

SEQ ID NO: 257202 - protein, 215 aa, Glycine max
  Clone ID: PAT_MRT3847_74276C.1.pep
VKPGGVSSAAAGARSRPSGLPPVSGLGEAIRLEPESSFSSSGRRMVPRIESNKKGASKRIHHPANLSMESLTKVSASNTDKGLSGMSRLAPLPFEAHNTFQTSQPMSSSAGIVPSSPESSLDSPDIHPFRVSSSGAEKARQLAGASGAGAATLKEISLSSSTSDGYEASGGEDSDRVDPSRIVQRSTNWTNLLFRADQDDKAFKMSLSSTSVGYR

SEQ ID NO: 257203 - protein, 44 aa, Glycine max
  Clone ID: PAT_MRT3847_74277C.1.pep
WLALSSDLIFIKLLVMLSFCFHRYPVLHWSHIWCYYIRLNVEDD

SEQ ID NO: 257204 - protein, 75 aa, Glycine max
  Clone ID: PAT_MRT3847_74278C.1.pep
GEILNGQSCKRNHLLDDVNLFKKLKINEDKSDIPDKVDDLSGSIARSQFTCSYASKNLKRIREDETTAANYKRIR

SEQ ID NO: 257205 - protein, 94 aa, Glycine max
  unsure (1)..(94): unsure at all Xaa locations
  Clone ID: PAT_MRT3847_74279C.1.pep
VFWPVFXILYXKIXFVHSXKXIXDXLXKKRFIILKKKKKNXVPFVXNSAXGXVVFXXQSPSFLSFIFFFXTCHCNLLYHVMILRYALCTVMFIL

SEQ ID NO: 257206 - protein, 86 aa, Glycine max
  Clone ID: PAT_MRT3847_7427C.1.pep
FTPAPQKKLLAPFLAKLFSTKAFFCGGIGSQKGVFLLPLSRKLVFSPPRRIFLFFPPVPLFRGSPFFFFPPPTVGWSGLFFLGFCF

SEQ ID NO: 257207 - protein, 65 aa, Glycine max
  Clone ID: PAT_MRT3847_74280C.1.pep
ALGRVSYPPFSAHVQLPSPQDPYYAFPAHLCPMKARSSPRHSRSVGVHRRACRDLMLSPWCDCRR

SEQ ID NO: 257208 - protein, 84 aa, Glycine max
  Clone ID: PAT_MRT3847_74281C.1.pep
IFLGCHKGFFYDETKTGSCTCSLVKHQLCSQEITILPQVRPHHCKCPSLSPRVSHQLNTALLRPPHVPRVKPQHHSQGDPLLCA

SEQ ID NO: 257209 - protein, 127 aa, Glycine max
  Clone ID: PAT_MRT3847_74282C.1.pep
LAYTTSLFLRFSPPTQKKPGRGLIQGGKGTISTHRNIDRSIDPALLTTQWQAALTKRATTYPHKLGHTVESVGPPHRGVLDRPTATPKARGCPRYLGEGTPPDNPEAEGPHALASAGPGVASTNARL

SEQ ID NO: 257210 - protein, 86 aa, Glycine max
  Clone ID: PAT_MRT3847_74283C.1.pep
KKKNKKKKKNKKKKREKKKKGKGKKKGGPNIIFSKLKTTCIHTSLVLHRVGWVHLCVHAFYNRFTGKTLSFPTLYSFDHSPLFPPA

SEQ ID NO: 257211 - protein, 30 aa, Glycine max
  Clone ID: PAT_MRT3847_74284C.1.pep
HVVSALALDHTGSRVLSGSYDYMVRMYDFQ

SEQ ID NO: 257212 - protein, 86 aa, Glycine max
  Clone ID: PAT_MRT3847_74285C.1.pep
GRGGLTHRGKEKRVGNKGNISADSLFFLKNLSPVLYYFFVKKKKKKQRFKLQSSILSVNGQMGVVVCDVIVVQEASDGDKRRKIIK

SEQ ID NO: 257213 - protein, 100 aa, Glycine max
  Clone ID: PAT_MRT3847_74286C.1.pep
KMFARETLCVFTQMSERGPPLCSSRAFLLKGVVLTCLITHWPLVPHHLREALFVPTGAPFFSPGFSYFRFKPRLSSGCPLLGSPSPLPIHLYVNGFIVTR

SEQ ID NO: 257214 - protein, 71 aa, Glycine max
  Clone ID: PAT_MRT3847_74287C.1.pep
ATLAYTPAILRFRLYATQFGVAGLLAMQYYQQGPCGALRVEKCSLKYLRRYYDVRIYAVFYGALVRHIALF

SEQ ID NO: 257215 - protein, 163 aa, Glycine max
  unsure (1)..(163): unsure at all Xaa locations
  Clone ID: PAT_MRT3847_74288C.1.pep
MGKEKVHINIVVIGHVDSGKSTTTGHLIYKLGGIDKRVIERFEKDAAKMNNKSFKYTXVLNKLKAKHKRRITINITLXKFKTTKYYYTVINTPKHHNFIKNIITNTSQTNYTILIINSTTNNFKTSISKDEQTRKHTLLTVTLNMKQMIVYYNKIDTHYADYS

SEQ ID NO: 257216 - protein, 42 aa, Glycine max
  Clone ID: PAT_MRT3847_74289C.1.pep
SLHHFIMKTALFMLPIIAHSLRRSRPRLSRALAIHFIPPFPS

SEQ ID NO: 257217 - protein, 51 aa, Glycine max
  Clone ID: PAT_MRT3847_7428C.1.pep
CEAATKSHIKVNCKQDQRFYNLNEVHSFNMQMLPIIDRHHIKLKFIPPVLN

SEQ ID NO: 257218 - protein, 135 aa, Glycine max
  Clone ID: PAT_MRT3847_74290C.1.pep
TSNVSMANHIDKLALHSTFHSIISFDPLKSLGIVSCLTTVSSIIRSTRPPLTKRELEPAGVTIICLNAMPSLGLRRRKVIRGVGVGVGENLLDLFQQTLLVSSAGTLEVLVVDPSGGGFSAGQTGRLGGVVSGIL

SEQ ID NO: 257219 - protein, 63 aa, Glycine max
  unsure (1)..(63): unsure at all Xaa locations
  Clone ID: PAT_MRT3847_74291C.1.pep
XYLFFFFFFFFFFFFFFFFFEQNPTLGFIFKPVYPLPKTESSATYMKVKSQLKYVHKIMFIKG

SEQ ID NO: 257220 - protein, 58 aa, Glycine max
  Clone ID: PAT_MRT3847_74292C.1.pep
FSFCSFQDSSVIAQLGIPDMRLPLLYTLSWPERIYCSEVTWPRIDLSKYGSLTFYAPD

SEQ ID NO: 257221 - protein, 344 aa, Glycine max
  Clone ID: PAT_MRT3847_74293C.1.pep
VGFEFKLTSMDIAKKHVSFFSGTLKNGSNFDNSPVTFRGKQSNILKFNLFPRIYHNLHELKLIQPLFHEFLPGSASRDTNEARASLESSTDGPVNTTLFINFLSDYVVEIDKENILGPVSFLADLGGLYCISIGIFFYLLIQCEYRIKKLRNEDSIMRRIRNRRKAQEHWDKLRKYVMYTYGCPTIDNNYNSTGKETDCGGCMLHSIRGSGSSRKRRLKSRKDSISLYQKPSLPDIKSVSCKPLGSTNDSKLHSENMTKQQNAGSCKDSPQSQSQESSIIDDNFIPPLPSLEIKGGSEMDLSDIQKNLKNLYEYNVMLRNKLLAAQSLLNSSSTGHTSSVNKET

SEQ ID NO: 257222 - protein, 50 aa, Glycine max
  Clone ID: PAT_MRT3847_74294C.1.pep
IYLCVNCNVSALAFPVAATMVLYIYFLHCFHFFFYLIFIALKLIKQYNIV

SEQ ID NO: 257223 - protein, 345 aa, Glycine max
  Clone ID: PAT_MRT3847_74295C.1.pep
MERYEIIKDIGSGNFGVAKLVKEKWSGELYAIKFIERGFKIDEHVQREIINHRSLKHPNIIRFKELLLTPTHLAIVMEYASGGELFERICSAGRFSEDEARYFFQQLISGVSYCHSMEICHRDLKLENTLLDGSSAPRLKICDFGYSKSSVLHSQPKSTVGTPAYIAPEVLSRREYDGKVADVWSCGVTLYVMLVGAYPFEDPEDPRNFRKTLQRILSVHYSIPDYVRISKECRHLLSRIFVANPEKRITIPEIKMHPWFLKNLPLEFMDEGEGVLQNDDHVNEESSEITQSIEEILAIVQEARKPGEGPKVGEQFVGGSMDLDDIDADADIDDIETSGDFVCAL

SEQ ID NO: 257224 - protein, 73 aa, Glycine max
  unsure (1)..(73): unsure at all Xaa locations
  Clone ID: PAT_MRT3847_74296C.1.pep
SQVSYLVEISRNSVLKMNVLVFFGATIFVAFHYHAFNFFPFQMNTVYTSLTTNVKCSSCRLSTXAHNIFDFYT

SEQ ID NO: 257225 - protein, 56 aa, Glycine max
  Clone ID: PAT_MRT3847_74297C.1.pep
NAVIVRSFFSYEVAAGVNVNSIGNVGVEPVFGSKSDCLTHCRVAHLHRKWKKWRVR

SEQ ID NO: 257226 - protein, 182 aa, Glycine max
  Clone ID: PAT_MRT3847_74298C.1.pep
MAIKQISRTSNSVDFKRSRNTVLEYVHDILCNAEFTAEEFVTGQTSTLIMPNVFDLLENQIYGTENFGEDYSKLERKAIFDCASEFLELRCKQAFVGTCKAWPGWVMSVQRKSWMAEELYKELLGIRSMEETMVDELVTKDMSSGCGKWLDFDVEAFEKGLEVEGDIMSYLVNELVSDLLLV

SEQ ID NO: 257227 - protein, 45 aa, Glycine max
  unsure (1)..(45): unsure at all Xaa locations
  Clone ID: PAT_MRT3847_74299C.1.pep
TXPTPPHRPCKGRSQVTSYVDIPLNLIRQLNEVKQTQAQLDNRLN

SEQ ID NO: 257228 - protein, 43 aa, Glycine max
  Clone ID: PAT_MRT3847_7429C.1.pep
FFFFFFFFFFFFNETPLGMTLVKNLTQDNITNIQYIRFDYFQS

SEQ ID NO: 257229 - protein, 44 aa, Glycine max
  Clone ID: PAT_MRT3847_742C.1.pep
KTDVLPLMVANAGNSYRAAISSLNSPPVVAVELCREHLVWNSTL

SEQ ID NO: 257230 - protein, 36 aa, Glycine max
  Clone ID: PAT_MRT3847_74300C.1.pep
VHSENPFLYWFGGIENGSIGSYDVSLCSVRAEVIRE

SEQ ID NO: 257231 - protein, 69 aa, Glycine max
  Clone ID: PAT_MRT3847_74301C.1.pep
RGIHLQWKESDIQGGGWLNARRNDKSIFISSFKRQILSSLHSHLIVSLEDPLKRQVYVGPSCVSDCRFD

SEQ ID NO: 257232 - protein, 131 aa, Glycine max
  Clone ID: PAT_MRT3847_74302C.1.pep
MVAIARSFGAARVASRSLTTAARPQNSLVAARSAFRNNAARNVIQKRGIVAESTAAAMVAAAKIQGAGLATIGLAGAGVGIGTVFGGLIQGVARNPSLRGQLFQYAVLGFAFAEATGLFALMMSFLLLYVA

SEQ ID NO: 257233 - protein, 77 aa, Glycine max
  unsure (1)..(77): unsure at all Xaa locations
  Clone ID: PAT_MRT3847_74303C.1.pep
SNQGIVSEEXSNNPFCSTTXVFSTGQEAGLVFLSFHFYMNRSLKGFRDLHDVRLGGILPLFVPPSDGNLGPLPECHV

SEQ ID NO: 257234 - protein, 90 aa, Glycine max
  Clone ID: PAT_MRT3847_74304C.1.pep
LCEYNSNPWYYPVWQEKFVSRDTLKSEALLISVETWNNVRYSRVRWSNSVPLRIVGGCSSIISKLKKKGDGCPVYRIPAEGSVHHRSSIV

SEQ ID NO: 257235 - protein, 253 aa, Glycine max
  Clone ID: PAT_MRT3847_74305C.1.pep
HASASTAFLPSSLRTLFHISSQRSLPNSFHNSITLASSFNPLTHSKQHLNHRGCNSKLLAISYRYFIEEEEEDDENNNFDEAVALFNGGEYYKCHDYLEALWLNAEEPTRTLIHGILQCAVGFHHLFNQNHRGAMMQLGEGLCKLRKMEFSNGPFQKFEKDISAVLDFIYQTQIELAACSEDMCVAMDRSERSYQLLGEYASGQRVYDLELCSDASVYIVFCPQGSNNGGATEAPRVKLPTLKATTEHLVAYE

SEQ ID NO: 257236 - protein, 81 aa, Glycine max
  Clone ID: PAT_MRT3847_74306C.1.pep
ICQPSNQGIVNAHQVEDDHFVHVSTCTCVVISIGTSHVSPLVVEQSIPICYTSSHPVGVICVSHSTWDGLHIPGNVLLKCH

SEQ ID NO: 257237 - protein, 82 aa, Glycine max
  Clone ID: PAT_MRT3847_74307C.1.pep
YSQLRFVPLCFTTDMIATTVKHNCYQIVKSTYKLVYFNFLDMLFYIGILMSVFTGIWIAEAMLKILYDCYLPISFLLPEVCF

SEQ ID NO: 257238 - protein, 45 aa, Glycine max
  Clone ID: PAT_MRT3847_74308C.1.pep
SRDIPPSKVAYVAKELYDMGCFESSLGDTIGVGTPGNELARCLSF

SEQ ID NO: 257239 - protein, 70 aa, Glycine max
  Clone ID: PAT_MRT3847_74309C.1.pep
LHLFDIKIKYLRLSVKTVQCPSLCSTRCNHTLYHKICMFFCHKCYKTCLFILAVYYSHKALFPCFNNLEY

SEQ ID NO: 257240 - protein, 40 aa, Glycine max
  Clone ID: PAT_MRT3847_7430C.1.pep
RYLSLLKPSNRNYAMVKIFLPQRRAHGYQAPLPGNTLLTG

SEQ ID NO: 257241 - protein, 38 aa, Glycine max
  Clone ID: PAT_MRT3847_74310C.1.pep
VHASVFFLASSNRTKITGENRKMKTRNQKNNKKKDSNY

SEQ ID NO: 257242 - protein, 204 aa, Glycine max
  Clone ID: PAT_MRT3847_74311C.1.pep
MDGIENIGLNLSVAREVLLFDSISWDLEDNYLSAWKVMQCYLESTLQVGIIHEMVGDGAEAETYFKWGKAISCSLNLPFFLIVFSSSLGKLYVKKRLWDLAEKELRSAEQILKESNTLFCCSKCKLKLEVTLYEYLGDLCQSKFDTCDGVMSEETAKNWYTSALDKLNLSEWKNPLSCPEVGSDGTATDIKCPPGKTCTCFIMN

SEQ ID NO: 257243 - protein, 77 aa, Glycine max
  Clone ID: PAT_MRT3847_74312C.1.pep
TFLLASIGVFPLLPAVPIDSLGIISSDALAIDYYSPACSAVGATSKSLTHQTIVAILYSDGTFIGEISPFTLARCDD

SEQ ID NO: 257244 - protein, 91 aa, Glycine max
  unsure (1)..(91): unsure at all Xaa locations
  Clone ID: PAT_MRT3847_74313C.1.pep
SGGCAIEGRAHRLHLSEPDMQPDLDTTRPRCYRLTTPCFFTDTXKYSHELPDXITTGTPIHGSEPNTVHRRHDYSEMTRVYRTIHDYATYD

SEQ ID NO: 257245 - protein, 136 aa, Glycine max
  unsure (1)..(136): unsure at all Xaa locations
  Clone ID: PAT_MRT3847_74314C.1.pep
MAPIAVGNVIPDGILAYLDEENKPQTVSIHSLATGKKVIIFGVPGAFTPTCSXNDPFVMNSWAKTFPENKHVKFLADGAAKYTNALGLELDLTDKGLGVRSKRFALLVEDLKVKVANVESGGEFTISSAEEIIKAL

SEQ ID NO: 257246 - protein, 206 aa, Glycine max
  unsure (1)..(206): unsure at all Xaa locations
  Clone ID: PAT_MRT3847_74315C.1.pep
MEPASSSSSSEHHRSYWRWSKCDFFPEKSFENGKSYRAALAATCPRLKDRLLNRSSDAHELLVLPRTSEHRMNRCLTWWDLTWLAFGSVVGSGIFVVTGQEARLHAGPAIVLSYAASGFSALLSALCYTEFAVDIPVAGGSFSFLRIELGDFLAFVAAGNILLEAXVGAAGLGRSWSSYFASMVKSDXDFFRIHVPSFNPGFDMLG

SEQ ID NO: 257247 - protein, 33 aa, Glycine max
  unsure (1)..(33): unsure at all Xaa locations
  Clone ID: PAT_MRT3847_74316C.1.pep
LGTXASHNAYIDDKATGSSAAKFEYVYTADVNA

SEQ ID NO: 257248 - protein, 122 aa, Glycine max
  Clone ID: PAT_MRT3847_74317C.1.pep
MAPIAVGDVIPDGILAYLDEENKPQTVSIHSLAAGKKVIIFGVPGAFTPTCSLKHVPGFIERAEELKGKGVDEIICISVNDPFVMNSWAKTFPENKHVKFLANVESGGEFTISSAEEIIKAL

SEQ ID NO: 257249 - protein, 162 aa, Glycine max
  Clone ID: PAT_MRT3847_74318C.1.pep
MAPIAVGDVIPDGILAYLDEENKPQTVSIHSLAAGKKVIIFGVPGAFTPTCSLKHVPGFIERAEELKGKGVDEIICISVNDPFVMNSWAKTFPENKHVKFLADGAAKYTNALGLELDLTDKGLGVRSKRFALLVEDLKVKVANVESGGEFTISSAEEIIKAL

SEQ ID NO: 257250 - protein, 162 aa, Glycine max
  Clone ID: PAT_MRT3847_74319C.1.pep
MAPIAVGNVIPDGILAYLDEENKPQTVSIHSLATGKKVIIFGVPGAFTPTCSLKHVPGFIERAEELKGKGVDEIICISVNDPFVMNSWAKTFPENKHVKFLADGAAKYTNALGLELDLTDKGLGVRSKRFALLVEDLKVKVANVESGGEFTISSAEEIIKAL

SEQ ID NO: 257251 - protein, 77 aa, Glycine max
  Clone ID: PAT_MRT3847_7431C.1.pep
TLQALTRQHSGDLPTDARNTFMTRLFQGNRSLSLGNCHMTTRLLRVAGFQSSYCIMLWARNGDAAQCEVANDGCAWA

SEQ ID NO: 257252 - protein, 157 aa, Glycine max
  Clone ID: PAT_MRT3847_74320C.1.pep
FAYCKPADKSTIALLQFHVLDTYVSSSNHDSLVAFVNTKHGANPTRLQFNVTAYGSNVNISTGVVNATVTGVVYSDKVLAVYHVDKVLLPLDFLRPKPPAPAPSPAMAPKADNDNSSADARLGTSKDSADASSLISTRGMTLLSFGVALVALVFIAS

SEQ ID NO: 257253 - protein, 94 aa, Glycine max
  Clone ID: PAT_MRT3847_74321C.1.pep
IFHSSNSQFSLSYFWCSISLLMRPMKINVKNKSSHSLFYIGYGWFKYVNFSNFFFILILNFSRCHNDKSLPSQSFSFSLSLLLYLFDEYGSSTL

SEQ ID NO: 257254 - protein, 63 aa, Glycine max
  unsure (1)..(63): unsure at all Xaa locations
  Clone ID: PAT_MRT3847_74322C.1.pep
YIYTHXDSCLLRNMWHLLGTSVPILNRMVTRLPMRDYSYLFQPVVGXNXXDVDDLISMHNVLC

SEQ ID NO: 257255 - protein, 85 aa, Glycine max
  Clone ID: PAT_MRT3847_74323C.1.pep
LAPDQWKDPKLGFPFFLRVFPNNPSFFTPKEKLGAWVTRGLGWTWTRSNPGSYLTCVEKKIIIFGGGKPGRGTIISLLWGPITII

SEQ ID NO: 257256 - protein, 71 aa, Glycine max
  Clone ID: PAT_MRT3847_74324C.1.pep
WEHPPVSSTLGSPGACFPFGHFVNSGSSVFESASCCIWSLGVIVNRQGFITFRWCAIERISVYINNIIFIS

SEQ ID NO: 257257 - protein, 38 aa, Glycine max
  Clone ID: PAT_MRT3847_74325C.1.pep
TAFILNVVESQVHLRRIPTTTIIKKLTYSKMILCYEPS

SEQ ID NO: 257258 - protein, 77 aa, Glycine max
  Clone ID: PAT_MRT3847_74326C.1.pep
AIWTMSSKKPAPREGNLRVEAFGLSRRGKTVKRWVPLFEWWGEVRGRNGTEHRMLQQHYGLVSILFCTPLLSSSRSR

SEQ ID NO: 257259 - protein, 43 aa, Glycine max
  Clone ID: PAT_MRT3847_74327C.1.pep
SLAQTIKENSRQGNYCHRNLLDQSQLNALSTLCRHIILLMLFK

SEQ ID NO: 257260 - protein, 207 aa, Glycine max
  Clone ID: PAT_MRT3847_74328C.1.pep
MALGRRSGLFALEKHFAFYGAYHSNKINIAIHVLFVWPIFFSALLILYFVPLPPLFNLQNLEFSMWENYVILVWNVGFLVALLYSVFYVSLDLKAGSLAALLCALCWIGSSFVASQLGLSLAWKVVLVVQIVCWTGQFIGHGVFEKRAPALLDNLIQAFVMGPFFVLLEVLQTLFGYEPYPGFNSTVKAKVEANINEWQESKQKLIS

SEQ ID NO: 257261 - protein, 53 aa, Glycine max
  unsure (1)..(53): unsure at all Xaa locations
  Clone ID: PAT_MRT3847_74329C.1.pep
LCATFVNIHIRHAGIHVGNSCWEHYXLHAGIHLEGIIPSDATFGVAHYTFKIF

SEQ ID NO: 257262 - protein, 80 aa, Glycine max
  Clone ID: PAT_MRT3847_7432C.1.pep
LRGDARWLYLYRAQMLMLRARATPQRCCCGTLHTSDKTSWHYQQQYIGLLQSLQSLEGNAGPDPVTKITTSEGDQTIFQA

SEQ ID NO: 257263 - protein, 113 aa, Glycine max
  Clone ID: PAT_MRT3847_74330C.1.pep
RPVIAVPATAALVCRAYSRKSLTPIGLLAAFVTAVVHALHPWRVFFALLAVFFLAGSTATKVKHDIKVKLTQSATGASGGEGTRNHVQVIANSGVASVLILLHLWQLERWEIW

SEQ ID NO: 257264 - protein, 55 aa, Glycine max
  Clone ID: PAT_MRT3847_74331C.1.pep
VVGSPQGRCLSLPLCLILESSPVCLALTPIAGKIKSLMYGTDAISECSDKESLAD

SEQ ID NO: 257265 - protein, 56 aa, Glycine max
  unsure (1)..(56): unsure at all Xaa locations
  Clone ID: PAT_MRT3847_74332C.1.pep
EFLRWVIILLTGVASASFVALNLRSXIEGNELSVAIIAAFFLQMALAIFIKVWFFP

SEQ ID NO: 257266 - protein, 110 aa, Glycine max
  Clone ID: PAT_MRT3847_74333C.1.pep
FLFFFFFFFFFFFFFFFFFFFSPPPGKKNFFLPPQKKERGTIFLWKTLQKKGGGGGAFLGGNQKPLWGGGEIREFFGATRLKTGPGVWEPRPPIKETPYWENTRGGTLLN

SEQ ID NO: 257267 - protein, 64 aa, Glycine max
  Clone ID: PAT_MRT3847_74334C.1.pep
SPQGNFTFHAKVFLFKPRSTRHHYVCLLLKTPHPNTNHGETGTSAIRLIDRPHSLIGDVLLSKK

SEQ ID NO: 257268 - protein, 291 aa, Glycine max
  Clone ID: PAT_MRT3847_74335C.1.pep
MYRTAAKRLVSGARYYYTGKVGLRFRPSQILIPSSRFSTSETQPLPIPVATETETPNSSDSSPSSSSSSTATKPRAKYEDQQTRVLQASLSYVLKLGWTEAALVAGARDVGLSPSIVGSLPRKEATLVEYFMDGCLQRLVDKIDSDESLKNLTPSDCISKLIRFRLEMQAPYISTWPQALSIQAQPVNVPTSFKQRAVLVDEIWHAAGDNASDIDWYAKRTVLGGIYSTTEIYMLTDSSPDFRDTWAFLDARVKDAFDIKKTIQEAQYLAEAVSTGLGNSFQGFVGKVFQR

SEQ ID NO: 257269 - protein, 142 aa, Glycine max
  Clone ID: PAT_MRT3847_74336C.1.pep
MRPPRKRVDFARDDKVEICGNEDGFLGSYYQATVVSRLDNGLYVVRYDTLLEDDASQQPLTETLFPKELRPQPPRVSKTDFALYQCVDAFDNDGWWLGQVTGKKDAEHYYVYFSTTNEEIAYHVSAIRVHHEWSHGEWVLSN

SEQ ID NO: 257270 - protein, 82 aa, Glycine max
  unsure (1)..(82): unsure at all Xaa locations
  Clone ID: PAT_MRT3847_74337C.1.pep
QALSNGLYKSVWHRAVVNVEKPGLSVAXFLCPNDEALISPAKPLTEGGSEAIYRGFTYAEYYKKFWSRNLDQEHCLEFFKNK

SEQ ID NO: 257271 - protein, 85 aa, Glycine max
  Clone ID: PAT_MRT3847_74338C.1.pep
ENGELLGRADQGHTITAISSERLLKPILSADEVSVCVHGTYRKNLDSILKSCLKRMTRLHVHFSCGLPTSGDVISGTLLNIIILM

SEQ ID NO: 257272 - protein, 102 aa, Glycine max
  Clone ID: PAT_MRT3847_74339C.1.pep
MERVTKMVSERPVVIFSKSSCCMSHTIKTLLCDFGVNPAVHELDEIPRGRDIEQALSRLGCSPSVPAVFISGELVGGANEVMSLHLNRSLIPMLKKAGALWV

SEQ ID NO: 257273 - protein, 45 aa, Glycine max
  Clone ID: PAT_MRT3847_7433C.1.pep
WSQPFPLKHGSVHVEKIKKRIYILSVYLLQIYYAYTKILDYHKAW

SEQ ID NO: 257274 - protein, 76 aa, Glycine max
  Clone ID: PAT_MRT3847_74340C.1.pep
EIAAAAIGLLCLWSVADSVPNTNITVILCNVGAYTSGDPFAVSLSYVVRELETETPTRKNYDYYNISPYPNAFAYG

SEQ ID NO: 257275 - protein, 81 aa, Glycine max
  Clone ID: PAT_MRT3847_74341C.1.pep
EIGVRRSLHYPLDSFYAIWTLAWTYVTGDPAVIVSNIFKNVIGVAVLVNITSFSFFCFFFPAFEVMMFRKQIPVSDSSIFG

SEQ ID NO: 257276 - protein, 40 aa, Glycine max
  Clone ID: PAT_MRT3847_74342C.1.pep
RSRSCLISLIETNKRAGESFYSWVIMQRIPPCKKTWQKPE

SEQ ID NO: 257277 - protein, 212 aa, Glycine max
  unsure (1)..(212): unsure at all Xaa locations
  Clone ID: PAT_MRT3847_74343C.1.pep
MLRLWKWYQNCLAVHPVKTQVISSGLIWGAGDIAAQAVTHYTAKKRVTFDADDTKEFKINWRRVSTTSLFGLGFVGPVGHFWYEGLDRFIRLKLMLKPNSFRFVATKVAVDGFIFGPLDLLVFFTYMGFSAGKSVPQVKEDVKRDFLPAFVLEGGIWPIVQVANFRFIPVRYQLLYVNFFCLLDSXCFLSWVEQQQDAPWKQWLKSFLPMKL

SEQ ID NO: 257278 - protein, 40 aa, Glycine max
  unsure (1)..(40): unsure at all Xaa locations
  Clone ID: PAT_MRT3847_74344C.1.pep
XGPSTKKSPSLVKPFTFTLNLQKQNFVFSYRQFCFPHSVY

SEQ ID NO: 257279 - protein, 209 aa, Glycine max
  Clone ID: PAT_MRT3847_74345C.1.pep
MSPSNGLQNGGGGGGNGVSYIEHQVSKLDTLAGVAIKYGVEVADIKRMNGLATDLQMFALKTLKIPLPGRHPPSPAPGPHEEPTKSGDASIERKPLRIGQSFARKPLQSLGLKPPQPNISPAMSILQKFYGLKSSNSRDTLNGTEMAVYSSSTSDHSNGEWLPKALPISDLPSASNDYPRSTNLVYDLLTGDDEYVPLAEIGDAPHKKL

SEQ ID NO: 257280 - protein, 53 aa, Glycine max
  Clone ID: PAT_MRT3847_74346C.1.pep
MSSQTVVLKVGMSCQGCAGAVNRVLGKMEGTFIPANYLYYQIQNENDLVIVAR

SEQ ID NO: 257281 - protein, 190 aa, Glycine max
  unsure (1)..(190): unsure at all Xaa locations
  Clone ID: PAT_MRT3847_74347C.1.pep
ILRVQAVCSEDEWLFCEIYDGFNGRDAADFLXTLYDFIISYFNMLYWDLEPDSIKASNIESMGGSFQYNFDDSLNLQEHQSLSTFKGNDSSLDCFTDNIPHSNSKASPKSFSQTTVLDGLQHVLSQVENDFLYMVEXEMEEHPDLVSIGSCVLLVLLHGNDLYTLNLGDSRAVVATCITDNSLNANERLK

SEQ ID NO: 257282 - protein, 56 aa, Glycine max
  Clone ID: PAT_MRT3847_74348C.1.pep
RFSFSYVIIEDLGTNFCPMFLCKPSDSVLFTPHKNIFGGCYIWVLFRTQNQISWLI

SEQ ID NO: 257283 - protein, 183 aa, Glycine max
  unsure (1)..(183): unsure at all Xaa locations
  Clone ID: PAT_MRT3847_74349C.1.pep
MAEERFTGVVQWFNNGKGFGFIKPDDGGEDLFVHQSSIRSDGYRTLLEGDRVEFAIATGDNDKTKAVDVTGVDGAPLQPRASAANNRAGGSGFGARRNGGSGAACYQCGDFGHLARDCNRSSNTGGGGGGSGGGCFNCGGFGHLARDCVRGGGGNVGVGGGCGSGSCFRCGGFXHMARDCATG

SEQ ID NO: 257284 - protein, 73 aa, Glycine max
  Clone ID: PAT_MRT3847_7434C.1.pep
RYKYKNPSAVFEFRTLQTHTRQRSIRPQTQLKNFEKDRRKGQGHMSHFTIKSRNQANKCHDPSFHFPAVTKSS

SEQ ID NO: 257285 - protein, 79 aa, Glycine max
  unsure (1)..(79): unsure at all Xaa locations
  Clone ID: PAT_MRT3847_74350C.1.pep
CGKNRFTSSKGLHYLQPHTNFSRHAINVHLGTGPIPESFLSPLLEIITAWMLRMPYRIAXEGHLIXXEVGTDXXHSLKV

SEQ ID NO: 257286 - protein, 65 aa, Glycine max
  unsure (1)..(65): unsure at all Xaa locations
  Clone ID: PAT_MRT3847_74351C.1.pep
MKMNVLVVIVAIILVAWQCHAXDMFTLRINTGNCARIPDVNCTFWXINVEAHIICXYENIPQHCL

SEQ ID NO: 257287 - protein, 103 aa, Glycine max
  Clone ID: PAT_MRT3847_74352C.1.pep
LVFFFFFFFFFFFFFFFFFFFFFFFFFFFFPGGGGHHKTQKKGAPGFSSPPFMGGTPISPLAKSPTRDFKGKALRNLNHGTGKTGKQGPISGHWGKKKNCISF

SEQ ID NO: 257288 - protein, 76 aa, Glycine max
  Clone ID: PAT_MRT3847_74353C.1.pep
LRIEQLKRTTSFFSQLILRGNANILKMQIINATQKDFQSRNFKLITFLNFTFLCKKKTKKKNQHTSISNYKLKSLH

SEQ ID NO: 257289 - protein, 86 aa, Glycine max
  unsure (1)..(86): unsure at all Xaa locations
  Clone ID: PAT_MRT3847_74354C.1.pep
GFLSRTXTKMREILHIPGRXNAGTRIGAKXLGGGVSSEQRGFGXQTGRSPRGXKXSSQTRXAXQTCLLXNGSEFVGKXSWPMGGXS

SEQ ID NO: 257290 - protein, 49 aa, Glycine max
  Clone ID: PAT_MRT3847_74355C.1.pep
SNCGIPYNYKYNTSLKYWTTMTSIELDILCGMDDIRYSCVSQSCLYIHR

SEQ ID NO: 257291 - protein, 69 aa, Glycine max
  Clone ID: PAT_MRT3847_74356C.1.pep
AESVAHQGCWQSMVSHDGVGLASCRSRRFFISGWVFRCDVHHLFFRIRILFVLLIRAAYPDRWLVCFPA

SEQ ID NO: 257292 - protein, 45 aa, Glycine max
  Clone ID: PAT_MRT3847_74357C.1.pep
KYVNLLSLGNLYTEFLHPTKAKKKSMSSSICHLGITSETVASLTE

SEQ ID NO: 257293 - protein, 68 aa, Glycine max
  unsure (1)..(68): unsure at all Xaa locations
  Clone ID: PAT_MRT3847_74358C.1.pep
GGAFSGTTMNRAVTLGPPDVSWTCANQWIYWAAPPIVDENFGLTXELVIINPTHEQLPSTDNNSATMG

SEQ ID NO: 257294 - protein, 160 aa, Glycine max
  Clone ID: PAT_MRT3847_74359C.1.pep
LGFIVDRPLKFKQLSLRKGLNLKRRHRDFLLKFEEMPLVCPYRNPAEALAKESLEAEKRSCALVREVLAMTVEKRTLIDHLTHFRKEFGLPNKLRGMIIRHPELFYVSLKGERDSVFLVEGFGEKGDLLEKDEDGVLFIQDKWMDLARESQRMTREKRKG

SEQ ID NO: 257295 - protein, 97 aa, Glycine max
  unsure (1)..(97): unsure at all Xaa locations
  Clone ID: PAT_MRT3847_7435C.1.pep
KCRGKNKKNXTERAEKRGEPKRKKWGKTIGKGGLKGRFRGCPSGQKGREKEGNKIWERKGFFKKQTGKRRDGQKEIIRRVKKRFYSVGRGGKKGLVK

SEQ ID NO: 257296 - protein, 54 aa, Glycine max
  Clone ID: PAT_MRT3847_74360C.1.pep
APARFFSLWTKKSNAICSRWEQSSNFLLFFNKTVFRVSWPIVQSSTNLGHSADI

SEQ ID NO: 257297 - protein, 225 aa, Glycine max
  Clone ID: PAT_MRT3847_74361C.1.pep
MEWKKCYLDVILVPLGFLISIGYHFWLWYTVRTHPHTTIIGINASGRRNWVAAMMKDNDKKNILAVQSLRNTIMGATLMATTSILLCSGLAAIVSSTYSVKKPLEDTVYGGHGEFMISLKYVTLLSIFLFSFFCHSLSIRFINRVNILINTPQDPIMSLVTPEYVNEILEKGFLLNTVGNRLFYAALPLLLWIFGPVLVFLCSLTMVPVLYNLDFVVTGANKGKM

SEQ ID NO: 257298 - protein, 96 aa, Glycine max
  unsure (1)..(96): unsure at all Xaa locations
  Clone ID: PAT_MRT3847_74362C.1.pep
KTNDRDEWPIMGYAPSLPETLRNDIMLRYLGFTTLFWTRRALNKQAEAXSHLXNACFHTYKKLVITDSQDTFTINAGIYTSTRRDETCYRMDPTCV

SEQ ID NO: 257299 - protein, 165 aa, Glycine max
  Clone ID: PAT_MRT3847_74363C.1.pep
TSARGEYGSSSSRFLRDQLLDPSYTCCSCELPSEAHVHCYTHQQGSLTISVKKSEFALPGEREGKIWMWHRCLKCPRIHGFPRATRRVVMSDAAWGLSFGKFLELSFSNHAAASRVASCGHSLHRDCLRFYGFGKMVACFRYASIHLHFCYLPPPKLEFNYDSQD

SEQ ID NO: 257300 - protein, 49 aa, Glycine max
  Clone ID: PAT_MRT3847_74364C.1.pep
NINLFLILSSSFLGVDNCLFSLAWCLVMDIHNQRLFSSYYYSLACYIRD

SEQ ID NO: 257301 - protein, 34 aa, Glycine max
  Clone ID: PAT_MRT3847_74365C.1.pep
IGFSILAGRNIKLRMKILRNSQKKSVGLTGVKSI

SEQ ID NO: 257302 - protein, 367 aa, Glycine max
  Clone ID: PAT_MRT3847_74366C.1.pep
MQFKTCTNDDYEKGRISAMHLMKDKFCSIYDQSDTRSVFDDLNLPTPQARVNQEHQKNYIEQSRFKSRCIHFEELPYYSGKNVSDLLFPQEQFSQHYFSVCGNGVDNTVLQDVTDTGGDFPLDESYGQDPDNDIGGYPNTSESHLPCTSTEDTKFVNGLNSLDTPCSDINVEKIESVKNDTSSNNFCQNDDHLETQYGSAVWDIFRRQDVPKLTEYLKKHHREFRHINNLPVNSVIHPIHDQILYLNEKHKKQLKQEFGVEPWTFEQHLGDAVFVPAGCPHQVRNRKSCIKVALDFVSPENVQECIRLTEEFRLLPKGHRSKEDKLEIKKMALYAADVAITEATKLMRGNDMSDEAKEVPQQHIFTK

SEQ ID NO: 257303 - protein, 43 aa, Glycine max
  Clone ID: PAT_MRT3847_74367C.1.pep
FFFFFFFFFFFFFFFFFFFFFFESPKFYWPVTKTLPPFFQTSP

SEQ ID NO: 257304 - protein, 112 aa, Glycine max
  unsure (1)..(112): unsure at all Xaa locations
  Clone ID: PAT_MRT3847_74368C.1.pep
WHNRKQMTRTSYTVDQSDGPXDGSTEGTAKCDENECIGYTSWTLQMPXGGERVRFIITIXERWHNGXPDTSRVHVIVPDYRGSSYLNPKGRCACTRNDNARALPAGVRVYAG

SEQ ID NO: 257305 - protein, 57 aa, Glycine max
  Clone ID: PAT_MRT3847_74369C.1.pep
VHAGIRGIQVQIAGRIAAEEIARVEWHQVGRVPLHIIRGKIDYYCYTVRTIDGVLWI

SEQ ID NO: 257306 - protein, 84 aa, Glycine max
  Clone ID: PAT_MRT3847_7436C.1.pep
ALVSPRLYKPPLRGKGGALRGRAGSKFRGSGANRGGAPPFLVWFFFFCFFFFFFFFYIFFFFFYIFFFFFFFFFFLRKQQMDNN

SEQ ID NO: 257307 - protein, 99 aa, Glycine max
  Clone ID: PAT_MRT3847_74370C.1.pep
MTLSKLIVASLLASLLLLHLVDADQSAHVQTQGSLLQKIDCNGACAARCRLSSRPRLCKRACGTCCRRCNCVPPGTAGNQEVCPCYASLTTHGGKRKCP

SEQ ID NO: 257308 - protein, 204 aa, Glycine max
  unsure (1)..(204): unsure at all Xaa locations
  Clone ID: PAT_MRT3847_74371C.1.pep
MEMGTVAWISLVIIVTVFCPSSLALTLDGMTLLEIKSTLNDTKNVLSNWQQFDESHCTWTILSCQDTSXQKPLHKSLPHAACSHTHHLXIDILSSLCRPTRPQNSLHGTIPNELTNCTELRALYLRGNYFQGGIPSNIGNLSYLNILDLSSNSLKGAIPSSIGRLSHLQIMNLSTNFFSGEIPDIGVLSTFDKNSYVLFPDKAS

SEQ ID NO: 257309 - protein, 368 aa, Glycine max
  Clone ID: PAT_MRT3847_74372C.1.pep
MATTNPFDLLGDDAEDPSQLIAAEQLKAAAAAATAPPKKDQAKPGARSGAPAQLPSKPLPPSQAVREAKNETSYGGRGGGRGGGRGFGRGRGGGGGFGRDFSNDDNSSAPANQGSFEGDSGNPSERRGYGGPRGPYRGGGSGRGRRGGFSNGETGDEGRPRRAFERHSGTGRGNEFKREGSGRGNWGTQNDDIAEVTEEVVNETEKVLADEKPVGEEDAAEGNKDSPANENEEKEPEDKEMTLEEYEKVLEEKRKALQAQKTEARKVDIKEFASMQPLSNKKENDEIFIKLGSDKDKRKDALEKEEKSKKSVNITEFLKPAEGERYYPGGRGRGRGRGSRGGYSGNAYSNAPAPSIEDPGHFPSLGGK

SEQ ID NO: 257310 - protein, 36 aa, Glycine max
  Clone ID: PAT_MRT3847_74373C.1.pep
KMSTLSVALRVLSSPASFNVPLQLACHSPFRLSICS

SEQ ID NO: 257311 - protein, 142 aa, Glycine max
  Clone ID: PAT_MRT3847_74374C.1.pep
MSAEIDSTYAPEPHKMSGATTSGQKLSIFSAKSGFVIPKNKLSGSLVPIFRGAKQHGVTAAAINEESSKQIERRSKWGPDLTQDAAVRRGKVLALQIRVDQITKQLESEKLEVGDTQNLNPDQSISGPQINSKAEMLELENF

SEQ ID NO: 257312 - protein, 117 aa, Glycine max
  unsure (1)..(117): unsure at all Xaa locations
  Clone ID: PAT_MRT3847_74375C.1.pep
QGSNAKISGYNNSRKFNNKNIXRVGETLPYLDDAPRNLEGRMREFRFLVXQPSKSXKNKFWKPTNVRYRSKKYEVQIKLRIENGGHLFKLDVRRAQEHLKKLGRRMEILSPFLMTSL

SEQ ID NO: 257313 - protein, 785 aa, Glycine max
  unsure (1)..(785): unsure at all Xaa locations
  Clone ID: PAT_MRT3847_74376C.1.pep
MEPLSLPPLPVMDDAEDPSSIWDFSYLLDFDLDDQDIIINNNNSLPLPFNDHPAPNEIPQNDRVRKRDPRLTCSNFLAGRVPCACPELDAILEDEGLPGKKRARTARASASARCQVPACEVDISELKGYHRRHRVCLRCANAATVMLNGEAKRYCQQCGKFHVLSDFDEGKRSCRMKLERHNTRGGRKPTTYSGGATHRQLLKRDIINSEEELPERYGRRCLGRGFLTSRPAIFVIVSDAVCLGVCVADLHPGRVSELAVSVRRCLFNYXYFLHLSSSWYIFDVTLNKSYCEDIIRLREDDRRGRISFKLYDWNPAEFPRRLRHQIFQWLASMPVELEGYIRPGCTILTIFIAMPNIMWINLLKDPLEYVHDIVAPGKMLSGRGTALVHLNDMIFRVMKDGTSVTNVKVNMHAPKLHYVHPTYFEAGKPMEFVACGSNLLQPKFRLLVSFSGKYLKCEYCVPSPHSWTEDNISCAFDNQLYKIYVPHTEESLFGPAFIEVENESGLSNFIPVLIGDKKICTEMKTLQQKLDVSLLSKQFRSASGGSICSSCETFALSHTSSSDLLVDIAWLLKDTTSENFDRVMTASQIQRYCHLLDFLICNDSTIILGKILPNLIILTESMKSNVVINRTSDVDIMQLLNHIHNARNAVYQKHPKSESIIVHSEMKGFILAQGCSQDNKLSVAINSQGIQSRADEKWGVLKVKSPTSNEKMERIPLLKRDIIMSMEELPERYGRRCLGRGFLTFRPAIFVLVSVAVCLGVCVAVLHPGRVSELAVSVRRCLFNY

SEQ ID NO: 257314 - protein, 153 aa, Glycine max
  Clone ID: PAT_MRT3847_74377C.1.pep
GVRSNLGRSIAVESKVKMMSSKPGTARDLKASRHTKDSASFDRKFLSIIVRPVICSTMVSSVENTSKGDQKLTPHGETAKPSTVNNNREFKVNQDGKLYSSSKSINNTSSKSPEPQVSSDRTSTSVDETQQDRLPRSQDTANQVDKTKDSSSD

SEQ ID NO: 257315 - protein, 66 aa, Glycine max
  Clone ID: PAT_MRT3847_74378C.1.pep
ILTVLPVIFCQNDHQIDKELHRSSPSSFGIVCSMMYICYKEFTKITHFRWLGRLPIRCYRMVNLIQ

SEQ ID NO: 257316 - protein, 536 aa, Glycine max
  Clone ID: PAT_MRT3847_74379C.1.pep
MPPQETQQPLLSEEQEETAYDSSEKVVVVGIDEHDGDLEAPPFSWRKLWLFTGPGFLMSIAFLDPGNLEGDLQSGAIAGYSLLWLLMWATAMGLLIQLLSARLGVATGRHLAELCREEYPTWARIVLWLMTEIALIGADIQEVIGSAIAIRILSNGVVPLWAGVVITAFDCFIFLFLENYGVRKLEAFFAVLIGVMALSFAWMFGEAKPNGVDVLVGILVPKLSSRTIQQAVGVVGCIIMPHNVYLHSALVQSRQVDPSKKGRVQEALNYYSIESTIALIVSFVINIFVTTVFAKGFYGTEIANSIGLVNAGQYLQEKYGGGLFPILYIWGIGLLAAGQSSTITGTYAGQFIMGGFLNLRLKKWIRALITRSFAIIPTIIVALIFDTSEESLDVLNEWLNVLQSVQIPFALIPLLCLVSKEQIMGSFRIGPVLKIISWLVAALVIVINGYLLLEFFSSEVNGAVFATVVCVLTAAYVAFVLYLISRAITYTPWQSLTRSKTGYHRELSSQIPIPENHGVGNALQLKAFTSTFPRFF

SEQ ID NO: 257317 - protein, 94 aa, Glycine max
  Clone ID: PAT_MRT3847_7437C.1.pep
KRAKMEQFYFAEEIKNIVSCEGPLRMERHERVDQWRRRMSRAGFQAAPIKMVAQSKQWLLKNKVCEGYTVVEEKGCLVFGWKSRPIVAVSCWKC

SEQ ID NO: 257318 - protein, 59 aa, Glycine max
  Clone ID: PAT_MRT3847_74380C.1.pep
KRLNPFFAPAGYRPFLKSGGSSPVAGIRGILGFAASPALEGVDSNKQLGPFFLTSGVLP

SEQ ID NO: 257319 - protein, 71 aa, Glycine max
  Clone ID: PAT_MRT3847_74381C.1.pep
FKRTSNKKTLLRFLPPSPLTHFNSPPYSLTKTIHTVGFIPQHIQSLFFQLKHLKKQTPTTLSMITTFSTPY

SEQ ID NO: 257320 - protein, 103 aa, Glycine max
  Clone ID: PAT_MRT3847_74382C.1.pep
MVYITSWDEFVERSVQLFRADPDSTRYVMKYRHCDGKLVLKVTDNRQCLKYKTDQAQEAKKMEKLNNIFFTLMARGPEVDPSEVTGKEPMDTQTTKRGRGRKQ

SEQ ID NO: 257321 - protein, 119 aa, Glycine max
  Clone ID: PAT_MRT3847_74383C.1.pep
KPNPNPVWRAQKKGGRGAFPSLKKKEGPPRLEIKKQGAPPRRGGWEPVPGRGGMENGRAHGLALWQGKGPSISRPGRTPILSSRGGDGKAFFLCWGNQNQWPGRYITTTGKGKPWPNPN

SEQ ID NO: 257322 - protein, 269 aa, Glycine max
  Clone ID: PAT_MRT3847_74384C.1.pep
MEAVKMVGLRRLIRQRSSLRDSLAEKVHSPVPSQHLARLTPKRFFDLHQLGNKEAIEKERARLADEMTRGYFADMAEFKKHAGKIAVANKLIIPAMVATKFPDFEVSFTDGKTMKLPIRVSDRAVDSDKSSVPKASLVCLSFRASSQEMINSWSVPFTEAFRKSNDVHLYQVSFIDSWLLCRAPIKRLLLWTMKKPSHHESKDTLQQQIVYSFGDHYYFRKELRILNLLTGYIFLLDNFGRVRWQGFGSATQDELSSLLSCTSLLLDQK

SEQ ID NO: 257323 - protein, 36 aa, Glycine max
  Clone ID: PAT_MRT3847_74385C.1.pep
QILKCLILLGLYKTHVHVFLGIIAAFYIEETYKSSK

SEQ ID NO: 257324 - protein, 112 aa, Glycine max
  unsure (1)..(112): unsure at all Xaa locations
  Clone ID: PAT_MRT3847_74386C.1.pep
MINSWSVPFTEAFRKSNDVHLYQVXFIDSWLXCRAPIKRLLLWTMKKPSHHESKDTLQQQIVYSFGDHYYFRKELRILNLLTGYIFLLDNFGRVRWQGFGSATQDELSSLLS

SEQ ID NO: 257325 - protein, 128 aa, Glycine max
  unsure (1)..(128): unsure at all Xaa locations
  Clone ID: PAT_MRT3847_74387C.1.pep
IKKKRTLFKSLTQIEGWKKWKKIKKGKGGEEKKKIQFLKGEHKKKLTTNMRRPHRLIGTVANGCPKKKTSPTPFANDKLETQRAEPLGKKKNIGRKGWXTKNKPFTCLLVGKKQTFLKLVLKGLKKKE

SEQ ID NO: 257326 - protein, 90 aa, Glycine max
  Clone ID: PAT_MRT3847_74388C.1.pep
KNKIKCKRRLRYTFVVISIVLSLQFFIKKILIGFYINIPEIFVNKIFKFKKFIKKIKKMFTKKEVSNYILFFLFHPSGPNSHLRQFLHYK

SEQ ID NO: 257327 - protein, 76 aa, Glycine max
  Clone ID: PAT_MRT3847_74389C.1.pep
SKYRLAYSCMSCLLLLSPIPLTKNKMKSYVIPHAAQNVLLPWYICVYYIMPSSPFPLDISGAALSLYYYTSFLILR

SEQ ID NO: 257328 - protein, 151 aa, Glycine max
  Clone ID: PAT_MRT3847_7438C.1.pep
VEDDFLMKVLEGMAFAGFVSERGVPYRPTDLFDELVAHEVARMRADENHPQRVLRHVQELAEQLYKNENPYPAVAMHKVQRPGESSHLRRVPRPFPRLDEGTVQWIVDQAAAKMQGAPPAVKAERRTTVPSGPPMTAILERCSGLHVNSAR

SEQ ID NO: 257329 - protein, 50 aa, Glycine max
  Clone ID: PAT_MRT3847_74390C.1.pep
LKHSHALIEFIYVNTCQIHAIHNQDVGNLDRSIFRQRKSMLDPHFSTDVQ

SEQ ID NO: 257330 - protein, 88 aa, Glycine max
  unsure (1)..(88): unsure at all Xaa locations
  Clone ID: PAT_MRT3847_74391C.1.pep
AADEDXDGVVRSMRKSRFSRRKXGAAALVEHETFEVSILPFNISHITSTSHIFIHLHSEIXXSXXRIKPTPXRLXSXLGEYVVWNATK

SEQ ID NO: 257331 - protein, 69 aa, Glycine max
  Clone ID: PAT_MRT3847_74392C.1.pep
MCDDLLISFSVTWLVVILNAAANTCVVGVQLVALLPLFLHLLFILISINLICSYLFQFNSPQCFNCIYC

SEQ ID NO: 257332 - protein, 64 aa, Glycine max
  Clone ID: PAT_MRT3847_74393C.1.pep
EFHLKHTLDYKAMGRTVSTRQVTQARVNLFDDQNRHIMTNVKGPVIQGDILTLLQSEQEARTLR

SEQ ID NO: 257333 - protein, 67 aa, Glycine max
  Clone ID: PAT_MRT3847_74394C.1.pep
MAMGISHEPVRMPVATCGDNPTEVLDFVNGSALLREMGFSSNRGSVALVMNGSLGYKAVAHFVNGSS

SEQ ID NO: 257334 - protein, 61 aa, Glycine max
  Clone ID: PAT_MRT3847_74395C.1.pep
LKSSNRHTKRLRFHCHLVYEIDNKHCIAINTEICMQIAQLSTCISKQHTYFESHLYLNGTG

SEQ ID NO: 257335 - protein, 157 aa, Glycine max
  Clone ID: PAT_MRT3847_74396C.1.pep
MASTASSLLRASRSKLSSSSSASLSRTFARSAPRRSPGSSAAATRSFGSAVPRWSRGVDWRSPLGLRPHIRAAAPLIERFHRRIATSATENPFKGNLTSLPRPGGGEFGKFYSLPSLNDPRIDRLPYSIRILLESAIRNCDNFQVKKEDVEKIIDLG

SEQ ID NO: 257336 - protein, 42 aa, Glycine max
  Clone ID: PAT_MRT3847_74397C.1.pep
MVVFFVNAIGTGKSPLENLLDHLDNPVGNNACVYATKFDPGS

SEQ ID NO: 257337 - protein, 107 aa, Glycine max
  Clone ID: PAT_MRT3847_74398C.1.pep
GCIRENLKLLFHFYFLGKRKSTHNVRDFIEEEAEVSSDGYVSNDEDDEEGSSFDSFIDDRTNPTAASQPEASRMDMMAIYSSAGVLCSVKHQVMEGLIFVPPLLLTV

SEQ ID NO: 257338 - protein, 73 aa, Glycine max
  Clone ID: PAT_MRT3847_74399C.1.pep
VSNVSFYWFIHLNGARAHICVAFVVICLTQLFYLLQVNCWRTSKPTWSRKISDEATKNYIQCCLPTIYIFCLW

SEQ ID NO: 257339 - protein, 52 aa, Glycine max
  Clone ID: PAT_MRT3847_7439C.1.pep
DSWLVHIRVGIEIFFYIDKRGFSTVLVALDYLLSFLWNVRSVINRGIDGRII

SEQ ID NO: 257340 - protein, 73 aa, Glycine max
  Clone ID: PAT_MRT3847_743C.1.pep
DSAPCSLRLFKSYQNINIYEIIFNHCYYVKIDIIIMFFLISIIIMLKNTKLILLLSLILRECHLIRNSTRIKI

SEQ ID NO: 257341 - protein, 79 aa, Glycine max
  unsure (1)..(79): unsure at all Xaa locations
  Clone ID: PAT_MRT3847_74400C.1.pep
HRIXVLTSHFFFSLFSVFXNVERYTLPAXPXIXXXEXENIAIAMGAPLXPSFXSXXXQXPSTXDSYFXSSIXPTXSFCS

SEQ ID NO: 257342 - protein, 73 aa, Glycine max
  Clone ID: PAT_MRT3847_74401C.1.pep
SLLGPINTMCLHGTIINFNSLIYSILYFSFLVKIIFACFSSYHSILIYQHHHCHIPNNNHSQEQNYIPYMPAV

SEQ ID NO: 257343 - protein, 95 aa, Glycine max
  unsure (1)..(95): unsure at all Xaa locations
  Clone ID: PAT_MRT3847_74402C.1.pep
XXLCXARXXCXITHTSHIITTXKXGVXFSNRXXILXKSLMSNXLSXXRXXXSIXEIRHDPLVEVXXCLXSFIELXKRNIRKKTQIPXHAEDSAFS

SEQ ID NO: 257344 - protein, 96 aa, Glycine max
  unsure (1)..(96): unsure at all Xaa locations
  Clone ID: PAT_MRT3847_74403C.1.pep
RLXVLGASAXVLMASVGCVXDLGSXWPFFGLFSWGCVSYCXACLLSFLFFSXINQIRLLVLGLLFSFLFCXXSCFFFIFPXFXXXLFFFXXXFAVL

SEQ ID NO: 257345 - protein, 88 aa, Glycine max
  unsure (1)..(88): unsure at all Xaa locations
  Clone ID: PAT_MRT3847_74404C.1.pep
IGLLRGRXLLHLWALRAPRVTSVLCGLSGLDAAGGQVCFALGCCLAVPVDSLAQGFLLLSSPLFMLLSQHTAILLLAYPFLSGYWLLL

SEQ ID NO: 257346 - protein, 104 aa, Glycine max
  Clone ID: PAT_MRT3847_74405C.1.pep
FAKYSPAGPKTDFSKTGKPLGPATYVGPLTWANPFFFFFFLSQGFFFFPSKLVCKGGEGFCLKGFHFFCQSPTGNFGFYPLLQKGGPFPPKKVHFVKIKAWFVS

SEQ ID NO: 257347 - protein, 330 aa, Glycine max
  Clone ID: PAT_MRT3847_74406C.1.pep
MGWRGILGFEYGIVQAPLGPDISAPPLVAAVANAGALGLLRAPDWESPDYLRELIKTTRTLTDKPFGVGVVLAFPFEENLNVILEEKVAVLQVYWGDCTRELVNKAHSAGIKVVPQVGNIEGAKQAIEAGADGIIVQGLEAGGHVIGQDGLITLVPRVVDLVGDREIPVIAAGRIVDARGYVAALALGAQGVCLGTRFLATEESNAHPTYKRKLLELDETACTVAPGRARWPGAPQRVLQTPFYKEWRSLPPHESEANKPVIGHSTINGVDKEIRRFAGTVPNKTTTGDLESMVMYAGQGVGLIKEILPAGEVVKRLVEGAQLIMQQNFK

SEQ ID NO: 257348 - protein, 115 aa, Glycine max
  Clone ID: PAT_MRT3847_74407C.1.pep
TNLGTKTFWENKICPQGKEKRTGGGPQNWKKLAPKNPFGGINLGNPPQGVSAPSKVLWEPKTGKGISPKGFLFKNGTRFLNMETLSPNKIQQKIFFFFYGNIFFGKNGGIRKNSF

SEQ ID NO: 257349 - protein, 114 aa, Glycine max
  Clone ID: PAT_MRT3847_74408C.1.pep
MEIALSLPLQRCHVHVGTSFGSTTPTLSEKRSMFILGMGFLGQSLARKLHNQGWVVSGTCTTHVEKKQLQDMGFHVHLFDANHPDVDVLQVLKNYTHILVSVPPLVGIGDPTLR

SEQ ID NO: 257350 - protein, 318 aa, Glycine max
  Clone ID: PAT_MRT3847_74409C.1.pep
MVSRHLVSLFLCFLCFEISVSSIRLPGLDQDAKATHGSVLRLNRGGSSVKFDPTRVTQLSWSPRAFLYKGFLSDEECDHLITLAKDKLEKSMVADNESGKSIMSEVRTSSGMFLNKAQDEIVAGIEARIAAWTFLPIENGESMQILHYENGQKYEPHFDYFHDKANQVMGGHRIATVLMYLSDVEKGGETIFPNAKAKLLQPKDESWSECAHKGYAVKPRKGDALLFFSLHLDASTDNKSLHGSCPVIEGEKWSATKWIHVSDFQKPIKQVDSGDCVDENENCPRWAKVGECEKNPLYMVGGEGVKGSCMKSCNVCSS

SEQ ID NO: 257351 - protein, 49 aa, Glycine max
  Clone ID: PAT_MRT3847_7440C.1.pep
MRSGRKSIHAITTWVRRQPPKVKAFLAVVSGMAALVLLRFIVHDHDNLF

SEQ ID NO: 257352 - protein, 64 aa, Glycine max
  Clone ID: PAT_MRT3847_74410C.1.pep
GNSKKIDIHTRLMRRYKSVPTWWFYIILAANIALIIFICEYYNESLQLPWWGVLLACAISIFRT

SEQ ID NO: 257353 - protein, 50 aa, Glycine max
  Clone ID: PAT_MRT3847_74411C.1.pep
VKSSSGMKLQFIFLLIKVHFVICIPQFHEYAGIRLIYVFYYLHVFHLSSP

SEQ ID NO: 257354 - protein, 89 aa, Glycine max
  Clone ID: PAT_MRT3847_74412C.1.pep
NSIDESEMKSLTSSRFECVGCIPDESHMFKVHVIYGLDYGHGLNHTLSFSGTGDVFAWYKTDVTTSPIELPEIPPKVTRFGCGRLVSQT

SEQ ID NO: 257355 - protein, 316 aa, Glycine max
  Clone ID: PAT_MRT3847_74413C.1.pep
YGFSQFGALLQQKLGFSYLLILCLATLVSSHRPYTTPSVTRLTDSFPRVQVDSAFSKTFGAKNIQFLSNGSTVTLALDKISGSGLVSQSRYSYGFFSAAIKLPSGLSPGVVVAFYLSNSDKFPHNHDEIDIELLGHDKRNDWVIQTNIYANGSVSTGREEKFYFWFDPTQQYHYYSILWNSYHTVFLVDNIPVREFIHSNTYPSIYPSKPMSVYATIWDGSEWATHGGKYPVNYKYAPFVVSFAQIELSGCISDPTAPVSSCSKASSSGLDPVNGPEFTKLSQQQIAAMDWARRKLMFYSYCNDRSRFKVMPPECH

SEQ ID NO: 257356 - protein, 75 aa, Glycine max
  Clone ID: PAT_MRT3847_74414C.1.pep
FLSFSEDLYQIVRAFTNYAKNEDHITHQVCGHKRELFPLPSRFVLKKVVSLQQIFVIKQLKVMSKVRHPSKILHN

SEQ ID NO: 257357 - protein, 134 aa, Glycine max
  unsure (1)..(134): unsure at all Xaa locations
  Clone ID: PAT_MRT3847_74415C.1.pep
MSSTYRNYIVAVSHCMGESXTSTVSEHLAYTLADMGAKDGIYDADVDGPCXPTMDSPEYRLTLPIPDETTFFPTAILVVKAISSGYTGQGRATMRGRMVAAGISQXLTTTEXGELHYLIIDMPPVTGDMXLTLC

SEQ ID NO: 257358 - protein, 255 aa, Glycine max
  Clone ID: PAT_MRT3847_74416C.1.pep
MGKTLWFFLVFTCLLIPLAVADWNILKLQTQDGLKISLKNYCESWRMNVELHNIRDFQVVPEECTEYIGKYVKSTQYKVDSQRASEECLVYLSTSCNLKKDGLDAWIFDIDDTLLSTVPYYKNNLYGGKKLNVTSLEEWMRKGNAPALDHSLNLYNELKSRGVQIILVTSRKEHLRSATIDNLVKVGYYGWTKIVFRDPANELVSVQKYKSDVRRQIINEGYRIWGIVGDQYSSIEGIPNPRRAFKLPNPMYYVA

SEQ ID NO: 257359 - protein, 57 aa, Glycine max
  Clone ID: PAT_MRT3847_74417C.1.pep
DTGAYRTMIMHDQEMPAGLQGPVPFQSENNPKTQEQLGKGAKNHCEESLVKNTQVNS

SEQ ID NO: 257360 - protein, 100 aa, Glycine max
  unsure (1)..(100): unsure at all Xaa locations
  Clone ID: PAT_MRT3847_74418C.1.pep
MRTTKDLATYISIXRPILHTYAGEDVYLGSWLLDLEAEHVYERSMCCGTPPNGDWKARTGNGGVASDDWACNEICKSGERIERCTQNXGVGDGAAWNVDL

SEQ ID NO: 257361 - protein, 47 aa, Glycine max
  Clone ID: PAT_MRT3847_74419C.1.pep
RSSWARVSHPRITLNPSSSNLNCREFNKAFLLSWPLICWMRNPRILF

SEQ ID NO: 257362 - protein, 34 aa, Glycine max
  unsure (1)..(34): unsure at all Xaa locations
  Clone ID: PAT_MRT3847_7441C.1.pep
IWGCGTISLPMLVPQKLIFLIXRVPYRLVLNLNI

SEQ ID NO: 257363 - protein, 61 aa, Glycine max
  Clone ID: PAT_MRT3847_74420C.1.pep
VYQKLCPRRSFSSLGHSMPTNVVTLFSSSTLSLLLSLFTHWLPESMSSLHHPRANKSPFCL

SEQ ID NO: 257364 - protein, 51 aa, Glycine max
  Clone ID: PAT_MRT3847_74421C.1.pep
PQKGKNGKPKGTGPEKKPGARGPKGGGRPIKRETREGESNGWKEFMGFLNF

SEQ ID NO: 257365 - protein, 52 aa, Glycine max
  Clone ID: PAT_MRT3847_74422C.1.pep
LKTKCVYLIESLTVHYNAREDLSLVLRCYKAIREQSSLLIITVRLLTMLYQR

SEQ ID NO: 257366 - protein, 43 aa, Glycine max
  Clone ID: PAT_MRT3847_74423C.1.pep
TTFIYLMINLIHTLSLFQHQLYPSFFLYFSLILCYYTPLTNYY

SEQ ID NO: 257367 - protein, 35 aa, Glycine max
  unsure (1)..(35): unsure at all Xaa locations
  Clone ID: PAT_MRT3847_74424C.1.pep
FLYEFCXINVQIXISMCKVXELCLXYTYNISILVK

SEQ ID NO: 257368 - protein, 36 aa, Glycine max
  unsure (1)..(36): unsure at all Xaa locations
  Clone ID: PAT_MRT3847_74425C.1.pep
KSDYLWSXXKKKKKKKKKKKKKKKKKKKKKKKRGRR

SEQ ID NO: 257369 - protein, 34 aa, Glycine max
  Clone ID: PAT_MRT3847_74426C.1.pep
IKTVCDLKHSLDELSFQLLPEKKFSFKDKARTTT

SEQ ID NO: 257370 - protein, 59 aa, Glycine max
  unsure (1)..(59): unsure at all Xaa locations
  Clone ID: PAT_MRT3847_74427C.1.pep
YRPLTPFLFFFFXLSKLSFNFHNVTNCHIQLHSGLYPNAILMAGKFQLSSYKVKPLHYK

SEQ ID NO: 257371 - protein, 62 aa, Glycine max
  Clone ID: PAT_MRT3847_74428C.1.pep
PQKGPPPTTAQKGPAARTRQKGPPARTPQKGPAARSPQKGPAARSPQKGPIQIGLPKICVTP

SEQ ID NO: 257372 - protein, 52 aa, Glycine max
  Clone ID: PAT_MRT3847_74429C.1.pep
ATELKLELTDSQSTERDSDLCSRSSIHLDEEPLLPLHPASDEPHSLAADCCL

SEQ ID NO: 257373 - protein, 224 aa, Glycine max
  Clone ID: PAT_MRT3847_7442C.1.pep
NQIHFVLHQWKENNYPCEAGRKLLLHMNGGKGERSYTNNCLLQKKLMLKAKPILEETIMRLYRDFSPNCMKVTNLGCSVGPNALLVISNIIDIVNTACTSLNREPPKFQFYLNDLFGNGFNTIFKSLPNFYTRLVEDKGHKFGPCFVNATPGSFYGRLFPSNSINLFHSSNSLHWLSQGLIEEEKLDSFNIPVYEPTVEKIRHVIEEEGSFFVQRFEILTLPWV

SEQ ID NO: 257374 - protein, 263 aa, Glycine max
  Clone ID: PAT_MRT3847_74430C.1.pep
EAMEQLYSLGALDEEGLLTKLGRKMAEFPLDPPLSKMLLASVDLGCSDEILTIIAMIQTGNIFYRPREKQAQADQKRAKFFQPEGDHLTLLAVYEAWKAKNFSGPWCFENFVQSRSLRRAQDVRKQLLTIMDKYKLDVVSAGKNFTKVRKAITAGFFFHASRKDPQEGYRTLVENQPVYIHPSSALFQRQPDWVIYHELVMTTKEYMREVTVIDPKWLVELAPRYFKVADPTKMSKRKRQERIEPLYDRYHEPNSWRLSKRRA

SEQ ID NO: 257375 - protein, 73 aa, Glycine max
  Clone ID: PAT_MRT3847_74431C.1.pep
TIVRGLVSAPVGYINYSGTILREGLERPIILHKKLEDWLRELECSLVIPALKLIQTGMPSELECTTSGCMCCV

SEQ ID NO: 257376 - protein, 92 aa, Glycine max
  Clone ID: PAT_MRT3847_74432C.1.pep
MSKMLGVFVGLLLLVGLAASAKFDELFQPSWAMDHFIHEGELLKLKLDNYSGAGFGSKSKYMFGKVTIQLKLVGRTNVVRTELAPEPPAHVG

SEQ ID NO: 257377 - protein, 327 aa, Glycine max
  Clone ID: PAT_MRT3847_74433C.1.pep
MELYTPMAWSFGKGMPLCSRFVCTLIGVSSTRKTTWRWFKMLGVFVGLLLLVGLAASAKFDELFQPSWAMDHFIHEGELLKLKLDNYSGAGFGSKSKYMFGKVTIQLKLVEGDSAGTVTAFYMSSDGPTHNEFDFEFLGNTTGEPYSVQTNVYVNGVGNREQRLNLWFDPTKDFHTYSIFWNQRQVVFLVDETPIRVHTNLEHKGIPFPKDQAMGVYSSIWNADDWATQGGRVKTDWSHAPFVATYKDFQIDACACPVPVTSADSAKNCSSSEDKKYWWDEPTLSELNLHQSHQLMWVRANHMVYDYCADTARFPVIPAECVHHRHH

SEQ ID NO: 257378 - protein, 64 aa, Glycine max
  unsure (1)..(64): unsure at all Xaa locations
  Clone ID: PAT_MRT3847_74434C.1.pep
MSLNPNNFGGPRNKVFHSFPPELWEPFHEFQFPNSPSAENSATVNTPVEWKXNPKAQVFKAENP

SEQ ID NO: 257379 - protein, 132 aa, Glycine max
  Clone ID: PAT_MRT3847_74435C.1.pep
MNSNFNFDFDLGIGSNRPKSLNDQKNPKPTSSYSSAQPAWTHRPAPTQTTALPGGPPSMVGDIFGKSWGTPQPSSASKNIGIGNKNPNLFGDLGRSALGLGSKTNVALKNAPAPNKTTTFSMGNMGDSLPKT

SEQ ID NO: 257380 - protein, 48 aa, Glycine max
  Clone ID: PAT_MRT3847_74436C.1.pep
RHLPWFLVLFIKQIKCHLLPYDPLINFSEVLKVETAVILVLSGHSCLQ

SEQ ID NO: 257381 - protein, 446 aa, Glycine max
  Clone ID: PAT_MRT3847_74437C.1.pep
MNSNFNFDFDLGIGSNRPKSLNDQKNPKPTPYSSYSTTTTASYSSSQPNKQPAWTHQPSPTQTTALPGGPPSMVGDIFGKSWGTPQPSSASKNIGIVNKNPNLFGDLVSSALGQGSKTNVPLKNAPTPAPNKSTFSMGNMADSLPKTGSTPQSSSTWASSSGGFNVSANKTTLNLGGPSLRNMGTGIGTNSNNKDPFSSLSGIGSKQSATLNSAPKGPKVDLGDDGFGDFQNASKPSSTAFPFTASPGIDINFTGSGDSGDPMDMFFTATSSSASGGGAAAASDGFGTQDDWGLDSEFGGGGHDVGGTTTELEGLPPPPSGVSGSTAKGKGMDNYKQGQFADAIKWLSWAVILLQKAGDSAATVEVLSCRASCYKEVGEYKKAVADCTKVLENDETNVSVLVQRALLYESMEKYRLGAEDLRTVLKIDPGNRIARSTVHRLAKMAD

SEQ ID NO: 257382 - protein, 93 aa, Glycine max
  unsure (1)..(93): unsure at all Xaa locations
  Clone ID: PAT_MRT3847_74438C.1.pep
MVQMFARLIDYADIRLTEKTIFTCKDSDISDVNYTIPTHFRRYLPNFIMWNLQTLVTDILPSFLTVGIKYKWNLCNIHISGXLFYDGRYKFWS

SEQ ID NO: 257383 - protein, 56 aa, Glycine max
  Clone ID: PAT_MRT3847_74439C.1.pep
FLHSRLQRLTYYLCNDATTKQIYDVICHRGAPQLQSFSSRNSISDRSLRAIQLPLI

SEQ ID NO: 257384 - protein, 103 aa, Glycine max
  Clone ID: PAT_MRT3847_7443C.1.pep
QPDFITCATGPSLYWKKLGVKQEDFPNVLFTNYFGIFKKQPLVKVISNLYTRFPQTRYSGFYQFNRPALIVTDVDLIKQMLIKDFEPFNEHRALTSAETDPLW

SEQ ID NO: 257385 - protein, 63 aa, Glycine max
  Clone ID: PAT_MRT3847_74440C.1.pep
LSMLHKRDHDLSFPLFNIYFLPQTLFKSPCTRALKKQFLAIPFSGHGGLYSNTGNINIMPQPH

SEQ ID NO: 257386 - protein, 64 aa, Glycine max
  Clone ID: PAT_MRT3847_74441C.1.pep
MKTTGWTAGMTLSSGERRARYLTQSALTDEPVVSGEGLIDNLTEPEGTELDCSWDMPYEHKKSM

SEQ ID NO: 257387 - protein, 106 aa, Glycine max
  Clone ID: PAT_MRT3847_74442C.1.pep
EIEEKVFFFFFLSETLVDLVMEKSKSFPEYSCSYTEFGFSERSNSYNFNGPNQKGNGFSASSDPEIKRKKRIKAYNVLTVEGKLKTNVRNSFKWIKNKFSDIRYGV

SEQ ID NO: 257388 - protein, 179 aa, Glycine max
  Clone ID: PAT_MRT3847_74443C.1.pep
KVQSPKGKTPKKGGPTWANPQDQMNKNFFSGKKIRAQSPKRPKFFKGDPFPKKKENGGEGNPPPTGEKQFFFPLPLLGKGFYKLTLTPQKTRGKSGKKKKKKKFFPTPPIFNNSKGGATQKSHKRGENPKFSWGGQNLWEILPKGPQRGRGNQGGPFKKKHSKGREKSHLEGGGQGTPQ

SEQ ID NO: 257389 - protein, 69 aa, Glycine max
  Clone ID: PAT_MRT3847_74444C.1.pep
QLFVWVLRACEEQETVRFENPIRMTETTHQKVAGHSQVRVLRYYSLSPLIHFTTPKLSLLLLNKKKSEI

SEQ ID NO: 257390 - protein, 64 aa, Glycine max
  unsure (1)..(64): unsure at all Xaa locations
  Clone ID: PAT_MRT3847_74445C.1.pep
SSWSRQYIRNVQLIFXEDYGTEGRGGYLDHYGIIRYIMPNDLLLTQGLYVMVTRVWLSAEDWME

SEQ ID NO: 257391 - protein, 84 aa, Glycine max
  Clone ID: PAT_MRT3847_74446C.1.pep
HRRLRDEPQQDDPVRLRPHLHHHTLRRDRPLRRHRPRLIAPEEEHQADQRLHPQLRPGASKRRSLTLEAEHGEPERVATLRGFG

SEQ ID NO: 257392 - protein, 68 aa, Glycine max
  unsure (1)..(68): unsure at all Xaa locations
  Clone ID: PAT_MRT3847_74447C.1.pep
FKMXSLKLATSXXPLQSSISHAVFPFQQMGXWQIGXFEXGPKAITMERVRMTGXXXIXXXXFRGSLIX

SEQ ID NO: 257393 - protein, 310 aa, Glycine max
  Clone ID: PAT_MRT3847_74448C.1.pep
MSSFDAFADDLNVNSSSTRQHDDDEDNFSGYGGYSSFTGGFSADGDVAVDHSAAASPEIYGFTDSNPAYSQSPFESATVENENGNGYGDGDGVFVSDGPVLPPPTEMEPEEGYALREWRRQNAIQLEEKEKREKEMRLKIIEEAEEYKVAFYEKRKLNVETNKVQNREREKLFVANQEKFHKEADKAYWKTIAELIPREVPNIEKKRGKKDQDKKPSITVIQGPKPGKPTDLSRLRQILLKLKHTPPAHMIPPPPAPAKDAKDGKDGKETASKANGSAPASQPKDATTNNAATDLPQKEAPPAPVEQSST

SEQ ID NO: 257394 - protein, 340 aa, Glycine max
  Clone ID: PAT_MRT3847_74449C.1.pep
MSSFDAFADDLNVNSSSTHHHDEDEDNFSGYGGYSSFTGGFSADGDVAVDHSAAASPEIYGFTDPNPAYSQSPFESATVENGNENGNGYGQGDGDGDGVFISDGPVLPPPTEMEPEEGYALREWRRQNAIQLEEKEKREKEMRLKIIEEAEEYKVAFYEKRKLNVETNKVQNREREKLFLANQEKFHKEADKAYWKTIAELIPREVPNIEKKRSKKDQDKKPSITVIQGPKPGKPTDLSRLRQILLKLKHTPPPHMIPPPPAPAKDAKDGKDSKDGKEKAASKATGSAAEGAPGSQPKDATSNGSSEEPQKEAPATEAACCMVIILQSPSIFLLSPFCSL

SEQ ID NO: 257395 - protein, 141 aa, Glycine max
  Clone ID: PAT_MRT3847_7444C.1.pep
GPYLGFYGYIIWALGPQPVTHPHKGFYNPQPHPYGGPQGACPKRFRFWPGNPPATLSSPIGVSCGLFNCFRSPLLGLFPSFSPLFRLLLPPGILTPVIVPRVRKLNPFGVRAPPPPPPPPPPPPPPPPPPPPPPPSRRHCY

SEQ ID NO: 257396 - protein, 49 aa, Glycine max
  Clone ID: PAT_MRT3847_74450C.1.pep
VFLLFLSHFFSILSSCQNICQQSTMHVFTIFEYKKIIYFCDFCFLKAQK

SEQ ID NO: 257397 - protein, 306 aa, Glycine max
  Clone ID: PAT_MRT3847_74451C.1.pep
MASTFDAFTVDDDHFAAPAAADTFSGYPDFSSFPSDDVPVDYADTAASPEIFGFSDPGPVYSQSPFEQVHENGNGNGTENGYGDGVFVSDGPVLPPPGEMEPEEGYVLREWRRQNVIQLEEKEKREKEMRLKIIEEAEEYKVAFYEKRKLNVETNKVQNKEREKLYLANQEKFHKEADKNYWKAIGEIIPREVPNIEKKRGKKDQDKKPSITVIQGPKPGKPTDLSRLRQILLKLKHTPPPHMIPPPPAPAKDAKDNKDGKEKAASKATGSAAEGAPDSQPKDATSNGLTEEPQKEAPATEEQPAA

SEQ ID NO: 257398 - protein, 138 aa, Glycine max
  Clone ID: PAT_MRT3847_74452C.1.pep
MASVSFAVGLLPYASVRFPVLSNANSLKLSSSASISTPILQQKLCSLLSPLPLSPRPRPLTIVSAKGYKMKTHKASAKRFRVTGRGKIVRRRAGKQHLLVKKNTKRKSRLSKMHAVSRSDYDNVIGALPYLKVNRNAT

SEQ ID NO: 257399 - protein, 57 aa, Glycine max
  unsure (1)..(57): unsure at all Xaa locations
  Clone ID: PAT_MRT3847_74453C.1.pep
SIDLNTSSPTLYKISQSTWHXVFPQTXSHEXXFLILYVVWPCWGYAKWGRLREKLSW

SEQ ID NO: 257400 - protein, 129 aa, Glycine max
  Clone ID: PAT_MRT3847_74454C.1.pep
MDKAESKLIPREVPNIEKKKSKKDQDKKPSISVIQGPKPGKPTDLYRLRQILLKLKHTPPPHMIPPPPAPAKDAKDGKDSKDGKEKAASKATGSAAEGAPGSQPKDATSNGSSEEPQKEAPATEEQPAA

SEQ ID NO: 257401 - protein, 25 aa, Glycine max
  Clone ID: PAT_MRT3847_74455C.1.pep
NQHIVHTEAQVRLGLNKSTKLKILN

SEQ ID NO: 257402 - protein, 81 aa, Glycine max
  Clone ID: PAT_MRT3847_74456C.1.pep
LGRAGEKKPNCPFQENKVWMGKNIFLKANFGPKPKLGHLGLGTSLGNLEKVTRLFFFLFPAPPPLFFGKTWAIPFFFFLPP

SEQ ID NO: 257403 - protein, 52 aa, Glycine max
  unsure (1)..(52): unsure at all Xaa locations
  Clone ID: PAT_MRT3847_74457C.1.pep
CEFPWVHAEINTESXMPEHETQVISCNNDQYPRIYFYXXDXXXXRGXLNAER

SEQ ID NO: 257404 - protein, 177 aa, Glycine max
  Clone ID: PAT_MRT3847_74458C.1.pep
ERVCRLLCSKIVPSRFPQCAQTVVVVTLTTPYGHVPQDTVVRFRLLITRSRGSHPVLLQQERARNMVPMPAAHHNLVILLFRVTPVLIKSYGGLNILLNVVSNIKSINSLVISNVASAFLPWRRYSFYFFCMVAHYGLLTVICAPPWLTSAMPITYQFVSTLAPPPPPPKAGGTTHM

SEQ ID NO: 257405 - protein, 161 aa, Glycine max
  Clone ID: PAT_MRT3847_74459C.1.pep
RAPPGAQAVPILRQPSLCPESSRAGLPRSVVVAHAFLCVRNSSHMSEAQRSALNALLFRTGDQSRDIVLGLATNRPAAPDTEAPQPPVRDMLFPRPPGAGRPMVAKLFASKGLDYAMMTGGDVAPLGAQAVTKIHDIFDWSKKSRKGLLLFIDEADAFLCE

SEQ ID NO: 257406 - protein, 72 aa, Glycine max
  Clone ID: PAT_MRT3847_7445C.1.pep
TNHLTGIPLKLSWTILSNWLNKKKNRSYLKPKPTLKVQSPTAKTPDMRASLNRHKRSSSSLRTCLTTLIARN

SEQ ID NO: 257407 - protein, 57 aa, Glycine max
  Clone ID: PAT_MRT3847_74460C.1.pep
PKKQGFPSPPIPLITASVLKILAPFFFKKKKKKKKKKKKKKKKKKKKKKKKKKKKKK

SEQ ID NO: 257408 - protein, 98 aa, Glycine max
  unsure (1)..(98): unsure at all Xaa locations
  Clone ID: PAT_MRT3847_74461C.1.pep
MMANTFILTSDSVTEGQADKLCDEISDAVLXAWREQDPDSKVASETCTKTNLVMDIGEIMTKANVDYEKIVRDTCRIIGFITNDVGLDADNCKVPVYI

SEQ ID NO: 257409 - protein, 65 aa, Glycine max
  Clone ID: PAT_MRT3847_74462C.1.pep
GGGKKGFLKGPLQNPKKKKNLGPPKRGFFTRAINPPKTFFLDQKGNTPNLKNLSRENWKGAKTIF

SEQ ID NO: 257410 - protein, 54 aa, Glycine max
  Clone ID: PAT_MRT3847_74463C.1.pep
EIVIGTISVKPSQNKSNPQKFFFRKNFRFSETPKLIMNHRIKVQIGLLQDKLEP

SEQ ID NO: 257411 - protein, 101 aa, Glycine max
  Clone ID: PAT_MRT3847_74464C.1.pep
FLIILLYIYFFHIYSINFCDNFIIYFFIISFFFFIYFFFLFFFFFFYFSIFLLIFFLYFFIFFFFSLFFFLLFLILLFFFFFPFIILLFIYIIFILYLYFF

SEQ ID NO: 257412 - protein, 64 aa, Glycine max
  unsure (1)..(64): unsure at all Xaa locations
  Clone ID: PAT_MRT3847_74465C.1.pep
VPEGYNYELYIRNDINRILGPKAYCISFKDSAXNCFGYMVSKNKYIYAIDKDCFDAKNPYGKDI

SEQ ID NO: 257413 - protein, 64 aa, Glycine max
  Clone ID: PAT_MRT3847_74466C.1.pep
IKKKGDLLVFNYTCTIYLTMSCSCSLQNQQGSYPTTSFVFPKNNQRKRITLYHLFNFSMTQSSA

SEQ ID NO: 257414 - protein, 60 aa, Glycine max
  Clone ID: PAT_MRT3847_74467C.1.pep
SMPAVLITLELINTQMYSTEKLARKNLFSFFLFLEFSLTSTLLILEEDMQEVIMGQSVIE

SEQ ID NO: 257415 - protein, 74 aa, Glycine max
  Clone ID: PAT_MRT3847_74468C.1.pep
ESAENLGEPLRGDQIHNSPNLFHMNVNPSIYLCITTALNENEVKLLKQRTRDLYQVNMILDNLPVMRFANQNGI

SEQ ID NO: 257416 - protein, 385 aa, Glycine max
  Clone ID: PAT_MRT3847_74469C.1.pep
MRRMGWLGGKDPVYKELMGVDLQTGLFTLRQIKAATKNFDGSCKISEGGFGCVYKGQQSDGTMIAVKQLSSKSKQGNREFVNEMGLISGLQHPNLVKLYGCCVEGNQLILIYEYMENNCLSRILFGRDPNKTKLDWPTRKKICLGIAKALAYLHEESRIKIIHRDVKASNVLLDKDFNAKVSDFGLAKLIEDEKTHISTRVAGTIGYMAPEYAMRGYLTDKADVYSFGVVALETVSGKSNTNFRPNEDFVYLLDWAYVLQERGSLLELVDPNLGSEYLTEEAMVVLNVALLCTNASPTLRPTMSQVVSMLEGWTDIQDLLSDPGYSAISSSSKHKSIRSHFWQTPSGTHSISIPSIYTDSSGSHVETEKNYHPVTVNSDGSDKSN

SEQ ID NO: 257417 - protein, 84 aa, Glycine max
  unsure (1)..(84): unsure at all Xaa locations
  Clone ID: PAT_MRT3847_7446C.1.pep
EPGALSTYVNSNFQAINXSIKVGGSCQPNDPGGPMDISDFSPEQEQPLGSLFLKEEKHGNKGNKINKGVFKSSHLSSFSSEDFD

SEQ ID NO: 257418 - protein, 67 aa, Glycine max
  Clone ID: PAT_MRT3847_74470C.1.pep
LQLTLPIASFAIAIETLIAGAFGMNIPCNLYNIDGVFWPFVWTTSAACVLLFLLILAYARWKKLLGS

SEQ ID NO: 257419 - protein, 174 aa, Glycine max
  Clone ID: PAT_MRT3847_74471C.1.pep
PRFRFEIGGKVVSQVGFQESAIPIGQNPEKFRPKKAAVLICLFEGDDGDLRVILTKRSSKLSTHSGEVALPGGKTEEGDKDDGDTAKREAKEEIGLDPELVNVVTVLEPFLSKHLLRVVPVIGILHDKKAFKPVLNPAEVEAVFDAPLEMFLKDENRRQDEREWMGEKYLLHFF

SEQ ID NO: 257420 - protein, 292 aa, Glycine max
  unsure (1)..(292): unsure at all Xaa locations
  Clone ID: PAT_MRT3847_74472C.1.pep
MDSSSNASSIGGSQRLFALAQHLRQYKAPSFPEDIVEQSIEEIGGKVVSQVGFQESAIPIGQNPEKFRPKKAAVLICLFEGDDGDLRVILTKRSSKLSTHSGEVALPGGKTEEGDKDDGDTAKREAKEEIGLDPELVNVVTVLEPFLSMMMIXMVDRLERLERKGNFTTVLXPIWLMQHLLRVVPVIGILHDKKAFKPVLNPAEVEAVFDAPLEMFLKDKNRRQDEREWMGEKYLLHFFDYDIGHKKYIIWGLTAGILIRAASVVYQRQPAFVEQNPKFKLPQDVSKDTTIP

SEQ ID NO: 257421 - protein, 85 aa, Glycine max
  unsure (1)..(85): unsure at all Xaa locations
  Clone ID: PAT_MRT3847_74473C.1.pep
VGFEDPHVLLTVGXDGLSFVEGFPXGTYHTIIEDSSDPIGPAQELSEKLFIRPIQMLSHKKIVCNXTESIXSYMHIIEDIVSNCL

SEQ ID NO: 257422 - protein, 129 aa, Glycine max
  unsure (1)..(129): unsure at all Xaa locations
  Clone ID: PAT_MRT3847_74474C.1.pep
PPPPTPPAQPPPPPPPPKPPPPPTXPTPAPTPPHRPSRRTTQPDXPPNAEXXPTPRAAAPGEGGRAGSPPPPPPEXPRRLHKEHQRTADMGFTKRRRRGEGEGVERKRSLGGTQERESNEQPFLTPPYV

SEQ ID NO: 257423 - protein, 152 aa, Glycine max
  Clone ID: PAT_MRT3847_74476C.1.pep
MSLVANEDFQHILRVLNTNVDGKQKIMFALTSIKGIGRRFANICCKKADVDMNKRAGELSAAELDSVMTVVANPRQFKIPDWFLNRKKDYKDGKYSQVVSNALDMKLRDDLERLKKIRNHRGLRHYWGLRVRGQHTKTTGRRGKTVGVSKKR

SEQ ID NO: 257424 - protein, 224 aa, Glycine max
  unsure (1)..(224): unsure at all Xaa locations
  Clone ID: PAT_MRT3847_74477C.1.pep
MMALNISSPAEVKSIFFADYFKSNCITAKFTGGFAFKRKERGAASGGRSCCSVLAPPPPACPGRGPRVRPRVRTDARRRQKGGSTGSIGTQTLDIVAENPDKFKVVALAAGSNVTLLADQVKRFKPQLVAVRNESLIAELEEALHDVEEKPEIIPGEQGIVEVARHPDAVSVVTGIVGCAGLKPTVAAIEXGKDIALANKETLIXGGPFVFPLAQKHNVKILPA

SEQ ID NO: 257425 - protein, 54 aa, Glycine max
  Clone ID: PAT_MRT3847_74478C.1.pep
ISFKLYTSARRHSLLHSHNEEPRRKVNNMDCTSRKAKEGKHEPCGEELRISNRK

SEQ ID NO: 257426 - protein, 69 aa, Glycine max
  Clone ID: PAT_MRT3847_74479C.1.pep
PPIPKCFRHQTPFMDHFGEGFGVKSKGTLWGRGISEIDPPVNVNGPLCRSAFILLKRIILDKHIFFNHS

SEQ ID NO: 257427 - protein, 135 aa, Glycine max
  unsure (1)..(135): unsure at all Xaa locations
  Clone ID: PAT_MRT3847_7447C.1.pep
AGIGSEKHLAXIVSLLTQPVEGEGEKSLVLTMDRFEHRGFLIHFGDKGSERNSFNQSSPFFANSNPDMPAVPVPAAQNHEWLLQNITSALDYISERTFFKENGPHSASDQDVAMADACTASHNKGSTSAINASFI

SEQ ID NO: 257428 - protein, 82 aa, Glycine max
  Clone ID: PAT_MRT3847_74480C.1.pep
VFPQRATPKAFFLSFPNFPKFNFFLGAYQPLKPPKFFFISLGPPPLQNFSRGKGGAHPGKFSPLFFREVKLGPILPPLGVIF

SEQ ID NO: 257429 - protein, 80 aa, Glycine max
  Clone ID: PAT_MRT3847_74481C.1.pep
TLGENSLHLIMIDSYLTFLWFNKKFNMSYSNLSADIQHYSAYGCDTNRSLIETQCWTFTILLFLMHKSLPLLTVKTLLRL

SEQ ID NO: 257430 - protein, 129 aa, Glycine max
  Clone ID: PAT_MRT3847_74482C.1.pep
LVICLEGTTCREQFLLRFSALFAELTDRIVPVAINTKQSVFYGTSVRGHKLLDPYFVFMNPMPTYEITFLNQLPTELTCMGGKSAIEVANYIQRVLAGTLGFECTNLTRKDKYAILAGTDGTVPSMKSA

SEQ ID NO: 257431 - protein, 67 aa, Glycine max
  Clone ID: PAT_MRT3847_74483C.1.pep
LRVRVFQVGTRCDHQGMSCSCSYVLFLFRTVLFSLASPFVFGLLLLLLLDKVLKTAYMFVSNVYNDC

SEQ ID NO: 257432 - protein, 74 aa, Glycine max
  Clone ID: PAT_MRT3847_74484C.1.pep
ALLLKFPRAVIVQPRRRTDGRLHPPQLQQTVQPSLFIWTTQAFRQLFEDHSWLRTSCRVNSTIPADTDQNPSDP

SEQ ID NO: 257433 - protein, 78 aa, Glycine max
  unsure (1)..(78): unsure at all Xaa locations
  Clone ID: PAT_MRT3847_74485C.1.pep
RNASTRHYSTWCSVFQALDGSRVNHILLHPRYDPGGSASGEMKNPGIKDGPXTRVVQPEDIVRRDRAARNYGHSGAVG

SEQ ID NO: 257434 - protein, 40 aa, Glycine max
  Clone ID: PAT_MRT3847_74486C.1.pep
WHNITHFFHSYAYESATLMLYARIRCKIENGWTGIGNYPC

SEQ ID NO: 257435 - protein, 121 aa, Glycine max
  unsure (1)..(121): unsure at all Xaa locations
  Clone ID: PAT_MRT3847_74487C.1.pep
SRLSGTISQSILLQTVWNQMATVRTPLXFDSSKQSXFCKFSIDLLGGGILVDKTGDXFTLIQNSHTSNLLRVVAWMKGCLMAKIVMFVNCXYKMSDWALXVQVFLTNSNXSSYYFDARKWT

SEQ ID NO: 257436 - protein, 75 aa, Glycine max
  Clone ID: PAT_MRT3847_74489C.1.pep
AVLRQRGGRKGFLWLVWMMVQGVEGEVAKLLMMMMMVVVVEMVRWVGCLTLKKENGFTEFFLTMMLLEIPPKSVV

SEQ ID NO: 257437 - protein, 63 aa, Glycine max
  Clone ID: PAT_MRT3847_7448C.1.pep
LHTHACLNSVDLPRSPFFFFFKFSNQWKNFIFCRGNILMALLPAWSLICYDNRDLATIMTRLN

SEQ ID NO: 257438 - protein, 99 aa, Glycine max
  Clone ID: PAT_MRT3847_74490C.1.pep
NPPFLQLFLRYPLIYPQLLLLELANAMEPTILEKLCAVLNVDKRSVDRDLDVYRNLLTKLVQAKELLKEYADREKKKREQRAEPQTSNEAITQQQHFSS

SEQ ID NO: 257439 - protein, 66 aa, Glycine max
  unsure (1)..(66): unsure at all Xaa locations
  Clone ID: PAT_MRT3847_74491C.1.pep
RGLLSGMPDLKYXMNDKIALEKKAHLKAHATKRGESMKHHDTTIHLCGYKTWVTLPNTNTLVPPDP

SEQ ID NO: 257440 - protein, 80 aa, Glycine max
  Clone ID: PAT_MRT3847_74492C.1.pep
LHLVTLKKKGDKTLFFFLSFFSLTLGSWVASLCDLYRSKLRALHVMCFNRELGSPDHLKDLKDSKFVKFSSNGYVYHALK

SEQ ID NO: 257441 - protein, 47 aa, Glycine max
  Clone ID: PAT_MRT3847_74493C.1.pep
KYHCLLEKSQRYLHLNNCLLRRIFTIFLNPRKCYENAWANTMIVSNQ

SEQ ID NO: 257442 - protein, 89 aa, Glycine max
  unsure (1)..(89): unsure at all Xaa locations
  Clone ID: PAT_MRT3847_74494C.1.pep
RATFSASYHTVXMDRTKQTARKSSGGNAPRKQLATKAARKSAPATGGVKKPHRFRPGTXALREIRKYQKSTELLIRKLPFQRLVREIAQ

SEQ ID NO: 257443 - protein, 354 aa, Glycine max
  Clone ID: PAT_MRT3847_74495C.1.pep
ENAGRFASMVAVFCERLGWHDLEGLVAKFQNRVSFGVRAEIVELTTIPYVKGSRARSLYKAGLRTPHAIAEASIPEIVKALFESSSWATEGSAQRGFQFGIAKKIKNGARKIVFDKAEEASNAAFSAFKSLGFNVPQFDPQILSTAARDSIRLGTGSTSGSDTTDTSHSFVNADCIDNTNKFTLDKEKEDLIKLSVNGTVASVEGKSRSRMICSLSSVPVAGPKMDELNRTSDYTKNADMTILSVQLQKPNDKSGVHDGCDAHCTEEAHKNGNLASGNAGSSSQKGPINAVSSPGGLDSFLDLWDSMPEFYFDIHYIKRLELHSTAPFEIHGIAVCWENSSVYYINLPREYSVV

SEQ ID NO: 257444 - protein, 50 aa, Glycine max
  Clone ID: PAT_MRT3847_74496C.1.pep
DERPNDPFYGFGVLGPFIGWRNELGCKLLELVHRKGLYSSPSHYELIINE

SEQ ID NO: 257445 - protein, 112 aa, Glycine max
  unsure (1)..(112): unsure at all Xaa locations
  Clone ID: PAT_MRT3847_74497C.1.pep
ARVPFVDKEFIRVAGNIDPEGKMINKDEGRIEIWTLQMTFDDEDHPYMAKHILYNHNEQSSDGVGYGXIDGLKAYDEQHATDRFMLNTGHTITCNTYTANELYHYRMISERV

SEQ ID NO: 257446 - protein, 51 aa, Glycine max
  Clone ID: PAT_MRT3847_74498C.1.pep
INSSVFWVKPTNLIWHLITQLFMENTSNVIKQGHHATWQLPLLCLCSNIFI

SEQ ID NO: 257447 - protein, 169 aa, Glycine max
  unsure (1)..(169): unsure at all Xaa locations
  Clone ID: PAT_MRT3847_74499C.1.pep
ARAEDQNDASNASARKIKREYKEPWDYENSYYPTTLPWRKPNSGDPEILDEKEFGEAATSVEYDENTVNSAAELEILIPTPLPMDKQSNKGKEKIGTSTVSGEATKSKNALEELPRGYMGKXLVYKSGAIKLKLGETLLDVSPGSXCRCVQDVMAVNTAQKQCCNLGEI

SEQ ID NO: 257448 - protein, 124 aa, Glycine max
  unsure (1)..(124): unsure at all Xaa locations
  Clone ID: PAT_MRT3847_7449C.1.pep
AAPRLLVASLLPPSPGXRCFLSXPVPLARXLPAWVRVGFSAPPGLHEFFAPRPPRXLGVFCFXVVWWWPHLWXQPTXICALWGLLPSRVVVACAPGRLXWRPRLXGAGAALXVCRXFFGGPPFS

SEQ ID NO: 257449 - protein, 144 aa, Glycine max
  unsure (1)..(144): unsure at all Xaa locations
  Clone ID: PAT_MRT3847_744C.1.pep
PHKKPRKKNGGANGPRPPGGKNKTPKGGELGPPGAKKKKPRMGGGYPTGGGFLNPGGGGITPXDPKKNGPGGQKKDGGYYGHPKKGQKTYLWGNPPRPLGVNRPQTPLGAEKAGKPPKKKNPRGLNGKNPAPPEKHLIKGGKRF

SEQ ID NO: 257450 - protein, 303 aa, Glycine max
  Clone ID: PAT_MRT3847_74500C.1.pep
MDPDQGTSKARKPKFKPRNLKAVRAPKTEADDKRNEDSEVPRALSRRRHENPAKREPKVERKSSVEVAFSLGSSSSHSLRTYGTSKSIDSGTSSGSPSKYFANEQIRSIATEDQNDASNASARKIKREYKEPWDYENSYYPTTLPLRKPNSGDPEILDEKEFGEAATSAEYDENTVNSAAELEILESEEQRMFFFQIPTPLPMDKQSNKGKEKIGTSTVSGEATKSKNALEELPRGYMGKMLVYKSGAIKLKLGETLLDVSPGSNCRCVQDVMAVNTAQKQCCNLGEISKRVVVVPDLDSIEL

SEQ ID NO: 257451 - protein, 69 aa, Glycine max
  Clone ID: PAT_MRT3847_74501C.1.pep
MTTRYKKNRRTRGLDITEGSGIQLHRKHPIRHTNTGSMHHHRILLDKYHPEFFCLVRMHYIHKLLIISL

SEQ ID NO: 257452 - protein, 298 aa, Glycine max
  Clone ID: PAT_MRT3847_74502C.1.pep
MESPFRPEILKGKVALITGGASGIGFEISTQFGKHGASVALMGRRKQVLQSAVSVLQSLVIPAVGFEGDVRKQEDAARVVESTFKHFGRIDILVNAAAGNFLVSAEDLSSNGFRTVLDIDSVGTFTMCHEALKYLKKGGEGRSNSSSGGSIINISATLHYTASWYQIHVSAAKAAVDATTRNLALEWGTDYDIRVNGIAPGPISGTPGMSKLAPDEISSKARDYMPLYKLGEKWDIAMAALFLVSDAGKFINGDIMIVDGGLWLSRPRHLAKEAVKQVSRSVENRSRNASVSVPKSKL

SEQ ID NO: 257453 - protein, 58 aa, Glycine max
  Clone ID: PAT_MRT3847_74503C.1.pep
FSSILRCVQRHFRECPPRQVDTCVLFNEHLAESPPLRSGGSVKGTLESTMMCKHVERD

SEQ ID NO: 257454 - protein, 175 aa, Glycine max
  Clone ID: PAT_MRT3847_74504C.1.pep
MSKNPKVFFDILIGKMKAGRVVMELFADATPKTAENFRALCTGEKGIGRSGKPLHYKGSVFHRIIPEFMCQGGDFTRGNGTGGESIYGSKFEDENFNLRHTGPGILSMANAGAHTNGSQFFICTTKTPWLDGKHVVFGKVVDGYSVVQEMEKVGSGSGRTSEPVVIEDCGQIVEK

SEQ ID NO: 257455 - protein, 251 aa, Glycine max
  Clone ID: PAT_MRT3847_74505C.1.pep
MGNPRKPSTADELHTAARSGDLIAVNSILASNPLAVNSRDKHSRTPLHLAAFSGQAEVVTYLCKQKADVGASAMDDMAAIHFASQKGHLEVVRALLSAGASLKATTRKGMTSLHYAVQGSHMELVKYLAKKGANLGAKTKAGKTPLDLATNEEIRSFLEEYEKSAKNGELGKKDKDKAEESDPKTSTLGSEGDLSSEPAAAAIDEEDNVGEKRKKGNEDGTREEESSQPKKARVNLSHLQSSDDTQEEENL

SEQ ID NO: 257456 - protein, 107 aa, Glycine max
  Clone ID: PAT_MRT3847_74506C.1.pep
VLVPLITCECIQNTKSNMLRSGDYRTHVSEVERESSTVEYPNAHVSLNKKVVYEESEIEGSHHHHHHLFHRHHHPETRESVKVVEYEQVPERRVAEVVYEENRTVWP

SEQ ID NO: 257457 - protein, 59 aa, Glycine max
  Clone ID: PAT_MRT3847_74507C.1.pep
VYTSRSQSVSKPYVLRCSLVLLDLFYATHLACAGIYDCHSRYSNGHTSVCSQVYVSARV

SEQ ID NO: 257458 - protein, 69 aa, Glycine max
  Clone ID: PAT_MRT3847_74508C.1.pep
VPGPKRPPFGPREGEIHFLFGAHSVGLIGPIIIILRLGEAVFHPFLPRIMDQVKRVGPLFAKGTLSFPA

SEQ ID NO: 257459 - protein, 61 aa, Glycine max
  Clone ID: PAT_MRT3847_74509C.1.pep
SPSHCLWRYIKVRQQSILDSRSAWLIQSTVAIFTRPFSAMSRSSHSLLSCEYEDKDYPDVL

SEQ ID NO: 257460 - protein, 36 aa, Glycine max
  Clone ID: PAT_MRT3847_7450C.1.pep
SFVYKTQLLGEAFLISLPLLKLQILIWRRINRLPIQ

SEQ ID NO: 257461 - protein, 45 aa, Glycine max
  Clone ID: PAT_MRT3847_74510C.1.pep
PKSIRVRSVGHVYKCKSKIFKILKNKLVWYISVCLKVYFFEKNFF

SEQ ID NO: 257462 - protein, 52 aa, Glycine max
  Clone ID: PAT_MRT3847_74511C.1.pep
GGSMLKGRPFVLDRSKPYSIVSTMPLSSVRSTNFRRVRYACPSSYIMCALLF

SEQ ID NO: 257463 - protein, 190 aa, Glycine max
  unsure (1)..(190): unsure at all Xaa locations
  Clone ID: PAT_MRT3847_74512C.1.pep
MSPPLLVTEEDEGQSNASMVASASSPSSECFTLNEARLKERNYLGLSDCSSVDSSIVPSLSDEKKENLNLKATELRLGLPGSQSPERDPDLFSLSSTKLDEKPLFSLLPTKDGICSLSQKTVVSGNKRGXADTIDPEFPGNAGINMMLSPKPSGVKPTTVKEIPSKVLQEHXFCSKXEXGHNHTGASISS

SEQ ID NO: 257464 - protein, 45 aa, Glycine max
  Clone ID: PAT_MRT3847_74513C.1.pep
HPEGREELEVVESFAGRLCVENWICCKLQMLNRPCAPIPIFLFKR

SEQ ID NO: 257465 - protein, 42 aa, Glycine max
  Clone ID: PAT_MRT3847_74514C.1.pep
QDSFRPICHYYDGPKFRLELDVHTAMSLLDMFAEQHAFNDTF

SEQ ID NO: 257466 - protein, 168 aa, Glycine max
  unsure (1)..(168): unsure at all Xaa locations
  Clone ID: PAT_MRT3847_74515C.1.pep
MKESTMGNPLRLQSVNHISLICRSVEQSMDFYQNVLGFYPIRRPGSLDFDGAWLFGYGIGIHLLEAENPENLPKKKEINPKDNHISFQCESMEPVEKKLKEMEIDYVRATVEEGRIQVDQLFFHDPDDFMIEICNCDSLXGEVARSCSLVNLEKMQNQQQIQKMLQQL

SEQ ID NO: 257467 - protein, 45 aa, Glycine max
  Clone ID: PAT_MRT3847_74516C.1.pep
KPNGRFFSYNPATKKTTLLAQDLYFANGVAVSADQQFVVFCESVL

SEQ ID NO: 257468 - protein, 69 aa, Glycine max
  unsure (1)..(69): unsure at all Xaa locations
  Clone ID: PAT_MRT3847_74517C.1.pep
HFHLLYHNXIPLYLVXWWSFCXVGTVSYRVINLFFVVPKSDGYSISFEYSSXVRKTCMQVGVASFSIHL

SEQ ID NO: 257469 - protein, 45 aa, Glycine max
  Clone ID: PAT_MRT3847_74518C.1.pep
LARYNKKPPLSSRGIQTAGGLVPPGGWAQPPVFEGTKAVPKFPSS

SEQ ID NO: 257470 - protein, 60 aa, Glycine max
  Clone ID: PAT_MRT3847_74519C.1.pep
IIVRRQNSRAKRPEETCVPDLHCTTNYNPDKQHHPALLTSRKEKEDSDNKSITLIKVPVR

SEQ ID NO: 257471 - protein, 217 aa, Glycine max
  Clone ID: PAT_MRT3847_7451C.1.pep
MGVDFYKILQVDRSAKDEDLKKAYRRLAMKWHPDKNPNNKREAEAKFKQISEAYDVLSDPQKRGVYDQYGEEGLNGVPMGAGGFPGGGGGGSSGDGGATSFRFNPRSADDIFSEFFGFSRPFGGGMPDMGGRAGGSGFSRGGPFGEDIFAQFRSAAGEGSGHMPRKGAAIERPLPCSLEDLYKGTTKKMKISRDVSDASGRPKTVDEILTIVLELWR

SEQ ID NO: 257472 - protein, 46 aa, Glycine max
  Clone ID: PAT_MRT3847_74520C.1.pep
MTSKDSTSKYKTLSHKKPTKICQCTTVIANIITQAQSITLKDKIRQ

SEQ ID NO: 257473 - protein, 57 aa, Glycine max
  Clone ID: PAT_MRT3847_74521C.1.pep
GSYPNEFSCIFLMCGLQKYGVRIQFITLRAFFSSVSFICQGSDINYTSKETHQKFPE

SEQ ID NO: 257474 - protein, 59 aa, Glycine max
  Clone ID: PAT_MRT3847_74522C.1.pep
YSGSFADFISFGLRIGLVMLTHSSDSHMSIFASAISRACAIALHPRGSARVGVHACSRV

SEQ ID NO: 257475 - protein, 60 aa, Glycine max
  Clone ID: PAT_MRT3847_74523C.1.pep
STNKATLTKPPTNSFKFWPKPLSSSTLQSITFFFSSSCSQSTYKITLLNYSFDYHHTFST

SEQ ID NO: 257476 - protein, 133 aa, Glycine max
  unsure (1)..(133): unsure at all Xaa locations
  Clone ID: PAT_MRT3847_74524C.1.pep
KDDGPSMGKIYXLGGPKIFSVHELADVMFYPIXKWPPYVKGPFPLAKALATPKEIFFNKVPFPLPVPEILNLDKIQAFAPKTVVLKKAFPFNDFGIVPPQLKGNPIGFFFSKRKGGPPFGFSISERGPPNFWP

SEQ ID NO: 257477 - protein, 53 aa, Glycine max
  unsure (1)..(53): unsure at all Xaa locations
  Clone ID: PAT_MRT3847_74525C.1.pep
XAXXGXXTXTADKXCXNAXXXXXXSRVFXXEGXSXRRSPESRVXLRXXVAMQT

SEQ ID NO: 257478 - protein, 58 aa, Glycine max
  Clone ID: PAT_MRT3847_74526C.1.pep
YTYNGGFIYQPVLALHPYSSITCRIISSLININTYHPVLYSISTHNSTHHTTPNHKVQ

SEQ ID NO: 257479 - protein, 78 aa, Glycine max
  Clone ID: PAT_MRT3847_74527C.1.pep
VKLQQQRGSQEKGSDGAEKVIVAVKASQEIPKTALVWSLSHVVQPGDCTTLLVVAPSQSSGRRLWGFPRFAGDCASGI

SEQ ID NO: 257480 - protein, 64 aa, Glycine max
  Clone ID: PAT_MRT3847_74528C.1.pep
YNQSYRTTPTCVASLSTLIFILPPSNMSKHSCAAKSSVHLRVIQFAPYIRTNVKQITRTVPRIR

SEQ ID NO: 257481 - protein, 69 aa, Glycine max
  Clone ID: PAT_MRT3847_74529C.1.pep
WFVVNRTTPLPGSIPTLCSVLHVKRQGTNYPLPICCPIYKIENHSICICNPSQGQKFMLILSNSYNGSG

SEQ ID NO: 257482 - protein, 50 aa, Glycine max
  Clone ID: PAT_MRT3847_7452C.1.pep
SLLGGRRHPWTLGFGQKTNWANAIRWGPVWFCEKCPNQLFYMYGIPILWK

SEQ ID NO: 257483 - protein, 127 aa, Glycine max
  Clone ID: PAT_MRT3847_74530C.1.pep
PRVRLVAGLLGVESGQDAVWRELLYERKEQLVPPYGVAVEEFTNRISILRSKLGNRGLKDEGIVVPTGLGAEGKVRGNILAGDVNSLAYSRTPEEILRIVYGIGDEHVRGGFYPKGASGHIAQSYLK

SEQ ID NO: 257484 - protein, 42 aa, Glycine max
  Clone ID: PAT_MRT3847_74531C.1.pep
ARDYTVESIPEDRRPAVHSFVANSHMEPAFMCHGRSNISRYG

SEQ ID NO: 257485 - protein, 121 aa, Glycine max
  unsure (1)..(121): unsure at all Xaa locations
  Clone ID: PAT_MRT3847_74532C.1.pep
KSIRKAGILFHALEKDLSNSRLELAEREKRINDILHNEANLKLDSEKHRKLMAQFKQRIDVLSREKEDLGKENQQLSRQLDAIKQGKRSTSDTTGEQAMKEEKDTRIHPLEPHXEXLRDEK

SEQ ID NO: 257486 - protein, 173 aa, Glycine max
  unsure (1)..(173): unsure at all Xaa locations
  Clone ID: PAT_MRT3847_74533C.1.pep
XDQRDSHVTTXVRGTVGHIAPEXXXXXXXXEKTDVFGFGILLLELITGHKALDAGNGQVQKGMILDWVRTLFEEKRLEVLVDRDLRGCFDPVGLEKAVELSLQCTQSHPTLRPKMSEALKILEGLVGQSVRPEESQGGTNLYDEITCSFSQNYGDAHEEPSFIIEAIELSGPR

SEQ ID NO: 257487 - protein, 64 aa, Glycine max
  Clone ID: PAT_MRT3847_74534C.1.pep
HCFPLSQKLKALTSATNSSYLFYIPYNAAADSFAKFGLSMKQQAASIFSACPSFCQNFIGKKYR

SEQ ID NO: 257488 - protein, 243 aa, Glycine max
  Clone ID: PAT_MRT3847_74535C.1.pep
GSRLDYTYLFDLKSALYKLDDPSGLISALHELDEKEWDHVEITYGGIIETSLLKATGIHVFRQDDIRYDDPYGKRKLEHDLNSSESQSLIKKPRLFCRLSRWVGPERIINILGNAADGALFTNAERRFRHISMDSCWRCGLLEETCLHALRDCPAVAEFWRSVLPKKLAPKFFNGDVTVWLERNLSFSEAGFFWPAFFGIAVELLWQFRNHYVFYKNDTVGLRDMRYIVFKRYEDYMRAHASH

SEQ ID NO: 257489 - protein, 367 aa, Glycine max
  Clone ID: PAT_MRT3847_74536C.1.pep
MKFSRPIFSYSLIALEWLRYPSNCLPSNFNSNKLVVCKLPDGCFTSIGFHGSQKKFRNIKVLKFDKCKFLSQIPDVSHLPSLEELSFERCDNLITVHDSIGFLNKLKILSAKGCSKLRTFPPLNLTSLENLQVSDFPIGLESRVLDVRRLLDAGSDDGVHMIGIHGMGGLGKSTLARAVYNELIIAEKFDGFCFLANVREKSDKKDGLEHLQRILLSEILGEKNISLTSTQQGISIIQSRLKGKKVLLILDDVNTHGQLQAIGRRDWFGPGSKIIITTRDEQLLAYHEVNETYEMKELNQKDALQLLTWNAFKKEKADPTYVEVLHRVIAYASGLPLALEVISSHLVGKSIKRIASFHFKILLDSKV

SEQ ID NO: 257490 - protein, 107 aa, Glycine max
  Clone ID: PAT_MRT3847_74537C.1.pep
PLVSGIYLKNPWLIKGEWCHYYLCQLFWPKIPYFSSSIKWTFTFLISMGEKNYYRFIFFKNLAWSLALPWRPRLRPFSLGLFRGEGYKYRYLIPVLKNKSSCLLAYK

SEQ ID NO: 257491 - protein, 120 aa, Glycine max
  Clone ID: PAT_MRT3847_74538C.1.pep
ATSLQQGKVLLCLDDGGVHAEQEPQLLGTTENELGIRKWIEEQGHTLVTTSDKEGPNSKFEKELEDAEVIITTPFHPGYLTKERLAKAKNLKLCVTAGIGSDHVDLDAANKTNGGLTVAE

SEQ ID NO: 257492 - protein, 91 aa, Glycine max
  unsure (1)..(91): unsure at all Xaa locations
  Clone ID: PAT_MRT3847_74539C.1.pep
GFGXFPFASENSIKDAIEGINGQNLSGGTITLIKVQSPGNPGGNGGCCKRGXNPLGGGYEGGGYGGDKNCGYGAGGSPYFRGGDVNGNRKN

SEQ ID NO: 257493 - protein, 153 aa, Glycine max
  Clone ID: PAT_MRT3847_7453C.1.pep
MGVDYYKILQVDRSAKDEDLKKAYRRLAMKWHPDKNPNNKKEAEAKFKQISEAYDVLSDPQKRGIYDQYGEEGLNGVPPGAGGFPGGGDGGPTSFRFNPRSADDIFSEFFGFSRPFGGGMGDMGGRAGGSGFSRGGPFGEDIFAQFKSAAGES

SEQ ID NO: 257494 - protein, 76 aa, Glycine max
  Clone ID: PAT_MRT3847_74540C.1.pep
MERPRYGGPHGPYRGGGGGRGRQGGHTHGETGEEGRPRRAHQHHRGTGRGAEFRRPGSGRGNWSTQNDHIAVDTEE

SEQ ID NO: 257495 - protein, 237 aa, Glycine max
  Clone ID: PAT_MRT3847_74541C.1.pep
ESVFGQGFVSTGGLETTKEFVAKLGLKPGQKVLDVGCGTGGGDIYMAENFDVEVVGIDLSINIISLAIERAIGLKCCVEFECADCTKKTFPVNTFDVIYSRDTLLHIKDKPSLFRSFYKWLKRGGTLLITDYCKSEGSLSLGYAEYIKKGGYYIHDMKTYCRMLENAGFDDVVAEDRTNLFMKTLQQELNALHSKKDDFIDDFSEEDYNEITERWKAKQMRGADGEQIWSLFIAKKE

SEQ ID NO: 257496 - protein, 113 aa, Glycine max
  unsure (1)..(113): unsure at all Xaa locations
  Clone ID: PAT_MRT3847_74542C.1.pep
MLIVIVGCVCVLDLVKEALQKGVGFYSTFLVADKLIVTTXHNNHDEKLRRGTKITLFLKDDQLEYLEETRIKDLVKKHSQFITHPIYLWTEKTTEKEISDDEPKKEGNVEDDD

SEQ ID NO: 257497 - protein, 105 aa, Glycine max
  unsure (1)..(105): unsure at all Xaa locations
  Clone ID: PAT_MRT3847_74543C.1.pep
XXTHXRXXAXDAVXXXXPXPXXXXXXXLXXXPXXXAAIXSXXXFHQXPLXGXXQXAIXNRXAHNXGTXSXXXKXXXXWPXRGPXSXXAKTHGXKXEQXRQXRXRW

SEQ ID NO: 257498 - protein, 132 aa, Glycine max
  unsure (1)..(132): unsure at all Xaa locations
  Clone ID: PAT_MRT3847_74544C.1.pep
KRERRDARGHRTGNAGPTHVFELTQTPKDAGKGRGNKPRTPXHRRKXTTRNKTRANGTKPGTASTRQKGTTPQSKTQQTAGKQRGTARTPTEADXESGADAKRQRTRXGGGRKQDKTRERNTQTQRAPKRKP

SEQ ID NO: 257499 - protein, 62 aa, Glycine max
  Clone ID: PAT_MRT3847_74545C.1.pep
QRTCLSTSMRNHITINNSKHNRRYIIHQDTLDMIRSGPNRDNTPVFLHQHIQIQGSRVNLRT

SEQ ID NO: 257500 - protein, 63 aa, Glycine max
  Clone ID: PAT_MRT3847_74546C.1.pep
MTIYGWSSDTMSIPYYTIQLYCCQSVISVLSCPLSRTILQSTFLYLPLNYIYTTNIFIQLIYN

SEQ ID NO: 257501 - protein, 75 aa, Glycine max
  Clone ID: PAT_MRT3847_74547C.1.pep
ITSSRGSSRQHHQKSSRQHPNVGRNHPVNPGRTVAVSQNLQSSGPIGISSFDNTNFQFGPHSKMAGFVKKDGSSS

SEQ ID NO: 257502 - protein, 93 aa, Glycine max
  Clone ID: PAT_MRT3847_74548C.1.pep
FWATTPGTTSPTSLATTNVGCHGRPNIDPMLNACTTRDPIPNPSRPMDTQFMMNPAMWNPALNNPVGFFPPELSTVMPTTFTDSPRPPTEAQS

SEQ ID NO: 257503 - protein, 659 aa, Glycine max
  unsure (1)..(659): unsure at all Xaa locations
  Clone ID: PAT_MRT3847_74549C.1.pep
MITFMDTKEKSKEVERCLDPQLWHACAGGMVQMPTVNSKVYYFPQGHAEHACGPVNFRTCPKVPPFVPCRVTAVKYRADPETDEVYAKLKLIPLNANDVDYDRDVVGGAETQDKPASFAKTLTQSDANNGGGFSVPRYCAETIFPRLDYSVDPPVQNILAKDVHGETWKFRHIYRGTPRRHLLTTGWSTFVNHKKLVAGDSIVFLRAENGDLCVGIRRAKKGICGGLETSSGWNPAGGNCHIPYGGFSPFLREDDNRILRNGNSNGLNPSVSMMGKGKVRPEAIIEAANLAANKKPFEVVYYPRASTPEFCVKASLVEAAMQTRWYSGIRFKMAFETEDSSRISWFMGTISSVQVADPLNWPNSPWRLLQVTWDEPDFPLDGQIPLPTLPNNLLGPNNTNQFGCLLESTPAESARARHAHYGLSLSDLHLSKLQSGLSSAGFPPLDHTATPMKVSNNKTLQKPSISENVSCLLSMTNSTRSSKKLDAGKTPSLMLFGQKILTEQQISPSSSVDTLSPVLTRNCSTDGNVNKVTNFFDGFGSALHQQGLHEHSSCEQVPXCKDNPQETEAGLEIGHCKVFMESEDVGRTMDLSLLPTYDEFHRKLADMFGIEKSEMLSRVLYCDSVGAIKHIGDEPFSDFTRTAKRLTILMDSGSNNVGV

SEQ ID NO: 257504 - protein, 79 aa, Glycine max
  Clone ID: PAT_MRT3847_7454C.1.pep
MTIQRDYGKQTSQLIQIPSDGNQYTTITSNSSRASTSSYGNTNSPISTDVDVNQLPDEIGLWVQFKLNSYQHCMSECSQ

SEQ ID NO: 257505 - protein, 84 aa, Glycine max
  Clone ID: PAT_MRT3847_74550C.1.pep
IGCNFCYKNLAYFFVVTLVLWEGIEMCACNLFERQCPVFSSFFPPYFLTVQYMDLIFTCFILCVNNRYDILKKLLYVILHFMHC

SEQ ID NO: 257506 - protein, 157 aa, Glycine max
  Clone ID: PAT_MRT3847_74551C.1.pep
DFDEYSSVTWLKVLDIGMEKFPQLQVLHMKNMPVVQWRLEIGAMPRLRHLVIKSCDKLSKLPEELWSMTALRLVHVHVFQLYPELADSLKNVEPRNGCKLIISNKCFTTVGVRQMQVGPSSYIASLKIVVILYPSSYMVMFGGSRHSVFPNINVTLH

SEQ ID NO: 257507 - protein, 137 aa, Glycine max
  Clone ID: PAT_MRT3847_74552C.1.pep
PQLPEKSDVYSYGVLMLELITAKRPIERGKYFVKVVRKEIYKPKDFYGFEKILGPPLGLGSPLKGLEMFVDLAMKCVEDSRPDRPPMNDVVKEIENVLLLAGLNCSTESNSSRYAEVSVQFSPSLQQWGFFVSSLYD

SEQ ID NO: 257508 - protein, 46 aa, Glycine max
  Clone ID: PAT_MRT3847_74553C.1.pep
GALMGDDIYSDVAILPAHRWLGIIKPICSTNIYYTTTREELLTYQN

SEQ ID NO: 257509 - protein, 47 aa, Glycine max
  Clone ID: PAT_MRT3847_74554C.1.pep
SFLSHKHTPLLFSPSISHTASHGRIAQNPTLPGRPNPLHITSPSFLH

SEQ ID NO: 257510 - protein, 60 aa, Glycine max
  Clone ID: PAT_MRT3847_74555C.1.pep
TNVPLTNSEKLSGDERNDTMEKIKDAREHWGFSEHGNQGIPNDILDTVDRLTKEHYRKCM

SEQ ID NO: 257511 - protein, 70 aa, Glycine max
  unsure (1)..(70): unsure at all Xaa locations
  Clone ID: PAT_MRT3847_74556C.1.pep
PELKKLQETVSPLHEEMFYLRXKKKKMQGPPRPTPTRMVWVSLPSPFGCLPGAGMQLWPLKTLFEKKKPI

SEQ ID NO: 257512 - protein, 90 aa, Glycine max
  Clone ID: PAT_MRT3847_74557C.1.pep
ITELAGCDRLTISPALLEELTKSTDKLAKKLDPETAAKAYSGEKLSYDEKDFRLSMNEDAMATDLLAEGIRGFSADIVKLEQILKAKLSA

SEQ ID NO: 257513 - protein, 83 aa, Glycine max
  unsure (1)..(83): unsure at all Xaa locations
  Clone ID: PAT_MRT3847_74558C.1.pep
XXXXXXXXGSXXXKXNXNPSQDNHHGHLCYSAISIHWSNCLKQSMIRPQTWAERRXHGDXGVXDWNHILHHITMYXIIXAXYX

SEQ ID NO: 257514 - protein, 318 aa, Glycine max
  unsure (1)..(318): unsure at all Xaa locations
  Clone ID: PAT_MRT3847_74559C.1.pep
MPSSPKSYAISYARQPTRRSTLYLFLSALLLLFLFGIVAFLAQIRGSRCVNAHPRSVRVVWEHSAGAGTVAGDGGRHKVMGFVGIQTGFGSAGRRVSLRKTWFPSDRQGLQRLEEATGLAFRFIIGRTSDRAKMSALQKEVAEYDDFILLDIQEEYSKLPYKTLAFFKAAYALFDAEFYVKADDDIYLRPDRLSLLLAKERSHPQTYIGCMKKGPVFTDPKLKWYEPLSHLLGKIXMLSKACFRMFSNEDVTIGAWMLAMNVNHENNHELCATVYCTASIAVWDIPKCSGLCNPEKKMLELHQKEACSKSPTLESDDE

SEQ ID NO: 257515 - protein, 54 aa, Glycine max
  Clone ID: PAT_MRT3847_7455C.1.pep
VSKYVNCFSTFLKGIHFKKLKRLISAFYVLVFIPFVSPNLSDYPSCIGVYMVTV

SEQ ID NO: 257516 - protein, 320 aa, Glycine max
  Clone ID: PAT_MRT3847_74560C.1.pep
MPSSPKSYAISYARQPTRRSTLYLLLSALFLFGIVAFLGQIRGSRCVNAHPRSVRIVWEHSAGNGAAGSGVGDGDRHKVMGFVGIQTGFTSAGRRESLRKTWFHASGQGLQRLEEATGLAFRFIIGRTSDRAKMSALQKEVAEYDDFILLDIQEEYSKLPYKTLAFFKAAYALFDAEFYVKADDDIYLRPDRLSLLLAKERSHPQTYIGCMKKGPVFTDPKLKWYEPLSHLLGKEYFLHAYGPIYVLSADVVQSLVALRNDSFRMFSNEDVTIGAWMLAMNVNHENNHELCATDCTATSIAVWDIPKCSGLCNPEKKMLE

SEQ ID NO: 257517 - protein, 66 aa, Glycine max
  Clone ID: PAT_MRT3847_74561C.1.pep
RILPSSFGFLGPKCALWDCAKPAQGVDWCPNYLSSFYAGLAFNGRAPRMGPVLRTGGIWLKGKLLF

SEQ ID NO: 257518 - protein, 131 aa, Glycine max
  Clone ID: PAT_MRT3847_74562C.1.pep
RCKRTPTRALGRSRHGESEIKSKRRVTRNQKRKNGSSTSHNHSFSRPAVAVRCTTALINRDDQTTFFFTNFRETHKAKDMWNIFHLHGKIMEVYIPTKMDRRGEIFRFSRFESIADPQILSLKLDKIFIGN

SEQ ID NO: 257519 - protein, 98 aa, Glycine max
  unsure (1)..(98): unsure at all Xaa locations
  Clone ID: PAT_MRT3847_74563C.1.pep
MANEKNHLDNTNMMPCNADEAHLRGVQKRPWGRYADEIRDPGKKTRVWLGTFDTDEDAXRAYDVTVRNFRGPXVKTNFPLLPDNNINVNLNMKSNNVY

SEQ ID NO: 257520 - protein, 36 aa, Glycine max
  Clone ID: PAT_MRT3847_74564C.1.pep
FSNLLLLPLSSLFPYKHLNLLTFFLKLYPLMVNNSI

SEQ ID NO: 257521 - protein, 73 aa, Glycine max
  Clone ID: PAT_MRT3847_74565C.1.pep
FPFSDSNLAIYVDTPCQPAPDVLLLTFVQNAQRSPSTGATTVEPIYRHLYLLTLCQSLTSPWSPNGDPSCGSM

SEQ ID NO: 257522 - protein, 97 aa, Glycine max
  Clone ID: PAT_MRT3847_74566C.1.pep
AQTIAPVRPNLVPVRVTHQVNLVTRHRRPASTLHKLVTRMIEALAELVERYLPKPGENVQDNLRLDRGLKLCWDQALNCSRAISLYCINHLYHLSLC

SEQ ID NO: 257523 - protein, 742 aa, Glycine max
  unsure (1)..(742): unsure at all Xaa locations
  Clone ID: PAT_MRT3847_74567C.1.pep
NTFHYAGVSAKNVTLGVPRLREIINVAKRIKTPSLSVYLRSDVGKTKERAKSVQCALEYTTLRSVTQATEVWYDPDPMSTIIEEDADFVKSYYEMPDEEVALEKISPWLLRIELNREMMVDKKLSMADIAEKINLEFEDDLTCIFNDDNAEKLILRIRIMNDEAPKGEIQDESAEDDVFLKKIESNMLTEMTLRGIPDINKVFIKNTKVQKFDGPEAFTTHASGMLDTEGVNLLAVMCHEDVDVTRTTSNHLIEVIEVLGIEAVRRALLDELRVVISFDGSYVNYRHLAILCDTMTYRGHLMAITRHGINRNDTGPMMRCSFEETVDILLDAAVYAETDYLRGVTENIMLGQLAPIGTGECALYLNDEMLKNAIELQLPSYMDGLDFGMTPARSPISGTPYHEGLMSPSYLLSPNLRLSPTSDAQFSPYVGGMAFSPTSSPGYSPSSPGYSPSSPGYSPTXPGYSPTSPGYSPTSPGYNPQSANPYSPTSPNYSPRSPGYSPTSPAYSPTSPTYFSVDNVXSPTSPSYSPTSPSYSPTSPSYSPTSPSYSPTSPAYSPTSPAYSPTSPSYSPTSPSYSPTSPSYSPTSPSYSPTSPSYSPTSPAYSPTSPGYSPTSPSYSPTSPSYSPTSPSYNPQSAKYSPSLAYSPSSPRLSPSSPYSPTSPNYSPTSPSYSPTSPSYSPSSPTYSPSSPYNSGVSPDYSPSSPQFSPSTGYSPSQPGYSPSSTSQYTPQTSDKDDGGTR

SEQ ID NO: 257524 - protein, 183 aa, Glycine max
  unsure (1)..(183): unsure at all Xaa locations
  Clone ID: PAT_MRT3847_74568C.1.pep
FDGLDFGMTPAGSPISGTAYHEGLMSPSYLLSPNLRVAPTTDAQFSPYVGGMAFSPTSSPGYRPSSPGYSPXSPGYSPTSPGYSPTSPRYKXQSIVSKVRSSXRPTSPTYSPTSPSYTPTSPAYSPSSPTYSPAALIGVSPDSPSSPQFSPSTGYSPSQPGYSPSSTSQYTPQTSDKDDGGTR

SEQ ID NO: 257525 - protein, 70 aa, Glycine max
  unsure (1)..(70): unsure at all Xaa locations
  Clone ID: PAT_MRT3847_74569C.1.pep
YSPTSPSYSPSSPTYSPSSPXNSGVSPDYSPSSPQFSPSTGYSPSQPGYSPSSTSQYTPQTSDKDDRGTR

SEQ ID NO: 257526 - protein, 197 aa, Glycine max
  Clone ID: PAT_MRT3847_7456C.1.pep
MLRRATTSLISGASRRRLSTDVPATPAADSVFAEAWKKVSPNIDPPKTPLAYMKPRPPTPSTLPSKLTVNFVLPYASQLAAKEVDMVIVPATTGQMGVLPGHVATIAELKPGVLSVHEGNDVTKYFVSSGFAFIHANSVADIIAVEAVPVDRIDVNLVQKGLQEFTQKLNSATTDLEKAEAQIGVDVHSALNSALSG

SEQ ID NO: 257527 - protein, 50 aa, Glycine max
  Clone ID: PAT_MRT3847_74570C.1.pep
EHRIVEFDKNKKLKSLSVYLYFTSPATSFPTISLLLSKSNTQQIKSQLRN

SEQ ID NO: 257528 - protein, 68 aa, Glycine max
  Clone ID: PAT_MRT3847_74571C.1.pep
EKEEKKPEENKVEEKKAEEEEKKEEEKKSEESKDDKESKEEPVPLEIVQGTTFAMHGHFKHDFWHLLS

SEQ ID NO: 257529 - protein, 35 aa, Glycine max
  unsure (1)..(35): unsure at all Xaa locations
  Clone ID: PAT_MRT3847_74572C.1.pep
VWGLILYFFXGFIKKNYWAPIGLFNIQIKCLHYNP

SEQ ID NO: 257530 - protein, 130 aa, Glycine max
  Clone ID: PAT_MRT3847_74573C.1.pep
MLRGALSLAHSATNKAIANQDTVVREIKPKIRTIMPAGGPDDEDNRWTPLLKPLLKESCYVQCKSHADSHNIECNMYSLDCMNGPLCSLCLDHHTDHRAIQIKRYSYHDAIMDYEIHKALDITGVQTYIM

SEQ ID NO: 257531 - protein, 67 aa, Glycine max
  Clone ID: PAT_MRT3847_74574C.1.pep
ETLGSSSSTSIHTNITTTNIPTLFNSSRRLHYTLTSNPILCTRQRSTSLNPTVVRMIIRNLKMLLLR

SEQ ID NO: 257532 - protein, 55 aa, Glycine max
  Clone ID: PAT_MRT3847_74575C.1.pep
KKQKGLLMMSVYISRGFYGHTQLSQKNRSLDLYEATPYTEKQRKTRPSTRFNNHE

SEQ ID NO: 257533 - protein, 152 aa, Glycine max
  Clone ID: PAT_MRT3847_74576C.1.pep
MKLEVEVISKEMIKPSSPTQDHLRHYPLSFLDQVSPMVYNPMVLFYSCYGITQTQFTISEKLKKSLSDVLTHFYPLAGRVNGNSTFIDCNDEGIPYLEAKVKCKVVDVIHKPVPGELNHLVPFLLDDITNITFGVQLNVFDCGGIAIGACLS

SEQ ID NO: 257534 - protein, 103 aa, Glycine max
  Clone ID: PAT_MRT3847_74577C.1.pep
GRAGQGRRRSESNRRREEATGGRSEGGGGRGKGMTRGKQKIDAQRRNAERNQKSKGSQLEARAVGLKIVCSICKVQLANEKQLTDHYGSKHPKEKPPSTSSTE

SEQ ID NO: 257535 - protein, 99 aa, Glycine max
  unsure (1)..(99): unsure at all Xaa locations
  Clone ID: PAT_MRT3847_74578C.1.pep
TVKDDRSTTEEMLYCDSLIHPEETVDTGKTLAQLSGDTMNDYYPMDHVXDEKRHLSKCDVEFLNKVNVVDDKYSTLSDKTLTNGKRTELYEREAFYAAD

SEQ ID NO: 257536 - protein, 226 aa, Glycine max
  Clone ID: PAT_MRT3847_74579C.1.pep
MSRLRRLIQASVDATKKVISGNLDDLMPPPERPIFSFNSKQELSKWHLYSDSEFGGLSSASLQITESENGATSGIFSGNLSLDVSEGSKWNITRSGFCGMRSKKFDGFIDLDSYDTIAMKLKGDGRCYISTIYTENWVNSPGQMEDNSWQAFVYVPEGNWYITKIPLARYLPTWRGNVIDAQIEMNPSRVLGMSLSVNAEGGVPGARSGPGDFRVELDWIKAMRTE

SEQ ID NO: 257537 - protein, 65 aa, Glycine max
  Clone ID: PAT_MRT3847_7457C.1.pep
KREHSSCSLILIHQTLVLTRGAKWEVFLKPNLHLKKKNNFKGKDHPTFKLGFFTHSCVLYSLPNS

SEQ ID NO: 257538 - protein, 63 aa, Glycine max
  Clone ID: PAT_MRT3847_74580C.1.pep
VALSHSVSDVSIDLDVVMEPLHFHFLEPFFLFNPRYSVRCNAGVVGFFLPLLLDRSDVCGDTE

SEQ ID NO: 257539 - protein, 89 aa, Glycine max
  Clone ID: PAT_MRT3847_74581C.1.pep
MMHSVKGGWGRTFALANHNDSEGRKTRIRRSKQERKAMVESFIKKYQELNNGNFPSLNLTHKEVGGSFYTVREIVRDVIQENRVLGPAK

SEQ ID NO: 257540 - protein, 146 aa, Glycine max
  unsure (1)..(146): unsure at all Xaa locations
  Clone ID: PAT_MRT3847_74582C.1.pep
HPAASGTFFTLMLLGLKYCSCQFQGNLQKFQMGLQLLEDRIYRASLGWFSFEPEWYDTNYTNFAQCEAQSVSLFVQYLTNMKGDTVQVGSKGNGQENGNPLADVSDHHHPVWGQMENYAAXREKRRQLLLMLCQHEADRLDVWAQP

SEQ ID NO: 257541 - protein, 55 aa, Glycine max
  Clone ID: PAT_MRT3847_74584C.1.pep
KMEITYDLHIRWGVLMGEDSTPNPVFTYNYKNLNTWFIKSMLQLTVILLANIHLV

SEQ ID NO: 257542 - protein, 89 aa, Glycine max
  Clone ID: PAT_MRT3847_74585C.1.pep
TPPFLFFLKKNPGFAPPRFLRRGTFSLPLGENLFPMVFSLFFSGKNMGMGVLLGFSRGPFSKGGFQTPWFFFSSRFFWNFRLKNPPFSG

SEQ ID NO: 257543 - protein, 51 aa, Glycine max
  unsure (1)..(51): unsure at all Xaa locations
  Clone ID: PAT_MRT3847_74586C.1.pep
TTGVTAENSGGTQLNCLAVHASLSSPRHNEEATTDRPLXQMGSLHGQWDTP

SEQ ID NO: 257544 - protein, 52 aa, Glycine max
  Clone ID: PAT_MRT3847_74587C.1.pep
SVIGVKKKKKKKKKKKKKKKKKKKKKKKKKKKKKKKKKGRPLKKNKPKKKRQ

SEQ ID NO: 257545 - protein, 409 aa, Glycine max
  Clone ID: PAT_MRT3847_74588C.1.pep
KIVSNGVGLVPPHLAHLLYEGLHSRLESAGIDGVKVDVIHLLEMLSEEHGHRIELAKAYYKALTASVKKHFKGNGVIASMEHCNDFFLLGTEAIALGRVGDDFWCTDPSGDPNGTYWLQGCHMVHCAYNSLWMGNFIQPDWDMFQSTHPCAEFHAASRAISGGPVYVSDCVGKHNFKLLKSLALPDGTILRCQHYALPTRDCLFEDPLHDGKTMLKIWNLNKYTGVLGLFNCQGGGWCPVTRRNKSASEFSQTVTCLASPQDIEWSNGKSPICIKGMNVFAVYLFKDHKLKLMKASEKLEVSLEPFTFELLTVSPVIVLSKKLIQFAPIGLVNMLNTGGAIQSMEFDNHIDVVKIGVRGCGEMKVFASEKPVSCKLDGVVVKFDYEDKMLRVQVPWPSASKLSMVEFLF

SEQ ID NO: 257546 - protein, 129 aa, Glycine max
  Clone ID: PAT_MRT3847_74589C.1.pep
MEDFNNYNKSRSHGNNGQMMQQMERYYGGAPPQPTRPYDLRSYSVSSYTQAPNNYNNKDLKMMKKGKSMSSRTSSISKSWSFVTDPEIQRKKRVASYKMYSVEGKVKGSFRKSFRWVKDRYCQVVYGWW

SEQ ID NO: 257547 - protein, 47 aa, Glycine max
  Clone ID: PAT_MRT3847_7458C.1.pep
MLTYSFVQHKHKCKSSFDEFPLQSYMHLYVIIGFLNSVVATMGGKNI

SEQ ID NO: 257548 - protein, 41 aa, Glycine max
  Clone ID: PAT_MRT3847_74590C.1.pep
RISKLISALSHLLSSQFTPDFYFRVDLLVTLMFHKDKLKFL

SEQ ID NO: 257549 - protein, 79 aa, Glycine max
  Clone ID: PAT_MRT3847_74591C.1.pep
TLSQNSAGAPSLKIKYSLTIPCVTNHVQIHQPRGLYQRGWSYIHINDIQSIGFHASRLESAQPSKQCSIKYTSKSSLTS

SEQ ID NO: 257550 - protein, 83 aa, Glycine max
  Clone ID: PAT_MRT3847_74592C.1.pep
ETPHRWHSHWRCHSRSHYLSRFHCQFAAATRLPKVSIRFVCRLRLFFAFLSLQKHRLLEKETTLVFKESCSRMLIDFALLLRL

SEQ ID NO: 257551 - protein, 53 aa, Glycine max
  Clone ID: PAT_MRT3847_74593C.1.pep
MNLLYFSFCLVSCFTSLMYPPTCLFPIASQDMHLSSVKRYELLGIRTWTLPDL

SEQ ID NO: 257552 - protein, 59 aa, Glycine max
  unsure (1)..(59): unsure at all Xaa locations
  Clone ID: PAT_MRT3847_74594C.1.pep
SSKHFGGRGGVGSQXCSCPLXSGLGAVGGGLLRWLVLGGLVPCGLSCACWRFWRPLVLG

SEQ ID NO: 257553 - protein, 295 aa, Glycine max
  Clone ID: PAT_MRT3847_74595C.1.pep
MMGLHGCTLKLASVPNFSSPTFLFKTPTLRFQKSPLSRPIRALSSSALVQTSTTKATEDQGVKPQWKATIDFKWIKDNKEAVAANLKNRNSDADLNLVLHLYDKMFTLQKEVERVRGERNAVANKMKGKLEQSERQRLIEEGKNLKEGLAALEEDLAKLNDELQQEAQCIPNMTHPDVPIGGEDCSTIRKMVGSSPKFSFPVKDHLQLGKELDLFDFDAAAEVSGSKFYYLKNEAVLLEMALVNWTLSEVMKRGFTPLTTPELVRSSVVEKCGFQPRANNTQIYSIADSDQCLIG

SEQ ID NO: 257554 - protein, 69 aa, Glycine max
  Clone ID: PAT_MRT3847_74596C.1.pep
PDFSITLYSHPLPLVTAYKYLHQKAFKRRKWVHAKRLDGKVNFQPAGMTVRYNVRSGEKQVTDTKNLQT

SEQ ID NO: 257555 - protein, 118 aa, Glycine max
  unsure (1)..(118): unsure at all Xaa locations
  Clone ID: PAT_MRT3847_74597C.1.pep
TLVQTVAHLHFANLNSGKGYDQFAEGTGLTNAYSCLHLKKLSYLKSTNASLLKSILPALYFYLQSDITRLSMRAYXPILIYDPTLYMLNXTVMHLYXSVSDIILVESGDGIIVSIDFY

SEQ ID NO: 257556 - protein, 67 aa, Glycine max
  unsure (1)..(67): unsure at all Xaa locations
  Clone ID: PAT_MRT3847_74598C.1.pep
LSLTLTLVLVLLTSKANSAETASFSWNNGVPKQPNMILQGDAIGTSSVKLQLKXGDENRTQEPSSLG

SEQ ID NO: 257557 - protein, 95 aa, Glycine max
  Clone ID: PAT_MRT3847_74599C.1.pep
TNSDRYAGDDMHPKEKRRTPAWCDRILWYGEGLHQLSYVRGESRFSDHRPVYGIFWAEVESSHGRLKKSMSCSRNRIEVEELLPYSHGYTELSFF

SEQ ID NO: 257558 - protein, 52 aa, Glycine max
  Clone ID: PAT_MRT3847_7459C.1.pep
GPTHFITHRVVIVNFFRASLDLRSALVASNRSYLFFAPLQIISACFSNNWLA

SEQ ID NO: 257559 - protein, 243 aa, Glycine max
  Clone ID: PAT_MRT3847_745C.1.pep
MGRYRSRSRSYSPRRRSRSPPAPRGRKRYVDDRYGDSRSYRDRRSPLPSGLLVRNLPLDARPEDLRIPFERYGPVKDVYLPKNYYTGEPRGFGFVKYRYGEDAAEAKQHLNHTIIGGREIRIVFAEENRKTSQEMRVNTRGSGRHGGGRRRNRTRSPRPRSYSRSPSPARDDSRDGRGRDDYYSPERSRSYSRSLSPSGGKDYKKSPRLRENGRSPNDKKDQTPRRSESPRDNDCSPSRSHSR

SEQ ID NO: 257560 - protein, 89 aa, Glycine max
  Clone ID: PAT_MRT3847_74600C.1.pep
TRLHRVLVEQHLDKYDTCFTNQNKLVSSLIFHLYIILVEVPRLITLLYILSLEDEKCVSGLHFFNESDYKMVINLEVFELCYLSKASFL

SEQ ID NO: 257561 - protein, 104 aa, Glycine max
  Clone ID: PAT_MRT3847_74601C.1.pep
ELEDEALRPPDLSNLQRRIKEIVRVLSNFKALRQDGSTRKEYVEQLKKDLCTYYGYNEFLIGALVEMFPVVELMELIEAFEKPRPMCLRTNTLKGACPFSVILG

SEQ ID NO: 257562 - protein, 56 aa, Glycine max
  Clone ID: PAT_MRT3847_74602C.1.pep
MCACTEVIKCQFLLIKKKKKKKKKKKKKKKKKKKKKKKKKNPKKKKKKKKKKKKKK

SEQ ID NO: 257563 - protein, 46 aa, Glycine max
  Clone ID: PAT_MRT3847_74603C.1.pep
GFVWKKKKKKKKKRRRKKKKKKKKNKKKKRKRKKKKNGGGPQHGLL

SEQ ID NO: 257564 - protein, 40 aa, Glycine max
  Clone ID: PAT_MRT3847_74604C.1.pep
SKLHSTDNACHWGLRSSEDELNRFIYRTLYRLPTQIKPIS

SEQ ID NO: 257565 - protein, 37 aa, Glycine max
  Clone ID: PAT_MRT3847_74605C.1.pep
TGNIKVITQATKTIFNIHVPEMEEHFAQTLMMMNNTW

SEQ ID NO: 257566 - protein, 45 aa, Glycine max
  unsure (1)..(45): unsure at all Xaa locations
  Clone ID: PAT_MRT3847_74606C.1.pep
GRFFQLVFTLLFXIITLTPLQHFFFFVFXNKSLIINKLINSIWCF

SEQ ID NO: 257567 - protein, 129 aa, Glycine max
  unsure (1)..(129): unsure at all Xaa locations
  Clone ID: PAT_MRT3847_74607C.1.pep
MQIFVKTVTGKTITLEVESSDTIDNVKAKIQDKEGIPPDQQRLIFAGKQLEDRRTLGDYHIQKESTLHLGLRLRGGIQIFVKNFNGETITLEXKGLTPLDNVKAKIQDKEGIPPDQQRLIFAGKQLEDG

SEQ ID NO: 257568 - protein, 133 aa, Glycine max
  Clone ID: PAT_MRT3847_74608C.1.pep
MCKQFQYFQSSVLDIPTPLLVAETPECDQGEFLLQKEFLTNYKNMCSYPTRASETLTHEFPVKFMNILDPLRNDNNLGRSVSIASLHRLRFAFAYSAQKLKQIFTLPGENMGAALEKFFFSTLERNGKGERAD

SEQ ID NO: 257569 - protein, 47 aa, Glycine max
  unsure (1)..(47): unsure at all Xaa locations
  Clone ID: PAT_MRT3847_74609C.1.pep
EPPSYLTGKFPGDYXWYTAGILADPETLFRNRELKGIHSRWAMLGAL

SEQ ID NO: 257570 - protein, 72 aa, Glycine max
  Clone ID: PAT_MRT3847_7460C.1.pep
SAKNFEPPKESFLMPIHVVCYCSIIPWGAFHEPQEMVLPRDNLAVGVKQRILEHIQILVPEAPEATQKWCSA

SEQ ID NO: 257571 - protein, 84 aa, Glycine max
  Clone ID: PAT_MRT3847_74610C.1.pep
VGNTGNSCRTLTRKDANRHIINSIRATNTVATDAIDSSTGATLPGAIQSNCNIIRVISSLDSEDMVHIGPELDDPSALDNFVFY

SEQ ID NO: 257572 - protein, 82 aa, Glycine max
  Clone ID: PAT_MRT3847_74611C.1.pep
VALGEPKKRSLTVLHQQGVGLKKIIPWLYFSKAGPKKGLLKPVAQYNTTLKGSTKRVNFLPLCFTLKIFLKSPLLCQKKIPS

SEQ ID NO: 257573 - protein, 597 aa, Glycine max
  unsure (1)..(597): unsure at all Xaa locations
  Clone ID: PAT_MRT3847_74612C.1.pep
MAGKKGVAAEDAIRAIGLGYDLTNDLKLKFCKNHSRLIAIDDDNLRTVELPPRISIPNVPKSIKCDKGDRMRLCSDVLSFQQMCEQFNXDLSLSGKIPMGYFNPAFGFIGVWQKDAANTKTLAFDGVSITLYEIAFGETHVVLHDQVKQAVPSSWDPAALTRFIENYGTHVIVGVKMGGTDIIYAKQQYSSTVPPAEVQKKLKDMAEEYFMDKAELYNSIGGRFNAKEKFMKDNVLIFMDIHARCYYEAEAKGIKFMCRTKGGNGNLFLWDPLLSQTGLTLPDRIXMSFVSSISLLVXINGSGYLTHAMNLYLSYKPGIEELHQFLEFQLPRQWAPVFGELALGPERKPQNTASLQFSFMGPKLYVNTTPVDVGKKPVTGLRLYLEGKRSNCLAIHLQHLSSLPKTFQLQDEPNGNASNDSSERKYYEKVQWKSFSHVCTAPVDSDDDNAVVTGAHFEVGDTGLKKVLFLRLHFCKVVGATRVKVPEWEGSPGLTQKSGIISTLISTTFSGPQKPPPPRPSDVNINSALYPGGPPVPTQSPKLLRFVDTTEMTRGPQDSPGYWVVSGARLLVEKAKISLKVKYSLLTVIPDEEGASF

SEQ ID NO: 257574 - protein, 84 aa, Glycine max
  unsure (1)..(84): unsure at all Xaa locations
  Clone ID: PAT_MRT3847_74613C.1.pep
METLRSRTLREQMHPSIIXVIWEXXEHIADGLTHXIYXSREXRPXQPHHYKAXAXNVLTRVSGLITNXXFXLNXXXGXXXDNPF

SEQ ID NO: 257575 - protein, 132 aa, Glycine max
  Clone ID: PAT_MRT3847_74614C.1.pep
MEEDLDGVAPCSSLAVEAMIRVGAAGAIWGLCAGPYDARQQGLRGSAKASFVAKSVGRFGTRCGFVAGVFSITRCGVQRYRGRNDWVNGLIGGAVAGAAAAAAAGTRSWSQVIGMAGLVSVFCAAADYSRTS

SEQ ID NO: 257576 - protein, 123 aa, Glycine max
  Clone ID: PAT_MRT3847_74615C.1.pep
ELDIVPFDSCSKEYQNLYEEWFNYADADGDGRFTGNEAIKFFAMSNLSRQELKQVWAIADSKREGYLGFKEFVIAMQLVSLGQCGYSITHDLLTSDAMRHAKPPTMDGLDVLLTKKKRKQKDK

SEQ ID NO: 257577 - protein, 61 aa, Glycine max
  Clone ID: PAT_MRT3847_74616C.1.pep
NSNTLIRTTTIRTTNRKIIKSTIMNTGVMNANLIDNTIATTMIKTATNPLARDMLPEITTN

SEQ ID NO: 257578 - protein, 78 aa, Glycine max
  Clone ID: PAT_MRT3847_74617C.1.pep
PTRTQFKSFNASSYEDNLDLCGQPLEKFCIAGRPTQLPNVEAQAAVFSLFILEFFIIMACDFAVSFWVVFGSNLFKLS

SEQ ID NO: 257579 - protein, 116 aa, Glycine max
  unsure (1)..(116): unsure at all Xaa locations
  Clone ID: PAT_MRT3847_74618C.1.pep
MESELKDLNSKPPNYNDNANSVFDDHLLLKLEPPASADSIAEMEKKYXRRDVYDTMGCNEFPKKEKLXLSFSLVTLLPIRFVLTITILLFYYLIWRICTAFSASTREEEQKDYAHI

SEQ ID NO: 257580 - protein, 123 aa, Glycine max
  unsure (1)..(123): unsure at all Xaa locations
  Clone ID: PAT_MRT3847_74619C.1.pep
MGLTVSRLLKXFYARKEMRILMVGLDAAGKTTILYKLKLGEIVTTIPTIGFNVETVEYKNVSFTVWDVGGQDKIRPLWRHYFQNTQGLIFVVDRNDRERILEARDELHRMVSEDELRDATVLV

SEQ ID NO: 257581 - protein, 75 aa, Glycine max
  Clone ID: PAT_MRT3847_7461C.1.pep
MGQGEALFKAPQEISRLWVFFFPPPWGGPCKLLGPVFLGFVGNSPVFGFFQFFLGGFPEVFQALRVPPLPPFVFF

SEQ ID NO: 257582 - protein, 130 aa, Glycine max
  Clone ID: PAT_MRT3847_74620C.1.pep
EEYRNVKEVVEGYQLEESKKKSKAGNGACEQGKNIRKSKSSNEECRQREHVKNEEMAEIFELEKSEKARMVHLHGKTEKKVPKADQSGSLKDVSEKQCKEHKRVESEESKEIDRQKLSEVQWSPKHMVHE

SEQ ID NO: 257583 - protein, 62 aa, Glycine max
  Clone ID: PAT_MRT3847_74621C.1.pep
GGGETKKENICSRPVMDRYYSRITLDFHTNKKLVEEVAIIPNRRLGNNIAGRFPHLIKRIHK

SEQ ID NO: 257584 - protein, 68 aa, Glycine max
  Clone ID: PAT_MRT3847_74622C.1.pep
MHGMKSHDCHIFIECLLPIAFSSLPPHVLNPLNEISHFFKDLCSTSLMKDDLSRMEQNIHLFCAIWRE

SEQ ID NO: 257585 - protein, 86 aa, Glycine max
  Clone ID: PAT_MRT3847_74623C.1.pep
MEPTSVALAMEWSIQLEMGLRSTKPGVPVKAISEMEPRLQRWSREPEFGIAPYAMFGLVPGEDKVFANTILLRLADAFRGGDIRDQ

SEQ ID NO: 257586 - protein, 45 aa, Glycine max
  Clone ID: PAT_MRT3847_74624C.1.pep
ATCTNLPLSMVPNYALQDPFCLIGRYNRAESPGIQDLSQRSARTN

SEQ ID NO: 257587 - protein, 133 aa, Glycine max
  Clone ID: PAT_MRT3847_74625C.1.pep
VAQTYSREHQGESDLFDHLFELLNSSIHNDESFPKELASCTGALQTSVSQHMAKEEEQVFPLLLEKFSLEEQASLVWQFLCSIPVNMMTEFLPWLSTSISPDESQDLRKCLSKIVPEEKLLQKVVFTWMEGGS

SEQ ID NO: 257588 - protein, 60 aa, Glycine max
  Clone ID: PAT_MRT3847_74626C.1.pep
NGGVTKLGETHLPNLLKTGDKANMWDTLGAKNLFPFKPTKKIAPQLTKPNTPKLKWPLGE

SEQ ID NO: 257589 - protein, 434 aa, Glycine max
  unsure (1)..(434): unsure at all Xaa locations
  Clone ID: PAT_MRT3847_74627C.1.pep
MYQWRKFEFFEEKYGAKCAVPENDEDDGRRRGGEXIECCSSGRGKLVTGFDDGVVCFFDRGLKFNYSFQPHSSSVLFLQQLKQRNFLVTIGEDEQLTPQQSALCLKVFDLDKMQSESSSTTSPDCVGILRIFTNQFPEAKITSFLVLEEVPPILLIAIGLDSGSIYCIKGDIARERITRFKLQVENNHSDKTLSAVTGLGFRVDGQSLQLFVVTPSSVSLFSLHDQPPRRQTLDQIGSGVNSVAMSDRSELVIGRPEAVYFYEVDGRGPCWAFEGEKKLLGWFRGYLLCVIADQRTGKHTFNIYDLKNRLIAHSALVKEVSYMLYEWGNIILVMNDXSALCIGEKDMESKLDMLFKKNLFTVAINLVQTQQADAAATAEVLMKYGDHLYSKQDYDEAMAQYIHTIGHLEPSYVIQKFVDAQKIYTLTNYLDTLH

SEQ ID NO: 257590 - protein, 89 aa, Glycine max
  Clone ID: PAT_MRT3847_74628C.1.pep
LGFLDEVVLKDSDYNEVDRAECQFATTATVLDNDTHGMPFQPPEASINSFFDSIESIWNKIWRSLTEFITGKTCRYYLQLYFSFASYKI

SEQ ID NO: 257591 - protein, 66 aa, Glycine max
  Clone ID: PAT_MRT3847_74629C.1.pep
NKSLRFFFSFLFLVCDLLIFNALHFLYSLMGHLQLRFLSLVFASFPVLNSRLLYSPIVVFSRKKMA

SEQ ID NO: 257592 - protein, 59 aa, Glycine max
  Clone ID: PAT_MRT3847_7462C.1.pep
HSLVGGQFLFKIPPPLINKFYKFLNDGPPHQTKNHFFNPKARGGVESSSLKTFQAMARS

SEQ ID NO: 257593 - protein, 67 aa, Glycine max
  Clone ID: PAT_MRT3847_74630C.1.pep
NNHLWAMATPELPSESIISRTTIYQYKEKGQDKKKKKKLIRTSVTITSDNLSQPLAPAPSLSNFCEN

SEQ ID NO: 257594 - protein, 83 aa, Glycine max
  unsure (1)..(83): unsure at all Xaa locations
  Clone ID: PAT_MRT3847_74631C.1.pep
IVRQIGEALRAKLDPLGRLVSLEMGKILPDGIGEVQEIIDMCDYCVGLSIHLNGSYFSSXRSDHLMYVVWNPLGILGEITVYN

SEQ ID NO: 257595 - protein, 161 aa, Glycine max
  Clone ID: PAT_MRT3847_74632C.1.pep
MERLQGPLNSCFFGDPLEVNCLDQVLVDEESLRLEEEEQFLISSLEDNMPFLQMLQSVESPQFFPLKEPNFQTLLRLQHMKKPWEGIAYIPRMEAQVQAALELESCVTHDMLEMQSPVKSESNELQHPLSISCFEKVNYECNQEPQKVSQTCPKSQPAATM

SEQ ID NO: 257596 - protein, 179 aa, Glycine max
  Clone ID: PAT_MRT3847_74633C.1.pep
TALIHAVQVMTFLKTLILKTLRERDESIAKARQLSSLLDSPSCKGDSHPLEVNNKEESCEEETEETCSTKPPVKSKFSRTSTLGRIEWCIEEKLWRSEEKGNGVGELESVSDSSSPSRYENGPLENRYRGIYDSEHWVKLRNGVRRLCRHPVFQLSKPTKKRASLGIVNTREGGGEAWA

SEQ ID NO: 257597 - protein, 94 aa, Glycine max
  Clone ID: PAT_MRT3847_74634C.1.pep
IFAVQKISELTTNSPHSPPLPNSSHIRGMANFEEFGFHFGSFASVQCQSIFICLIASTVDRSSRSLVSRYTNVTNSSPLVTTLTNRKNYTRQQK

SEQ ID NO: 257598 - protein, 55 aa, Glycine max
  Clone ID: PAT_MRT3847_74635C.1.pep
FYFIALGGLFYSKPWMVFSKTLKNVYIILKGVFNFWRRINKCNKNTGFNNLRGGG

SEQ ID NO: 257599 - protein, 77 aa, Glycine max
  Clone ID: PAT_MRT3847_74636C.1.pep
VMECVSSEFSFTVFVMVSSKRDPKEDENVAPPETEVGDPCNAAPWVARLVIHPEPVEGDNFSEGFKFKREIATMSPV

SEQ ID NO: 257600 - protein, 52 aa, Glycine max
  Clone ID: PAT_MRT3847_74637C.1.pep
RFILSTFSCWCRVMASMSVVCEYSIGSVANSSTGNSVFVFSALNLPHLLHPS

SEQ ID NO: 257601 - protein, 147 aa, Glycine max
  unsure (1)..(147): unsure at all Xaa locations
  Clone ID: PAT_MRT3847_74638C.1.pep
MDMKPYITELTGLIAHELDVNSSQVHLMNFLSLGNGSLSKWVITPRPYADFFSNATAMSMMPXLSEHRMQLPNSVGSYKLVDWNAEPPLKRTWWQQYYLVVALAVLLTFVLGISTLGIFLIWKKRQQAEHSYKPTRPAVQEQELQPL

SEQ ID NO: 257602 - protein, 225 aa, Glycine max
  Clone ID: PAT_MRT3847_74639C.1.pep
LACSHQSKTTQELFLGDFLQIVEKTGRMFEVTKLQLPVINISSLKVIFEDYRTFGTPSAANTREGLWRSLEEEMLPSFSAAKTNWLELQSKLIPKKHSQSNVCVVGEAVTVNIEFKNPLQISIPISGVTLVCKYSASTDDVRSDENESSVEKDNEVDHFGNMSSDSSSFMVSDVDFLLGGGETTMIQLSVTPRAEGSLEILGVRWKLSGTIVGFHNFKLGHPKKI

SEQ ID NO: 257603 - protein, 153 aa, Glycine max
  Clone ID: PAT_MRT3847_7463C.1.pep
MQLQLTLSSLFLSLLLTITLTSPTLAAQSKPQDLVRSSCVHARYPRLCLHTLSNYPGSANTPLDVARTALKVSLAHTRRASKFLHALSHDDSIIMRKRERSALRDCTEQISDSIDQLRRSLDELQHLRSETFRWQMSNALTWVSAALTDGDTC

SEQ ID NO: 257604 - protein, 53 aa, Glycine max
  Clone ID: PAT_MRT3847_74640C.1.pep
PTNTTIITSRIDHYLLLKLTHLSDENVQLFRIIYLEQVDKHRMYPLSGGRHYH

SEQ ID NO: 257605 - protein, 74 aa, Glycine max
  Clone ID: PAT_MRT3847_74641C.1.pep
SSNGTSGRKNSQRSHRRCCQRTQHCIHPLPSELAQVPSRPVQFRRQVKTTPWLRPKTNVLNRILFPLLHMQYVG

SEQ ID NO: 257606 - protein, 71 aa, Glycine max
  Clone ID: PAT_MRT3847_74642C.1.pep
ILHGPKSNLRSFIMALYFPHIHYHQPMNSHPYCHVQLHHKETLLPLTAFIVIGTRFSIASPMTDHRHDNQL

SEQ ID NO: 257607 - protein, 420 aa, Glycine max
  Clone ID: PAT_MRT3847_74643C.1.pep
MFGRGGPRRSDNSKYYDILGVSKNASEDEIKKAYRKAAMKNHPDKGGDPEKFKELGQAYEVLSDPEKKDLYDQYGEDALKEGMGGGGSFHNPFDIFESFFGGASFGGGGSSRGRRQKHGEDVVHSLKVSLEDVYNGTTKKLSLSRNVFCSKCKGKGSKSGTAGRCFGCQGTGMKITRRQIGLGMIQQMQHVCPDCRGSGEVINERDKCPQCKGNKISQEKKVLEVHVEKGMQQGQKIVFEGQADEAPDTITGDIVFVLQVKDHPRFRREQDDLFIDQNLSLTEALCGFQFAVKHLDGRQLLIKSNPGEVIKPGQYKALNDEGMPQHNRPFMKGRLYIQFNVDFPDSGFLSPDQCQLLEKVLPQKSSKHVSDMELDDCEETTLHDVNFKEEMRRKQQQQHREAYDEDDDEPSGHRVQCAQQ

SEQ ID NO: 257608 - protein, 420 aa, Glycine max
  Clone ID: PAT_MRT3847_74644C.1.pep
MFGRGGPRRSDNSKYYDILGISKNASEDEIKKAYRKAAMKNHPDKGGDPEKFKELGQAYEVLSDPEKKELYDQYGEDALKEGMGGGGSFHNPFDIFESFFGGASFGGGGSSRGRRQKHGEDVVHSLKVSLEDVYNGTTKKLSLSRNILCPKCKGKGSKSGTAGRCFGCKGTGMKITRRQIGLGMIQQMQHVCPDCRGSGEVINERDKCPLCKGNKVSQEKKVLEVHVEKGMQQGQKIVFEGQADEAPDTITGDIVFVLQVKDHPKFRREQDDLYIDHNLSLTEALCGFQFAVKHLDGRQLLIKSNPGEVIKPGQYKAINDEGMPQHNRPFMKGRLYIQFNVDFPDSGFLSPDQCQLLEKVLPQKSSKHVSDMELDDCEETTLHDVNFKEEMRRKQQQQYREAYDEDDDEPSGQRVQCAQQ

SEQ ID NO: 257609 - protein, 58 aa, Glycine max
  Clone ID: PAT_MRT3847_74645C.1.pep
ESINCKPMSHEQNYNRLTFHNFLIDKLRRVCLQVAFPRQKNMKEQLKTNLILLNSLGC

SEQ ID NO: 257610 - protein, 62 aa, Glycine max
  Clone ID: PAT_MRT3847_74646C.1.pep
FFFFFFFFFFFFFFFYQETCAFAQTPWFNSQLGAGRPAWCSHQPNLINPKFCSITLVPPLGL

SEQ ID NO: 257611 - protein, 69 aa, Glycine max
  unsure (1)..(69): unsure at all Xaa locations
  Clone ID: PAT_MRT3847_74647C.1.pep
VVKKVNEALHRCEYILNNLGLISPNLTKXDTNTTNLKFILFLLYLTELTEIISQDDIHTYSNYLKAKHY

SEQ ID NO: 257612 - protein, 45 aa, Glycine max
  unsure (1)..(45): unsure at all Xaa locations
  Clone ID: PAT_MRT3847_74648C.1.pep
XQRXDKXXLAXTVNFRLNAIXRCNXAXNSTDYXRXRTGLDXETLS

SEQ ID NO: 257613 - protein, 79 aa, Glycine max
  Clone ID: PAT_MRT3847_74649C.1.pep
PERKGRPTRPATRALTRPQKFRLQVEKMKLNPGCVEQTPDEPKGSFYGTIDRAVGAYERPFVSGDGDLVQHVGETTTEG

SEQ ID NO: 257614 - protein, 143 aa, Glycine max
  Clone ID: PAT_MRT3847_7464C.1.pep
KSSCPWDPTISLGESLLTPTKIYVKQLLPVVKERLVKAMAHITGGGFIDNIPRILPKNLGVVIDSSVWELPKVFKWLKENGNIPSDELFRTFNCGIGMVLVVSSDNEIRVKKLLQEYESNVYTIGRVVTKQTNNDKHVVIKGI

SEQ ID NO: 257615 - protein, 112 aa, Glycine max
  unsure (1)..(112): unsure at all Xaa locations
  Clone ID: PAT_MRT3847_74650C.1.pep
ASSPGGFFKENTHFTHYTNCYKNCDIWHPACTKAMTMXFNPNPCADAWSSTFMKRTGFHCDIICVTGWTATPMQDVQATTDWFIPSQECVPRTYCAVNPQNPFVINRGMGKL

SEQ ID NO: 257616 - protein, 108 aa, Glycine max
  Clone ID: PAT_MRT3847_74651C.1.pep
LRGTWNKQWQSIRKKRKSDTNRLHLHTPLLLRDSLLKLRYSYDSGRIGQWKNKGKDLNNTLRISAEAKRERHVTEKRCMPEGLKVCTGKSQMLQTFLMISNGLGLFGS

SEQ ID NO: 257617 - protein, 92 aa, Glycine max
  Clone ID: PAT_MRT3847_74652C.1.pep
RTCFLIENFRATFIWLWCFSHPKLNPVSNSWKQQLIMYMNLKNANPLLSDEPSKMNLMSSFPTVIFLILKLIFFFNVHFCITFVIFSILFKE

SEQ ID NO: 257618 - protein, 66 aa, Glycine max
  Clone ID: PAT_MRT3847_74653C.1.pep
NKLQQHLFQTISKGNNSQFKRTTTTPVWFGGWASSFDFVHLFLGLIGKVETRDKVGLIGGKVMAFW

SEQ ID NO: 257619 - protein, 74 aa, Glycine max
  Clone ID: PAT_MRT3847_74654C.1.pep
MCSVLTVKGILLLGLPHASFGCFYSSLWQSEIRSFFTRMTSAENEILRTQDQTPLCCRLRWVQPLCFQHLWCLC

SEQ ID NO: 257620 - protein, 67 aa, Glycine max
  unsure (1)..(67): unsure at all Xaa locations
  Clone ID: PAT_MRT3847_74655C.1.pep
MGKVXIGINGFGXIXRXVXRVALXXXDVELVAVNDPFIITDYMTYMFKYDSXXGHWKXHDVTVKXEX

SEQ ID NO: 257621 - protein, 123 aa, Glycine max
  unsure (1)..(123): unsure at all Xaa locations
  Clone ID: PAT_MRT3847_74656C.1.pep
QHREGNQLDFLPYTCDGCQQILCSXHRSYKYDACLKCDHNSVQDGDCEAXSMSIDTTGHVXHDQEAILQNHLKSRKXDPTKKXKPICPVKRFKEDLTVFNTITCKTCHINVSLRHRFHDDHAC

SEQ ID NO: 257622 - protein, 79 aa, Glycine max
  Clone ID: PAT_MRT3847_74657C.1.pep
DYVKLLQSLSLQDIKSEDWSRFVAPFWPAVIRSAFTWKGLTSLLSSGKLGIYIAFQKQTPPSSIATCKSYVTDHYFHTR

SEQ ID NO: 257623 - protein, 105 aa, Glycine max
  unsure (1)..(105): unsure at all Xaa locations
  Clone ID: PAT_MRT3847_74658C.1.pep
DKKKKKKKKKKKKKKKVKKKKKKKKKKKKKKKTSRGGPKPNSPKRKPNNARSLAXLLKMPEWEXNPGVTKLKRLEPNPPFPSWEKKKKAPTNRPSKNLGSLNGKW

SEQ ID NO: 257624 - protein, 79 aa, Glycine max
  Clone ID: PAT_MRT3847_74659C.1.pep
FLRDPVFKNRWGEKVFKCVPKKTKALFLGHRKKLFLGGKFYPLLNSSGSNPLPQGQKKARPPGGPRGKIFNLLRLQILS

SEQ ID NO: 257625 - protein, 73 aa, Glycine max
  Clone ID: PAT_MRT3847_7465C.1.pep
GVFSRAKFKFPGCQKIFVCRKWGFPKFSRFVFFKFKSKNKIVPHGVNAKLFGGHGPLAHCEPGKALLDTATSF

SEQ ID NO: 257626 - protein, 115 aa, Glycine max
  unsure (1)..(115): unsure at all Xaa locations
  Clone ID: PAT_MRT3847_74660C.1.pep
FWLVLVALVVERGCLCGSFFASRCFCXWLCSGGLFVRSCVLWVAWVGPXCVCCXVCPPRLRVWGPWVLCRCRCXSGRGFVLPVVLCRAXLFGLPCVVCFQLESCFSGRVGGQXSQ

SEQ ID NO: 257627 - protein, 69 aa, Glycine max
  Clone ID: PAT_MRT3847_74661C.1.pep
VLNAPLGIDVPKKLTKSLTRVEGTRLHIDMKAIRARSQSQNGVSLPQKVRGVSKGAPKHFLLALIVTGG

SEQ ID NO: 257628 - protein, 77 aa, Glycine max
  Clone ID: PAT_MRT3847_74662C.1.pep
SMWDQTTTLEAAIMAAPKKPQLRQLSNTLRAQCYKYGACGKCRWPNNGSWIGFDTKLKGKELYINFVLHSLILTFIG

SEQ ID NO: 257629 - protein, 87 aa, Glycine max
  Clone ID: PAT_MRT3847_74663C.1.pep
SSVVPAVSKGFSGHGYSGELQIWTRVLAAVAIMQPSVLSSLAVTGRVRVTLSSTAGRPRLLNRQRLRWLTTRPWSLKSTRGRRRCRR

SEQ ID NO: 257630 - protein, 84 aa, Glycine max
  Clone ID: PAT_MRT3847_74664C.1.pep
RVPPAMALPNGDDMQHDRILNCFSSNKMFDSDNRALKQDTYLVDEHIEEEADGTSNYPKNYHLVRETAAMAALLLQRQAIASMQ

SEQ ID NO: 257631 - protein, 74 aa, Glycine max
  Clone ID: PAT_MRT3847_74665C.1.pep
RSCFPKQCYYPFTIDITHPHLTHNNHVSTIYFTLNGHQTMHACLTLHRVPVLRYFTLLSGFPSPSTFFPLFLPY

SEQ ID NO: 257632 - protein, 31 aa, Glycine max
  Clone ID: PAT_MRT3847_74666C.1.pep
MCEIPELTLEIPSQYIVRSKDAVSNVIAAMT

SEQ ID NO: 257633 - protein, 63 aa, Glycine max
  Clone ID: PAT_MRT3847_74667C.1.pep
VFPPYPTPMLFNTRVANDIFLAYPHRYVSEQTLKWLTCTQNDPIVLPFINILAEQTAFANRAS

SEQ ID NO: 257634 - protein, 120 aa, Glycine max
  unsure (1)..(120): unsure at all Xaa locations
  Clone ID: PAT_MRT3847_74668C.1.pep
DLTYKDNQWQKAVXFYSEAIKRRGDFAAXYGCMAQTYLGLGSDLQAVEDCTKAISLDKKKKIFVLCNNINNVKAYFRKGTAKKMLGYYKEAIDDFKHALVLEPTNKRAASAAERLRKLFQ

SEQ ID NO: 257635 - protein, 100 aa, Glycine max
  Clone ID: PAT_MRT3847_74669C.1.pep
LEELPKWEEDPNFYSKPRYKQIVKDLADKYHTENLLLVTHGEGVGVALSSFKKDVTVYEVDYCGYVQLRRPIFKKDQSFTAGESEVLNHNGQTGVNFIPN

SEQ ID NO: 257636 - protein, 186 aa, Glycine max
  unsure (1)..(186): unsure at all Xaa locations
  Clone ID: PAT_MRT3847_7466C.1.pep
MAQLAGADEIESLRNELAEIGRNIRSSFRSHASSFQRVSSINPVQQEVDNDAGEALQWAEIQRLPTFERITSALFDVYDGXKQVVDVRKLGAQERHTFIEKLIKHIENDNLRLLQKFRKRIDKVGINLPTVELRYQNLSVEAECKIVQGKPIPTLWNTLKEWIFDTTKLSVLKSQNSKISIIKNDN

SEQ ID NO: 257637 - protein, 56 aa, Glycine max
  Clone ID: PAT_MRT3847_74670C.1.pep
IRLEESKSSDHRHRQMSANISVKPTVVEQINLKQNPNGVKLYDESNNQSLEIPIPY

SEQ ID NO: 257638 - protein, 152 aa, Glycine max
  Clone ID: PAT_MRT3847_74671C.1.pep
MSLVANEDFQHILRVLNTNVDGKQKIMFAMTSIKGIGRRFANIACKKADVDMNKRAGELTAAELDSVMTVVANPRQFKIPNWFLNRKKDYKDGKYSQVVSNALDMKLRDDLERLKKIRNHRGLRHYWGLRVRGQHTKTTGRRGKTVGVSKKR

SEQ ID NO: 257639 - protein, 150 aa, Glycine max
  Clone ID: PAT_MRT3847_74672C.1.pep
CSHIQLAATALPITGTQAAPKKVTKDELGNVAGIAATATASGGKFDKKLAGEKPQKHEGKYRKFLPVVEGTGIGSLEREQTEKILNKIISKNSHNILNVEKAVTMHNVKKEKKRMSEKGKALASATDKILKTQKKSFKKGDSNKGKAKGK

SEQ ID NO: 257640 - protein, 152 aa, Glycine max
  Clone ID: PAT_MRT3847_74673C.1.pep
MSLVANEDFQHILRVLNTNVDGKQKIMFAMTSIKGIGRRFANIACKKADVDMNKRAGELTAAELDSVMTVVANPRQFKIPDWFLNRKKDYKDGKYSQVVSNALDMKLRDDLERLKKIRNPRGLRHYWGLRVRGQHTKTTGRRGKTVGVSKKR

SEQ ID NO: 257641 - protein, 333 aa, Glycine max
  Clone ID: PAT_MRT3847_74674C.1.pep
MEMEGEKQHKFDVDLGNLMAFDSYHTFPSQPSLSREDLIKQCLLKGTHLVQAIADALFILPSTEDLDGPLVTLPPPLTKLPREKHLPKPKPPTKWEAFAKKKGIQKRKKDKIVYDEQSGTWKRRHGYDRANDEDAIPIIEAKPTDDPEEDPFAKRKENKKNRIEKQEKNRLQNLKEAAKFGALPSHIQLAATALPITGTQAAPKKVTKDELGNVAGIAATATASGGKFDKKLAGEKPQKHEGKYRKFLPVVEGTGIGSLEREQTEKILNKIISKNSHNILNVEKAVTMHNVKKEKKRRSEKGKALASATDKKLKTQKKSFKKGSSKKGKAKGK

SEQ ID NO: 257642 - protein, 195 aa, Glycine max
  Clone ID: PAT_MRT3847_74675C.1.pep
NGPNDHTPLLYLSATTSSITSATPPPLCAPNAAITRSLSFFILLFPFAPTLIGVPSLLLPPPPASDADSPSLLLHQRLPMDFPPALNLLTEFGCGFVLLRSLSRIFNLLGLFLMLTFCFKVMCFGWNSKNALRFLCDSGGVPRIRFCLDKVVLEKVSKAKTKPLKKPRHPTSSSSLRRRPGGSGERGNAASDDGS

SEQ ID NO: 257643 - protein, 151 aa, Glycine max
  unsure (1)..(151): unsure at all Xaa locations
  Clone ID: PAT_MRT3847_74676C.1.pep
GLREGAGTNGSGGLRAGAVLGELVCGSGCCCHCCAGGPVARQKALPRLRGVMSRFLNVLRSWLVMVSIIAMGNTLQSFRDHTFLYEKLYTGKPNLVNGLQARTFGIWTLLSSVIRCLCAIDIHNKTLYHITLWTXLLALGHFLSELFVYGT

SEQ ID NO: 257644 - protein, 71 aa, Glycine max
  Clone ID: PAT_MRT3847_74677C.1.pep
NHTPFLCIRLVIYILLVILLIWFLYLLSLFCFDLLCKKDFFFGYSTLGAVCAVLQLELENYLSNPHNKGLC

SEQ ID NO: 257645 - protein, 59 aa, Glycine max
  Clone ID: PAT_MRT3847_74678C.1.pep
AARCIQTVKSNHEHYKRTSIEQSVDILAKFLDASYSHVYQSGHIILQGLMNTLFHKNEQ

SEQ ID NO: 257646 - protein, 123 aa, Glycine max
  Clone ID: PAT_MRT3847_74679C.1.pep
KKTKVSITHTQPFSLGLSVPATLDPFAQADGDLTRWVPGNAGLSHGRPARGAGEASGLGRDRWLAFDPVGFDHPPHDQIPGGPPRKLPGNGARDNNRAKGLLGQIPVQAADHKVGPQTGFFDP

SEQ ID NO: 257647 - protein, 60 aa, Glycine max
  Clone ID: PAT_MRT3847_7467C.1.pep
IGNNGLVPLLVWCQLTWPRVGSNVFYIFLIPTFYRIVADDKKLNGIINQSLNQDNSSCAV

SEQ ID NO: 257648 - protein, 162 aa, Glycine max
  Clone ID: PAT_MRT3847_74680C.1.pep
TQGLKGFFFSAVKGVLAPFLSESQAFWFSVIRIVTVLALPFSPQSKECGVFLVFSSPPGGFLLSHKNFLPPIFFALWGDSVFFFLQKYPLFPAIFFRVGGKICIFFLFSPPYGKFNFPLGSQKQGMLVLFFPMGRKIQGFLLNERGVGFPFFCFKGKKKKRF

SEQ ID NO: 257649 - protein, 34 aa, Glycine max
  unsure (1)..(34): unsure at all Xaa locations
  Clone ID: PAT_MRT3847_74681C.1.pep
RTPYAVYGRNPKRHFITSXLKRGLNLRGNSLVTN

SEQ ID NO: 257650 - protein, 45 aa, Glycine max
  unsure (1)..(45): unsure at all Xaa locations
  Clone ID: PAT_MRT3847_74682C.1.pep
LKLLAVYIEINLALYCKLHXETYNVYSLERWLSGSSSMHLLINAL

SEQ ID NO: 257651 - protein, 73 aa, Glycine max
  Clone ID: PAT_MRT3847_74683C.1.pep
PTLPLSRFTCRVSNDVQWGCCRWTHNLLRSMISGLCSLLHCYYLSSFHEKSHVRWWINCHTCTLSVAESSDVL

SEQ ID NO: 257652 - protein, 70 aa, Glycine max
  unsure (1)..(70): unsure at all Xaa locations
  Clone ID: PAT_MRT3847_74684C.1.pep
MPASLSWSYANYDKGIQLLLIGHSYVVYSCLLMRFYNGTITTSIITPIGIEPLYXTIELYGKRIMLYIWE

SEQ ID NO: 257653 - protein, 101 aa, Glycine max
  Clone ID: PAT_MRT3847_74685C.1.pep
EKIQNRREGGVTKEQVELSLKAKLNPSHLEVVDISGGCGASFVVEIVSEQFEGKRLLERHRMVNAALEEEMKQIHALSIKKAVTPEQWKQQQESNQSNPAA

SEQ ID NO: 257654 - protein, 52 aa, Glycine max
  Clone ID: PAT_MRT3847_74686C.1.pep
RKDLTSKILFYFTLLIASFIFALISILSLANNSIGVQEIKLQSLNTQSNIIQ

SEQ ID NO: 257655 - protein, 93 aa, Glycine max
  Clone ID: PAT_MRT3847_74687C.1.pep
MGVTKEEVESSLKAKLNPSHLEVVDTSGGCGASFVVEIVSEQFEGKRLLERHRMVNAALEEEMKQIHALSIKKAVTPDQWKQQQESNQSNPAA

SEQ ID NO: 257656 - protein, 149 aa, Glycine max
  unsure (1)..(149): unsure at all Xaa locations
  Clone ID: PAT_MRT3847_74688C.1.pep
FLTEGNFTASVDLQRTHRINGMIKMVATVGIPDNTGISSTCAMNSSFRGRANCDIYTICSQYCELWIPAYTIAMTMSFNPNPSSNTWSLKFFKLTRFHXNIICVTVXTTTPMHNIQVTINDFIFSQHCIAXTYYNVNAQHPFILYRWGK

SEQ ID NO: 257657 - protein, 109 aa, Glycine max
  unsure (1)..(109): unsure at all Xaa locations
  Clone ID: PAT_MRT3847_74689C.1.pep
XAXCAXXXAFXXXXEXXXXXXXXSXXXXLXXXXXYXRXXTXXXXXXSXXXSXQXCVXWXAPXDXCXXSXCXXSXXXDXXXXCTGPVDTCXXXXAQXVRXXRXXXXXXXE

SEQ ID NO: 257658 - protein, 84 aa, Glycine max
  Clone ID: PAT_MRT3847_7468C.1.pep
GSRPVGAKEWRNWNEFADEVVKRDEIGDAIGVLMGGEEPIPMRRLALAPIVAATKAIHVGGSSYCLLLELIPQLLSLLLQKAHL

SEQ ID NO: 257659 - protein, 65 aa, Glycine max
  Clone ID: PAT_MRT3847_74690C.1.pep
EDRFILTYLLCIINNRTPSLERWNIFCRCASFFALPNIHTLKSSTKKQQANDLDTFRLEDPLREG

SEQ ID NO: 257660 - protein, 62 aa, Glycine max
  Clone ID: PAT_MRT3847_74691C.1.pep
HLQGRGGEKVRGGKVMLVVVVAVAACFVDSKISNTHSLLLSLYKSKRRDHEFDPQIWLIKCL

SEQ ID NO: 257661 - protein, 58 aa, Glycine max
  unsure (1)..(58): unsure at all Xaa locations
  Clone ID: PAT_MRT3847_74692C.1.pep
TWHKHTTHQRRKKNINHAKSLCKQIAVRILNTAMLQIQLQPKTRGYGCSXFSVAKART

SEQ ID NO: 257662 - protein, 84 aa, Glycine max
  Clone ID: PAT_MRT3847_74693C.1.pep
SVTRADCEPHGLVQEPKSVYPPLHLITSHSIIHYNCIKVSPVTYKTYQICNGLVLFITDESLEPLGLLSLLFILIRVWRLILKI

SEQ ID NO: 257663 - protein, 50 aa, Glycine max
  Clone ID: PAT_MRT3847_74694C.1.pep
LTTSRQLLHHTQTRTRTFYVYMLQDFLLEKSSLMVLHSQNCSVIMFHDLL

SEQ ID NO: 257664 - protein, 62 aa, Glycine max
  Clone ID: PAT_MRT3847_74695C.1.pep
VSIVMLVMTQKLQASGWCCVGLYIRPLTETYYPSSMLDIPLQHYELSIFSPKISHQSRQNVF

SEQ ID NO: 257665 - protein, 56 aa, Glycine max
  Clone ID: PAT_MRT3847_74696C.1.pep
EERERKRGGSFGWLFFLCEKEKRKKKNLPVAKQQKPSLHWQQEDYYFDMICLFATQ

SEQ ID NO: 257666 - protein, 29 aa, Glycine max
  Clone ID: PAT_MRT3847_74697C.1.pep
NLLRKGTFNWHWPYCTIELKFYHRLWNLG

SEQ ID NO: 257667 - protein, 61 aa, Glycine max
  unsure (1)..(61): unsure at all Xaa locations
  Clone ID: PAT_MRT3847_74698C.1.pep
MWKVXRXAAXRXRXXSTAXPGPXXVHKRGXDILHDXWFNKDTGXPVXXRXRXXXXGSASSC

SEQ ID NO: 257668 - protein, 77 aa, Glycine max
  Clone ID: PAT_MRT3847_74699C.1.pep
YIFVQVKIKRWCCYASFLQPQTLYASTTHSCPCLFLSPCLYDLLNLITTSIIIMSCSNVYDLQSLRSSPLTRGRGPH

SEQ ID NO: 257669 - protein, 176 aa, Glycine max
  unsure (1)..(176): unsure at all Xaa locations
  Clone ID: PAT_MRT3847_7469C.1.pep
MVTEEVVGGDSGDSHHHHRNSDIELIATAERAPLPHSGPLNKRRSSKLSNASSASASASASISAPEEQQDEGDYVEVTMDIQGGSVALHSVKTVNNDQGEDEKLILLGKGMEKKRSFGASVVRSASIRIXQVSQELKRLASLSKQTAPAARVHYDRNKSAAYHALQKGLKFIRSGN

SEQ ID NO: 257670 - protein, 80 aa, Glycine max
  unsure (1)..(80): unsure at all Xaa locations
  Clone ID: PAT_MRT3847_746C.1.pep
PSXSSPPXXXPRWRXXRSDADDILIRQXVPXXXEANEEDXXLNXEXHSXLQXQXRQDXRHQGGXRSSLRRXQVNLGRAXC

SEQ ID NO: 257671 - protein, 43 aa, Glycine max
  unsure (1)..(43): unsure at all Xaa locations
  Clone ID: PAT_MRT3847_74700C.1.pep
KYFFGSDSXKVYVYKLVLRKVNLLINLSNKVNNFQIEFDLYTL

SEQ ID NO: 257672 - protein, 45 aa, Glycine max
  Clone ID: PAT_MRT3847_74701C.1.pep
SVALQNASNTGIRFILGGSSVLNSKRFLRDLEEAQRVARSSTTVI

SEQ ID NO: 257673 - protein, 56 aa, Glycine max
  Clone ID: PAT_MRT3847_74702C.1.pep
ENERDFAYRHCSVRRGVSENQPVGPGESQLSFDPLSSHHQHSYRTQARSDSAIARA

SEQ ID NO: 257674 - protein, 46 aa, Glycine max
  Clone ID: PAT_MRT3847_74703C.1.pep
MSITRGSNSILKTLRLKNPKLVLLECCSNARDLKIIHAHMLRTHLF

SEQ ID NO: 257675 - protein, 82 aa, Glycine max
  Clone ID: PAT_MRT3847_74704C.1.pep
VSGNFLPNVGVPPLGWGPLLLKLGESLKFPKMGSCPPFGRLGSGVAFPPQWVGIVLTLWESKSKKFFKPSPGNFGGKLNLGD

SEQ ID NO: 257676 - protein, 181 aa, Glycine max
  Clone ID: PAT_MRT3847_74705C.1.pep
LKAKVGIMNLTKSSKQASRPWKSLKIKIKNSFQIASEQFYLQETHDHRSIHIQICSSPEANPNANQQTPRYKSAPSTTTASVLLHVDPVQDMLLAQSQVTLLFYYLICYMVGKVCFPAKTSQSKVIISFISPVKCIVMEEEGPSPEGGSTVDCVHRQLGQVGEGECGFTHILRTRGRTRGR

SEQ ID NO: 257677 - protein, 53 aa, Glycine max
  Clone ID: PAT_MRT3847_74706C.1.pep
MTQVNWRKKASHPKMKGWQTMKVLIFLMNLNLTKMVAKPVRLHSGIKMRKWIQ

SEQ ID NO: 257678 - protein, 41 aa, Glycine max
  Clone ID: PAT_MRT3847_74707C.1.pep
TCIRIFISVRVDTAHRMYRQLWEQYVNFKFPLKIKYDFGIK

SEQ ID NO: 257679 - protein, 71 aa, Glycine max
  Clone ID: PAT_MRT3847_74708C.1.pep
EKTTEGLSHFFFTKVMSISSLPNNFRILFSSMSHLFFLNQTTKYFTLFLFVRIIFFYFHLLYFYLLNLTQT

SEQ ID NO: 257680 - protein, 67 aa, Glycine max
  Clone ID: PAT_MRT3847_74709C.1.pep
EGETDALEECSEWLKAHGASGITDNNGDMLLDTKVSSSNLFVPEPEDAVAHGDANLAGDDFLARAPL

SEQ ID NO: 257681 - protein, 91 aa, Glycine max
  Clone ID: PAT_MRT3847_7470C.1.pep
LEKIVLLSFLSTKGANSTNKAKPFLICASQYSLLKYLWLLLTLFPKGFKEVEISRRTNKKELTRYDYNKGRKEKHTSRHNPTQQTKTVFPT

SEQ ID NO: 257682 - protein, 82 aa, Glycine max
  Clone ID: PAT_MRT3847_74710C.1.pep
VLGFSTGVATNGVSDERETDALEECSEWLKAHGASIITDNNGDMLLDTKVSSSNLFVPEPEDAVAHGDANLAVDDFLARAPL

SEQ ID NO: 257683 - protein, 46 aa, Glycine max
  Clone ID: PAT_MRT3847_74711C.1.pep
RTREDYNMVIWATLHEAPTKMECRKDRCLKIKILMLCQPSPSISIY

SEQ ID NO: 257684 - protein, 225 aa, Glycine max
  Clone ID: PAT_MRT3847_74712C.1.pep
ITLQKLRVYETHARLALEFGDLFEYNQCQSQLQTLYAEGIEGSDMEFAAYNLLCVIMHSNNNRDLVSSMARLSHEAKKDEAVKHALAVRAAVTSGNYIAFFRLYKTAPNLNTCLMDLYAEKMRYKAANCMCRSYRPTLPVSYISRVLGFSTGMATNGASDEGETDALEECSEWLKAHGASIITDNNGDMLLDTKVCLISILCIHCPVGANLVKNFCSQASSILIC

SEQ ID NO: 257685 - protein, 184 aa, Glycine max
  unsure (1)..(184): unsure at all Xaa locations
  Clone ID: PAT_MRT3847_74713C.1.pep
AYAWAGLRVMYPVKRTYWFDIYKNIDKIPLVNCPVLVIHGTADDVVDCSHGKQLWENCKQKYEPLWIKGGNHCDLELYPQYIKHLKKFITVIEKSPHQKTGSDRIPDQLDKPRNSIDFREKSRPSMDQRENLRVXDQKEKPSASTDHKEKSRASVDRRDKSRKSIDRPEKSYNGSDIPEKARNS

SEQ ID NO: 257686 - protein, 80 aa, Glycine max
  Clone ID: PAT_MRT3847_74714C.1.pep
RESSFPRVVNGDISVTVSIAVTINVINIIIITPIMFFSYPYERIFGLSRFHLVEAQWCRNGPHNGVTVLTENLKDGFINV

SEQ ID NO: 257687 - protein, 144 aa, Glycine max
  Clone ID: PAT_MRT3847_74715C.1.pep
DCMHLLDPSRTPLSAHFRISLPKRHHFASCSLVALLEPPPFFFISHVPTRPLHSFIFVFHFLNLLLSFFFVSSYLSLSSFISLFSWTFSRTVFIQALDFDFFLFFLVEIGKHKMYRFLRIVRFAFLAGSFGHLLDPMDVENLPS

SEQ ID NO: 257688 - protein, 129 aa, Glycine max
  unsure (1)..(129): unsure at all Xaa locations
  Clone ID: PAT_MRT3847_74716C.1.pep
MHSDNDMAACGGLLRDCHGRWAASFVXKLGNTSAFVAELXGAYLGLSLAWDKGDKNLEVNIDSLVVVVSIKISKQGSASGWSLINTICWLIGRRXECYLCHIYREANGCADALANYACAMEEEYVILEQ

SEQ ID NO: 257689 - protein, 48 aa, Glycine max
  Clone ID: PAT_MRT3847_74717C.1.pep
YLYASTLSTIDTLVRARPTPSHRCSTTCASSVPHVLRGSLVSSDTQLV

SEQ ID NO: 257690 - protein, 65 aa, Glycine max
  Clone ID: PAT_MRT3847_74718C.1.pep
SSSIKSLVCANRQYHVCKFALVCFACDSILGYMCSIFSRVSSFSSLCRDIRDVIGSISTLLFVVV

SEQ ID NO: 257691 - protein, 552 aa, Glycine max
  Clone ID: PAT_MRT3847_74719C.1.pep
ADAGLRTLILAYRELDEEEYNLFNEEFMEAKNLVSADREQIVEEISEKIEKDLILLGVTAVEDKLQNGVPECIDKLAQAGIKLWVLTGDKMETAINIGFACSLLRQGMKQIIISSDTPETKSLEKMEDKSAAAVAVKVSVIHQLTNGKELLAESDENSEALALIIDGKSLTYALEDDVKDLFLTLAAGCASVVCCRSSPKQKALVTRLVKVKTGSTTLAIGDGANDVGMLQEADIGIGISGVEGMQAVMSSDIAIAQFRFLERLLLVHGHWCYRRISSMICYFFYKNIAFGFTLFFYEIYASFSGQAAYNDWYLSLYNVFFTSLPVIALGVFDQDVSARLCLKFPLLYQEGVQNVLFSWKRILGWAFNGVLSATIIFFFCINGMENQAFRKAGEVADLEVLGATMYTCVVWVVNSQMALSISYFTYIQHLFIWGGILFWYIFLLVYGTMDPSLSTTAYKVLIEACAPAPSYWLITLLVLVASLLPYFAYASIQMRFFPTFHQMIQWIRNDGQTTDPEYVNIVRQRSIRHTTVGFTARFEASHSSGASKSIQV

SEQ ID NO: 257692 - protein, 71 aa, Glycine max
  Clone ID: PAT_MRT3847_7471C.1.pep
EVPSQLVKTKVHQQFTAVIVIVIMWWCVSRKDWSDSIKRKRMGIRNKGGGGWLGLAKEDGECRREGDKKTE

SEQ ID NO: 257693 - protein, 74 aa, Glycine max
  Clone ID: PAT_MRT3847_74720C.1.pep
AANVQSGELVNYDSLSGFPLYVSKDIDGMLVVNRIRSEIVDVRKKEIVVHVMDGVIMDAEFEQSVLSEDDTEED

SEQ ID NO: 257694 - protein, 59 aa, Glycine max
  Clone ID: PAT_MRT3847_74721C.1.pep
GGAPLFPWRNASRVPFMFSTMAPKNQLKLTLSSGLKVVFQTNPGPGLLAKSRNPPRSPL

SEQ ID NO: 257695 - protein, 72 aa, Glycine max
  Clone ID: PAT_MRT3847_74722C.1.pep
HLPLQLLTHKIFKNDCNFSHNVKVFRLSPTTLTSISTITEKSRPQLQFKTLNKTIQDRVTMPFGLVSAWNKR

SEQ ID NO: 257696 - protein, 78 aa, Glycine max
  Clone ID: PAT_MRT3847_74723C.1.pep
SPGPLGVGWPMFRCAWSVFGLWGVVRILLFLVRSFRWFWWSGPRWKISLFVFLVWGPSPAYRHKPSPWAAARVLGNDG

SEQ ID NO: 257697 - protein, 128 aa, Glycine max
  unsure (1)..(128): unsure at all Xaa locations
  Clone ID: PAT_MRT3847_74724C.1.pep
MLITVLQKIYLLGSEAQTQILLSGPPVLAGVIGIIAYAIYRAGGIGGVRLYVPILSIVAALHLKTGSSISAFMVTGGSIAYVMCNMCITGPKFGGXSLIDYDIALSSXPCMLLLVSLRIIWNLEFSEW

SEQ ID NO: 257698 - protein, 72 aa, Glycine max
  Clone ID: PAT_MRT3847_74725C.1.pep
KEKKKKKPFIGPPNISKLRSNTPPNFPPPSSITPPRKKNLKKKKPKKRGHPRPSFQNQKPPWAPTDPPRGPP

SEQ ID NO: 257699 - protein, 85 aa, Glycine max
  Clone ID: PAT_MRT3847_74726C.1.pep
GITEADLCLFHTLIRLDVYQSKADKKHLTDFPNVVAYLRDLYQYGLKSTVCWSHLKIGLENKVPGAIADGPFVDYDEAHVRAQLS

SEQ ID NO: 257700 - protein, 36 aa, Glycine max
  Clone ID: PAT_MRT3847_74727C.1.pep
KELLFTSIKFCCNTLSTIVEGRLCDLVPKYWKAPLP

SEQ ID NO: 257701 - protein, 98 aa, Glycine max
  unsure (1)..(98): unsure at all Xaa locations
  Clone ID: PAT_MRT3847_74728C.1.pep
MSDQALILLKDFLSGGMAAAXISKTAVAPIERVKLLLQVQHAIKQIIADKQYTGIIDCVVRIPKEQVSVSFWTRNLTNVIRYLRTQALKFAFNDKYKQ

SEQ ID NO: 257702 - protein, 217 aa, Glycine max
  unsure (1)..(217): unsure at all Xaa locations
  Clone ID: PAT_MRT3847_74729C.1.pep
MESEDDMPDANDIESLDDDFYSGETEDAPLDYYSDYDADDYFDDAERIESRRPEQNFTILKESDIRLRQEDDVTSSNGSFHIKXVXASILLRHHNWSVSRVHDAWFADEERVRKAVGLLEKPIVQHPNTRELTCGICFENYPRARIEMASCGHPYCISCWEGYISTSINDGPGCLMLRCPDPTCDAAIGQDMINLLVSDEDKQKYARYLLRSYIEDN

SEQ ID NO: 257703 - protein, 118 aa, Glycine max
  unsure (1)..(118): unsure at all Xaa locations
  Clone ID: PAT_MRT3847_7472C.1.pep
MFEILKLHSPCTIQKRQTERTGNIQPPQRSYDGATHPGNMPGGHVWNRDVTRPMNVDGMQRIREQEPQGYNLXAQAGMVAGKNPGGNPMQRGEPXXQMKRKDQTGMRVYPPEQKPRRI

SEQ ID NO: 257704 - protein, 92 aa, Glycine max
  Clone ID: PAT_MRT3847_74730C.1.pep
AIITLNKGSLRLYPGLWLSHSLIALTSIDRTIKCRRDAMRDAVRRDRRAPHPPRSLTENDTRLTGSTAIQSMSTGTLRRTRLTRCRATRTLT

SEQ ID NO: 257705 - protein, 115 aa, Glycine max
  unsure (1)..(115): unsure at all Xaa locations
  Clone ID: PAT_MRT3847_74731C.1.pep
GREPASTYTKSRSFHGVPAEERLHWRSFLVKLGADNLKGVKNEELLVACHXSEVIFVITSAVKDVCGKPPSERLFLDKYGRICLCLDEIVWKGYLENTEKDRIKRLVRLKPPTEF

SEQ ID NO: 257706 - protein, 34 aa, Glycine max
  Clone ID: PAT_MRT3847_74732C.1.pep
PFRDGVDASGSKGQAKGVFQFVAKYGGNVHGFSP

SEQ ID NO: 257707 - protein, 125 aa, Glycine max
  Clone ID: PAT_MRT3847_74733C.1.pep
LRVDLLCYYQHPLRRKQPCPQGCEDHVSRPKVPRTPPPEEDPPIAPKHVLPASCPRSRVSSRGLRKGVQWVFMEFLQRSSVVLLKGGDETMILAVLFANVEGNILIERFVSCPKLITQLRGKLEN

SEQ ID NO: 257708 - protein, 94 aa, Glycine max
  Clone ID: PAT_MRT3847_74734C.1.pep
FTATLCCHLLRGPRANSERADAICSIQHDLGTPDLVTRNLPDLQYPGLHHAVNVECMCDGIIFVAIAFITSTSQGAWAPRRETRVVGRAEFPML

SEQ ID NO: 257709 - protein, 149 aa, Glycine max
  Clone ID: PAT_MRT3847_74735C.1.pep
MLPLSLLKTAQGHPMLVELKNGETYNGHLVNCDTWMNIHLREVICTSKDGDRFWRMPECYIRGNTIKYLRVPDEVIDKVQEETKSRTDRKPPGVGRGRGRGREDGPGGRQPKGIGRGLDEGGPKGQGGRGRGGPGGKPGGNRGGGRGRG

SEQ ID NO: 257710 - protein, 53 aa, Glycine max
  Clone ID: PAT_MRT3847_74736C.1.pep
GTSWGPSVRQIKGRCAFRTQWAPPELSEDKVRQSDETHLHSVLWGNAVKFFQN

SEQ ID NO: 257711 - protein, 100 aa, Glycine max
  Clone ID: PAT_MRT3847_74737C.1.pep
TTRIMVGLPSLENRVKILRNLLAKEKVDTEVEFRHLATMTEELPARVEKNLCTTAAYRPVRELIQQERIKSLVSGNCIIYFEFNGDALIIQSQITVNITL

SEQ ID NO: 257712 - protein, 48 aa, Glycine max
  Clone ID: PAT_MRT3847_74738C.1.pep
IHWLKFLILTANQNFPKKKQIKLSRGGPASPAGSLSLHIHFFHFIQGA

SEQ ID NO: 257713 - protein, 76 aa, Glycine max
  Clone ID: PAT_MRT3847_74739C.1.pep
REKKIPTNWALNRNLKKPPKGENGGAKQKKNKALFFNKFYLGEIPLAHLQLFGGNFSPKFPSNPFPYKKKIAPPKN

SEQ ID NO: 257714 - protein, 59 aa, Glycine max
  Clone ID: PAT_MRT3847_7473C.1.pep
VDLSQLPLPWYSLLMSCIRVSTGSIGFLMSYYFCALPWFSFSKDSLRFLLSLLINYEKG

SEQ ID NO: 257715 - protein, 64 aa, Glycine max
  Clone ID: PAT_MRT3847_74740C.1.pep
YTRSLRCNLSYRLQSKPLMGDFPATTKMLASLFNATFCQRGGRRMNTSYMERTLWHYHPIREVA

SEQ ID NO: 257716 - protein, 255 aa, Glycine max
  unsure (1)..(255): unsure at all Xaa locations
  Clone ID: PAT_MRT3847_74741C.1.pep
LTTLQMESVDLNGNIPVNLFSLAYLQNVVLNNNNLGGTLDIGTNNRKHLKLVNLKSNSIQDFEQQNDLPENITIILESNPICTETGAMERSYCKKHNILDTEPQNKCPPDSCSRDQILSPKCICGYPITGTLTFRAPSYFEWRDTTSLEKHLLQEFQSHDLPVDSVSLIISDPFHSFVYTIQIFPRGQDRFDRQDKSTISSILGNLSATSPYDFITGNQGPKESTNSSSKVLIIRVAVXGSFVMLVLLVLAGVYA

SEQ ID NO: 257717 - protein, 99 aa, Glycine max
  Clone ID: PAT_MRT3847_74742C.1.pep
EAQEQGPAQAFSPKGAEGAAHEGHDHMAPAEPPSKHASSRKNHAEDGGLDPRQITLRIARERPRQRRRTPKQRRAATAPDRRTTGHEQSENFFFSPPPP

SEQ ID NO: 257718 - protein, 41 aa, Glycine max
  Clone ID: PAT_MRT3847_74743C.1.pep
DQAFGFVGNAQMQSLSTLTISDMTGSFPSQDCPRSTYAGRT

SEQ ID NO: 257719 - protein, 65 aa, Glycine max
  unsure (1)..(65): unsure at all Xaa locations
  Clone ID: PAT_MRT3847_74744C.1.pep
TFNPPFNKNYNHXMXHFHDPIPHIKHQTTLFFPTKILTNQRSIPIPPKTKTKNNYPQNDIYTFTN

SEQ ID NO: 257720 - protein, 63 aa, Glycine max
  Clone ID: PAT_MRT3847_74745C.1.pep
IFYTNTLLNPLKLIVLLIHTTNMDCFILQAGYLNSAFPFFGTIPRCIQNRLYNTGNRIFSIIP

SEQ ID NO: 257721 - protein, 213 aa, Glycine max
  Clone ID: PAT_MRT3847_74746C.1.pep
EKGELVEAPVKLERKGVSPERSIEALKNHSEAERRRRARINAHLDTLRSVIPGAKKLDKATLLGEVIRHLKELKTNATQASEGLMIPKDSDEIRVEEQEGGLNGFPYSIKASLCCEYKPGLLADIRQALDALHLMIIRAEIATLGGRMNSVFVIISCKEQNIEDPEYRQFLAGSVHQALRSVLDRFSVSQDMLESRKRRRISIFSSSSIGDFF

SEQ ID NO: 257722 - protein, 37 aa, Glycine max
  Clone ID: PAT_MRT3847_74747C.1.pep
VGHNLTQFHSLKCIYSAKHFSAQRDYNTSLSHCTPHT

SEQ ID NO: 257723 - protein, 794 aa, Glycine max
  Clone ID: PAT_MRT3847_74748C.1.pep
MKNQLMFLSMFLSFLILPTASQKHACGSAKTSNFPFCDTSLSYEDRAKDLVSRLTLQEKTQQLVNPSAGISRLGVPAYEWWSEALHGVSNLGPGTRFDKKVPGATSFPAVILSAASFNASLWQKMGQVVSTEARAMYNVDLAGLTFWSPNVNVFRDPRWGRGQETPGEDPLVVSRYAVMYVRGLQEVEDEASAKADRLKVSSCCKHYTAYDLDNWKGIDRFHFDAKVTKQDLEDSYQPPFKSCVVEGHVSSVMCSYNRVNGIPTCADPDLLKGIIRGQWGLDGYIVSDCDSVEVYYNAIHYTATPEDAVALALKAGLNMNCGDFLKKYTANAVNLKKVDVATVDQALVYNYIVLMRLGFFDDPKSLPFANLGPSDVCTKDNQQLALDAAKQGIVLLENNNGALPLSQTNIKKLAVIGPNANATTVMISNYAGIPCRYTSPLQGLQKYISSVNYAPGCSNVKCDNQSLIAAAVKAAASADAVVLVVGLDQSIEAEGLDRENLTLPGFQEKFVKDVAGATKGKVILVIMAAGPIDISSTKSVSNIGGILWVGYPGQAGGDAIAQVIFGDYNPGGRSPFTWYPQSYVDQVPMTDMNMRANKSRNFPGRTYRFYNGNSLYEFGHGLSYSTFSMYVASAPSSIMIENTSISEPHNMLSSNNSGTQVESLSDGQAIDISTINCQDLTFLLVIGVKNNGPLNGSHVVLVFWEPATSEFVIGAPIKQLIGFERVQVVVGVTEFVTVKIDICQLISNVDSDGKRKLVIGQHTILVGSSSETQVRHHIDVKLSGSMNGKEFMSE

SEQ ID NO: 257724 - protein, 63 aa, Glycine max
  Clone ID: PAT_MRT3847_74749C.1.pep
LRELSEPAPTHDAAGSQCFFGNHGDSGNYASPPPRHPRVSTLALQSFSGYIWSYRYIGARYEL

SEQ ID NO: 257725 - protein, 66 aa, Glycine max
  Clone ID: PAT_MRT3847_7474C.1.pep
MSFSFSNVALFLTLYVACLMQLQKAVKLLDSGAVRATRFLWRYPTARVILFFYLVRSVHYMFKMSI

SEQ ID NO: 257726 - protein, 173 aa, Glycine max
  unsure (1)..(173): unsure at all Xaa locations
  Clone ID: PAT_MRT3847_74750C.1.pep
MHSVISRFFAMGEDFNNNDPLIRNQNAAVQARAKDQNRANALQLKLIGQSHPTGLTANLLRLFEPRPALDYKPPPEKRXCPSLXAQKRARIHKLRLEKGAAKAAEELEKYDPHNDPNVSGDPYKTLFIARLSYESTDSRMKREFESYGAIKRVGVLNIPKGFSKDIVYARLLI

SEQ ID NO: 257727 - protein, 51 aa, Glycine max
  Clone ID: PAT_MRT3847_74751C.1.pep
LKNRCADNSFGLCKGDDLDTVADKRPLMLYTPTGNPKIDGRHTRMTATMAI

SEQ ID NO: 257728 - protein, 110 aa, Glycine max
  Clone ID: PAT_MRT3847_74752C.1.pep
IVLIIFYRKKVSIIVILSCDQFYGGSISEGSELQIEVAEFFWRNVQLNGSLIIISENVMGSMKINENGESILHYGQRCGRCKLQNVKVLNKGIDWTCGENIYWKHDVQRS

SEQ ID NO: 257729 - protein, 110 aa, Glycine max
  unsure (1)..(110): unsure at all Xaa locations
  Clone ID: PAT_MRT3847_74753C.1.pep
NPVLPPDEPIAHYNNRHESPAESACGHETRPTADADAAYKMENGPAEGNCLAQKVIHRVSSPDQVTPQEEDRESXNMICEKMHHLPEEDLDQLKNALRRTLEGGNGPEHR

SEQ ID NO: 257730 - protein, 698 aa, Glycine max
  Clone ID: PAT_MRT3847_74754C.1.pep
MEESEILTLEVSPPPPPDFNFRREIARLADLRDRLSACSTLNEKLRVIDADSRVKRFFRSRRGLAGVLASLQLSSDQLFLLKCVVAAGQEHVLCLGETESLESSVATSAVKSALYTLADMIENMDSFNGNGGAGFGMALGDHEIAELNNLLEILAEIERFYDCIGGIVGHDVKECQILGINAPNGLNLSEDTEYASQAALWGIEGLPDLGEIYPLGGSADRLGLVDPNTGECLPAAMLPYCGRTLLEGLIRDLQAREFLYFKLYGKQCITPVAIMTSSAKNNHKHVTSLCERLSWFGRGRSTFQFFEQPLVPVVGAEEGQWLVTKPFSPLSKPGGHGVIWKLAHDKGIFTWFYCQGRKGATVRQVSNVVAATDLTLLALAGIGLRQGKKLGFASCKRILGATEGVNVLMEKKSLDGNWEYGVSCIEYTEFDKFGITTGPLAPKGLQTEFPANTNILYIDLPSAELVGSSKSETSLPGMTPDGALLDILRNAHDLLSQCDIRLPEIEANENYVDSGPPFLILLHPALGPLWEFYGGSISEGSELQIEVAEFFWRNVQLNGSLIIISENVMGSMKINENGESILHYGQRCGRCKLQNVKVLNKGIDWTCGENIYWKHDVQRSEVLQIILHGNAEFEATDVVLQGNHVFEVPDGYKLKITPGSPGLAIKLDPIDQDMMESGSWHWDYKIEGSHIQLELVES

SEQ ID NO: 257731 - protein, 476 aa, Glycine max
  unsure (1)..(476): unsure at all Xaa locations
  Clone ID: PAT_MRT3847_74755C.1.pep
PLVPVVGAEEGQWLVTKPFSPLSKPGGHGVIWKLAHDKGIFTWFYCQGRKGATVRQVSNVVAATDLTLLALAGIGLRQGKKLGFASCKRILGATEGVNVLMEKKSLDGNWEYGVSCIEYTEFDKFGITTGPLAPKGLQTEFPANTNILYIDLPSAELVGSSKSETSLPGMVLNTRKPIVYTDQFGRRHSVSGGRLECTMQNIADNYSNSYSSRCYNXVEDKLDTYIVYNERRRVTSSAKKKRRHGDKSLHQTPDGALLDILRNAHDLLSQCDIRLPEIEANENYVDSGPPFLILLHPALGPLWEVTKQKFYGGSISEGSELQIEVAEFFWRNVQLNGSLIIISENVMGSMKINENGESILHYGQRCGRCKLQNVKVLNKGIDWTCGENIYWKHDVQRSEVLQIILHGNAEFEATDVVLQGNHVFEVPDGYKLKITPGSPGLAIKLDPIDQDMMESGSWHWDYKIEGSHIQLELVES

SEQ ID NO: 257732 - protein, 245 aa, Glycine max
  Clone ID: PAT_MRT3847_74756C.1.pep
MSTKLLLTLILISYTLSNVIGEETGFVGTLHPKSLGLHKKQTLSHFKFYWHDIVSSGANSTSATIIPPLPKYNTTTSFGMVNVMDNPLTLGPELGSKLVGRAEGFYALTSQSQINLLMVMNFALFEGKYNGSTITIVGRNAVSENEKDIPVVGGSGVFKFAKGYAHAKTYFFDPKTGDATTEYNIYVLHYEEGIYALTSQSQINLLMVMNFALFEGKYNGSTITIVGRNAVSENEKDFPVVGGSG

SEQ ID NO: 257733 - protein, 43 aa, Glycine max
  Clone ID: PAT_MRT3847_74757C.1.pep
YYRPVWYWNPIKKVLEKIIEIELCLVSGVNCLLPLLLGKFELR

SEQ ID NO: 257734 - protein, 165 aa, Glycine max
  Clone ID: PAT_MRT3847_74758C.1.pep
MSFKLYSFIHTMELRPSFLVLTSFLLLLLWLARIYKQKIKVRSVVHKLPPGPWKLPLIGNLHQLAGAGTLPHHTLQNLSRKYGPLMHLQLGEISAVVVSSSDMAKEIMKTHDLNFVQRPELLCPKIMAYDSTDIAFAPYGDYWRQMRKICTLELLSAKRVQSFSF

SEQ ID NO: 257735 - protein, 180 aa, Glycine max
  unsure (1)..(180): unsure at all Xaa locations
  Clone ID: PAT_MRT3847_74759C.1.pep
SRSHLILSIVIESTXNLQSQSTARGKLSFVDLAGSERVKKSGSSGSQLKEAQSINKSLSALGDVISALSFGGQHIPYRNHKLTMLMSDSLGGNAKTLMFVNVSPVESSLDETHNSLMYASRVRSIVNDPSKNVSSKEIARLKKLIGYWKEQAGRRGEDEDLEEIQEERPTKERTDGRHSM

SEQ ID NO: 257736 - protein, 172 aa, Glycine max
  Clone ID: PAT_MRT3847_7475C.1.pep
KDKGLGKPPPLGGGPFEGSAGIREGGRTGITALTVAADSFLACFFTGLLASIPAWAVGPPLILVGVLMMRSVVEIDWEDMREAIPAFVTLILMPLTYSIAYGLIGGIGTYIVLNLWDWGWEGLGHFGLGKKTTTAAAMASDEDSHHHHGVNGILQNQHSPQNPTAKALQLEP

SEQ ID NO: 257737 - protein, 73 aa, Glycine max
  Clone ID: PAT_MRT3847_74760C.1.pep
RRQCLTRVNEWILQFNSNVQKLIIILNHRLPNAKFIFADTYPLVLDLINNPSTYGNLASLPYILIYMLMVVNN

SEQ ID NO: 257738 - protein, 97 aa, Glycine max
  Clone ID: PAT_MRT3847_74761C.1.pep
FGSRYTHTLVYAILALDSCSVPSTEIVVMLGTRSPPLVGQSWDLLGSGGGAAVLFDALGGLGGPCDMMNLPMQSPKGLQSSDLDGVGLGIVAGLGEL

SEQ ID NO: 257739 - protein, 119 aa, Glycine max
  Clone ID: PAT_MRT3847_74762C.1.pep
MLQETSDVSPVGVRKRKAPLNAHSKTKSTSNRQSNSRRQSLAHAGLTWKSGVMRSTRIKTRPLQHWCGEKVLYGRVHNSMITVIAMMYAEREVDGKSPVLNVKSYVSDQYADLASKVAK

SEQ ID NO: 257740 - protein, 92 aa, Glycine max
  Clone ID: PAT_MRT3847_74763C.1.pep
NIHFGPGKNPLFLFNPPKLFGLDPKVCFLRTPHTPHPLVNPSVKPGGEGQKPRNPCAEGYGGNPPGGAGLLDYRRGRFFSPIANLLKGWAPW

SEQ ID NO: 257741 - protein, 48 aa, Glycine max
  Clone ID: PAT_MRT3847_74764C.1.pep
MSPNSIADYDIDATGDCKLAACNPFYSCARDWLLKSRGMRFWLGKIGR

SEQ ID NO: 257742 - protein, 116 aa, Glycine max
  unsure (1)..(116): unsure at all Xaa locations
  Clone ID: PAT_MRT3847_74765C.1.pep
MARFSLDEISDTGAFVRSASTFRNWISRDLNSQFPPESGRYHLYVSYACPWASRCLAYLNIKGLNKAISFSAVKPIFERTNESDDYKGWVFPESETEVPGAEPDMLNGAKTIXELY

SEQ ID NO: 257743 - protein, 325 aa, Glycine max
  Clone ID: PAT_MRT3847_74766C.1.pep
MARFSLDEISDTGAFVRSASTFRNWISRDPNSLFPPESGRYHLYVSYACPWASRCLAYLNIKGLDKAISFSAVKPIFERTRESDEYKGWIFPESETEVPGAEPDRFNGAKTIRELYEIASENYAGKYTVPVLWDKKLKTIVNNESSEIIRMFNTEFNNIAENPTLDLYPTDLKAQIDDTNEWIYDSINNGVYKCGFAKKQEPYNEAARQLYGALDKCEDILSKQRYICGNTLTEADIRLFVTLIRFDEVYAVHFKCNKKLLREYPNLFNYTKDIFQIPGISSTVNMEHIKLHYYGSHPSINPFGIVPVGPNIDYSAPHDRERFSA

SEQ ID NO: 257744 - protein, 46 aa, Glycine max
  Clone ID: PAT_MRT3847_74767C.1.pep
MATSLTYGAVLPSIAILHRNVAYVKAIKNTEGMGPGTYTMWIGWHP

SEQ ID NO: 257745 - protein, 80 aa, Glycine max
  unsure (1)..(80): unsure at all Xaa locations
  Clone ID: PAT_MRT3847_74768C.1.pep
VKCRTIRHQQKAGLAVWAIQCDFNRGFICPQVMQFEDLKDLGXESTVEVGGKYVQEGKTYVVQDGDGIFLKLNVSGEGKK

SEQ ID NO: 257746 - protein, 76 aa, Glycine max
  Clone ID: PAT_MRT3847_74769C.1.pep
ARASMLLSLMSGLTTQAPKPGGIRQRTTPPCSMTVLNMKEGRLQTMDWDTVITACLPHTDELIITYYRAERIRQNM

SEQ ID NO: 257747 - protein, 38 aa, Glycine max
  Clone ID: PAT_MRT3847_7476C.1.pep
QDSFIIYSMNAQLKHQPYDMKGKHPMLRDWLLFNRLIC

SEQ ID NO: 257748 - protein, 41 aa, Glycine max
  Clone ID: PAT_MRT3847_74770C.1.pep
CMQQVKKHTLHIYLSTYNFFLPKFMHLLLKNRIDLLFFLQQ

SEQ ID NO: 257749 - protein, 60 aa, Glycine max
  unsure (1)..(60): unsure at all Xaa locations
  Clone ID: PAT_MRT3847_74771C.1.pep
AGQVFRKKQLDNLNELQWLGCLGXGRACHXDWGRPVKLRSGVADASAYLGSGIPMIPSRI

SEQ ID NO: 257750 - protein, 359 aa, Glycine max
  Clone ID: PAT_MRT3847_74772C.1.pep
ERLKEEGFLTDIIYDDEVITRLKERLQVKTDKNLPMVDNRKYSGVRKSTLGLSGGKELIAIIRASGSIRRIESSLSTRSSGIIGEKLIEKIRKVRESNKYKAAIIRIDSPGGDALASDLMWREIRLLAASKPVIASMSDVAASGGYYMAMGAGVIVAESLTLTGSIGVVTGKFNLGKLYEKIGFNKEIISRGRYAELLAAEQRPFRPDEAELFAKSAQHAYKQFRDKAASSRSMTVEKMEEFAQGRVWTGKDAALRGLVDAIGGLSRAIAIAKMKADIPQDRQVTLVEISRASPSLPEILLGVGSSLVGADRTAKELLQGLTFSDGVQARMDGIKFQTLEEYPFGNPILSIIKDILSSL

SEQ ID NO: 257751 - protein, 38 aa, Glycine max
  Clone ID: PAT_MRT3847_74773C.1.pep
DALPVRSATLSSQAHSHAPHTDPVRNSATPMKQSTETP

SEQ ID NO: 257752 - protein, 65 aa, Glycine max
  Clone ID: PAT_MRT3847_74774C.1.pep
ADPFLCQEVWQPIAKFLIFASVGLGDSLPIQQAAELVQKTQRIGVAGNLVKLVLREAAIKGKLEF

SEQ ID NO: 257753 - protein, 121 aa, Glycine max
  Clone ID: PAT_MRT3847_74775C.1.pep
MEKRFLLGQRIKKFMWGDCLPVNYKFLKNNGKRQLRRKIVGATPFKNKKGKAKWGKVFMKNPKNVRRSKFLWQKKQMLIMERGVVKKPQRSFFSISRASMFSWGKNFFQLSWGHFCLPLHF

SEQ ID NO: 257754 - protein, 46 aa, Glycine max
  Clone ID: PAT_MRT3847_74776C.1.pep
TTRNLQKKKKKKKKKKKKKKKKKKKKKKIKINKKKIKNNLNKIKKN

SEQ ID NO: 257755 - protein, 123 aa, Glycine max
  Clone ID: PAT_MRT3847_74777C.1.pep
HKLLTRDRHRTMTHPIDPPLEEHVPKQLRMIPHQMCKTSPHEILEDLRTPPLTPVPIEPMRLSAASFSLSFLNNIDCLKINETVVRNGVTYYVLEVYQFHYSSRLPTNVNNPRMAATHQSDGS

SEQ ID NO: 257756 - protein, 83 aa, Glycine max
  unsure (1)..(83): unsure at all Xaa locations
  Clone ID: PAT_MRT3847_74778C.1.pep
DLGIIAPIAIGFIVCAYILLGGAFSGAAMNPAETFVPAGGSWTXTSHWIYXARPDHRGGIAGLDYEAVFISHTHEQITTTDYY

SEQ ID NO: 257757 - protein, 67 aa, Glycine max
  unsure (1)..(67): unsure at all Xaa locations
  Clone ID: PAT_MRT3847_74779C.1.pep
CXXRXWTXXXXXXXWSXXKXXXIXRXXSXCIXPIVIRXXXXXXXCXXXXRXXXXRAEFRAYVRVXAT

SEQ ID NO: 257758 - protein, 57 aa, Glycine max
  Clone ID: PAT_MRT3847_7477C.1.pep
PTRPPTRPPTRPPTRPRRQKGRWIACVSGVVQTALYADFFYYYFISWKNNSKLKLPA

SEQ ID NO: 257759 - protein, 49 aa, Glycine max
  Clone ID: PAT_MRT3847_74780C.1.pep
PVNHFNFQVTKVASGLGLSGFFGLKKAHRMIGLIHNEKWVNAPWNRLGP

SEQ ID NO: 257760 - protein, 78 aa, Glycine max
  Clone ID: PAT_MRT3847_74781C.1.pep
LLYTTYELNWVSIKSILHKTAYELRKDKETNISYFHVFAWEHYILKNKKNLGRFDSKSDKAILSSDSLSIKAYRFTNS

SEQ ID NO: 257761 - protein, 206 aa, Glycine max
  Clone ID: PAT_MRT3847_74782C.1.pep
PRPAESSEPPSHRQKPTTGDDDRISHLPDVLLLQILSLLPTKQAVITGILSKRGRPLWPAVSVLDFDDESSPEFHHPGGLTGFAEFVYSVLLLHDAPAIERFRLRCANPNYSARDIATWLCHVARRRAERVELSLSLSRYVALPRCLFHCDTVSVMKLNGVFLNALASFSVSLPLLKVLHVGDRVLFGCHDYVVKLIAGCPRLEDL

SEQ ID NO: 257762 - protein, 284 aa, Glycine max
  unsure (1)..(284): unsure at all Xaa locations
  Clone ID: PAT_MRT3847_74783C.1.pep
MLDPRTHHPTNSFELYDATRHKPHTWDVTNSGLWPSKPALEEAEVDDSGICSPPMRTTSPPRRKNNHRSLSPTSRTQAIVRGQRELMEMVKNMPESNYELSLKDLVEHHMVVDATRHEKNAVEERNLSSVYNKREKNGGSRKVDNNNNNKNMAQVKRNGNIDRGGFYLKMGLPFPFGSKDKKKKXKKNEPLGNSCSSRVTPKPSDGSAKGGVVDKEWWKKSPLACKESDSGESSINSDSGKSSGSSSSNSSSSRSNSRRENSGRRCWPFIRRPKNRTQKSKISF

SEQ ID NO: 257763 - protein, 54 aa, Glycine max
  Clone ID: PAT_MRT3847_74784C.1.pep
KSFTLRTGELEKILQAKEINSKLKDRSEEISQNVAQRNKMMQYFKNNNLEPQKV

SEQ ID NO: 257764 - protein, 56 aa, Glycine max
  Clone ID: PAT_MRT3847_74785C.1.pep
EAASRCGSGPDCSVRPFFAYAIKFLHGAGCILLSVNTQEKIMNLRQRGVGDLKHLY

SEQ ID NO: 257765 - protein, 77 aa, Glycine max
  unsure (1)..(77): unsure at all Xaa locations
  Clone ID: PAT_MRT3847_74786C.1.pep
VDSITKRDKXRGQAGNNPYSMERTGXAXRKPSKGNEXPRRDXASXDGXXTKQXRSKTAEKKNRPGGGEEKQKRERTH

SEQ ID NO: 257766 - protein, 364 aa, Glycine max
  Clone ID: PAT_MRT3847_74787C.1.pep
MGSIENASKPRKENPKFELPAGFRFHPTDEELINQYLTKKVVDNCFCAIAIGEVDLNKCEPWDLPGLAKMGETEWYFFCVRDRKFPTGIRTNRATDIGYWKATGKDKEIIMENALIGMKKTLVFYKGRAPKGEKTNWVMHEYRLEGKHNQPPPAKSEWVICRVFEKSRCGKKMHVPKCGRFNNPFGEEPSSGASLLPPLMDSSPYNSETRTTTAGELSQVTCFSDPNQTEDQNNTHDDIVDSMETPILNFSPFSRPDDASTLAKATLSSASNQSAQIAHQIGDSQFPDYCYAPQEPSMLRMLMENHEPCAKQTQKEEFPEGRDFDGDISSMIYSSDMINRMFGNQEHSSSASAGPVDTDFLWNY

SEQ ID NO: 257767 - protein, 56 aa, Glycine max
  Clone ID: PAT_MRT3847_74788C.1.pep
VFECETFNSFHVLFAFIFILFTFNFFPLFLMCFNCLSKPSSHLINDKMNFNRSFIL

SEQ ID NO: 257768 - protein, 209 aa, Glycine max
  Clone ID: PAT_MRT3847_74789C.1.pep
LEVSVTKTTTLSAAKTTITSRSSTPLSRSTARSSTPTTKPTLPASRPTSRASTPARRPSTPPNVPTVSSPSVKTSSVSKSAPVISRQPVPSRGTSPTVKSRPWKPSEMPGFSLDAPPNLRTTLPERSLSTTRGRPGAPNLRSSSVEPASNGRPRRQSCSLSRRRSSNGISRPTGSSMPAVNRAYSRANDNVSPVVMGTKMVERVINMPK

SEQ ID NO: 257769 - protein, 102 aa, Glycine max
  Clone ID: PAT_MRT3847_7478C.1.pep
FGTRVMHLVKAFEKLLTIPKSSKEKDHKEEHDHEHEEQKNKSQVMKWALPGLQFQQHPKPKTLEATTDDASVSGSSSFCGTSDLDLTSENRRIGQELSVSSS

SEQ ID NO: 257770 - protein, 226 aa, Glycine max
  Clone ID: PAT_MRT3847_74790C.1.pep
ITRPPTRPPTRASTRPVNGDGGRDVNLGDSNYSFGEAEALSDEMEEESRYVAEILRIRDVLLNPEDESEAVLFDSLRRLQLMELTVDCLKATEIGKAVNPLRKHGSKDIRQLSRTLIDGWKEMVDEWVKATTTTAITGSEEGTPDSVNPSVVDDDEEEGLPSPSLDEGAFFVTQAGSMELSQFFDGMDDDGNTRPTGPFSKNHENGRKPVFDSHVLQMRKSQASHD

SEQ ID NO: 257771 - protein, 54 aa, Glycine max
  Clone ID: PAT_MRT3847_74791C.1.pep
FNKWLKSLLKYRCVMGFDANEYCLFIKNICNYRIFNDFKGSRPPNYSYKSILAN

SEQ ID NO: 257772 - protein, 77 aa, Glycine max
  unsure (1)..(77): unsure at all Xaa locations
  Clone ID: PAT_MRT3847_74792C.1.pep
NRFYPYHYAPFTSDLKVLGELDITFKLFTLFKPYNQLLTFLSSASSDALSXPYIKLITDPSSPIIDLYPLLLSTVHE

SEQ ID NO: 257773 - protein, 173 aa, Glycine max
  unsure (1)..(173): unsure at all Xaa locations
  Clone ID: PAT_MRT3847_74793C.1.pep
IFNAVLTFFINSQKFTALILNSIIVLTISVTLIALNTESEETKNLSKQKQIIGFFCALGASAIFALHHSLMQFYFEKIIKTETFSTVLSMIFYPMIVGTIGGLVGLLVSGDWRTMGMEMKEFENGSVSYVMTLVCTSVTWQIGCVGMLGLIFEVSSLPSXALSNLELNIAPIL

SEQ ID NO: 257774 - protein, 52 aa, Glycine max
  Clone ID: PAT_MRT3847_74794C.1.pep
CHVTFVNRHSFSHSNGIISNDSAYKRLQGSKIMSNLKSLHHISFFNKNMSIV

SEQ ID NO: 257775 - protein, 54 aa, Glycine max
  Clone ID: PAT_MRT3847_74795C.1.pep
EQREVLIIRAPNLDHPWYICKLRKLLWGKLLFSSYNSCNSYVNTCILYILLFST

SEQ ID NO: 257776 - protein, 179 aa, Glycine max
  unsure (1)..(179): unsure at all Xaa locations
  Clone ID: PAT_MRT3847_74796C.1.pep
MSESTETQKRQAADSESKENAVASKKPKVESCGTGTDGNAVKKPSFLIEADAAEDKGARHTMEDASVMLLDASLDYPGNLRCAHFAIYDGHGGRLAAEYAQKHLHRNVLSAGLPRELFDAKEARRAILNGFLKTDESLLQESAEGGWQDGATAVCVWVLRQRVVVANLGDAKAVLAXST

SEQ ID NO: 257777 - protein, 79 aa, Glycine max
  Clone ID: PAT_MRT3847_74797C.1.pep
PCKCPLAMSPLQKEIGFYKLRYGFYLLSTSLCYPCRSRALSAQDFLYAIQLLFRSQCRRIASNFWEFFFEALLRSLLTA

SEQ ID NO: 257778 - protein, 128 aa, Glycine max
  Clone ID: PAT_MRT3847_74798C.1.pep
AGSAINFKSYKKILEISFFKNNVFTNPKELSLQSLCRDQLNKILNPAEYTIITSLSNNYIDSYILSESNLFIYPYKIIIKTYKTTKLLLSIPIILKLTNALDISIKCIKYTRKTCIVPKTQSFPHAQF

SEQ ID NO: 257779 - protein, 78 aa, Glycine max
  Clone ID: PAT_MRT3847_74799C.1.pep
LAVDKNEDKEHFSSDENVRTIGLEEPNPMEFDSEVSSSASYSPIPESTIDAEHAEDSDTAECFDNHALVALVPAFEQN

SEQ ID NO: 257780 - protein, 215 aa, Glycine max
  Clone ID: PAT_MRT3847_7479C.1.pep
MNIFRLAGDMTHLLSILVLLLKIYATKSCSGISRKTQELYAIVFVARYLDLFTDFISVYNTFMKVVFIASSLAIVWCMRFHPMVRRSYDRELDTFRHYFLVGASFALALILHEKFTVQEIFWAFSIYLEAVAILPQLVLLQRSGNVDNLTGQYIFFLGAYRAFYILNWIYRYLTEPHFTRWIACVSGVVQTALYADFFYYYFISWKNNSKLKLPA

SEQ ID NO: 257781 - protein, 92 aa, Glycine max
  unsure (1)..(92): unsure at all Xaa locations
  Clone ID: PAT_MRT3847_747C.1.pep
PLVSVTSCVFVGGVFRAVSRVLGPVRVVXXGRFLFVLLFRSFPFLFPLFGGSRGLXVLLFLAVFXLGGCRGPCRPVSRGLLRSSSVTRSVVW

SEQ ID NO: 257782 - protein, 67 aa, Glycine max
  Clone ID: PAT_MRT3847_74800C.1.pep
RQDSANRRRPDCGGRVSNSDSLDGMRVVVEPSDRHDIQALRRMEAKKMTELNRERVREPSEPDLIRN

SEQ ID NO: 257783 - protein, 53 aa, Glycine max
  Clone ID: PAT_MRT3847_74801C.1.pep
SKHDESILWVSSITRNTSIIIFPIHFISGAHDIPDREPDTNLIPQGTKIHFKG

SEQ ID NO: 257784 - protein, 100 aa, Glycine max
  unsure (1)..(100): unsure at all Xaa locations
  Clone ID: PAT_MRT3847_74802C.1.pep
FSLNSLMYSLLSFSHDSDVDCCVVEYAGLTGRAXYPCVXPSNVTSNEFAYTGLEIVGDTPRSIITVMIPVFESQFDGLYWRGISEARMYLTVGSVIQCHT

SEQ ID NO: 257785 - protein, 55 aa, Glycine max
  Clone ID: PAT_MRT3847_74803C.1.pep
SLSLSLYKYIYVVISFGQAITYVLFVVKVGNEFLYFCNLCMFKAYCKNKFKCSLF

SEQ ID NO: 257786 - protein, 150 aa, Glycine max
  unsure (1)..(150): unsure at all Xaa locations
  Clone ID: PAT_MRT3847_74804C.1.pep
MPEEGACQKAVTEALVANVLAMIRADRTIVXLSRXQGHMWRSGYENNXWQGIVLDDVPQAIEKWHTLGIMVHIYSSGSRXAQRIIFGHTSHGDLRKYSCGFFDTTVGYERKARSHVEIFESHGVHEPSDILFVAYVYQEGSVVKAPGLQV

SEQ ID NO: 257787 - protein, 49 aa, Glycine max
  unsure (1)..(49): unsure at all Xaa locations
  Clone ID: PAT_MRT3847_74805C.1.pep
NYHEXTMSVYTWLNXHMXGSSNITGHHDSHNGDVHNVSTKVHYVISSAI

SEQ ID NO: 257788 - protein, 77 aa, Glycine max
  unsure (1)..(77): unsure at all Xaa locations
  Clone ID: PAT_MRT3847_74806C.1.pep
FPHTFFLLSQSCYLFLSSISSIFFSYFFLCXKTTERLKSGITTRPLFYIYLXIDERQKTVHTMFLEYXELYISWKFF

SEQ ID NO: 257789 - protein, 139 aa, Glycine max
  unsure (1)..(139): unsure at all Xaa locations
  Clone ID: PAT_MRT3847_74807C.1.pep
PRNRLTPGNPRAPPGPPPETPGRPPGPAPGXPGSPSGRPXGSPPFNLFNPNSLHRLSPPLPAPLPPFTPPPVVPVPPSPPPPVFFPPPPPPPRFSFPPALSPGSLFPAPKLVCRPCPSGSFPKRVTIRELLLLFFPIPL

SEQ ID NO: 257790 - protein, 83 aa, Glycine max
  Clone ID: PAT_MRT3847_74808C.1.pep
RCAGPRAPVPGSRHAPRLRLWLLLRGSGLHTGDQHGHKRIALCVAILDMPRSVPRQSRISATRIASSQPRGSSALGLVRSLSH

SEQ ID NO: 257791 - protein, 41 aa, Glycine max
  Clone ID: PAT_MRT3847_74809C.1.pep
EFFSFKLLYSSGCFDVLLGFVNVWCSQNSYLYEHIVIMLTC

SEQ ID NO: 257792 - protein, 38 aa, Glycine max
  Clone ID: PAT_MRT3847_7480C.1.pep
NDKYFYEVLERKRVKNVVVSLKKIDFVEFTHKLYAQSF

SEQ ID NO: 257793 - protein, 54 aa, Glycine max
  Clone ID: PAT_MRT3847_74810C.1.pep
KNDYKSKKEKKNIRYENKWKILEKTLDYKKTIINRVSIKSRLIIKMMIDHMLFE

SEQ ID NO: 257794 - protein, 77 aa, Glycine max
  Clone ID: PAT_MRT3847_74811C.1.pep
ELLTGEPPVTDGKELVKWVLDHSTNPQYILDFNVSRSSQEVRSQMLAILKIALVCVSTSPKARPNMNTVLQMLLNVG

SEQ ID NO: 257795 - protein, 55 aa, Glycine max
  unsure (1)..(55): unsure at all Xaa locations
  Clone ID: PAT_MRT3847_74812C.1.pep
TSGKIGTTLIKFGVYCNHSNLTVLQKGVSHRVRQXQAFEAWFCFAFRVFKTFXTI

SEQ ID NO: 257796 - protein, 774 aa, Glycine max
  unsure (1)..(774): unsure at all Xaa locations
  Clone ID: PAT_MRT3847_74813C.1.pep
PRPGFSSEFTLLETFNASGFKLNGSIPEWLGERLGVLEELDLSLCSIKGSIPDSIGRLSKLKVLLLSGNFLTGRMPSTLGNLTRLSVLDLSGNSLSWPVPDSVSKLGNLSRLDLSYNFLSGSVPPELGALSSLQFLNLSGNSFTGSVPSQLGNLSKLVEVDLSMNFLSSSLSGGLFSSVXTALEVLILRGNLLDGXLPAPLRSMPRLHFYDTARNLVPETVTYNTXAEGIAYLHECSPPLVHRDIQASSILLDDKFEVRLGSLSEVTAQGDLQQGVISRVFSKPPSCNQADSGKSSVTCFMINYCYRKILLELITGNIEVSKLDXCVLFGGLGFIVLLALVLMLVLKQCHNRKSLEVPRETKDGGAVEEGERPIPPKDIDFVTGVGEAWRVEQTLENPWNFVREKNTSSARLRSNSFRKSWSTASVVVKKVDLNLFKRESYVEGLGVTSKITHAXVLPILGHCLDNENEKCIVYKYMPNRDLATSLHRVTGSDGKIXSLDWITRLKIAIGAAEDNWWCHECSPPLVHRDIQASXSILLDDKFEVRLGSLSEVTFQGDLQQGVISRVMSEPRSSNQADSGKSPVTCAYDVYCFGKILLELITGNIEVSKSDDATTKEWLEQTLPYITIYDKERVTKIIDPSLIVDEDLLEEVWAMAIVANACLNPKPSKRPPMRHVLKALENPLKIVREENTSSARLRTNSSRKSWSTAFFGSWRHSSSDSVVATNKEGSNDTKKSGKVGSQSSGNDHSSSNKRSSNEIFPEPLEIQDVETGVTR

SEQ ID NO: 257797 - protein, 96 aa, Glycine max
  unsure (1)..(96): unsure at all Xaa locations
  Clone ID: PAT_MRT3847_74814C.1.pep
AYELMSANDAPERDPMXWILEGSSDDGISWQVLDKQTXSQFFEDRFQRRTYTISSANFPCNVFRFRFLAVRDIQSNSRLQIGSIDLYAKSIGKLRA

SEQ ID NO: 257798 - protein, 384 aa, Glycine max
  unsure (1)..(384): unsure at all Xaa locations
  Clone ID: PAT_MRT3847_74815C.1.pep
FNQNKDTKKLVETRXGRCGEWANCFTLYCRAFGYXSRLILDFTDHVWTECFSQYLGRWMHLDPCEGIYDKPLLYEKGWGKKLNYVIAIAKDGVYDVTKRYTRKWHEVLSRRTILTEPSLSTLLSNITKESRRGFASQLLSIIESHDMEENKELERSLHAEDDESLSLPGRRSGNEEWRKSRLEMGSDKLSSSACPVRLCVDEHVTRIYNAFRPILYQFVGEELTKSEAVEVLRITKGILLDLSKSPYKTRRTSIDSVLDNPKFQKLLPSFDDLLGALXCGVVYRTFGNKMFELAAYELMSANDAPERDPMDWILEGSSDDGISWQVLDKQTSQFFEDRFQRRTYTISSASFPCNVFRFRFLAVRDIQSNSRLQIGSIDLYAKSI

SEQ ID NO: 257799 - protein, 345 aa, Glycine max
  Clone ID: PAT_MRT3847_74816C.1.pep
THATAARRRQKGEEAKGPFDVFLCFNEAETRHSFTGTLYHALQSARFKTYMENGKLRRGDKIATAILTAMEASRISIVVFSPYFASSTCCLDQLVHIHRCMNTKNQLILPIFYDVDQSDVRDQLNTFGQAMLQHQHRFGKSSDKVLQWSSVLSHVANLTAFCFSSTGDQYEYQFVEEIVDWVTKTVPRNDVFLSFCGRDTRYSFTGFLYNALSRSGFKTYMNDDGDQISQSTIGKSRLSIIVFSKNYAHSSSCLDELLAILECMKMKNQLVWPIFYKVEPRDIRRQRNSYGEAMTEHENMLGKDSEKVQKWRSALFEAANLKGWTFETGYEYEVIEEIVERAIKI

SEQ ID NO: 257800 - protein, 128 aa, Glycine max
  Clone ID: PAT_MRT3847_74817C.1.pep
AHSWSGLKELLANLECMKMKNQLVWPIFYKVEPRDIRRQRNSYGEAMTEHENMLGKDSEKVQKWRSALFEAANLKGWTFETGYNTYSVFCCVPITIFFMYVVNKKKALRFCRYEYEVIEEIVERAIKI

SEQ ID NO: 257801 - protein, 41 aa, Glycine max
  unsure (1)..(41): unsure at all Xaa locations
  Clone ID: PAT_MRT3847_74818C.1.pep
LMGPIGARXXLTGDQXXSSEXXRXWXKSXESXASXTYAXXT

SEQ ID NO: 257802 - protein, 65 aa, Glycine max
  Clone ID: PAT_MRT3847_74819C.1.pep
KKILLKAKLRFAGPNFRFLTKYIKRVFKVFIFRSLNRLYNIFAESVVSWYTFWGGGYCYCPDALK

SEQ ID NO: 257803 - protein, 46 aa, Glycine max
  Clone ID: PAT_MRT3847_7481C.1.pep
RSGNHQLSLTVTHKSEENNLTFKTRTIHVEPNNQVRMHNRSSNIPS

SEQ ID NO: 257804 - protein, 33 aa, Glycine max
  Clone ID: PAT_MRT3847_74820C.1.pep
FFNQRPLVSMTHIVIMWAPINYFLAIAIVLECS

SEQ ID NO: 257805 - protein, 37 aa, Glycine max
  Clone ID: PAT_MRT3847_74821C.1.pep
KKNHQFMCLGGHVKKEYVRVGNNYVFVSQVNYKGRLV

SEQ ID NO: 257806 - protein, 83 aa, Glycine max
  Clone ID: PAT_MRT3847_74822C.1.pep
PSLLVGCDDNRQITASYTAPLHEGLNGRVLYLRVLSTSFNPFFFYFKICEAALKANLIILSHSRLLIIWLTCVIWQMHGLLYF

SEQ ID NO: 257807 - protein, 82 aa, Glycine max
  Clone ID: PAT_MRT3847_74823C.1.pep
PSACRALEASEILENWARDQAALTAFAQKITVEPQDIMKNWTADDDDVRNVAGVQCAQYSKGYQAGMAPGTNNSTVWRKLAA

SEQ ID NO: 257808 - protein, 65 aa, Glycine max
  Clone ID: PAT_MRT3847_74824C.1.pep
SNLLEFSSQRAEVPFAKYKLLLTNDPMTSLSFWFWWCINKSNTELLIYPLVVEYLSAYILVNINK

SEQ ID NO: 257809 - protein, 595 aa, Glycine max
  Clone ID: PAT_MRT3847_74825C.1.pep
MFRQNLSRGPLKILTRWLIFLTILQVSCAIKDPDVEGEALLDLLHFLNDSNKQITDWDSFLVSPCFSWSHVTCRNGHVISLALASVGFSGTLSPSIIKLKYLSSLELQNNNLSGPLPDYISNLTELQYLNLADNNFNGSIPAKWGELPNLKHLDLSSNGLTGSIPKQLFSVPLFNFTDTQLQCGPGFEQPCASKSENPASAHKSKLAKIVRYASCGAFALLCLGAIFTYRQHQKHRRKIDVFVDVSGEDERKISFGQLRRFSWRELQLATKNFSEGNVIGQGGFGKVYKGVLSDNTKVAVKRLIDYHNPGGEAAFEREVQLISVAVHRNLLRLIGFCTTTTERILVYPFMENLSVAYRLRDLKPGEKGLDWPTRKRVAFGTAHGLIRLHEQCNPKIIHRDLKAANILLDDEFEAVLGDFGLAKLVDARMTHVTTQVRGTMGHIAPEYLSTGKSSEKTDVFGYGITLLELVTGERALDLSRLEEDEDVLLIDYVKKLLREKRLEDIVDRNLESYDPKEVETILQVALLCTQGYPEDRPTMSEVVKMLQGVGLADRWADWQQLEEARNQEFSLMTHQFVWNDESTLDQEAIQLSRAR

SEQ ID NO: 257810 - protein, 78 aa, Glycine max
  Clone ID: PAT_MRT3847_74826C.1.pep
MGKKFEGWECSLQCSGNLSPQAHYPMRRLEEEGRDSEGKKVVLSVMGMSCAACAGSIEKAIKRLPGIREAVVDVLNHK

SEQ ID NO: 257811 - protein, 68 aa, Glycine max
  unsure (1)..(68): unsure at all Xaa locations
  Clone ID: PAT_MRT3847_74827C.1.pep
XXXXXCRXRNXRHRKAXRGYXTPXTLKAGLAEFISTLXFVVTPXQVSXIAYXXXHRXRRRHSXRPHLR

SEQ ID NO: 257812 - protein, 187 aa, Glycine max
  Clone ID: PAT_MRT3847_74828C.1.pep
GPSLNTGFGLVPVAGSWARPPATRDESLLKLVSIPDGLGPVDDRNDAGKLCDAMQNTMPTMLEKLIEDVHLNGDNRITLRVAVCCVASASAVGWQLAAWGALWWAAPAAVSGLPCCGPHLLVDGAFDSAAASFSMLGPLFPIVLDLFPPLWPLTLLWVYLGWDCEQLFWYLFIINQFEKDYSQKKKN

SEQ ID NO: 257813 - protein, 70 aa, Glycine max
  Clone ID: PAT_MRT3847_74829C.1.pep
LTLQGYSHHPIQNHPIDIQVYQNHTLTKNKKGHHIRHTHLTLLQIKLTTSSTTLLSLPLSFIIFSFSKYF

SEQ ID NO: 257814 - protein, 45 aa, Glycine max
  Clone ID: PAT_MRT3847_7482C.1.pep
METGGFHGYRKLPNTTSGLKLSVSDMNMNMRQQQVASSDQNCSNH

SEQ ID NO: 257815 - protein, 56 aa, Glycine max
  Clone ID: PAT_MRT3847_74830C.1.pep
YRLTTGDDCHICEKWALEEKNIRGKKNTRKTCVRQDIGALYKEVQIRGRGFLCKIT

SEQ ID NO: 257816 - protein, 181 aa, Glycine max
  unsure (1)..(181): unsure at all Xaa locations
  Clone ID: PAT_MRT3847_74831C.1.pep
RVRSNIDNFIRSPCEGLRPRAGKIATDKSGVEINQVDKENQVAKRARRSSEGLVPHKNKKXDVKKPHKCDLDGCQMSFKTKAELLLHKRNLCPHEGCGKKFSSHKYALLHQRVHDDERPLKCPWKGCSMSFKWAWARTEHIRVHTGEKPYHCKVEGCGLSFRFVSDFSRHRRKTXHHVKPA

SEQ ID NO: 257817 - protein, 113 aa, Glycine max
  unsure (1)..(113): unsure at all Xaa locations
  Clone ID: PAT_MRT3847_74832C.1.pep
NKFETLCYLRDLDDAQLAKELXWRLRKGCVRLLQFXFEHXFXYXEHNRSPGYYDRRYWTMMKLPMSGCTDASQVLKELXEAKTAYPNCFIRIIGFDNRRQVHCISFICYKPST

SEQ ID NO: 257818 - protein, 140 aa, Glycine max
  Clone ID: PAT_MRT3847_74833C.1.pep
KKKLRHEEDPSLKFSQRTSQPHVPSPSLHIHNSTTIIILINTNSIFPISFNNTHTHIHSFSLSLSWLLLPFPLQRSPSRRRSSPFRSRRRGRPRSSRSRCNPPAAASPPPPPTTAVAAAPNAAGSPCCTTSPRSRNASIP

SEQ ID NO: 257819 - protein, 40 aa, Glycine max
  Clone ID: PAT_MRT3847_74834C.1.pep
IANQFLLRIKIMHTEQLSHYMRVNHRRKGDPHYCCHLPTR

SEQ ID NO: 257820 - protein, 60 aa, Glycine max
  Clone ID: PAT_MRT3847_74835C.1.pep
VLSKTSETLLCHHNNRLTLFIQRSTLISRNPKWPLLYPIITLKELELRFYFEGFYNSLNK

SEQ ID NO: 257821 - protein, 93 aa, Glycine max
  Clone ID: PAT_MRT3847_74836C.1.pep
FLRNWGGKSKKGMMGWSKNFPIRLGSLKGVFKVWMHNNKNPFRKNPQNGIGNANAPQSNNDDAKKNMVVVVDLIVISTTLTTQIAAPMAMIFP

SEQ ID NO: 257822 - protein, 139 aa, Glycine max
  Clone ID: PAT_MRT3847_74837C.1.pep
VDPFWKLKRFLNIGCEATLKRNVKIIDDFVHGVIKTRKAQLALQQEYNVKEDILSRFLIESKKDQKTMTDQYLRDIILNFMIAGKDTSANTLSWFFYMLCKNPLIEEKIVQEVRDVTCSCSHESEPNIEEFVAKITDDT

SEQ ID NO: 257823 - protein, 93 aa, Glycine max
  Clone ID: PAT_MRT3847_74838C.1.pep
EVYNKIQPQKLSIKGRTPQMETPLVVQNFTSEADYFPVTSLKDVKFGFVGRDSEDMENSIASGIDPSIPGSPQTPQLPYMLVILETLNSLLSL

SEQ ID NO: 257824 - protein, 80 aa, Glycine max
  Clone ID: PAT_MRT3847_74839C.1.pep
FYHPNIAYLGKICLDILPDTSGTVLYILTELMTIQALLSAPDSDDPFSAIIVKHRKFTEAHAAPMAYDRTHFFAGGTGCF

SEQ ID NO: 257825 - protein, 51 aa, Glycine max
  Clone ID: PAT_MRT3847_7483C.1.pep
VPLLISRSSFSVLGWLLSGLAIASYLARWFDGSRSSNRPMSRIANLGLCSY

SEQ ID NO: 257826 - protein, 233 aa, Glycine max
  Clone ID: PAT_MRT3847_74840C.1.pep
MKRHHRSPHHQQRSWAEICCFGWSCLQLFWARVVMRKWFNMGSYESDYSADPVDDDDDSESGSDNEERGRQSQFADNRCNEDEASSESTEFLPKLRRQKSSTYRSQYINKNELRVCVGTWNVGGKLPPDDLDIDDWLGINEPADIYVLGLQEIVPLNPGNIFGAEDTRPVPKWENIIRETLNRVRPEMPKIKSFSDLPCQSKFPLVTHVLDQDLSLLLTSLSDKSEYYLKVIV

SEQ ID NO: 257827 - protein, 74 aa, Glycine max
  unsure (1)..(74): unsure at all Xaa locations
  Clone ID: PAT_MRT3847_74841C.1.pep
MLARTPHTTDNARCYQIXLATTRTLEQDDLKKAYKKADINNHPDMGGDPYRYKELAHAHEVLSDPEKRDIYDQH

SEQ ID NO: 257828 - protein, 50 aa, Glycine max
  Clone ID: PAT_MRT3847_74842C.1.pep
KTLGDEAPKNFWDKTFLAARKTPIGQFFKKGGPSILEKNPPEFFKTRYGG

SEQ ID NO: 257829 - protein, 49 aa, Glycine max
  Clone ID: PAT_MRT3847_74843C.1.pep
SLRLSLKFTHLISFKIFTVTLLIHFLIALRRFIFALYRHLRKFQPRFLS

SEQ ID NO: 257830 - protein, 65 aa, Glycine max
  Clone ID: PAT_MRT3847_74844C.1.pep
CHDKGIAISGLFFFWGLLEVHHFWTLKVIGPSFFILFGPFTHVSQFLYNVHNKKVMICSSPVYYK

SEQ ID NO: 257831 - protein, 106 aa, Glycine max
  unsure (1)..(106): unsure at all Xaa locations
  Clone ID: PAT_MRT3847_74845C.1.pep
QMFMALLNITRSQLNAGRVPYPQKKKRGESPFMLSIYPNIYKVNVESYGTDKFKQIKEFKYSVKKKLILNVRYFIXXIXXXRFYXXQXXWVXXXNLLNCHLSQXIL

SEQ ID NO: 257832 - protein, 78 aa, Glycine max
  unsure (1)..(78): unsure at all Xaa locations
  Clone ID: PAT_MRT3847_74846C.1.pep
XXVTINRSKIEIPISRKLLDQGRNSNHNRREQRGANTTKDEAGEPKEPNDVPRRATQSRGNNPISDPPRRGQGQGRQF

SEQ ID NO: 257833 - protein, 296 aa, Glycine max
  Clone ID: PAT_MRT3847_74847C.1.pep
MIDISTLNAAQITVLGSAFCAMLSMHFTSQLLSQHLFYWKNPKEQKAIIIIILMAPIYAAVSFVGLLDIRGSKEFFTFLESVKECYEALVIAKFLALMYSYLNISISRNIVPDEIKGREIHHSFPMTLFQPRTVRLNHHNLKLLKYWTWQFVVVRPVCSVLMIALQLVGLYPTWLSWAFTIVLNISVSLALYSLVVFYHVFAKELAPHKPLAKFLCIKGIVFFCFWQGMLLELLAATGVIQSRHLRLDVEHIEEAMQNILVCLEMVIFSVLQQYAYHPAPYSGEVEKMLKQNKKNE

SEQ ID NO: 257834 - protein, 116 aa, Glycine max
  Clone ID: PAT_MRT3847_74848C.1.pep
MAVSLAVNRPLLGLHENVPLAVAHPQFLPFKWPPKSKLPSVVGIRCSSSPFNDKTLISITPNTSHLNPNPLACRFHASQFGGTSFSFLNPNFSFRLFFSLPSRTFFLLVMLPTSDI

SEQ ID NO: 257835 - protein, 58 aa, Glycine max
  Clone ID: PAT_MRT3847_74849C.1.pep
APCRLTKVGLVSMQVRYQVVVERGTSLSVDSIVVIVLSGTMNVPSGRWFIHHGNGDYP

SEQ ID NO: 257836 - protein, 61 aa, Glycine max
  Clone ID: PAT_MRT3847_7484C.1.pep
ICPLFIPKKKIPSACFQQRKKKNWYWFHKKKGSNFEGVFWLPLRGVLGQNPVLWKKKTFLG

SEQ ID NO: 257837 - protein, 125 aa, Glycine max
  Clone ID: PAT_MRT3847_74850C.1.pep
IKTSLQILTLQRETNKVMVKRQRTAFPPNFVHSLDGSHMMMTAVACKKAGLNFAGVHDSYWTHACDVDEMNRILREKFVELYDAPILENLLESFQKTFPALNFPPLPERGDFDLQEVLGSAYFFN

SEQ ID NO: 257838 - protein, 65 aa, Glycine max
  Clone ID: PAT_MRT3847_74851C.1.pep
LEPGQLSVVRWSLKPLSEISQTASFLLLLWSRLLSFVRNWCLGSPVPPMSLSRVGCQFSSYRSKC

SEQ ID NO: 257839 - protein, 335 aa, Glycine max
  Clone ID: PAT_MRT3847_74852C.1.pep
FNSARGLEEGEKENEELESRSGSSQIEKLEEVVCIEQGESKEESRNVEAEDVKEIPHNVNKEPAQASEIEAKYVTLDHPKVTPVNRESNATKKKKKSMLSTSKPKASQFSTPRSSNPTSTPTKTLASASSTKRGNSPSISWRKITSTSENRKVPNKSLHMSLSLAPSQPDPASHTTMRKSLIMEKMGDKDIVKRAFKTFQNNFNQPKTSGENKSLVKEKVPSKVTESRNPTSITLRKEDGQSPKVDSMDRRSVNAVRTAFGLKGDVKAEKGKEFPRKIDEKFNSKEVERTHLQLKSKGEKIKHISKATHLPAFHWGQKASKSHPEKGDVKIEKWR

SEQ ID NO: 257840 - protein, 123 aa, Glycine max
  unsure (1)..(123): unsure at all Xaa locations
  Clone ID: PAT_MRT3847_74853C.1.pep
MQGRGTTISGQSMSTSRSLGSPSSRSEQTMATPASDSTFLRLNHLDIHGDDAGSXGAVASKKKKRGQRAIGGDKSGXRGLRQFSMKVCEKVESKGRTTYNEALANEHPVDMPSVGKHPAASFI

SEQ ID NO: 257841 - protein, 50 aa, Glycine max
  Clone ID: PAT_MRT3847_74854C.1.pep
IAWANQIRRFQHGHSSRSTLKSSSIRHHSTSIMAHTFRFTGLTCLNHRDQ

SEQ ID NO: 257842 - protein, 44 aa, Glycine max
  Clone ID: PAT_MRT3847_74855C.1.pep
QCLVNLSSEWRASVPSNECSVSVMRFSVGLSNNVLPQQVPHLRR

SEQ ID NO: 257843 - protein, 69 aa, Glycine max
  Clone ID: PAT_MRT3847_74856C.1.pep
FFEPLKYYLETLLLLCSSMHTKPLLFVSNFIQSFLPIELQALVNCRHELTFMRNRILYLFNLLQVLLQM

SEQ ID NO: 257844 - protein, 37 aa, Glycine max
  Clone ID: PAT_MRT3847_74857C.1.pep
FKNQSRKVQERDSEALPVKSTTALILKLNKYYCCCCI

SEQ ID NO: 257845 - protein, 82 aa, Glycine max
  Clone ID: PAT_MRT3847_74858C.1.pep
PIAGVSVLAAHCGRATWLQPLLRAYLHGSIPSVGTVILTPSLQSSSGQTARPHSTSTSSRKHTRHIISGDTIAVLNLDQLVC

SEQ ID NO: 257846 - protein, 96 aa, Glycine max
  Clone ID: PAT_MRT3847_74859C.1.pep
AQSRSRNTISSEDKPFNLRSRDPIYSNKLGKLFEITLKKNPHLWDLYVFLSRVYMNEGALFLPHFNLKAIEVLVINEGEANIELVDIKEQHQTQQQ

SEQ ID NO: 257847 - protein, 172 aa, Glycine max
  Clone ID: PAT_MRT3847_7485C.1.pep
ILRWIRGFNYNHKPPNAATDTNNGLLAQSRLQTGNDRGLGSSRTPISTLLVQGAASFSSLSSALNSAMDSAERLVEDLESYIHNHPTNGVNTNSTHDGNVAATDSTPAASTSHFSRNVDTTADIGLEIQTTDSNIQTETSPLDPSSSSSHRGSTRVSTSRQVSNDRRRRRSR

SEQ ID NO: 257848 - protein, 87 aa, Glycine max
  unsure (1)..(87): unsure at all Xaa locations
  Clone ID: PAT_MRT3847_74860C.1.pep
VDEGADFIETDILSSKDGVLVCLHDVTLGNTTDXADRTEFVIRYDHIEVNGXNLTGFCTARFTFDRCKLLRSEHRFSFRANSLFGRF

SEQ ID NO: 257849 - protein, 223 aa, Glycine max
  Clone ID: PAT_MRT3847_74861C.1.pep
MSTITASYNVTPNEPTPNVSLWLSESDQVARWSHTSTIYIYKENQTQNALERMRDSLSKILVHYHPLAGRLTWLEGGKVALNCNGKGVTLIEAESQKTMDDYGDFAPSEKLKNELIPPVDYSQPIEELPLLLVQLTRFKKGSSNNNNNNQLGLAIGVAFCHVLCDGLAAIRFINAWAKLTRGGVLDSIEMFPFLDRTIMNSTYPPRTPRFDHPELKPLPLKLG

SEQ ID NO: 257850 - protein, 49 aa, Glycine max
  Clone ID: PAT_MRT3847_74862C.1.pep
TNFCPPNNALPNNAGGWCNPPLHHFDLSQPIFQQIAQYKAGIVPVAYRR

SEQ ID NO: 257851 - protein, 61 aa, Glycine max
  Clone ID: PAT_MRT3847_74863C.1.pep
GIAQCTILTQDDRRNLNRITSNASRPGPTNRGHGAYAGLSHSTDPSKGTSTIYLAHHVTLL

SEQ ID NO: 257852 - protein, 80 aa, Glycine max
  unsure (1)..(80): unsure at all Xaa locations
  Clone ID: PAT_MRT3847_74864C.1.pep
TGDWIKLIQNYTISNLXEVTARKNGXLWIKNEIDREIVSEKRSEWASYEQGLETNRNSAKHFDACKWTKISNTQLPRENE

SEQ ID NO: 257853 - protein, 131 aa, Glycine max
  Clone ID: PAT_MRT3847_74865C.1.pep
APCFACLLLFSSLVWSRNCFNPSNETYKSAIKIITTNNLTDFSNEGDLEREITSIKFTLLSGKALQRDGSACTMVYSPVLAGQRLLYHNFTKYELYKRAITFMINESRKQNNRSLKQVINDQVVMKVRYLS

SEQ ID NO: 257854 - protein, 105 aa, Glycine max
  Clone ID: PAT_MRT3847_74866C.1.pep
HHKCCLKKINIYLWPIIYSYFGFTEMFITNLLSLFGGRNIKHVKGKDDELDPSEGKVISHETNLILLFLVQTMERSCHVFVYCLLATFMFVVTITENNQVLPVNF

SEQ ID NO: 257855 - protein, 69 aa, Glycine max
  Clone ID: PAT_MRT3847_74867C.1.pep
MVVSSGNEFDGCNYFGIYRGHSSNICLIRREIILSIVFIQDDDFPGCDCFVIYIEYCLGGVLSTHSFAR

SEQ ID NO: 257856 - protein, 75 aa, Glycine max
  Clone ID: PAT_MRT3847_74868C.1.pep
IKRASIKVDFNSCEKLNSFYLFFPSLIEAYGEVYSNGAIVWKFMNCGIFAASALKCLFVHNNITFQLHKSIFFLP

SEQ ID NO: 257857 - protein, 146 aa, Glycine max
  Clone ID: PAT_MRT3847_74869C.1.pep
MANTLQRALRATMARPFSTGALAEIKRGEIGMVSGIPEEHLRRRVLIYSPARTASQQGSGKVGRWKINFLSTQKWENPLMGWTSTGDPYSHVGDSALTFDSEQAAKAFAEKHGWEYSVKKPHTPLLKVKSYADNFKWKGPPKSGEE

SEQ ID NO: 257858 - protein, 45 aa, Glycine max
  Clone ID: PAT_MRT3847_7486C.1.pep
CSYYENQQIFIIFIIKRKCKYEYCIYYLFVIINKTCISNIYIFYI

SEQ ID NO: 257859 - protein, 91 aa, Glycine max
  Clone ID: PAT_MRT3847_74870C.1.pep
FFCSAEVPVYIAEIAPQKLRGGLGSVNQVEALLLLLDACLFFFFFIRSLLFINFGHFLVQLSDTVGIMLALSVDSFRPLESPCNAREIATY

SEQ ID NO: 257860 - protein, 103 aa, Glycine max
  Clone ID: PAT_MRT3847_74871C.1.pep
AVPDAPALLYLSVGFEPVGWVVGGDIAKGEGELGYGNVRSWGRGLRAGCGVSTVVLFNCGVVPVGYGCFYGGEVRVSGEVSGMKYQVRELRLKMDWIWLLSPP

SEQ ID NO: 257861 - protein, 140 aa, Glycine max
  Clone ID: PAT_MRT3847_74872C.1.pep
PRAEIRHEAQNGGTFNVTIDGNHMDCAGGSGICLFVFDMKDFKNPTTKKCFDSSQMSTLCSTIGKVKDGNLIIMGTKGDCTKFCTEDFKQCCAMLGSMEISRLENRDCWAMMVKKGMPQTFYEMRKPETVTFNRTFDCCC

SEQ ID NO: 257862 - protein, 96 aa, Glycine max
  unsure (1)..(96): unsure at all Xaa locations
  Clone ID: PAT_MRT3847_74873C.1.pep
RNKPGGTKKTRPNTPPERSCPEITPKKPKPSPLQPEERAXRGPKTRNTTPRDNRQRTHTGGPSHAXPMGKGPKKTPRPPAKINPAPSQEEGGAPQK

SEQ ID NO: 257863 - protein, 66 aa, Glycine max
  Clone ID: PAT_MRT3847_74874C.1.pep
MVSENMRMLKANAGVFDLKGGHEGRGSAMVRYNEKLITPQGDQDFDCPDDVFILEKAEEFGIDLAY

SEQ ID NO: 257864 - protein, 103 aa, Glycine max
  unsure (1)..(103): unsure at all Xaa locations
  Clone ID: PAT_MRT3847_74875C.1.pep
IEKKTVSFERNATLNDIFQQRFTKTPTLVNGFSNLYAMEVDPTVEHEDMGGADGMDSLFSELAGAIPXIDEAMSFAEMLKAIAMEGTENRVSLLTIHSNQDTA

SEQ ID NO: 257865 - protein, 105 aa, Glycine max
  Clone ID: PAT_MRT3847_74876C.1.pep
VLNVTPHKDTRQHKPFAHPPNNPSGPKKAGPPGPKKPGPRRRGPQRGPPGPGPHSGPAGPPPAGPQAGPPGPGPQPGPSGPGPPGPAGPMITGYLCNSTLTDAWT

SEQ ID NO: 257866 - protein, 59 aa, Glycine max
  Clone ID: PAT_MRT3847_74877C.1.pep
FVGFFFCFWGFFFCFYIHKLKNQHFLTHIYGRSFSKTWSLYYRLDLNNRGQGGANLHLH

SEQ ID NO: 257867 - protein, 54 aa, Glycine max
  unsure (1)..(54): unsure at all Xaa locations
  Clone ID: PAT_MRT3847_74878C.1.pep
GGGPXFFFFFFFFFFFFFFFFFFFFXLIKIGYGVSHGVWVRWVGPGISGWVWRG

SEQ ID NO: 257868 - protein, 80 aa, Glycine max
  unsure (1)..(80): unsure at all Xaa locations
  Clone ID: PAT_MRT3847_74879C.1.pep
FNLLYFFKAGGFLAWGGHPNYMFPILINTFYETRTSXFKYPHINFSLYPHNIIGFQTTPKNSFLSSNQYIHFEQHFSYFK

SEQ ID NO: 257869 - protein, 45 aa, Glycine max
  unsure (1)..(45): unsure at all Xaa locations
  Clone ID: PAT_MRT3847_7487C.1.pep
RQCLEKXRXXWRVAXLSXLDLXXXSSXSXXSPLSTFFHLFHTXXF

SEQ ID NO: 257870 - protein, 130 aa, Glycine max
  unsure (1)..(130): unsure at all Xaa locations
  Clone ID: PAT_MRT3847_74880C.1.pep
GKIPXKKKKKKKKKKKKKKKKKKKKKKKKKNSFGFGPIKKYQXKGKKGKKKIWGVPPGKTKKVLGENPFQKLSGKTSPKTGGGPTIQTGKNPRHKGLCSLFKKGGKPPQSQTPGPWLKIFLLGGGPPWAT

SEQ ID NO: 257871 - protein, 66 aa, Glycine max
  Clone ID: PAT_MRT3847_74881C.1.pep
QTQPTCGSVISIMWENFTVWELKQQQLYYLDFLLFKFPHDTHAQALLPNPKICEHHLSGRVGQRIS

SEQ ID NO: 257872 - protein, 107 aa, Glycine max
  Clone ID: PAT_MRT3847_74882C.1.pep
MEEEGVPVEGSSGTVSRARKLLFRRMLVGIKDGRFFLGSFYCIDKQGNIILQDAVEYRSTRQSSPSPMEQRCLGLILIPSSCRTSCHVDCAIHEQLSLLSLNQTPPH

SEQ ID NO: 257873 - protein, 63 aa, Glycine max
  Clone ID: PAT_MRT3847_74883C.1.pep
NSQWCIFILSFYLGNDSAICRERVKETSFRLQKPTISYAGILMFCICLPFSKNERSPLGKGDP

SEQ ID NO: 257874 - protein, 66 aa, Glycine max
  Clone ID: PAT_MRT3847_74884C.1.pep
KKFKGCPFFPNLGYGFNKKTPPHFPNGFKKIVVSHFKGLGPLLMPHRAFCGGIAPPISPKKKKNIV

SEQ ID NO: 257875 - protein, 104 aa, Glycine max
  Clone ID: PAT_MRT3847_74885C.1.pep
SNRRQCAGILPFHRPPLFFLPLPFNIIRRVNIICLPSHADLDRNVKVKNKLDTHSNFELYYHIHPNIVANFHKLQSLIDLLHKILEKPLFNQLTTIYHPDYILN

SEQ ID NO: 257876 - protein, 53 aa, Glycine max
  Clone ID: PAT_MRT3847_74886C.1.pep
ISTMKFFIAEKNFLLEIYLLEGGVYYQRNVSLDPAFFGEKGDKICTKTHQCLH

SEQ ID NO: 257877 - protein, 261 aa, Glycine max
  Clone ID: PAT_MRT3847_74887C.1.pep
MESSYLHATHFQSIQICKLTSCLPPHSNAQITSIPFPTTHYLYNHCNSFIIPLSFTVPLKALSTSIHSSLSSPKPPITKEDAILQAKTSLSATLEKPLNNTKLIGKFKKLRQPKFRVEIPVIDDSPDSLSQLALDFFGDMPIKRKGSPIKILMLWPDASLKESATIAFQSHSTFEHIDIPSVAKTDPRILNSADVAIFLAPESSQLAPIRRVSDAFYPKPVVLFNPKWAFEEESNLGDLSGFVDSFEVVYSFIGLEVRGIL

SEQ ID NO: 257878 - protein, 111 aa, Glycine max
  unsure (1)..(111): unsure at all Xaa locations
  Clone ID: PAT_MRT3847_74888C.1.pep
MSLPTKLSVTAFSYLSPPPPIKKAKSLLLXSYSNNHXXFFDPSSIPLYNYLPNSRSANLARKKATPPQPAKNLLIKLHKAXPTFATNFQEDTWAKLKSSICAIFIKQPNSF

SEQ ID NO: 257879 - protein, 73 aa, Glycine max
  Clone ID: PAT_MRT3847_74889C.1.pep
PNNGGKIKITSPDWKHTVPTFVGQNSSKKPTLIFKGHYIPFTKHFFFLKVWGNSTFNTYTKIIFDLYTPPKTQ

SEQ ID NO: 257880 - protein, 85 aa, Glycine max
  Clone ID: PAT_MRT3847_7488C.1.pep
SLILLYRATRFFLSLPSLAYFFFLFSFSFFFLSYFIPLSLSLSFSLFFMAATLEAFGVAAGGSFPLRTFLVCRLPEAGGFRRVLH

SEQ ID NO: 257881 - protein, 77 aa, Glycine max
  Clone ID: PAT_MRT3847_74890C.1.pep
VGSFLLNSDLVQTMGFPHYFNKMVVVPYFMTKSSVFLPQGKKGKNWGYPFFFVSSQTPKKGLYENLYPLFYNLFILV

SEQ ID NO: 257882 - protein, 35 aa, Glycine max
  Clone ID: PAT_MRT3847_74891C.1.pep
VERLDSYDLMVYITPCLCLNSAKCFYSTMGSDAWA

SEQ ID NO: 257883 - protein, 48 aa, Glycine max
  Clone ID: PAT_MRT3847_74892C.1.pep
KTSNVQITSNASSTTNTTGFINQIIHTSHFLLYHNTKSHLNINLLHII

SEQ ID NO: 257884 - protein, 61 aa, Glycine max
  Clone ID: PAT_MRT3847_74893C.1.pep
EKYTKVNINKYNSDKTNHQVTFQDGKYHTRQHFKMENITQTSFYSCCPTFFFYSQYKYKYL

SEQ ID NO: 257885 - protein, 253 aa, Glycine max
  Clone ID: PAT_MRT3847_74894C.1.pep
MALLFKDPSKISAYRDRRFPGTQEEFEHALLTSTTVYVGNMSFYTTEEQVYELFSRAGEIKKIIMGLDKNTKTPCGFCFVLYYSREDTEDVCKYISGTILDDRPIRVDFDWGFQDGRQWGRGRSGGQVRDEYRTDYDPGRGGYGKLVQKELEVQRQLVDYGTGSLGSFPPVIPTSYGRHGGGHGHGGSHRHGRDYYRKRHRDDDRHIHESSKRTSDHESRRNTDHESRPEKNPRFRESGDSDDDEEDDRKRRA

SEQ ID NO: 257886 - protein, 54 aa, Glycine max
  Clone ID: PAT_MRT3847_74895C.1.pep
TCHPGLACTVATPGEDTDDQEEVEKAHDDLGALIYDRNCTDIVLRLARTDAEAY

SEQ ID NO: 257887 - protein, 75 aa, Glycine max
  Clone ID: PAT_MRT3847_74896C.1.pep
MADSDRSSSEVSTHSTDSGKRGSSKVEFSEDEETLIIRMYKLVGERWSLIAGRIPGRTAEEIEKYWTSRFSGSSE

SEQ ID NO: 257888 - protein, 401 aa, Glycine max
  Clone ID: PAT_MRT3847_74897C.1.pep
MEGKLSRAAKKITSSSIQELSQLAQRCNAINLAEGFPDFPSPPHLKNAAVSAINSDFNQYRHVQGVCDLLAKMVKQMHGLDIDPVTDVAICCGQSEAFAAAIFATIDPGDEVILFDPSYETYEGCVAMAGGVPIHVPLDPPQWTLDPSKLLRSFTEKTKAIVLNSPHNPTGKVFTKEELEIIAGECCSRNCLAITDEVYEHITYDNLKHISLASFPGMLERTVITSSLSKSFSVTGWRVGWAIAPAFLASAIRNIHGRVTDSAPAPFQEAALTALRSPPEYFESLRRDYQSKRDYIIKLLDGVGFKIVFIPQGSFFLFAELPDNWLLSDVEFVKKLIIEAGVVAVPGQGFFHTNLSSNEGSSLNYQKRYVRFAFCKSDTTLTTVAERLGKLLDAAGHLALH

SEQ ID NO: 257889 - protein, 58 aa, Glycine max
  Clone ID: PAT_MRT3847_74898C.1.pep
LHVAAMYVKELVDMHRPRAHLGHLKTTAKLSLWTNVHRSPQGGRDPLVACLENDKTRH

SEQ ID NO: 257890 - protein, 121 aa, Glycine max
  unsure (1)..(121): unsure at all Xaa locations
  Clone ID: PAT_MRT3847_74899C.1.pep
NNTIFFALFLVCAYTSYLPSHNADTIFDINGDFDQNGGPYYIFANILRDLRAIEIPLTRNETCPLTVVQSPLXVSNGLPLIISSPFQILTIQQRLNENNGVTFVPPCAIIPSRGTTVRGLP

SEQ ID NO: 257891 - protein, 405 aa, Glycine max
  Clone ID: PAT_MRT3847_7489C.1.pep
ESSTGIKGTRPPMLKPPPGARVQVVDDSTCSTWDLLRDLAPQGEEGLPLNRSENESEVAREVERGAVEKEEGEVGTRESPKREEEENVAGLSESCSFSTSNEDDSSSSTTDPTSNNISPQGRIKRIITAESWQKGEFLGGGSFGSVYEGISDDGFFFAVKEVSLLDQGTQGKQSVYQLEQEIALLSQFEHENIVQYYGTEMDQSKLYIFLELVTKGSLRSLYQKYTLRDSQVSSYTRQILHGLKYLHDRNVVHRDIKCANILVDASGSVKLADFGLAKATKLNDVKSMKGTAFWMAPEVVKGKNKGYGLPADIWSLGCTVLEMLTGQLPYCDLESMQALYRIGKGERPRIPDSLSRDAQDFILQCLQVSPNDRATAAQLLNHSFVQRPLSQSSGSSFPHIHGRKG

SEQ ID NO: 257892 - protein, 58 aa, Glycine max
  unsure (1)..(58): unsure at all Xaa locations
  Clone ID: PAT_MRT3847_748C.1.pep
FSLPSFFFVSHPIRGLHCLSPSPFLHNGPVHLGGLLPXRVHSTARFXFSLLIPKIQKG

SEQ ID NO: 257893 - protein, 120 aa, Glycine max
  Clone ID: PAT_MRT3847_74900C.1.pep
LEPNRLEVSFKSLAYFLVAPTLCYQPSYPRTPYIRKGWLFRQLVKLIIFTGVMGFIIEQYINPIVQNSQHPLKGNLLYAIERVLKLSVPNLYVWLCMFYCFFHLWLNILAELLRFGDREF

SEQ ID NO: 257894 - protein, 211 aa, Glycine max
  Clone ID: PAT_MRT3847_74901C.1.pep
MRELDLSFCILLCIPDAFGNFQCLKKLCLRGNNFERLPSLKELSKLLHLNLQHCKRLRYLPELPSRTDWPGSWTPVKHEEYGLGLNIFNCPELVERDCCTNNCFSWMIQILQCLSLSGFSGLFSFPLFSSIIPGSEIPRWFKKEHVGTGNVINIDRSHFTQHYKNRIGIALGVIFVVHKERRMPPPDMEQPAILSITCGPFYSTPTKRGST

SEQ ID NO: 257895 - protein, 50 aa, Glycine max
  Clone ID: PAT_MRT3847_74902C.1.pep
NQPHAVPSTLRTRRPMPSLKSHDSILNLERAGQHFAVTAQPSKAKEPDAW

SEQ ID NO: 257896 - protein, 72 aa, Glycine max
  Clone ID: PAT_MRT3847_74903C.1.pep
RITDHLCECSHWSFLLEFPSGHRSSQTQLLDCDYTNPSTDFLTIKSFIMETEPTETLNENKASLGPYSQTLG

SEQ ID NO: 257897 - protein, 74 aa, Glycine max
  Clone ID: PAT_MRT3847_74904C.1.pep
GIRGVPRYQGFHSVCLKSIHPILPFFASQAESYRSVTGFPWLNVPSSVSKALALLVVFVLTMALWRTSVSTFDM

SEQ ID NO: 257898 - protein, 68 aa, Glycine max
  Clone ID: PAT_MRT3847_74905C.1.pep
RNLWHSRVLFLDDYPFDATFGLVNLTPFLKDGSGPYHRSNWGLTGMQDGGPKTMWWILLQSGKKRHYI

SEQ ID NO: 257899 - protein, 72 aa, Glycine max
  Clone ID: PAT_MRT3847_74906C.1.pep
CLRLLHHFISLHKSLTLTFAPILILRIVPCVLLAILSLSRFTWNLLHLRIRLVFLNFFCCHFDVRFRFRMNL

SEQ ID NO: 257900 - protein, 115 aa, Glycine max
  Clone ID: PAT_MRT3847_74907C.1.pep
IYVGDDKLVEVKAIGHFKLLLCTGFYLDLKDTFVVPSFRQNLISVSYLDKLGYLCSFGNNIFRLSFKSDIVGTRSLLVNDNLYLLDTVAFYGESYVVLLSVKLIIQTQDHYDISA

SEQ ID NO: 257901 - protein, 65 aa, Glycine max
  Clone ID: PAT_MRT3847_74908C.1.pep
ASMRRRQKGKVGLGVIHKTFEPNVALLHQPSTSHSFIFAFSTVANCAAGYANLFARHQIIQNDES

SEQ ID NO: 257902 - protein, 53 aa, Glycine max
  Clone ID: PAT_MRT3847_74909C.1.pep
FLTSHTSASSSAFIISLLQLKMLKSSITLSDDEELITMVGVHHCVTVVFIRRR

SEQ ID NO: 257903 - protein, 68 aa, Glycine max
  Clone ID: PAT_MRT3847_7490C.1.pep
DDIEKLVSKLEDKVCAPEEGSCMDAIILHLHGCLPPELQASSFDWIQFSDIDALIILTSAVPQIKHGV

SEQ ID NO: 257904 - protein, 159 aa, Glycine max
  Clone ID: PAT_MRT3847_74910C.1.pep
PGFLVVPGIKGIFIPVSPGGGPLPDPPPRAPPGGPPCLRGASLGGYLWAPPAPYVGPPPLFWPRYLFPPIGVFKYPLFWGSPPPPPFIFPWSVPPTWGGGKKTTMPPVPPAIFLREQRTHLFPICFFPSSNCNHFWVCRPLFPAVFFLFGNRVGGNGVV

SEQ ID NO: 257905 - protein, 56 aa, Glycine max
  Clone ID: PAT_MRT3847_74911C.1.pep
IKNAGSTFSSFNCLESKSGFETYHARAGFPMPWGPSQDFVVTEFTGQVFGGFSHSH

SEQ ID NO: 257906 - protein, 119 aa, Glycine max
  unsure (1)..(119): unsure at all Xaa locations
  Clone ID: PAT_MRT3847_74912C.1.pep
LELEPLEPLEPLERLEKKKKKKKKKKKKKKKKKKKKKKKNIKKTIYNIKXKKKKKKKKWGGPPFMGLFPREIISVRVPGGPPFFFFGDIFKPGENKGKTCFLGKNVSPPKSPQIYVPEN

SEQ ID NO: 257907 - protein, 74 aa, Glycine max
  Clone ID: PAT_MRT3847_74913C.1.pep
PCCNHTPSNPYPLFPHFHPQFIFFFYPPFYLAISTQMGHKWLVDKRLLTLSNGGWWGATHCKAIESRAARAARA

SEQ ID NO: 257908 - protein, 53 aa, Glycine max
  unsure (1)..(53): unsure at all Xaa locations
  Clone ID: PAT_MRT3847_74914C.1.pep
GHSSYLRHREDIISCCVTFVGRLVGTLIXLDAPFLPCLQSSLGAIWIPNQGTT

SEQ ID NO: 257909 - protein, 138 aa, Glycine max
  Clone ID: PAT_MRT3847_74915C.1.pep
MLQCILSKFSFIVSFFFSICGPIFFSLSQNEPKRLKKHLPQILKLLKPDDRILIVGTTRRPFDAELQSFCKVYQKIILVPRPDYASRYVLWKQIIERNGGVLTSALNVSCLAKVTDGFTQGHTVEVVKGVLTDQRIRR

SEQ ID NO: 257910 - protein, 39 aa, Glycine max
  Clone ID: PAT_MRT3847_74916C.1.pep
RPARPGQARARQNSVRLLKSIARRRPCVIRQRHVMRKGM

SEQ ID NO: 257911 - protein, 143 aa, Glycine max
  unsure (1)..(143): unsure at all Xaa locations
  Clone ID: PAT_MRT3847_74917C.1.pep
LTXXVALSGAHTIXXSXCSQFSKRIYNFRRRKSIDHTVNPTYAKQLQQVCPKNVDPRLAIDMDPVTPRTFDNQYYKNLQQGRGLLASDQALFTHKRTRDLVNLFASNNTAFEASFVSAMMKLGRIGVKTGNQGEIRHDCPMIN

SEQ ID NO: 257912 - protein, 74 aa, Glycine max
  Clone ID: PAT_MRT3847_74918C.1.pep
ERETLWSVFCETEVFFLNHCLLQSNSASKISFQKNFRLLKLVSHSQVTSHTLYLLQHPTKCSSLVLFNDSDLQM

SEQ ID NO: 257913 - protein, 221 aa, Glycine max
  Clone ID: PAT_MRT3847_74919C.1.pep
METQHQQPTIKSRFRRICVYCGSSPGKNPSYQLAAIQLGKQLVERNIDLVYGGGSIGLMGLISQVVYDGGRHVLGVIPETLNAREITGESVGEVRAVSGMHQRKAEMARQADAFIALPGGYGTLEELLEIITWAQLGIHDKPVGLLNVDGYYNSLLAFMDKAVDEGFVTPAARHIIVSAHTAQELMCKLEEYVPEHCGVAPKLSWEMEQQLVNTAKSDISR

SEQ ID NO: 257914 - protein, 125 aa, Glycine max
  Clone ID: PAT_MRT3847_7491C.1.pep
MAQKQKLRPSPLDEPPTASSSDSEEEEPQQQQPSSQKNKEEEDEEVSSGEEEEEDEEEEEAASSEEEEEDEDLPPPPVSKNPPPPPANPQPQHSSSESETESGSETESEPDPTPVKVKPLASKPM

SEQ ID NO: 257915 - protein, 79 aa, Glycine max
  Clone ID: PAT_MRT3847_74920C.1.pep
EDVVIEEECHTPTSPSQKLPTNPLVCPPAPKKARVVPRRLKNLDPPSQEGFFQVPHDLASVFVLRSPSLPRRTAKQAFF

SEQ ID NO: 257916 - protein, 77 aa, Glycine max
  Clone ID: PAT_MRT3847_74921C.1.pep
GASARSGLLFETMPGSSSAKPVMCSGSSYLICPERLRMNKKVASCVMVLSLPSRSCAYDMPMGDIGSPCVRSCTFCH

SEQ ID NO: 257917 - protein, 383 aa, Glycine max
  Clone ID: PAT_MRT3847_74922C.1.pep
MNFKMDSDSAKLFVGGISRDTTEHVLKLHFAKYGVVSDSTISVDRTTRSPRGFGFVTFSDLSAADKALQDTHVILGRTVEVKKAIPRSEQHQHQNPLQSRGGGYYYNNNNNNNDDNNNNSNDYCSDHNVRTKKIFVGGLPGISEEEFKNYFERFGRITDVVVMQDSVTHRPRGFGFITFESEESVQNVMVKSFHDLNGRQVEVKRAVPKEGNHGYDGFSKLRNKSERGVPKSFPPFSHRDMLPLPGFTPLPWYSGDGVYAYGSNAYGCWYPVGGYGGNGYAVPSDAPSNLWYGPMMTGPQACQVPYASAVPNVVYVGGRIGIVGSGAGSWGYTGIMGSATNLKFDQAFNANEFVPGNVTSPHGVKQDVIDSSSLKGSNGGISS

SEQ ID NO: 257918 - protein, 227 aa, Glycine max
  Clone ID: PAT_MRT3847_74923C.1.pep
MNFKMDSDRAKLFVGGISRDTTEDVLKLHFAKYGVVSDSTISVDRTTRSPRGFGFVTFSDLSAADKALQDTHVILGRTVEVKKAIPRSEQHQHQNQLQSRVGGYYNNNNNNNNNYSNDCSSDYNVRTKKIFVGGLPAGISEEEFKNYFERFGRITDVVVMQDSVTHRPRGFGFITFESEDSVQNVMVKSFHDLNGRQVEVKRAVPKEGNHGYDGFSKFRNKSERGVP

SEQ ID NO: 257919 - protein, 94 aa, Glycine max
  Clone ID: PAT_MRT3847_74924C.1.pep
VPPYFYHSVASLMFQSGLLYQPLGLRSGWRANDFVPPARSFQHSQVPIVPNFTRHQRQNRGSRMNGNLNSLGKAYSSVYIPQLQYYQAVEYSAA

SEQ ID NO: 257920 - protein, 36 aa, Glycine max
  Clone ID: PAT_MRT3847_74925C.1.pep
KTIAFYISVYFIKWLISCTFYTFLLKIKSKGILRKW

SEQ ID NO: 257921 - protein, 30 aa, Glycine max
  Clone ID: PAT_MRT3847_74926C.1.pep
IPLLTSLGIHDSGPIVGDSTLDSSIEIARR

SEQ ID NO: 257922 - protein, 42 aa, Glycine max
  Clone ID: PAT_MRT3847_74927C.1.pep
KKKKKKKKKGATFLKGAPLGSAGLPDVRFHVGSLNFNKGPLI

SEQ ID NO: 257923 - protein, 90 aa, Glycine max
  Clone ID: PAT_MRT3847_74928C.1.pep
MFGLTWIPTDDDEAEEDTEENNSDMEEESDYNEDQNSLVHQRFQGWYCVLCSKLDISKKKVIHDPRCTCYPSPPISTSTYPDSYSYHSHT

SEQ ID NO: 257924 - protein, 46 aa, Glycine max
  Clone ID: PAT_MRT3847_74929C.1.pep
LNSHKKRFPAVLFVFPFIFQEKVQFLRVKNCCLIAYLSTINRKNLP

SEQ ID NO: 257925 - protein, 75 aa, Glycine max
  unsure (1)..(75): unsure at all Xaa locations
  Clone ID: PAT_MRT3847_7492C.1.pep
PWPLFVKYGGIANILYYTLTPVLCVIRWLQSHFLVGAFVVLVSLCWAMYSLFYMVQXLVYQFGRDICFSGGLXYD

SEQ ID NO: 257926 - protein, 139 aa, Glycine max
  unsure (1)..(139): unsure at all Xaa locations
  Clone ID: PAT_MRT3847_74930C.1.pep
KTRTRGFNKKKKTNGCGPYPKKMGPLRPTAPGGDPGNPDPAVKAXNFGPWGGGIQLGPKRGKNEPGGKQGTGPNPPKNKTRKQKGKNLGGQKKERTPGGPQGGTAPKSMGKPNGPLSKKKNPPPRGKKKTSPPPGGGFF

SEQ ID NO: 257927 - protein, 74 aa, Glycine max
  Clone ID: PAT_MRT3847_74931C.1.pep
NTHTSQQIQQKNRFLFKFCRVKKKMKTPQNNYQTPTPLNTRNKRTLRKKINMKKKTIHIRWLKKPQYRSAKEIV

SEQ ID NO: 257928 - protein, 80 aa, Glycine max
  Clone ID: PAT_MRT3847_74932C.1.pep
SKIREMALKRLIARVFTCFRFSCCCTAWFNPSPPPSPSIALLLLPPTPTSLLFFIQNQTIHRYADQGRSICRHNLRTKQQ

SEQ ID NO: 257929 - protein, 76 aa, Glycine max
  Clone ID: PAT_MRT3847_74933C.1.pep
GISHLYEPPRHLVRTDVDLSGRGGLGIVGSAESVVVKGGLGSESGHVRHFRSVLCRHPQVSGSGLNNNLKVGVTLW

SEQ ID NO: 257930 - protein, 104 aa, Glycine max
  Clone ID: PAT_MRT3847_74934C.1.pep
MAMSGASSDHSPKPGVSSPWSQIVAAAAPPSSTSPPPPPVVDASVAVNSPPTEDSDNGGGNNVITGKRPAWNKPSNAASSSVIGADSWALPAESARAPTKSPSP

SEQ ID NO: 257931 - protein, 42 aa, Glycine max
  Clone ID: PAT_MRT3847_74935C.1.pep
TLGDSIFKWLIFTFTRSRARPRRTLAIINLCYVFNVSNFKEA

SEQ ID NO: 257932 - protein, 54 aa, Glycine max
  Clone ID: PAT_MRT3847_74936C.1.pep
LHIDRTVEVADHLSYPFVRRLQSLPHHILLCLLSILRLATMPISLDQFLNLESE

SEQ ID NO: 257933 - protein, 67 aa, Glycine max
  Clone ID: PAT_MRT3847_74937C.1.pep
GKKKLVLFFFPKFNQRVFPNHGNPWGPIFYHFLIKIRSPKLDIAPKLQEFPPRKPPFEMNPGVFIDD

SEQ ID NO: 257934 - protein, 60 aa, Glycine max
  Clone ID: PAT_MRT3847_74938C.1.pep
ICWRMLHLGVQDSIVLTYSVEGLAVLAVWVYLMGLLATFVTNGCPHSLTLVVVDKLPRVS

SEQ ID NO: 257935 - protein, 56 aa, Glycine max
  Clone ID: PAT_MRT3847_74939C.1.pep
RGSISGAGGYIHRDSFINDSEYDNFQMLNSSNRFILMLFVYADLVIRFSHGNATVP

SEQ ID NO: 257936 - protein, 119 aa, Glycine max
  Clone ID: PAT_MRT3847_7493C.1.pep
MASTSTSRTRIKWQKLEETKQQRSMTRPCEHATNSSSSQERGIGNVEEDSINEEDVCSSGCATPKAKRFRIPEVLTCPPAPKKRRVMPNYSSKKSPIAFFASPDIEFFFFSSSLRNVSA

SEQ ID NO: 257937 - protein, 94 aa, Glycine max
  Clone ID: PAT_MRT3847_74940C.1.pep
EAEKGKIPAVGNLVNRCLELNGKKRPTMKEVTFELERIQRLDKKSNAEQNREEIELARIEDYQPWVGYSISNSLATLGSESISSDSEVIPIVTL

SEQ ID NO: 257938 - protein, 53 aa, Glycine max
  unsure (1)..(53): unsure at all Xaa locations
  Clone ID: PAT_MRT3847_74941C.1.pep
DLKDHVQNIKVCCVFTGLGGYLXNNGSISTRISAHQTSFCFICCHLTLRHKEC

SEQ ID NO: 257939 - protein, 480 aa, Glycine max
  Clone ID: PAT_MRT3847_74942C.1.pep
MVVIDEKNRVIRRDMVELSQHDQSVTVAYYGEELHGGVPLPRFSRMSPLNTDRQNKGMENKYKLLNSPVKQATPAEAQKFASSIKVATEGTSSRGQAMSSAVLQAEEVQSNLEREFPSFVKSLVRSHVASCFWMGLPVSFCKRHLPDKDTTFILEDESGKEYMTKYIACKTGLSAGWRQFSAVHKLHEGDVVVFQLVEPTKFKVYIIRANNTRELDGAFLSLDSCIKQKMGGNDNADSDDVACNNSKRKHGKSVQQDVQTKKKASASRLRPKARPSVEQSENDSEEALSEVMEGFKMLEFNDVKGFENFSIIVDGVPIDAEFSTEVRNKYYRLCCSQHAFLHENLIKGMNYKLIAGIILETVNIADAIEVSVICTPRAEFSNWDKTLLAFEHLGMDVEFLRVRLRRLARIAYEKDDASETKKHLAYRNEYSRADDEIKNMEAKLEELKGACNGFGAYLESLKCRAESNHIKFQKEVVAPW

SEQ ID NO: 257940 - protein, 71 aa, Glycine max
  unsure (1)..(71): unsure at all Xaa locations
  Clone ID: PAT_MRT3847_74943C.1.pep
FTYNRHISSPFTPQPNFLHAHVWGHPPFDMSHRTLSVATPKAPPKWMPILVGAIPPSHLLLKSLTGKFXAP

SEQ ID NO: 257941 - protein, 79 aa, Glycine max
  Clone ID: PAT_MRT3847_74944C.1.pep
LDTQTSRSVLFNDTVLSKSMFRRKSSLGVQQEGIYYVDAESGGPTFVVEDEKQFGSSCPFRLYFDFCLINKKKLLFLLS

SEQ ID NO: 257942 - protein, 64 aa, Glycine max
  Clone ID: PAT_MRT3847_74945C.1.pep
KGNPRFCRAASPTNWWNQYSSSTLTSTQRRWFKWVRKYHMIYDYCQDNERFQNNLPRECSLLKY

SEQ ID NO: 257943 - protein, 68 aa, Glycine max
  Clone ID: PAT_MRT3847_74946C.1.pep
FITCLFYITKPKSTSCPYDVIHLNHLLNLEQLICFCLSFSSFSFCLFFSLFSCFWQLRHNMDGLFFSV

SEQ ID NO: 257944 - protein, 111 aa, Glycine max
  Clone ID: PAT_MRT3847_74947C.1.pep
ESFLYTSEILRMAPRTSLFQLEAESQHYCEDHWDALKNQHNEVDYLDLLKYCFSSAYMLALLHDVLGIAMEEKSQHYCDHQSNALKDWTLGSFFIGFIGRYPSNLHIYLHD

SEQ ID NO: 257945 - protein, 132 aa, Glycine max
  Clone ID: PAT_MRT3847_74948C.1.pep
MMRGRTRHEEDEQSRALYQLSALVLNLLRSPLSSLTFSDEVPPLAASRRPGLGQISPAGFASLLLGISLALMLCGSVTFFIGFVLMPWVLGLVMLFYVAGILSSLSVFGRSILCYATAPPSPRKDIPAWKLM

SEQ ID NO: 257946 - protein, 96 aa, Glycine max
  Clone ID: PAT_MRT3847_74949C.1.pep
MLNSEGDLKISFGYKCNSDRGIPCEVASGCKILPGVRRTSSFSCFSGAALSANATLANTNICNGKIGEEILPSWDSPNSFRKGTSSPSLSKLDILS

SEQ ID NO: 257947 - protein, 38 aa, Glycine max
  Clone ID: PAT_MRT3847_7494C.1.pep
FLFLLLSLFIFFLILIVLIYYVHVWFKNKNFDQLIKLL

SEQ ID NO: 257948 - protein, 54 aa, Glycine max
  Clone ID: PAT_MRT3847_74950C.1.pep
MSCCGRNCGCGSAFMCGNGCRCCIMYPDLSYTDSTTTDTLFMGVAPVKAQFQSA

SEQ ID NO: 257949 - protein, 49 aa, Glycine max
  Clone ID: PAT_MRT3847_74951C.1.pep
ILFTRSNVGHQFNIMNPLELREDYVYIYIYASCRIWFKEEDVSYLNQMY

SEQ ID NO: 257950 - protein, 66 aa, Glycine max
  unsure (1)..(66): unsure at all Xaa locations
  Clone ID: PAT_MRT3847_74952C.1.pep
RHCRTGRXAGETHSHTHTXXFTHTQQYATTYLTXDLGPARHEGRAHSWAGRTPSLKXSRGTGCRSR

SEQ ID NO: 257951 - protein, 40 aa, Glycine max
  Clone ID: PAT_MRT3847_74953C.1.pep
RSHKNKNSEVPPDLTRRDRARIKGTWETDHYFMPAENMGC

SEQ ID NO: 257952 - protein, 88 aa, Glycine max
  Clone ID: PAT_MRT3847_74954C.1.pep
TAACGNPTFMKPFCRCSTSLSRNGHADHLIRYLERQRFCRREAPAMVVIGGERRCSIIRGMELRDANVHNVDVLFVSAGADGAERVRA

SEQ ID NO: 257953 - protein, 54 aa, Glycine max
  Clone ID: PAT_MRT3847_74955C.1.pep
MYFSLSFNVCSFNIIFMLKLISIMIIVIIIHKILAFGPRQLENGHCLLLWSFFF

SEQ ID NO: 257954 - protein, 34 aa, Glycine max
  Clone ID: PAT_MRT3847_74956C.1.pep
RVLPSNHKPSYTVIVIQFVDFCTNYHKGYSNNDF

SEQ ID NO: 257955 - protein, 96 aa, Glycine max
  Clone ID: PAT_MRT3847_74957C.1.pep
MKTLPGALIGMTVTINVTINNAMANVKDKIHVTAGLHPENHPGKHLGEQLTHARTIIHNDIHIDLTLNLRLRLIDPIIKPFVMAYAHDYINDKMIY

SEQ ID NO: 257956 - protein, 91 aa, Glycine max
  unsure (1)..(91): unsure at all Xaa locations
  Clone ID: PAT_MRT3847_74958C.1.pep
VEDTDRSVGDLGATVSAHRWGLPGQISVEPLQTLVIQGCXIEDRPIVAYGSLIVKVQEKKTIAWKVLDEEKQGQTVLMNRAATLHRLGIQA

SEQ ID NO: 257957 - protein, 54 aa, Glycine max
  Clone ID: PAT_MRT3847_74959C.1.pep
KNSHFARCRGGSGLGSARYCEIYARVRFRIYVMIVRNRFVLVCHFASRPQMLQW

SEQ ID NO: 257958 - protein, 74 aa, Glycine max
  Clone ID: PAT_MRT3847_7495C.1.pep
GAIHNPFPGGEGRNPGVRAEGQKFYSGFCRALLKQKLCRSRKIFMLGERLPRFMVPWPVAFRLMDQSRRALVFF

SEQ ID NO: 257959 - protein, 83 aa, Glycine max
  Clone ID: PAT_MRT3847_74960C.1.pep
KNILFLNTGEKNLFLLKGPPHFFILFIIFFFLFFFFLFNLIFLIFFFKYFFFFFILINLIFFLFFFFRFQIIKHCSILKIVFV

SEQ ID NO: 257960 - protein, 37 aa, Glycine max
  unsure (1)..(37): unsure at all Xaa locations
  Clone ID: PAT_MRT3847_74961C.1.pep
YRSGHVKAXTEXKGRXEDLGLFRXRRMNXRITKGLKT

SEQ ID NO: 257961 - protein, 73 aa, Glycine max
  Clone ID: PAT_MRT3847_74962C.1.pep
DDFILLYYLFFFKIYIFYFNLKYFSFKINLIFYYINFSLSKKKTKISYALRDRKLHPHIYGLFFFAQVYRSNS

SEQ ID NO: 257962 - protein, 335 aa, Glycine max
  Clone ID: PAT_MRT3847_74963C.1.pep
ARNSARDLFNYYFSKILNGQGWRLSLGLGAVPAFIFVIGSWGPPASPGPRVVRPLQVGAKRELVKIRGTTEVDAEFRDILAASEASQNVKHPWRTLMDRKYRPQLVFAICIPFFQQFTGLNVITFYAPILFRTIGFGSGASLMSAVIIGSFKPVSTLVSILLVDKFGRRTLFLEGGAQMLICQIIMTVAIAVTFGTNGNPGTLPKWYAIVVVGIICVYVSGFAWSWGPLAWLIPSEIFPLEIRPAAQSITVGVNMISTFFIAQFFTSMLCHMKFGLFIFFGCFVVIMTLFIYKLLPETKGIPLEEMSMVWQKHPIWGKFLESDNPIQNDKMNSKC

SEQ ID NO: 257963 - protein, 74 aa, Glycine max
  Clone ID: PAT_MRT3847_74964C.1.pep
VRHLIVQGGECTRDYLYPYLLLFLFIRNKLTSYRVNIVYFILHYNFSLINRNKCIVLIINDNIMIYDYDAFQIL

SEQ ID NO: 257964 - protein, 53 aa, Glycine max
  Clone ID: PAT_MRT3847_74965C.1.pep
ILLTTAHCWWGVQTKEKPQALSFSDQKNFLSALLVREKDSQLSGSRFNVAKPS

SEQ ID NO: 257965 - protein, 55 aa, Glycine max
  Clone ID: PAT_MRT3847_74966C.1.pep
VNLGLKTPFIFQISEQNCGELSIDLIRGGILVDISGDRIRLMQKSSISDSLKIAA

SEQ ID NO: 257966 - protein, 101 aa, Glycine max
  Clone ID: PAT_MRT3847_74967C.1.pep
SIKVPQTGRTAAGTGVGRERGGLRRTVSGFLSPSIIFSRPCPSIIFSRPCPSIIFSRPCPSIIFSRPRPSIIFSPPCPSIIFSRGCPSMIFSRPCKHINQP

SEQ ID NO: 257967 - protein, 51 aa, Glycine max
  Clone ID: PAT_MRT3847_74968C.1.pep
SKFYKKISGVFHLLDSEGSTRMKTSAAQPHLTNGVPTSGAATQTMGATGRV

SEQ ID NO: 257968 - protein, 57 aa, Glycine max
  Clone ID: PAT_MRT3847_74969C.1.pep
VLIYKANMLISKGIIHGLKTCNLQFTITSSINSPKPRFSTPLTHLLSFISRKLIPSF

SEQ ID NO: 257969 - protein, 48 aa, Glycine max
  Clone ID: PAT_MRT3847_7496C.1.pep
LMGIYHDLMIGGWSLTYIKNYFTPNKYKIYAKLWAYKCWIVMLSKIQL

SEQ ID NO: 257970 - protein, 85 aa, Glycine max
  unsure (1)..(85): unsure at all Xaa locations
  Clone ID: PAT_MRT3847_74970C.1.pep
LANKVKWSRATLIKKRQELSSSISEVYLPVHYPASLERISAVLIGKISPHLPQEGSVIPTRGEVLQELMIFSCTSLLIRQVFXPF

SEQ ID NO: 257971 - protein, 57 aa, Glycine max
  unsure (1)..(57): unsure at all Xaa locations
  Clone ID: PAT_MRT3847_74971C.1.pep
NNFYPQIGLFSIHSQFPTKFNSTSPWEYSPNISCKPYGYHNIKFTXIDTITYNYSPP

SEQ ID NO: 257972 - protein, 128 aa, Glycine max
  Clone ID: PAT_MRT3847_74972C.1.pep
NQGSNCLSEDEQKKKQEQRLQLNGGRNLGGMVAGRCQTDGESCCQDNEDSCCCQNDVFEEMTELSADNKRENVNVISRINKGKGALRKFSSMPTWLDSWEQEDTYAALAVVCAAVSVAIAYSCYKQLR

SEQ ID NO: 257973 - protein, 65 aa, Glycine max
  Clone ID: PAT_MRT3847_74973C.1.pep
SLSNFVPLKNTLTNILLTFSHILTHLSTSICIFNVLEGTAIQLMCSKTNASGYISQCILSIIYFS

SEQ ID NO: 257974 - protein, 115 aa, Glycine max
  Clone ID: PAT_MRT3847_74974C.1.pep
RPLTRQIFLRVLSFFSNLNRADVHSFLQEPYRDDIHPPHKLPWITSRLIANPHGSISCSLVMTEQGIISGIKGNSEGRKFTHVKGFGYRGAAEIADMIDCGGHVDMPGWTEVHGL

SEQ ID NO: 257975 - protein, 123 aa, Glycine max
  unsure (1)..(123): unsure at all Xaa locations
  Clone ID: PAT_MRT3847_74975C.1.pep
QILTKGGLKEENIIDFMYGDVAFNGXNPRPVVIINKPDXCNVYKVSPKDHTVXYLTNDYFSADSFGYXYALTYVSVNVVDSDPDDHILVYYTDHGSSYVLSMHADYDLYSDDLIEVLKIKPAS

SEQ ID NO: 257976 - protein, 86 aa, Glycine max
  Clone ID: PAT_MRT3847_74976C.1.pep
HGKNEVLLQLSQFNYRNKLRMILKIFLKLIQWYKNGTSYSPPTSDLKSIIPHPPWAFYSTRFSCSTQINMNMWKSQTQALLLIACK

SEQ ID NO: 257977 - protein, 139 aa, Glycine max
  Clone ID: PAT_MRT3847_74977C.1.pep
VSDILTLQENRLQKFKLPEPVLCIGGVLLIELLGRVQKQKMDELFYICISHVQVMGRLLFPEFDVKIHHWSGKCTLKYCPQTDCYMFFPTSSPRSNSSNPSRLRTITSSIMQRGVRRWEQFFLGALLGTGPVVVDNEDQ

SEQ ID NO: 257978 - protein, 60 aa, Glycine max
  Clone ID: PAT_MRT3847_74978C.1.pep
ALITERNKLLVEFEGPLDSQICDVRGGGTMSSDSLSRNLLDILYLETKLFTLLTFHDELD

SEQ ID NO: 257979 - protein, 127 aa, Glycine max
  unsure (1)..(127): unsure at all Xaa locations
  Clone ID: PAT_MRT3847_74979C.1.pep
ARARADSARVLSVRLEHPMLGELLKNTEQDLNEAYSTVEDKALLXEGCVITVVSLENSIRDRDSNRESRLDGSGEKEXRLTSQMQLSLRALRGRDREKERVGFEMESFIHEQSSMENQTSSLGTLIS

SEQ ID NO: 257980 - protein, 53 aa, Glycine max
  Clone ID: PAT_MRT3847_7497C.1.pep
NTGALVLWLGLLPTLAPIVATPPNIFGLLVLSIKHNQGYSIFYTLNVVSVTVN

SEQ ID NO: 257981 - protein, 50 aa, Glycine max
  Clone ID: PAT_MRT3847_74980C.1.pep
KQNQQCYIYILSYVANGNKQIKNLTTNYPIQLQFRTTLTNHISFPAIRVS

SEQ ID NO: 257982 - protein, 33 aa, Glycine max
  Clone ID: PAT_MRT3847_74981C.1.pep
PRVLIGQTNGGSIVCEIYPWSGNGDLQEGLFWF

SEQ ID NO: 257983 - protein, 293 aa, Glycine max
  Clone ID: PAT_MRT3847_74982C.1.pep
MDGGNRPEAERWLYTANKLLSARDLHGARSFAIRARESDPTYDASEHLLTVIDTLLAGESRINDHHRDWYGILQILRYATNMDHIAAQYRRLALLLDPHRNMFAFASHAFSLVNDAWSVLSNSAKKAMYDSELRLLTAPAPPQHHPLPPQPQPTPRRNPRSRDEPNPNRPESAESSRQTRTVETDTGTSFWTSCPYCYVLYEYPKVYEECTLRCQSCRRGFHAVVIRSPPPLSGKDGSYCSWGFFPLGFSGNSKDVNGHASNWNPFSPLFPCPLKGSSKRRPQRNWAYYDDDA

SEQ ID NO: 257984 - protein, 65 aa, Glycine max
  Clone ID: PAT_MRT3847_74983C.1.pep
SKPLMPTLPPINDTATGHKFYSNITGKVGAPHWVPVPAKVDEHMFITIGLNLDTCDPKNATNATC

SEQ ID NO: 257985 - protein, 62 aa, Glycine max
  Clone ID: PAT_MRT3847_74984C.1.pep
KSRRLFLQNLFPRKILFLYVDVCCTCFQGVLYTSSNIGLSPILYFLNRISFRILLSSPVDKQ

SEQ ID NO: 257986 - protein, 149 aa, Glycine max
  Clone ID: PAT_MRT3847_74985C.1.pep
REQAQEFTDIKFREAYLDTVCLNMVQDPGHYDVLVMPNLYGDILSDLCAGLIGGLGVTPSGNIGEGAAVFESVHGTAPDIAGQDKANPTALLLSGVMMLRYMGLESYANKIEKACFDAISHGDHKTRDLGGTGTCSSFTADICARIKSM

SEQ ID NO: 257987 - protein, 50 aa, Glycine max
  Clone ID: PAT_MRT3847_74986C.1.pep
DTSLHTSIRIEPSHVNVRLASIIYPPCHCDILPNIYSKMLPKLHTWDCIS

SEQ ID NO: 257988 - protein, 200 aa, Glycine max
  unsure (1)..(200): unsure at all Xaa locations
  Clone ID: PAT_MRT3847_74987C.1.pep
LFIFSSRFSERALALIHGDLHTSSVMVTPEXTQVIDPEFAFYGPMGFDMGAFLGNLILAFYAQDGLVHQPNHSKAYKEWILQTIEDTWNLFYDKFIALWDEHRNGAGEAYLPAIYNNPEVQLLAQKRYMTDLFHDSLGFGAAKMIRRIVGVAHVEDFESITDAVKRATCERKALNLAKMLLKDRRKFEGIAEIVSAIRQF

SEQ ID NO: 257989 - protein, 26 aa, Glycine max
  Clone ID: PAT_MRT3847_74988C.1.pep
RPFSLSNLFGVKLGSIGFGIKLYNYA

SEQ ID NO: 257990 - protein, 44 aa, Glycine max
  unsure (1)..(44): unsure at all Xaa locations
  Clone ID: PAT_MRT3847_74989C.1.pep
RGPSSPGSPCXXXRIDRXRCXMXKVLEFXXWSXPXFIXGVEKEX

SEQ ID NO: 257991 - protein, 81 aa, Glycine max
  Clone ID: PAT_MRT3847_7498C.1.pep
GKVLGPPGLTPRGGPLLGPGFPPPRGVKRGPPQVLVRSSKGTLGSPRKTLKGDVGVGRGSPLLKVKGFFRLDPASPIFKAL

SEQ ID NO: 257992 - protein, 42 aa, Glycine max
  Clone ID: PAT_MRT3847_74990C.1.pep
SPLFFIYICSRGNTTIGDDSCTFFHSIMSLDLTVLPYSILYY

SEQ ID NO: 257993 - protein, 206 aa, Glycine max
  unsure (1)..(206): unsure at all Xaa locations
  Clone ID: PAT_MRT3847_74991C.1.pep
MMGWVANRWTGVAAAIWIQWSCGASYTFSIYSSVLKSTQGYDQSTLDTVSVFKDIGANFGVLSGLLYSAVAPYTTHRASPSKSIWTSLSGPWVVVAAGAVQCFAGFIFIWASVVGLVSPPPVPVMCFFAWLASNGQTFLNTXHVVTGLRNFPEYSCTIIGIMKGFLRLSGAILVQIYHTFFDGDPATYLLMLAVLPSVICVLLMFF

SEQ ID NO: 257994 - protein, 107 aa, Glycine max
  Clone ID: PAT_MRT3847_74992C.1.pep
PLVLNRWMGKLTFLQGTYRNANRMPLSIGGGAGAQNAILMNMPNAVLSMWRYFVGDLGSEDAKMTSDYIKCADSFFIASGNMADDANNFEAFPHKLVQFGQTYEKAE

SEQ ID NO: 257995 - protein, 60 aa, Glycine max
  Clone ID: PAT_MRT3847_74993C.1.pep
TTPRFYFWGKGANCPFPPLLKKWVCFLFFVPEFKFSFFFDYNIGAPVPFINKRFGLSPGT

SEQ ID NO: 257996 - protein, 145 aa, Glycine max
  Clone ID: PAT_MRT3847_74994C.1.pep
EIIEVIVLCRCSFSYFFDSCFHFVALTALLVFMLFFLAATINAIVISLLISLAAAGGFLALFFAFVTAIYIGALAIAIFAISVTTFWSIVAILIITGFIGFIYTVWLVTRKSFGFAKHSLDVTGSAISSYTTARHARYQIHTNSK

SEQ ID NO: 257997 - protein, 90 aa, Glycine max
  Clone ID: PAT_MRT3847_74995C.1.pep
NRHQREKVWMIIGPNLHILNSLPGFYGGAPRIRGFWAPRRKFLWSQRKIDGSAQAPLQKGKFSGTILQWRTPPHFSERPGAGTGQPDATH

SEQ ID NO: 257998 - protein, 64 aa, Glycine max
  Clone ID: PAT_MRT3847_74996C.1.pep
ESEGCNYNFSGSYIIILVVNFFWIMFIFEDMLLLIGKQSYLKKKNGGGAGARGGGAAVAVDIGP

SEQ ID NO: 257999 - protein, 100 aa, Glycine max
  Clone ID: PAT_MRT3847_74997C.1.pep
RLGIEDELYDMASPLTQTLNQLSMPEILSTSFFTWIFLKIALTITIWRHRNSLLFKGIPFDPHKVMDEALFLAWSWQRAREKGFHTQFNHWSSNLSECFG

SEQ ID NO: 258000 - protein, 154 aa, Glycine max
  Clone ID: PAT_MRT3847_74998C.1.pep
MRRKKKKMKKKIEKMRKRKKTKLAKEKKKEIVPCIRNEAPYPLVPSKKDKEQHFPRFLDIFKKLEITIPFGEALQQMSLYYKFLKDLLTKKGKYIHSDNIVMEGNCSAVIQRIFPPKYKDPGSVTIPCSIGVVSIGKALIDLRANINLMPLSMC

SEQ ID NO: 258001 - protein, 102 aa, Glycine max
  Clone ID: PAT_MRT3847_74999C.1.pep
TLRNFTNFVTILISLPQGYESLRIMYLLFFSFRRSYGNSRNAQNTSFRFPSHYGIFTNRVSLLPFDSRHVSGLHILCNKGCQVSRNGQSKVVYHQIIIPGRN

SEQ ID NO: 258002 - protein, 38 aa, Glycine max
  Clone ID: PAT_MRT3847_7499C.1.pep
ADEVFAIFKGAFFSRNGVCGFKSFKSESETIIRCQIST

SEQ ID NO: 258003 - protein, 36 aa, Glycine max
  Clone ID: PAT_MRT3847_749C.1.pep
LSIYAHVLIMDVYYPSMLCSSGIVVVFSIMLCSIRR

SEQ ID NO: 258004 - protein, 134 aa, Glycine max
  unsure (1)..(134): unsure at all Xaa locations
  Clone ID: PAT_MRT3847_74C.1.pep
MAIQPMQPHFVLVPLFAQGHMIPMIDMAKILAEQGVVVTLLSTPQNASRFEQTICRAISQSGLPIHLLAKSXFPXNKLGLPIGCENLDTLQSRNLLRKFYNALDMLQEPLEEYLKSHATPPGCIIXSDKCISWT

SEQ ID NO: 258005 - protein, 159 aa, Glycine max
  unsure (1)..(159): unsure at all Xaa locations
  Clone ID: PAT_MRT3847_75000C.1.pep
HEEEMQKEHEERRRMEKEEXQMRAFKAQPIIKEDPIPVPEKVRKPLTQVQEFSLHVNHRAVDRAQFDERIKEKEMMYKRYREESEAARMIEEEKELKQMRRTMVPHARPVPNFDNPFCPQKSSKDITKPKSPNLRVLHRKERRKVFNGTAFSSPAANMR

SEQ ID NO: 258006 - protein, 44 aa, Glycine max
  Clone ID: PAT_MRT3847_75001C.1.pep
CYTKIPGNNVKAQPLKNQNHKHERVKKTHNHSGRLLYPLNPILG

SEQ ID NO: 258007 - protein, 76 aa, Glycine max
  Clone ID: PAT_MRT3847_75002C.1.pep
MDNSTRDGPDETPEMVTRPPRSVSLPHEQTEAVEVKKVYARAASFQPERSNEARHVHPKLPDCDDLAARIAALRGT

SEQ ID NO: 258008 - protein, 265 aa, Glycine max
  unsure (1)..(265): unsure at all Xaa locations
  Clone ID: PAT_MRT3847_75003C.1.pep
HASAHASEWVYMWDKFGGYLLLLLGLTSKAEQAQDEVRLRLFLDSIGFSDLSAKKIKKWMPEDRRQFEIIQESYIREKEMEEEVFMQRREEEGRGKERRKALLEKEERKWKEIEASLLSSIPNASSREAAAMAAAVRAVGGDSVLDDSFARERVSSIARRIRASQLSRRALQTGVAGAICVLDDEPTASGRXCGPIDSSLCQSQKVSFSIALMIQPESGPXVCLLGTEFQKKICWEILVAGSEQGIEAGQVGLRLXTKGDRQTTV

SEQ ID NO: 258009 - protein, 144 aa, Glycine max
  Clone ID: PAT_MRT3847_75004C.1.pep
LEGQYPPQNGGVNAWSPQRPNEKGWPYAPQATPMLPGPRPVQKRLDPFISRLPDFKKPRVAMIGREPNPGVSSPKKKKVRKGINPRGPPILPRDPKGPLLPISSKKTPSGKRAGEPLVLRFPFPPGAGPKAGFAPNFGPIPGTP

SEQ ID NO: 258010 - protein, 76 aa, Glycine max
  Clone ID: PAT_MRT3847_75005C.1.pep
GKNSDLGFSIPPKPNKKTNQGGGVTKIPQSPPRGPKKNWNWRGFYPHPKTLISFLKISKAFDWRRGPKKEEGPLKL

SEQ ID NO: 258011 - protein, 188 aa, Glycine max
  Clone ID: PAT_MRT3847_75006C.1.pep
MPRCMLFADDIVLLGESREELNERLETWRRALETHGFRLSRSKSEYMECKFNKRRRDDGEIEGDVNHRIQAGWMKWRKASGVLCDAKVPIKLKGKFYRTAVRPTILYGTECWAIKSQHENKVGVAEMRMLRWMCGKTRQDKIRNGAIRERTGRLCSEESRPDGGKANNSRQRKTQKDYKRGYQEGSRT

SEQ ID NO: 258012 - protein, 116 aa, Glycine max
  Clone ID: PAT_MRT3847_75007C.1.pep
MFSYRGDVNHRIQAGWMKWRKALGVLCDTKVPIKLKGKFYRTAVRPAILYGTECWAVKSQHENKVGVAEMRMLRWMCERRPVDSVVRRVDQMERRQTIRGRGRPKKTIREVTVIDI

SEQ ID NO: 258013 - protein, 67 aa, Glycine max
  Clone ID: PAT_MRT3847_75008C.1.pep
YEKKEFYIVRAKMPELFHETPLNGNSQQKGPILWERKFNTILQIMVVGGKCPAHGSIKARAILHGSH

SEQ ID NO: 258014 - protein, 774 aa, Glycine max
  Clone ID: PAT_MRT3847_75009C.1.pep
MDQLRNNVNVRSLPGSNALYGSSTVLKEQGPLHRRPDVVKSKQGFPHFRERVWVKKLVHDRRIRFGTWNIGTLTGKSMEIVDVMVRRKINFMCLQETKWTGEKAKELDNSGFKLWYTGKIRSRNGVGIIVDKEWKKDVVDVRRVGDRIIVLKLVVGQDTFNVISGYAPQVGLAEHFKVKFWEDLEGVLQDIPQGEKVFLGGDLNGHVGSVARGFEGVHGDFGLGEMNGEGKSILEFSEALDLSITNTWFKKREEHLITYKSGGTCSQIDFFLIRKSDRKYCLNCKVIPGESLTTQHRVLVMDVRIRDRAKRRSPLVAPRIKWWHLKGEKQGIFQQKIWEGWCGQSQGSANDMWNKMSQEIIKVAKETLGESRGFGPRGKESWWWNENVQSKIRVKKECFKEWSRCRNSETWDKYKIARNETKKAVSETRTQAFDGLYQALGTRDGERSIYRLAKGRERKTRNLDQVKCVKDEEGKVLVHEKDIKERWKAYFHNLFNDEYGYDSSSLDTREEDRNYKYYRRIQKQEVKEALKRMSNGKAVGPDNIPIEVWKTLGDRGLEWLTELFNEIMRSKRMPEEWRRSTLVPIYKNKGDIQNCANYRGIKLMSHTMKLWERVIERRLRKETQVTENQFGFMPGRSTMEGIYLLRRVMEQYRMAQQDLHLIFIDLEKAYDRVPREILWKALKKKGVRVAYIRAIQDMYDRVSTSVRTQGGESDDFPITIGLHQGSTLSPYLFTLILDVLTEQIQEIAPRCMLFADDIVLLGESREELNERLET

SEQ ID NO: 258015 - protein, 213 aa, Glycine max
  Clone ID: PAT_MRT3847_7500C.1.pep
VNLNSQLSSLPLSRDSDGNCTTANTIYSTNMTGQSCNSGPEEAMTATNEEIQNLSNELSSINIDRNAEHCGITKPNSPPTDHALVKSPQIQGSKYNVDRFRDVITTNVTGKATLNNVACNSREQCDWKLDSQSLVSDTAEIDDDVTSFDNQRLKDPEVVCRSYLPKSTSFLHASNHSSPCLLQHGELCTAINAGSVSADDRVQNESMLHASNI

SEQ ID NO: 258016 - protein, 1189 aa, Glycine max
  Clone ID: PAT_MRT3847_75010C.1.pep
MLPKNPIFRCRDTPSANAFKKPRPTRKQKSKNKENNPPPFKSLLPPKPPSSTPNPNPLKRKHSDHSVPAASNSGVKVIVRMRPSCSDGDEGDSIAQRISSDSLSINGQNFTFDSVAHSNATQARFQLDIFELVGAPLVENCLAGFNSSVFAYGQTGSGKTYTMWGPADALSDDNSASDQQGLAPRVFERLFSLINEEQIKHSDKQLKYQCHCSFLEIYNEQIADLLDPNQRNLQIREDVKSGVYVENLTEEQVCTKKDVAQLLIKGLLNRRIGATSINSESSRSHTVFTCVVESRCKSTADGVSRFRTSKINLVDLAGSERQKLTGAAGDRLKEAGNINRSLSQLGNLINILAEVSQTGKLRHIPYRDSRLTFLLQESLGGNAKLALVCAISPALSCKSETLSTLRFAQRVKAIKNKAVVNEVMHDDVNQLRDVICQLRDELHRIKENGYSPSDGSRGHSAALIRRSLILLKPTLNHPLSLPHVDEDGDEEMEIDEEGVEDHAVVLHNSNGGFAGFSAPNGSIGSPSAAMNGDSPAGGMVKCKTSPILKFRPSSLSPTIRSSRKSLRTSLKQSPSENNIHGESDLGTNTVNQKCLSAALSSQTAPNFLTKTENLAVSICHGLEIIDSHHHGASLSNLSLRSKDSRLIIPVEKVDVPAQTFLDDNAKKEDYAMLTCNNCKSRMQLDANEIANSSNVQLVLIDRPESTDKPKKQILKAAEKVLAGSIRREMALEEFCAKQTSDIMQLNCLLQKYRQERECNATIAQIREDKILRLQSHIDGVLSTKEFMDEEPVSLAHENKDLPAIKIQQLLKENHEHHLEVLKMKIELKRVQDELQEYQNFYQFGEREVLMEEICSLRNQLHFYVDSSSKSTRKQYPPLQFTYSSEPSLAANLTAISDLTEASTEANANPESTEDSAKVKIKQEKSQWTEAESRWISLTEKLRAELEASRSLAEKRKQELDTERKCAEELNKTMQMAIEGHTRTLEQYADLEEKHIQLLERHRKIQDGIDDVKEAASGAGVRGADSKFINDLAAEISALKAETEKEKEMKILRDENRGLRAQLKDTAEAVQAAGELLVRLNEAEEGVITAQKRAMDAEQEAAKAYKQIDKLKKKNDKDISTHNKLLAKTRLPNEEIQPTLDDLLVMPICDDTKVLKNVNGQFELFCNEEDSELANLADQSWFSAYDTWDK

SEQ ID NO: 258017 - protein, 363 aa, Glycine max
  Clone ID: PAT_MRT3847_75011C.1.pep
MEAIVAWSNKTMHLIFIDLEKVYDKVPREILWKALEKKGVRVAYIRAIQDMYDRVSTSVRTQGGESDDFPITIGLHQGSTLSPYLFTLILDVLTEQIQEIAPRCMLFADDIVLLGESREELNERLETWRRALEKHGFRLSRSKSEYMECKFNKSRRVSNSEVKIGDHIIPQVTRFKYLGSVIQDDGEIEGDVNHRIQAGWMKWRKASGVLCDAKVPIKLKGKFYRTAVRPTILYGTECWAVKSQHETKVGVAEMRMLWWMCGKTRQDKIRNGAIRERVGVAPIVEKMVENRLRWFGHVERRPVDSVVRRVDQMEERQTIQGRGRPKKTIREIIKKDLELNDLDRSMVLDRTLWRKLIHVADPT

SEQ ID NO: 258018 - protein, 50 aa, Glycine max
  Clone ID: PAT_MRT3847_75012C.1.pep
SMRCWLFPGKKARAAHVRVEEWGPGDDNLFGEQPQRTHGGCRTRGRTRPR

SEQ ID NO: 258019 - protein, 928 aa, Glycine max
  Clone ID: PAT_MRT3847_75013C.1.pep
PRRHHPHPSHSLLTDKAALLEFRKTIISDPHSSLANWDEAVHVCNFTGVVCDKFHNRVTRLILYDKGLVGLLSPVLSNLTGLHYLEIVRSHLFGIIPPEFSNLRRLHSITLEGNNLHGSIPESFSMLSKLYFFIIKENNISGSLPPSLFSNCTLLDVVDFSSNSLTGQIPEEIGNCKSLWSISLYDNQFTGQLPLSLTNLTLQNLDVEYNYLFGELPTKFVSSWPNLLYLHLSYNNMISHDNNTNLDPFFTALRNNSNLEELELAGMGLGGRFTYTVAGQLTSLRTLLLQENQIFGSIPRSLANLSRLFILNLTSNLLNGTISSDIFFSLPKLEQLSLSHNLFKTPIPEAIGKCLDLGLLDLSYNQFSGRIPDSLGNLVGLNSLFLNNNLLSGTIPPTLGRCTNLYRLDLSHNRLTGSIPLELAGLHEIRIFINVSHNHLEGPLPIELSKLAKVQEIDLSSNYLTGSIFPQMAGCIAVSMINFSNNFLQGELPQSLGDLKNLESFDVSRNQLSGLIPATLGNPQLCGTIAGISLCSQRRKWFHTRSLLIIFILVIFISTLLSIICCVIGCKRLKVIISSQRTEASKNATRPELISNFPRITYKELSDATGGFDNQRLVGSGSYGHVYRGVLTDGTPIAVKVLHLQSGNSTKSFNRECQVLKRIRHRNLIRIITACSLPDFKALVLPYMANGSLESRLYPSCGSSDLSIVQRVNICSDVAEGMAYLHHHSPVRVIHCDLKPSNILLNDDMTALVSDFGVARLIMSVGGGAIDNMGNSSANLFCGSIGYIAPEYGFGSNTSTKGDVYSFGILVLEMVTRRRPTDDMFVGGLSLHQWVKIHFHGRVEKVIDSALVTASIDQSREVRKMWEAAIVELIELGLLCTQESPSTRPTMLDAADDLNRLKRYLNGDTTGTFASSLGISSSTVGGDW

SEQ ID NO: 258020 - protein, 703 aa, Glycine max
  Clone ID: PAT_MRT3847_75014C.1.pep
MRLHCYQASQRPSMTIDRPSLLMAHIDPGIGPNISMCVRGSANDMWNKMSQEIIKVAKETLGESRGFGPRGKESWWWNENVQSKVRVKKECFKEWSRCRNSETWDKYKIARNETKKAVSEARAQAFDGLYQALGTRDGERSIYRLAKGRERKTRDLDQVKCVKDEEGKVLVHEKDIKERWKAYFHNLFNDEYGYDSSSLDTREEDRNYKYYRRIQKQEVKEALKRMSNGKAVGPDNIPIEVWKTLGDRGLEWLTELFNEIMRSKRMPEEWRRNTLVPIYKNKGDIQNCANYRGIKLMSHTMKLWERVIERRLRKETQVTENQFGFMPGRSTMEAIYLLRRVMEQYRMAQQDLHLIFIDLEKAYDRVPREILWKALEKKGVRVAYIRAIQDMYDRVSTSVRTQDGESDDFPITIGLHQGSTLSPYLFTLILDVLTEQIQEIAPRCMLFADDIVLLGESREKLNERLETWRRALETHGFRLSRSKSEYMECKFNKRRRVSNSEVKIGDHIIPQVTRFKYLGSVIQDDGEIEGDVNHRIQAGWMKWRKASGVLCDAKVPIKLKGKFYRTAVRPAILYGTECWAVKSQHETKVGVAEMRMLRWMCGKTRQDKIRNEAIRERVGVAPIVEKMVENRLRWFGHVERRPVDSVVRRVDQMERRQTIRGRGRPKKTIREVIKKDLEINGLDRSMVLDRTLWRKLIHVADPT

SEQ ID NO: 258021 - protein, 92 aa, Glycine max
  unsure (1)..(92): unsure at all Xaa locations
  Clone ID: PAT_MRT3847_75015C.1.pep
MMSSIWGYPGYLHKLQSLITYGCKDVIAPLTIQRSYDNDPHPHAILYYXRELPTXGLLITEASGVCDTDQGYPDTTGIWTKNHDQAWKPIVD

SEQ ID NO: 258022 - protein, 92 aa, Glycine max
  Clone ID: PAT_MRT3847_75016C.1.pep
WSPGFGLGPPVVSPARRVCAGGPRFFFRVPLCGAVWAPLGGGVSGSSFARPPFLLWFSPGLLRWFLFLLALVVPVFFLFLSPLLPFVFRLFY

SEQ ID NO: 258023 - protein, 120 aa, Glycine max
  Clone ID: PAT_MRT3847_75017C.1.pep
LPDRVRSGRRQGGAVDRGILPLRLLRLFSCLVVLASLAFPSVLLFAFYFLDWEDRELEEAEDLRLLGCLFSFRRFRLESERGIKGDVLMLDVVIVRTPLSLGYIISRLPLLSSSHDHAST

SEQ ID NO: 258024 - protein, 77 aa, Glycine max
  Clone ID: PAT_MRT3847_75018C.1.pep
MRLVDYKLESQSPERAKDVDTSSPPVVRPVRDILGENVVPLRISEPPKTNSGRPADRSAPTQVKLLMMVHLVLPPRF

SEQ ID NO: 258025 - protein, 49 aa, Glycine max
  unsure (1)..(49): unsure at all Xaa locations
  Clone ID: PAT_MRT3847_75019C.1.pep
MLYLVFYYYYYYYYYYYYYYYYVVYYIICYALNXYYIYYYFLIYYIIYV

SEQ ID NO: 258026 - protein, 247 aa, Glycine max
  Clone ID: PAT_MRT3847_7501C.1.pep
SVGFETNGLFIERKISLPILDLDHKNSKLPILCTNSSKMLGITLDEAVFNSATALYYDAKFMHWIVDQIPDQSLLNTAGWRFIVPQLYKKYPNHDMNLNVSLSSPPVVEISNQKAGATIFADMAIDVLEEDEVIPVACISLVIQGTGLVKIKGNNLVGSIRLNDFQMSLKWSNIGNLRMYLIQPVVWTLIETVFLPYANARLSKGLPLPIIHGFTLQNAEIILSTSRIAVCSDVAFADSNKRFLQFH

SEQ ID NO: 258027 - protein, 400 aa, Glycine max
  Clone ID: PAT_MRT3847_75020C.1.pep
HLFPTQHASDSELPLFCFIFFFLSLFLILMGISWSGRRRNNYLQNRPPPPPPSYYYHTESHPAPPPQPQGYFLPSATPYAPPPPMPPPPPPQTHSISFYYSSNPNSYGTPTLAPRFHYPQHYYHPQPQPQLAAWPVPRPAAPTPPPYVDHQTAKKIRNYVNVHKDTLRLEVDDHNPDLHLLSFVFDAVYDGSITILYFAKEEEKCRFVPLYPEAFQPVRIPFQKGVGQKFAQPSGTGIDLGFFELDDLSKPSPGEDVFPLVICAETSLKTTSEDETPGDSLLDASPHMQITQGVLEKSNGAGPFLIKVVKQILWIDDVRYELRELYGIGNSSAADFDDNDPGKECVICMTEPKDTAVLPCRHMCMCSECANAHRLQSNKCPICRQSIEELIEIKVNNGDH

SEQ ID NO: 258028 - protein, 332 aa, Glycine max
  Clone ID: PAT_MRT3847_75021C.1.pep
MSKLSILFLLVLSFSSVLSELCNPQDKQALLQIKKDLGNPTTLSSWLLTTDCCNRTWLGVSCDTDTQTYRVNDLDLSDLNLPKPYSIPPSIANLPYLNFLSISRTPTLIGQIPSAIAKLTQLRYLYITHTNVSGPIPDFLSQIKTLVTLDFSYNTLSGKLPASLSSLPNLVGITFDGNQISGAIPDSYGSFSKLFTSMTISRNRLTGKIPATFANLNLAFVDLSRNMLEGDASVLFGTEKNTQKILLAKNMLAFDLGKVGLSKNLNGLDLRNNRIYGTLPQGLTALKFLHSFNVSFNDLCGEIPQGGNMQRFDVSSYANNKCLCGSPLPPCT

SEQ ID NO: 258029 - protein, 65 aa, Glycine max
  Clone ID: PAT_MRT3847_75022C.1.pep
DAKLRVVASLMQETDEKRSEWKELSALLKLEYPQYTALLAMNLEGLVSMSYVINQIHHDHKGHFL

SEQ ID NO: 258030 - protein, 87 aa, Glycine max
  Clone ID: PAT_MRT3847_75023C.1.pep
RAWTTVGAVLGWHLLRQQRVKANLPRLAPPPGLQPAQTTADRPGASQPYFGTLETLERTVASTGLWRSQVPPFSSCHRTTGGPCPPG

SEQ ID NO: 258031 - protein, 65 aa, Glycine max
  Clone ID: PAT_MRT3847_75024C.1.pep
FINYGRCSNLINCIHPLISFSYKNSVDAKYQIEFLHPYILENGAFSCPLFSRVAPIIVSNFKISQ

SEQ ID NO: 258032 - protein, 74 aa, Glycine max
  Clone ID: PAT_MRT3847_75025C.1.pep
TPWKQKSKQSIQSSTRGNEEVSGVGDEASTTFLLTLPLFALFFKEPIIAAKGLHTASASKLYMNLANLNYDSLN

SEQ ID NO: 258033 - protein, 107 aa, Glycine max
  Clone ID: PAT_MRT3847_75026C.1.pep
VYWRDFEVQKTNFVDLTPLTLYWREHIRTEAGPNIWKASVLLDWLTKVEVSTNSHKEQYYVQRGRMNVPDSNDKNDLLLSIEGGGLQGARLAYPSMSGFDDNIVLPN

SEQ ID NO: 258034 - protein, 67 aa, Glycine max
  Clone ID: PAT_MRT3847_75027C.1.pep
DLLVPKWSQLQIVVDLERTFEHRSGGIRDGELQMAILLWNLSDEFCQGAISIISTSERYPSVVSSQR

SEQ ID NO: 258035 - protein, 87 aa, Glycine max
  unsure (1)..(87): unsure at all Xaa locations
  Clone ID: PAT_MRT3847_75028C.1.pep
PQKVINCGXAIIKKTDGVNTQVQNNPNSMELTGVPNMILSKGNHILGRKYARSDGLTTKQDMSNTVLMINRLCGGEDKFMLRSDTPC

SEQ ID NO: 258036 - protein, 49 aa, Glycine max
  Clone ID: PAT_MRT3847_75029C.1.pep
SFCMFVGYKEYIVLFLPVLRANKWFKFFFFHPAIISPFTKNKILVFSFF

SEQ ID NO: 258037 - protein, 299 aa, Glycine max
  Clone ID: PAT_MRT3847_7502C.1.pep
AEYVKVISESDPRSLPSISAPKALGDVVESIVGAILIDTKLSLDQVWNVFYSLLSPIVTPDKLELPPFRELNELCDSLGYFVKVKENCEKVGSAMHVEVSVQLPNALLVREGKGANKKTAKGEAAFYLLKDLEKQGISHGSFMSKGKRDNPDHVYGSSHLKMDSSILIEEHSSEPASHKRHILDETNLTAINLSINMKKGGPRTTLYEVCKKLQWPVPTFDSTEYKDRSLFESCEGLQGSKGQNCFVSKITLCIPNYGNIESKGEARSDKKTSFDSAAVQMLLELQRLGKVEIDPLPSS

SEQ ID NO: 258038 - protein, 128 aa, Glycine max
  unsure (1)..(128): unsure at all Xaa locations
  Clone ID: PAT_MRT3847_75030C.1.pep
QPDRPGDKIIRARTTTDERXVGTEHDGHEPELGGTQKXATPTKPLDEETHPKDAQDMAEERNERDEEEDPPEEASTSAALNGVEGPDHNERTTLATYEGDPPVLPRKKGEKGKRRSATGDGDETTTKP

SEQ ID NO: 258039 - protein, 118 aa, Glycine max
  Clone ID: PAT_MRT3847_75031C.1.pep
QEILAHPSIGGSLFHSGWGSVIETLQFGHNLVVLPFIIDQPLNARFLVEKGLAIEVKMTEDGSFTRNEIAKSLRQAMVLEEGKKLRINTGEAAAIVGNLKLHQDHYIAAFVQFLKNGS

SEQ ID NO: 258040 - protein, 55 aa, Glycine max
  unsure (1)..(55): unsure at all Xaa locations
  Clone ID: PAT_MRT3847_75032C.1.pep
STKSNGLAVDLQRLEWEYPDVTQMNRLASRSRLGTXRYREEARTVLPSYQLLIMN

SEQ ID NO: 258041 - protein, 149 aa, Glycine max
  Clone ID: PAT_MRT3847_75033C.1.pep
DFLPFGFIKRTSNKGVVCMGWIPQQEILAHPSIGGSLFHSGWGSVIETLQFGHILVVLPFIIDQPLNARFLVEKGLAIEVKRNEDGSFTRNDIATSLRQAMVLEEGKKIRINTGEAAAIVGNLKLHQDHYIAEFVQFLKNGIRKVETDV

SEQ ID NO: 258042 - protein, 74 aa, Glycine max
  Clone ID: PAT_MRT3847_75034C.1.pep
QNVFFFRVDPFPVALRAVLFGVRNEILSSSAPPPFLSRLLFPFYGFKFLVFECPFAFVFLVPIFFSLKKSPILF

SEQ ID NO: 258043 - protein, 52 aa, Glycine max
  unsure (1)..(52): unsure at all Xaa locations
  Clone ID: PAT_MRT3847_75035C.1.pep
VAXALXTAIQVGYRHIDCXXAYXXXXEIGXXLKKLXDXGVXKXXXLWXTSKL

SEQ ID NO: 258044 - protein, 115 aa, Glycine max
  Clone ID: PAT_MRT3847_75036C.1.pep
PRVREFVRFADEAKSNRVMASLKASGLLHAAGIATSLTNTSQQWDFPNGWAPLQHLIAEGLLHSGSEAKKLAEDIATRWVRTNYAAYKATGAMHEKYDVEAWGESGGGGEYKPQT

SEQ ID NO: 258045 - protein, 46 aa, Glycine max
  Clone ID: PAT_MRT3847_75037C.1.pep
QCMKLKSTLDFPTNSYNPSLFPLKFTYTSEEPDPSLNLNSPNIKLF

SEQ ID NO: 258046 - protein, 75 aa, Glycine max
  Clone ID: PAT_MRT3847_75038C.1.pep
LSTNSDIYKVSFPQDFNLKVSNYSNSFGGVVALLLAYRLVFTWVCPLQLYLHNTIIPSRPRAENSARGLGRIRHE

SEQ ID NO: 258047 - protein, 43 aa, Glycine max
  Clone ID: PAT_MRT3847_75039C.1.pep
LLRSAVNPVSGKFVSDVWQNDKTVSVVSAWAQNTRFLIDHILH

SEQ ID NO: 258048 - protein, 244 aa, Glycine max
  unsure (1)..(244): unsure at all Xaa locations
  Clone ID: PAT_MRT3847_7503C.1.pep
MLRNLTRIVIQISTLSSAASFVPILKPQCCDLARRIRFLAPLFQELHDDIVSSRAVHFLALEDALFKAMELLRFATRASQILDREQVMFGFTDVAVRFEHALSMISFGELDVSEEIKEQVALVITQFRRAKAQFDPPGFQLYEHLLFVYNQSYDVNTETAELRVICEKLQFLNVDDIKQESLALQKMVVDKGGXFSENIHDMSLVVLKKIKISWGWNLGTILCHQGEDFSHHTGEPYLKLCPQS

SEQ ID NO: 258049 - protein, 132 aa, Glycine max
  unsure (1)..(132): unsure at all Xaa locations
  Clone ID: PAT_MRT3847_75040C.1.pep
GARXVAVFTSSSKSFSKSNINYSIEEILVHYQAITQTTKHLSIPIQKYISYIIKYPVKRPIPPSKLTYISKELYNINYFKISLKNTIKVNTPKTIVPILLTIITIMPAENLTIHFHNTYKQSLPNILISLQI

SEQ ID NO: 258050 - protein, 356 aa, Glycine max
  unsure (1)..(356): unsure at all Xaa locations
  Clone ID: PAT_MRT3847_75041C.1.pep
MAFTYAAPIAPSLYGIARIGYCDQKVSLAGSPGEVNTSLFCVSSHAGKSDVLLERRKLKSADTRIAENTQMKSSVEIEIPVSCYQLIGVPDRAEKDEIVKAVMGLKNVEIDEGYTLLSNIALQDLLMDVRDKLLFEPEYAGNLREKIPPKSSLQIPWSWLPGALCLLQEVGESKLVLEIGQTSIRHQNAKPYTDDLILSMALAECAVAKIGFEKKKVSQGFEALARAQCLLRSKPSLAKMTLLSQAWNTTLRMLIEESLEELAPACTLELLSMPHAPENVDRRRGAISALRELLKQGLDVEASCQVQDWPSFLXQAFDSLLAKEIVDLLPWDKLAVMRKNRRPWITESKAVIDSNC

SEQ ID NO: 258051 - protein, 93 aa, Glycine max
  unsure (1)..(93): unsure at all Xaa locations
  Clone ID: PAT_MRT3847_75042C.1.pep
IYQSFFTKWPAEKDRLIFLGTMSXXKVYDLFHIKVXKFKTGKXKVATSVSKPTKLTTKKNFQKXKNWNSSNFPDPFITKRNTDLRKPQTRKSD

SEQ ID NO: 258052 - protein, 54 aa, Glycine max
  Clone ID: PAT_MRT3847_75043C.1.pep
SCAAGAGGASAGADSTSEAPNDSAITAREVRRAQPQNHIWPILSCQGKGASTET

SEQ ID NO: 258053 - protein, 110 aa, Glycine max
  Clone ID: PAT_MRT3847_75044C.1.pep
RKRNRNILIQLIGVPDRAEKDEIVKAVMGLKNVEIDEGYTIDVVAARQDLLMDVRDKLLFEPEYAGNLREKIPPKSSLQIPWSWLPGALCLLQEVGESKLVLEIGQTSIR

SEQ ID NO: 258054 - protein, 336 aa, Glycine max
  Clone ID: PAT_MRT3847_75045C.1.pep
VVLLLKCLNMETSGGVSGGVTLVGSDAPSDYHVAPRTDNPAPASGSTTQIPATGGRVPPSPHPPHTVSTAAYPAKVPAKKYRGRMRKYAPDGSVTMALSPKPISSSAPLPPVIDFSSEKRGKIKPTSSVSKAKFELENLGEWVACSVGANFTPHIITVNSGEDVTMKVISFSQQGPRAICILSANGVISSVTLRQPDSSGGTLTYEGRFEILSLSGSFMPSESGGTRSRSGGMSVSLASPDGRVVGGGVAGLLVAASPVQVVVGSFLAGNQHEQKPRKQRHEVITSVIPAAVVPISTLDPVSILSAASSIRNDNWSAMPAEAKNKPADINVSLPAG

SEQ ID NO: 258055 - protein, 131 aa, Glycine max
  unsure (1)..(131): unsure at all Xaa locations
  Clone ID: PAT_MRT3847_75046C.1.pep
FPGRRDYKTAAALXXXGGFKEKSARHAPKKRQKKGTQLHRHKRTEKRTAGRTTKKENRQPHHGNTKRKRTKGDKRRKQMRGRNKQGGTGTTHKKEQEKTEAHGQRNKKTPPSPRENKTQGRGPHDSETREG

SEQ ID NO: 258056 - protein, 73 aa, Glycine max
  Clone ID: PAT_MRT3847_75047C.1.pep
NHEFGMFWTEKPKRPFWKNKISPLNKKRTFVFFKGELEQNMLRIVSKKRKKMWGTQNQQCSRSGKTKIIILEK

SEQ ID NO: 258057 - protein, 74 aa, Glycine max
  unsure (1)..(74): unsure at all Xaa locations
  Clone ID: PAT_MRT3847_75048C.1.pep
PLLFSQRTERKTLGFLCXSFGPKKILXVQENXNGXGXGGXXXPWXXHFRXKXFXXKXCIXXXXTQXGKXRGXXX

SEQ ID NO: 258058 - protein, 126 aa, Glycine max
  unsure (1)..(126): unsure at all Xaa locations
  Clone ID: PAT_MRT3847_75049C.1.pep
MATRGTRSEKVRRIFNQFDANRDGGLNREEMALLVGAVNPRXVKFSDEQINAILDEVFRTYGEFIDGDKGLTYXGLLRTYDDGARDVDRDFDALGLDLVAADAVKEPLAASEASSSSIVDERITVE

SEQ ID NO: 258059 - protein, 50 aa, Glycine max
  Clone ID: PAT_MRT3847_7504C.1.pep
MGNEGVPISFSSRVGLFKLKKNRPDSVYIERASATFILHKISKQIQMLCV

SEQ ID NO: 258060 - protein, 38 aa, Glycine max
  Clone ID: PAT_MRT3847_75050C.1.pep
THSISFPNFFLLCFKYLPNLLGRVYINRLYNRHIFTNN

SEQ ID NO: 258061 - protein, 217 aa, Glycine max
  Clone ID: PAT_MRT3847_75051C.1.pep
ANSEVSALLGRIPSAVGYQPTLSTDLGALQERITTTKKGSITSVQAIYVPADDLTDPAPATTFAHLDATTVLSRQISELGIYPAVDPLDSTSRMLSPLILGADHYETARGVQKVLQNYKNLQDIIAILGMDELSEDDKLTVARARKIQRFLSQPFHVAEVFTGAPGKYVELKENVASFQGVLDGKYDDLPEQSFYMVGGIEEVIAKAEKIAKESAAS

SEQ ID NO: 258062 - protein, 70 aa, Glycine max
  unsure (1)..(70): unsure at all Xaa locations
  Clone ID: PAT_MRT3847_75052C.1.pep
AKRSTNQTXHADCGMLSDDXCXXVXXXQNHXVSXXXXXHFRPXPXVXLXSCHHAVXFLCIHESQVIXXXD

SEQ ID NO: 258063 - protein, 43 aa, Glycine max
  Clone ID: PAT_MRT3847_75053C.1.pep
GRGWHLSVCSKNIIILNALEKLGLYREYASRLISKECLQAYIY

SEQ ID NO: 258064 - protein, 71 aa, Glycine max
  unsure (1)..(71): unsure at all Xaa locations
  Clone ID: PAT_MRT3847_75054C.1.pep
MSITRSLHSDDHILIIRLEDTSVVNQETYPHMLYVTNCFIRCPVVRYIQXPSKGVDIQLFHDSTKREPHCG

SEQ ID NO: 258065 - protein, 54 aa, Glycine max
  Clone ID: PAT_MRT3847_75055C.1.pep
MAAASTMALSSPSLAGKAVKQGPSAPEFGRVNMKKTVIKQAFSGSTWYCPHRVK

SEQ ID NO: 258066 - protein, 52 aa, Glycine max
  Clone ID: PAT_MRT3847_75056C.1.pep
SNAIMMNTPNAVPTVQRYGAVDLEIECFARTFFYTNCSVVLFITCETKAENA

SEQ ID NO: 258067 - protein, 89 aa, Glycine max
  unsure (1)..(89): unsure at all Xaa locations
  Clone ID: PAT_MRT3847_75057C.1.pep
SILSLKDDGTETPLATELIKPHPQGEEYSPVSEAFMPASEXLEAHIWLLTKAYVLENDACIHAIISHLVRTHAIVEPFVISTNRHLSVV

SEQ ID NO: 258068 - protein, 77 aa, Glycine max
  Clone ID: PAT_MRT3847_75058C.1.pep
PAFDIMFGYNLHQSMNEKKGKNFGATTNVRQKLQTDKDYKHKIVALSLNSSTSPTGIRLSWTCSLRPSLITHVEFIM

SEQ ID NO: 258069 - protein, 34 aa, Glycine max
  Clone ID: PAT_MRT3847_75059C.1.pep
SYSLREPEPFTASLLCTRHLCILLVRRRKSYISH

SEQ ID NO: 258070 - protein, 95 aa, Glycine max
  unsure (1)..(95): unsure at all Xaa locations
  Clone ID: PAT_MRT3847_7505C.1.pep
GPFCGLMSNKFCHLGQKTRVICVVYDEKSLCITCFGQLKLAQKQYLLWLGFRVLFIRGRIITKNAAAPLCCHKERVSPPSKNVSDSCCFMHWXPR

SEQ ID NO: 258071 - protein, 47 aa, Glycine max
  Clone ID: PAT_MRT3847_75060C.1.pep
DMTCHARVRKLARARARRFFFFFFGKIDYLLSNSYWHDSEGIDIISA

SEQ ID NO: 258072 - protein, 128 aa, Glycine max
  Clone ID: PAT_MRT3847_75061C.1.pep
AVTDRIDEVIEFPLPGEEERLKLLKLYLNKYLCDDNNGSKGGFFLKKQPQKISIKDLSEDVFREAATKTEGFSGREIAKLMASVQAAVYGRPDCILDSQLFRESIDYKVVEHHQRLKLAAEGGQPGQI

SEQ ID NO: 258073 - protein, 205 aa, Glycine max
  Clone ID: PAT_MRT3847_75062C.1.pep
MTEEQTKTAESESVTPPPAAAPSQAPPAAEAEHVPEAPKDVTEEKSVIPVPSSDDKPDESKALVLVEKTQEVAEVKPTEGSINRDAVLARVATEKRLSLIKAWEESEKSKAENKAHKKLSSVSAWENSKKAAVEADLKKIEEELEKKKAEAAEKIKNKIAAIHKEAEERRAIIEAKKGEDLLKAEEQAAKYRATGTAPKKLLGCF

SEQ ID NO: 258074 - protein, 96 aa, Glycine max
  Clone ID: PAT_MRT3847_75063C.1.pep
CPFDQSIIPGHPRPAFTSMASSNLFFDDIRSKVDVDPPQNDESTDVGELVNDPAQTALKPNGTVSSSVRELLECPVCLNAMYPPIHQVVYVLMDHC

SEQ ID NO: 258075 - protein, 77 aa, Glycine max
  Clone ID: PAT_MRT3847_75064C.1.pep
YPGRPPPGPTGPVPASPWSVLAARGNRFLIPWVGAIYENFPGLFGKKGPSNRFESRYGMLFRAPFFSFNGCRPIRFN

SEQ ID NO: 258076 - protein, 68 aa, Glycine max
  Clone ID: PAT_MRT3847_75065C.1.pep
PGLTLNILTTCAQSRNLFHLLSCKHMTRHIAHIIKPEQTLEILYFHISIYIYSSSLFSFLKSTFTVSF

SEQ ID NO: 258077 - protein, 46 aa, Glycine max
  Clone ID: PAT_MRT3847_75066C.1.pep
RCSGSNTSLFYRDQVLLLNVITYKRGKEIYYIPSWLIKEKEKVLYT

SEQ ID NO: 258078 - protein, 51 aa, Glycine max
  Clone ID: PAT_MRT3847_75067C.1.pep
AFIGNTPYLLFHRKCLHISSDAFAGTPSILSSQALYLQIELDLLTSFCLII

SEQ ID NO: 258079 - protein, 40 aa, Glycine max
  Clone ID: PAT_MRT3847_75068C.1.pep
IFPTPIFPILISQFLNLFPILCQTTLETPHIHYELSSPRQ

SEQ ID NO: 258080 - protein, 86 aa, Glycine max
  unsure (1)..(86): unsure at all Xaa locations
  Clone ID: PAT_MRT3847_75069C.1.pep
QKRDECLQIIPTLDEFVQTLDPRKXVLAPLCDQEEVXAYVKTRTKGEMGATKTLCKPFDQPKLPESTKCFALRKPATKWTYWGRRY

SEQ ID NO: 258081 - protein, 219 aa, Glycine max
  Clone ID: PAT_MRT3847_7506C.1.pep
MGISRDSMHKRRATGGKKKAWRKKRKYELGRQPANTKLSSNKTVRRIRVRGGNVKWRALRLDTGNYSWGSEAATRKTRILDVVYNASNNELVRTQTLVKSAIVQVDAAPFKQWYLQHYGVEVGRKKKSAAASAKKEGEDGEAATEEVKKSNHVLRKLEKRKQNRVLDPHIEEQFGGGRLLACISSRPGQCGRADGYILEGKELEFYMKKLQKKKGKGAA

SEQ ID NO: 258082 - protein, 58 aa, Glycine max
  Clone ID: PAT_MRT3847_75070C.1.pep
CLPLPFPWILASPKLKLKLGDQKKKAYVHVNLHGHVERYNLFLAYVNMYSRAGNKTAP

SEQ ID NO: 258083 - protein, 70 aa, Glycine max
  Clone ID: PAT_MRT3847_75071C.1.pep
NKLIPFGPTIELGAIADFLNQLSSPSNLRASLCYEYPSLKTPDVCALPFYKVAVSLGGPILSIGQTNTGI

SEQ ID NO: 258084 - protein, 94 aa, Glycine max
  unsure (1)..(94): unsure at all Xaa locations
  Clone ID: PAT_MRT3847_75072C.1.pep
IKGFDLKERCMLLXVTSCSRAPLXGFKYLQPPFTIHKVACDVPLWATIGGQDVDRLPSASTCYNTLKLPTYKRPGTLRAKLLYAISSNAGFELS

SEQ ID NO: 258085 - protein, 71 aa, Glycine max
  Clone ID: PAT_MRT3847_75073C.1.pep
VLRLNWFNLTNLFFGDLSQGPRVAGFDGFSKGARMVAVTPGGDIHGVRFYGHRFPTVFLFLLMQGNRGTII

SEQ ID NO: 258086 - protein, 493 aa, Glycine max
  Clone ID: PAT_MRT3847_75074C.1.pep
VIESRFPLAHRRKKGLGSRNRDSGKEFSIGVVPRISSICYPQCGYFPSSGGFTAKRRKCNSLLRLKDCSENIRQHASILFVRLVTGVMLVMAVSLASSEPSWALSEENLLFLEAWRTIDRAYIDKSFNGQSWFRYREDALRNEPMNNRDETYTAIRKMLATLDDPFTRFLEPEKFRSLRSGTKGALTGVGLSIGYPTKADMQPGGLVVISASPGGPAYRAGVSSGDVILAIDDTNTENMGLYDAAERLQGPEGSSIALTIRSGSDIKHLDLTREKVSLNPVKSRLCKLPASGNDSPTIGYIKLTSFNQKASSAIKEAINTLRSDNVNAFVLDLRDNSGGLFPEGIEIAKIWLDKGVIVYICDSRGVRDILDTDGSSALATSEPLVVLVNKGTASASEILAGALKDNKRAVLFGEPTFGKGKIQSVFELSDGSGLVVTVARYETPAHTDIDKVGVIPDHPLPISFPKDEDAFCNCLQDPASSCYVNRIQLFSKS

SEQ ID NO: 258087 - protein, 76 aa, Glycine max
  unsure (1)..(76): unsure at all Xaa locations
  Clone ID: PAT_MRT3847_75075C.1.pep
VKDKGSCGSCWTFSSTRAFDAGYAHVFRRRVSLLTEXSYLDYAGPFKNXGCHGGLPSQVFEYIKYTGGLETAEVYS

SEQ ID NO: 258088 - protein, 44 aa, Glycine max
  Clone ID: PAT_MRT3847_75076C.1.pep
FHVVDEYDNGLNVCDTLCNYIVHGLPFRQEELPPPPTTDVESEW

SEQ ID NO: 258089 - protein, 84 aa, Glycine max
  unsure (1)..(84): unsure at all Xaa locations
  Clone ID: PAT_MRT3847_75077C.1.pep
RHAIDKDQFDQEKVHDVRRKKHIAINDPLVFNDRESHEVQGSSAIDMHSISKGLTHMPKTSNDXLLLSASAGQSGDGWSGDDVQ

SEQ ID NO: 258090 - protein, 399 aa, Glycine max
  unsure (1)..(399): unsure at all Xaa locations
  Clone ID: PAT_MRT3847_75078C.1.pep
TPFKAFSISNHFFLCCHNFNNFFLLDLTMAHLALSQMAVTVPVGNDLSLRRSAVKAPNLNFWDKSWAPVFTLDLKPNNPSLRSRHVVCMSVQQASVSKVNVSPLELEDAKEPPLNLYKPKEPYTATIVSVDRLVGPKAPGETCHIVIDHGGNVPYWEGQSYGVIXPPGENPKKPGAPHNVRLYSIASTRYGDFFDGKTASLCVRRAVYYDPETGKEDPSKNGICSNFLCNSKPGANQITGQIMLLPEDDPNATHIMIEGXVAPFSYLRRMFMESVPAYKFGGLAWLFLGVANTDSLLYDDEFSKYLKDYPDNFRYNRALSREQKNKSGGKMYVQDKIEEYSDEIFKLLDNGAHIYFCGLKGMMPGIQDTLKKVAEQRGESWEEKLSQLKKNKQWHVEVY

SEQ ID NO: 258091 - protein, 202 aa, Glycine max
  unsure (1)..(202): unsure at all Xaa locations
  Clone ID: PAT_MRT3847_75079C.1.pep
AGRPARCCRQIKNKPYQKSRFCHGVPDPKIRIYDVGMKKKGVDEFPFCVHLVSWEKXNVLSEALEAARIACNKYMTKFAGKXDAFHLRVRLHHFHVLRINKMLSCARADTLQTGMRGEFGKPLGTCATVAIGQVLLSVRRMDCNSHHAQEALXRAKFKFPGCQKIIVSMKCFLGAMDHWLTANQEEPFCLGLLHSVFITQKY

SEQ ID NO: 258092 - protein, 73 aa, Glycine max
  unsure (1)..(73): unsure at all Xaa locations
  Clone ID: PAT_MRT3847_7507C.1.pep
KRIRESELIHRMCFMLPTLVGIISETLTGVTXRTLIRCXLVRRAAYLGXPLTFYITTLICVDAVVLRYIERHR

SEQ ID NO: 258093 - protein, 53 aa, Glycine max
  Clone ID: PAT_MRT3847_75080C.1.pep
LAEALYAYGIADDRRGLELLDPDFDATDYKIIGASDEQVDVFNEVWYNMLLNI

SEQ ID NO: 258094 - protein, 342 aa, Glycine max
  Clone ID: PAT_MRT3847_75081C.1.pep
MEIITPVPATATTTAKNATAKSPEPDVETPTRIHQNPNLNPKPVSFSNGVLKRHHANHRPNAVVYKECLKNHVASLGGHALDGCGEFMPSPAATADDPSSIKCAACGCHRNFHRREPEETPISPATHHVLEYQPHHRHHPPPPAPSHRSPNSASPPPISSYPYARHMLLALSGGGGFSVARENTGAPAPAHNHSRKRFRTKFTQEQKEKMHEFADKVGWKMQKRDDEMVMEFCNEIGVERGVLKVWMHNNKNTLAKKDNLNNGNGSTLSVSANGISLDGAVGSATVRTGVHVPEHGHEHSGINGNGSGDNNHNHNLASHDVNEYENDSGTNGGGTNGSSSSS

SEQ ID NO: 258095 - protein, 43 aa, Glycine max
  Clone ID: PAT_MRT3847_75082C.1.pep
TRKKDWEAPSAKPRGYFFFWGHKTNNLLYIQIIDAEGGENKNT

SEQ ID NO: 258096 - protein, 116 aa, Glycine max
  Clone ID: PAT_MRT3847_75083C.1.pep
EIPSSHLGKKGLILFFFQFIFFYYFFNQFSLFLLVYTMSFILCPLPFFFYIVGSPSLIFFLFFFSSSHLLSFIIVLTFFFVIAHIFGDFPFRHFSYLFLFHFLIVINFLLVSFFLF

SEQ ID NO: 258097 - protein, 78 aa, Glycine max
  Clone ID: PAT_MRT3847_75084C.1.pep
PPQTLLFSPSTNPSPQFPHYLRHHTNYNSLSPPINPLSPTLPTPSPSEQPCSPPGRPPPPTSGACSPNPAPTSSATPS

SEQ ID NO: 258098 - protein, 93 aa, Glycine max
  Clone ID: PAT_MRT3847_75085C.1.pep
IGSEHTLLLKFDFFLAHFYPFNQGCFISCFREFCRWFCLCSSESDDRRICWGRVSIFQILSLIHLVLHSRFSLSIFVRDYGFSFLEGGVGCFY

SEQ ID NO: 258099 - protein, 35 aa, Glycine max
  Clone ID: PAT_MRT3847_75086C.1.pep
ILLQKYLQSTTVRVDEMRVKRQDAEQWMFHRMLPE

SEQ ID NO: 258100 - protein, 65 aa, Glycine max
  Clone ID: PAT_MRT3847_75087C.1.pep
VCQALHAVSQQIVTITIHGRIYQSLYLLKRVMSCNFGQSHGSSFIWPPQKFKGIGAVTFFFFINN

SEQ ID NO: 258101 - protein, 108 aa, Glycine max
  Clone ID: PAT_MRT3847_75088C.1.pep
GSRLFNIFGISVCDETAKRLACWISIQKCDKDGDNRLRVCHSACQSYNLACGASLDCSDQTLFSSDGEGEGQCTGSGEMKLSWFNRLRSSFSLRNSSLKGISVKYRQL

SEQ ID NO: 258102 - protein, 78 aa, Glycine max
  Clone ID: PAT_MRT3847_75089C.1.pep
GSGANRGGIKNTSNLCPKKVHEFTPALFQADWENITMGHSITGNAQICSLKLALNGPNVTSVLYPMARGELPPVLYQC

SEQ ID NO: 258103 - protein, 34 aa, Glycine max
  Clone ID: PAT_MRT3847_7508C.1.pep
VRDTGRSPVLLRYVVLTSSSPPPRVLSLGIGPSA

SEQ ID NO: 258104 - protein, 70 aa, Glycine max
  unsure (1)..(70): unsure at all Xaa locations
  Clone ID: PAT_MRT3847_75090C.1.pep
AIYTSNILRTHTSEMLRSNSYSPASPRNRXLRSFSTYYILPMYQANISDYKIRWQGDDSNRANMYARLII

SEQ ID NO: 258105 - protein, 55 aa, Glycine max
  Clone ID: PAT_MRT3847_75091C.1.pep
IGWSAFSFVSPNPLLYSEKIHHLFRVSKGLEEQNCLSGSCVRRFSFNLQWLEVRS

SEQ ID NO: 258106 - protein, 126 aa, Glycine max
  Clone ID: PAT_MRT3847_75092C.1.pep
HSLYNQVPNSVTFKVYLTLHKITCSNLDISSTMYYFLKDKGWTHLNLEDIAECRIMSITRERQLKLELNGNIFVKPNPSKLARKLSSNSLIQQLTMFYFAHVYELNLTLLGLGTLFLLIIRNSLTM

SEQ ID NO: 258107 - protein, 233 aa, Glycine max
  unsure (1)..(233): unsure at all Xaa locations
  Clone ID: PAT_MRT3847_75093C.1.pep
MSRENTPAMAKEEVCDDGSSSVENVDLESHARISLDKDNGLGTCRVCQCTESDKKADAALEFLGIIPGSEMCKTKGEVGSDGGGDGIPENTSLDRNNEKNAGMVEFVSPNGEVFICKSDLELGLCHQDKLVELGCSCKNDLALVHYACALKWFVXHGSTICEICGHIANNIRISDFNKVVGALKEYEVLRERTASGDPGAPHVHANAXXDPEAXAAIRRQRXSEDALWWYNNR

SEQ ID NO: 258108 - protein, 72 aa, Glycine max
  Clone ID: PAT_MRT3847_75094C.1.pep
QNKIRLQEEANDCYSLPKPKGRTINQSIFLHSPSIHVPPLFIITFLLSLLLDPTPFPLSITDSPMCPSFPFL

SEQ ID NO: 258109 - protein, 46 aa, Glycine max
  Clone ID: PAT_MRT3847_75095C.1.pep
LKPIHICLIVVFLMLHHWFIVTVSPRPLQSGSPLSSRVLPDRFQSR

SEQ ID NO: 258110 - protein, 112 aa, Glycine max
  unsure (1)..(112): unsure at all Xaa locations
  Clone ID: PAT_MRT3847_75096C.1.pep
XXHCXXXXGEXHXLXXLXXXXSXXXXVAXWXXXTXVPXEXXXXXXSPXKLYSXPRXXXSXSSXXGXKXXLMXRHYDMXXGXFSXQXXGXXLXXXXSRXRSXXLXVXXXXXLX

SEQ ID NO: 258111 - protein, 64 aa, Glycine max
  Clone ID: PAT_MRT3847_75097C.1.pep
REIAHDFKTELRCQSHAVLALQDAAEAYLVGLFEDTNLCAIHSKRVTIMPKDIHLARTIRGERA

SEQ ID NO: 258112 - protein, 51 aa, Glycine max
  Clone ID: PAT_MRT3847_75098C.1.pep
MESKGGKKKSSSSRSSLMYEAPLGYSIEDIRPASGIKKFSAAYSNCARKPS

SEQ ID NO: 258113 - protein, 33 aa, Glycine max
  Clone ID: PAT_MRT3847_75099C.1.pep
SSYIVSGLVGTSPLGRGVLINPMMSLIELGNVR

SEQ ID NO: 258114 - protein, 57 aa, Glycine max
  Clone ID: PAT_MRT3847_7509C.1.pep
HKSQPVVKYDQGFKSGQRLYASPGLMELRSLALVYIQFADQYHCDLADPRANGAELC

SEQ ID NO: 258115 - protein, 160 aa, Glycine max
  unsure (1)..(160): unsure at all Xaa locations
  Clone ID: PAT_MRT3847_750C.1.pep
XXXXXIXXXXXXXXXXSHMPXXXXXLXXCHXVVXXXXHXXXXXXXCRXXXXXXIXXTXXMXXVAXCXRXSXXTXXSXXXLXXIALXWXGXSHXXXCGXEXVYXXXXXLXXXXSXVXXXXXXCGGCYXXXCXFXSXXPXXXXSXXGXXAXQGXVEXXXLXX

SEQ ID NO: 258116 - protein, 100 aa, Glycine max
  Clone ID: PAT_MRT3847_75100C.1.pep
GPGPWRKNGVAQKRGREMLLLKLLIQAQVKKVQTPRFMTLLKSLQKATLGQLFGHPRFSKNKVNFLAIKGDYASPKGEKGKGAFFFQKFQGVKPKFLKPI

SEQ ID NO: 258117 - protein, 175 aa, Glycine max
  Clone ID: PAT_MRT3847_75101C.1.pep
QAIQQQSQQVSAGQVGAPPTPPGQAFQYTLNVNGRLDDTSQFENIIVKSGTSGDVTRVRDVGWVELGAQTYSQIFSLNKQPAVGIGVFQSPGANALQVEQAVEKKMAELAKRFPEGIKYDTPFDTTKFVEASVHEVYMTLIEAGLLVLVVMLVFLQDWRAMLVPATTVPVTIIGA

SEQ ID NO: 258118 - protein, 133 aa, Glycine max
  Clone ID: PAT_MRT3847_75102C.1.pep
ELSLWSIQLKKILISLWLQDYANYGLSYLIDYVHGKSQKKPELLQEQLKLSGKSPNLITYKGTPNLMGLKDIAETLSASDRSASDSVMPDGMDKREQQRRPLLRNGIAKTLSGLDKSALDSIMPNGVDKLEQL

SEQ ID NO: 258119 - protein, 331 aa, Glycine max
  Clone ID: PAT_MRT3847_75103C.1.pep
MAMAMQSGIGVSKILIIAGAGYTGTVLIKNGKLSDLIGELQLLVKGLEKSGEHAEGEGEYADAIAAQVRRLANEVRQLASNRPITVLNGGSEQSNLSSLVVPAAALGALGYGYMWWKGISFSDLMYVTRRNMEKAVADLTKKLQHASDVIADTKKHLTQRIQNLNDKMLKLNELQRSTKDEVAGVRSTITNIHEDLGYLQQTVETLDYRLAELSSKQDYANYGLSYLIDYVHGKSQKKPELLQEQLKLSGKSPNLITYKGTPNLMGLKDIAETLSGLDMSASDSVMPDGGDKREQQRRPLLRKGIAKTLSSLDKFASDGIMLDGVDKLEQQ

SEQ ID NO: 258120 - protein, 85 aa, Glycine max
  unsure (1)..(85): unsure at all Xaa locations
  Clone ID: PAT_MRT3847_75104C.1.pep
MIAYLSAVLLRYSRMLPAILNAAIDLNLSDIIXRHIVHVTQVSEXEIASLLSNQHPQLANCAERISPLAAIYTLVTCSIRTNDDG

SEQ ID NO: 258121 - protein, 128 aa, Glycine max
  Clone ID: PAT_MRT3847_75105C.1.pep
MSGKGAKGLITAKDKDKKKPISRSSRAGLQFPVGRIHRLLKSRVTAHGRVGATAAVYSAAILEYLTAEVLELAGNASKDLKVKRITPRHLQLAIRGDEELDTLIKGTIAGGGVIPHIHKSLINKSSKE

SEQ ID NO: 258122 - protein, 73 aa, Glycine max
  Clone ID: PAT_MRT3847_75106C.1.pep
SIVSERKWKSWKSGMTRRRSERVKKNVALCHLFCLDLCFLCKFDIYNDECLRTTVTPTSFSHLDFFSFLQLGK

SEQ ID NO: 258123 - protein, 110 aa, Glycine max
  Clone ID: PAT_MRT3847_75108C.1.pep
EHNQELVFEKSLTITQLRMKGSLFHLLFVILFGLSHFVCLKAVPITRTESLMQDPKVIHHALDNIHNHKIITEIKGQQEEPIFAERMDLELHDYPPYGANGHHTPKPPYP

SEQ ID NO: 258124 - protein, 93 aa, Glycine max
  unsure (1)..(93): unsure at all Xaa locations
  Clone ID: PAT_MRT3847_75109C.1.pep
HISFFQSXLFADPVGYGLXRALAQTHQDEILTXAARTIDSSFRNXHADSYVSVXDSKLFAYAYRNIIMTXGTTXLQPALGPILKIAEMLSLTX

SEQ ID NO: 258125 - protein, 51 aa, Glycine max
  Clone ID: PAT_MRT3847_7510C.1.pep
KKIFPFASPGYVTLGIRARAPKNKSPVARFVAPPRVFLNPFFTKPFPKEIF

SEQ ID NO: 258126 - protein, 208 aa, Glycine max
  unsure (1)..(208): unsure at all Xaa locations
  Clone ID: PAT_MRT3847_75110C.1.pep
MAPTRKSRSVNKRMSSSNDNSPERDGINSNKNKLRKKKLTDKLGSQWSKEELERFYEAYRKYGKDWKKVAAFIRNRSTEMVEALYNMNRAYLSLPEGTASVVGLIAMMTDHYNVMEGSDSERESNDAPGSQKPVKRKHEEVQLSVSKDQSHSIASRDDCLSILKKRRXDGMQLKPYAVGKRTPRXPVYKKDDTEXYVSPYRRKPEVDY

SEQ ID NO: 258127 - protein, 148 aa, Glycine max
  Clone ID: PAT_MRT3847_75111C.1.pep
MSSRRGGGNNVEGKVYVGGLPEDATSEELDDVFHKFGRIRKIWVARRPPGFAFVEFEDTRDAEDAVRSLDGTRICGVKARVELSTGRSRRDRNDRGGGGGGYRIGGGGGGGGYRGGGGNRDYSRSRSRSRSPYQLLGGGGGRSRSRSR

SEQ ID NO: 258128 - protein, 54 aa, Glycine max
  Clone ID: PAT_MRT3847_75112C.1.pep
PKLYLRFWFNENHMSWDQIWIVICISSTSGTQLIYDIMFADKKKKKKFLRPRIL

SEQ ID NO: 258129 - protein, 83 aa, Glycine max
  Clone ID: PAT_MRT3847_75113C.1.pep
MRPRVRPRVRPLVRYNGRRTYLQTWEGSKRMAQAIASMTSLRGSSHAELQVTLISTPLNVIESKQFALNYTRNIYRPCTQTTF

SEQ ID NO: 258130 - protein, 74 aa, Glycine max
  Clone ID: PAT_MRT3847_75114C.1.pep
QYNDLKSYLLGDEAEKENLRKQVFQLKGELKKKDDALINIEKKFKDSNGRTQLSEGTKTNSKNKKGASIPQSSK

SEQ ID NO: 258131 - protein, 28 aa, Glycine max
  unsure (1)..(28): unsure at all Xaa locations
  Clone ID: PAT_MRT3847_75115C.1.pep
RLREDDRRDPTLLIRCXISEILFVSLNT

SEQ ID NO: 258132 - protein, 76 aa, Glycine max
  unsure (1)..(76): unsure at all Xaa locations
  Clone ID: PAT_MRT3847_75116C.1.pep
LPNFHQLAISRGCFQNLECGQYSISLIGDTRACSVSNPYVRPIPHSLMKARFCHGLLPALQGRESSLFRETIXPSW

SEQ ID NO: 258133 - protein, 50 aa, Glycine max
  Clone ID: PAT_MRT3847_75117C.1.pep
QGNNTSSQTRLIPTFNLGPSKTLIPTLTPTHNFYTSSFFFMTTLKRLLGS

SEQ ID NO: 258134 - protein, 56 aa, Glycine max
  Clone ID: PAT_MRT3847_75118C.1.pep
LSPAFYLCVMWYSSLDELTHPWISTLISQGSLSNSHIGRRKQLFVNKFACDEIFQS

SEQ ID NO: 258135 - protein, 103 aa, Glycine max
  Clone ID: PAT_MRT3847_75119C.1.pep
KGPLEKKHFFQRVQLLTNLQGPSRGAQNSFGSFANKTCFPMKQKPPTFFPKTIPKLQNFLGGGGYQGFSLRGWGGLQNREGETGLKGAFKGINSGEALLGRGL

SEQ ID NO: 258136 - protein, 49 aa, Glycine max
  unsure (1)..(49): unsure at all Xaa locations
  Clone ID: PAT_MRT3847_7511C.1.pep
XXXXTSPVWSLGNXGKMHXXMESTVVVXGEVKWXGKXXRFCELEVGSCV

SEQ ID NO: 258137 - protein, 106 aa, Glycine max
  unsure (1)..(106): unsure at all Xaa locations
  Clone ID: PAT_MRT3847_75120C.1.pep
IKEYLKKSVWLAASRSPVSQFLDCPTTAAQRIIRYIKISPAEGLCFQLALTLNSKRFSDSDWGTCLDTRRSITGFXFLGFSLASWKSKKQPTISKSSSEILDEFDA

SEQ ID NO: 258138 - protein, 159 aa, Glycine max
  Clone ID: PAT_MRT3847_75121C.1.pep
ASNMKFAMNGCIVIGTLDGANVEIREEVGEDNFFLFGARAQEIVGLRKERVEGKFVPDPRFEEVKAYVRSGVFGPYNYEELMGSLEGNEGYGRADYFLVGKDFPSYLECQEEVDKAYHDQKRWTKMSILSTAGSFQFSSDRTIHEYARDIWRIEPGELA

SEQ ID NO: 258139 - protein, 113 aa, Glycine max
  Clone ID: PAT_MRT3847_75122C.1.pep
LSAESAVSNTVVLSNSSSSSTHPTLSSPNTTSPSTQSPSSPPSRPTNIYTKTKHMELDIFFLREVLNKSLIDQHTPAPDPNADFLIKLLSPLQFLAIQDKLRVVGKFSLTQPP

SEQ ID NO: 258140 - protein, 41 aa, Glycine max
  Clone ID: PAT_MRT3847_75123C.1.pep
IKKKKKKKKLEFFFFFFFELNNCVHSCYLIKNYIAKFFLMS

SEQ ID NO: 258141 - protein, 76 aa, Glycine max
  Clone ID: PAT_MRT3847_75124C.1.pep
REVAYNHRVVCLNIENVSSTIFFTCEKFWLNQRKKKKLSHFPDLPEPLLSSIFSKYKLVFEELFLLFQQVKVGPDK

SEQ ID NO: 258142 - protein, 67 aa, Glycine max
  Clone ID: PAT_MRT3847_75125C.1.pep
KEKKSFIPLKKTREGKKSSGKTILKQYYNKKTGFSFLKKFSPPKKTFQKNTQGQEHFKKLNKPRNLL

SEQ ID NO: 258143 - protein, 244 aa, Glycine max
  Clone ID: PAT_MRT3847_75126C.1.pep
PRVRSASPSSIIPDQTTLVSRTVESGSSSSKYSFNHSRHVQSTLNNFVSVNKRNRDSVIRALSEVPVLRNQAPHCQLKTANTETQDLITRSSLCFDQSDEPARASEIESLKQLNPDNVFYKNENAVSFKGDSSVREPKSNMELDLKNNTPLGDTASITPSSIDMITTDVLASDPPLHSSPVWLNSCKSSSNKICSNMQFSFQELKKRREKRLSLLQSSKFGCGKAKVKSHYFAATLEDFTSEIG

SEQ ID NO: 258144 - protein, 50 aa, Glycine max
  Clone ID: PAT_MRT3847_75127C.1.pep
KNKKSHTDQCYFFKGLLVLPWYKCKKKIIQEEAGFWIHKLPNLELIETLR

SEQ ID NO: 258145 - protein, 113 aa, Glycine max
  unsure (1)..(113): unsure at all Xaa locations
  Clone ID: PAT_MRT3847_75128C.1.pep
ALEIERVLGPGGIGAVIVSTSDSMPNXLIRASTPVSSWLKTCTVMHVSHVNNLTLVAYKKNXEEYQHLEEPCLSYECRSVTWNKRAIPKLEPIVKERPAGFDKYVAYLPMLVD

SEQ ID NO: 258146 - protein, 39 aa, Glycine max
  Clone ID: PAT_MRT3847_75129C.1.pep
TFPESLSRSYNRRQVNQGSIVKIKKLANQKNLLILSIFV

SEQ ID NO: 258147 - protein, 257 aa, Glycine max
  Clone ID: PAT_MRT3847_7512C.1.pep
MAIRGIGMSFSAPSTTRPILSLNPRFLSASSTIPLFLVPSRSSYLLLSFSFSRPETECPVPHEQQPINEYQSLSTSFPFSWAAGDVVEYASRLFVTGASFALLLGLPVAWFGSAGAQAEPAKRLLCAASSGLFAVTLAVVRMYLGWAYVGNRLLSATVEYEETGWYDGQIWVKTAEVLARDRLLGSFFVKPVLGRLKITLVSLATSLLVCALILINIDGDQNLTSKEPRVRVVPGVYNDDSARLFEPDAFRDELDLQ

SEQ ID NO: 258148 - protein, 68 aa, Glycine max
  Clone ID: PAT_MRT3847_75130C.1.pep
PPEMEPFFRKQGMPVRFNKGVVELVSDFVVCEERKPLSPQAFCILRLMGIKMGTFWLSFICRWSPHEF

SEQ ID NO: 258149 - protein, 60 aa, Glycine max
  Clone ID: PAT_MRT3847_75131C.1.pep
FTSESGQIRSDPMEEYPEELRTPPVTLASLVGCPELHPLISTHFLSAQLPSTPSPSPISP

SEQ ID NO: 258150 - protein, 94 aa, Glycine max
  Clone ID: PAT_MRT3847_75132C.1.pep
IPNLLTLLPQYTGTQASYISYWLWLISARFFFTSTSREATPWVACCRRPTPRSSAAPTARGWPARRRRQRRHCAAAPGRPTPRNRPAPHRSEPA

SEQ ID NO: 258151 - protein, 222 aa, Glycine max
  Clone ID: PAT_MRT3847_75133C.1.pep
EKLKQELKEAIKIEFSQTGSQYSSPIEANIHVLGSQACTKGSNAETNANPSREEHVSHVIPTMGLYVQRQHSTHLVALGKIYEGGSTIHNMAYADDIVRVSVEKVIDGDAQVSLPMSEIQYVRQTLHTFIAWPKPLVKLVSNEDSTITPNKVIEIVQRSNDATVDDPLHDLIKIVYDIYEKPIELLWDATKFGIPNVDAFLLTYADVNEIISGDKCLNIVIL

SEQ ID NO: 258152 - protein, 48 aa, Glycine max
  Clone ID: PAT_MRT3847_75134C.1.pep
YLIIVEFRARWQLVVLCPTNNVVVWFCSLCKKPDVHIKPAINKLSFIL

SEQ ID NO: 258153 - protein, 72 aa, Glycine max
  Clone ID: PAT_MRT3847_75135C.1.pep
KLIDSYCLMEQFACGLWMKVGAFYSGTASGGQVIKLQPQASILVYKCVYATVPYNYASMFSRFTFEMKHQSR

SEQ ID NO: 258154 - protein, 255 aa, Glycine max
  unsure (1)..(255): unsure at all Xaa locations
  Clone ID: PAT_MRT3847_75136C.1.pep
MEQEDTVVLYPAPGIGHIVSMVELAKLLQTHSYPIITLLSTGFLDHPSVDAYVHRISTSHPYISFHRLPHIAPPTTTTVSFAAKGFNFIKRNTPNVATTLAKISKSTSTTIKAFITDLFCFSVTETTSSMGIPVYYFFASGAAGLAIVSYFPKLHEETNVSFKDMVGVEVRVPGNAPLKXREHAATHVGQGRLCVLGHAVSGHAPXEASGVVVNTFPELEPLAVNAVAGSSRFADAKEAPPVFYIGPLIAEPQLS

SEQ ID NO: 258155 - protein, 95 aa, Glycine max
  Clone ID: PAT_MRT3847_75137C.1.pep
TKMQFMGLRKRGREWRIALSNHYAWLQTRGWRMHERKRNSWGSEKGVAGPNGPPGFFHLKRQTCFLQRKINHSREHHVLEKQYTYAKGNLPCARK

SEQ ID NO: 258156 - protein, 55 aa, Glycine max
  Clone ID: PAT_MRT3847_75138C.1.pep
LLKIAVMLQALVGVLVFRHMGLKLVIHSCDQSSSLRYPVISPGVRSFLIAEATSL

SEQ ID NO: 258157 - protein, 306 aa, Glycine max
  unsure (1)..(306): unsure at all Xaa locations
  Clone ID: PAT_MRT3847_75139C.1.pep
SEVRRVENEDGTWEVKFFYSKAARLINVDDVLKTVKERKSCVERSNWVWYEGKCMENDMQFVVKEISDLNSLPMSMWEETVKIRKVRHPNIINLIATCRCGKRGYLVYEHEEGXEVKXTVDNLSWQRRCKIAVGVAKALKFLHSQASSMLLIGEVSPEIVWVDAKGVPRLKVTPPLLPCLDVKGFVSSPYVAQEVIERKNVTEKSEIYGFGVMLVELLTGRSAMDIEAGNGMHKTIVEWARYCYSDCHLDVWIDPVLKGGDALRYQNDIVEMMNLALHCTATDPTARPCARDVLKALETVHRTTFC

SEQ ID NO: 258158 - protein, 87 aa, Glycine max
  Clone ID: PAT_MRT3847_7513C.1.pep
PGKDGPSIFWGGGPKTGGTTFGTWSIFGKLGEDFLIYQGTGYPCIGFGSKKILKYNPPQQKHNFFNYLFFLGGRNNTRRHKRVLKQR

SEQ ID NO: 258159 - protein, 32 aa, Glycine max
  Clone ID: PAT_MRT3847_75140C.1.pep
CVEGKCFGMLQVKVLIGTKNDYRAMTKYGSGL

SEQ ID NO: 258160 - protein, 149 aa, Glycine max
  Clone ID: PAT_MRT3847_75141C.1.pep
TDKPLILFCDYSSPVLVFSHSRFRLFLFGEGEKLAHFDLQISKRVLRLLINEAYCEDFDIGNGQYCVMGWPSTNFYDSMQPYLVVTHIFCCVFRMLWSFNGWSWSRLIFQPVLKKLYYCLRTFSRPRNIRTKKELMLVPVDAVSYLMIF

SEQ ID NO: 258161 - protein, 359 aa, Glycine max
  Clone ID: PAT_MRT3847_75142C.1.pep
HDLIQDMGKRIDQESSEDPGKRRRLWLTKDIIEVLEGNSGSREIEMICLDLSLSEKEATIEWEGDAFKKMKNLKILIIRNGKFSKGPNYFPESLRLLEWHRYPSNCLPSNFPPKEELVICKLSQSYITSFGFHGSRKKFRKLKVLKFDYCKILTEIPDVSVLVNLEELSFNRCGNLITVHDSIGFLNKLKILNAYGCSKLTTFPPFNLTSLETLELSHCSSLEYFPEILGEMENIKALHLERLPIKELPFSFQNLIGLREITLRRCRIVRLRCSLAMMPNLFRFQIRNCNSWQWVESEAGEEKVEVRYPNVLDLESSASESPSLLQTIALGTRKFSVAFFLFFSCFLFYYFGLSCQKFT

SEQ ID NO: 258162 - protein, 137 aa, Glycine max
  Clone ID: PAT_MRT3847_75143C.1.pep
PTRPIKELPFSFQNLIGLREITLRRCRIVRLRCSLAMMPNLFRFQIRNCNSWQWVESEAGEEKVEVRYPNVLEYEKEKKEEGVLELESSLIKGSGIHIFREEGSMEEDIRFDDPYLSSSASESPSLLQTIALGTRKF

SEQ ID NO: 258163 - protein, 203 aa, Glycine max
  Clone ID: PAT_MRT3847_75144C.1.pep
NFPPKELVICKLSQSYITSFGFHGSRKKFRKLKVLKFDYCKILTEIPDVSVLVNLEELSFNRCGNLITVHHSIGFLNKLKILSAYGCSKLTTFPPLNLTSLEGLQLSACSSLENFPEILGEMKNLLMLQLLGLLGVKELPVSFQNLVGLQSLILQDCENFLLPSNIIAMMPKLSSLLAESCKELQWVKSEEGEEKVGSLYVQM

SEQ ID NO: 258164 - protein, 53 aa, Glycine max
  Clone ID: PAT_MRT3847_75145C.1.pep
RFWLFFYVTSSTNTRRGILIIAPPTQWGNHFATQLYHIKNLTPTRPETKLYQI

SEQ ID NO: 258165 - protein, 97 aa, Glycine max
  unsure (1)..(97): unsure at all Xaa locations
  Clone ID: PAT_MRT3847_75146C.1.pep
MVRVDIYRPMTLEQVMVHTDIAGNAKKWATAQDXPHLLLYGPCGCDXKTLMMALMRQKFGPGAEKVNADDRTCEADAGSRASDVELAAVSSANHIEM

SEQ ID NO: 258166 - protein, 56 aa, Glycine max
  Clone ID: PAT_MRT3847_75147C.1.pep
DVFTREFLVSISRDWSFSFTFYSFYRSKVAERTVSIFNFFFKVFFHIFASIFLQNT

SEQ ID NO: 258167 - protein, 134 aa, Glycine max
  Clone ID: PAT_MRT3847_75148C.1.pep
GTSASGRGGGRGFDYESQRNDRDRSPDKGSSWRDRFKSVNRDRSRSPNRAALPQHSQGGSFHKAMMERGGWDSDRNKSFNRDRSRSPSPHRQVKGPAVREHSPVYILTETQPPPRVMEDMVDLIHLTMEKWRKG

SEQ ID NO: 258168 - protein, 53 aa, Glycine max
  Clone ID: PAT_MRT3847_75149C.1.pep
EVRTSEMWCFYSSCLRLVVPCLVSHTPATRFGMERSKVSKLTSPIALLLASSR

SEQ ID NO: 258169 - protein, 90 aa, Glycine max
  Clone ID: PAT_MRT3847_7514C.1.pep
VDERLNKEFDVDEMTSLIVVGLWCTNPNNKERPTATQVIKVLQLEAPLPTLPLDMHDGPPLSLNTYTHAQPPYDSLQSVPFTNSLQSVGR

SEQ ID NO: 258170 - protein, 57 aa, Glycine max
  Clone ID: PAT_MRT3847_75150C.1.pep
QLSLMLLSASYNFNLISIGNFNRHLSCWAYASSPKVLQGEAVFGGSCLYKTAEVPLC

SEQ ID NO: 258171 - protein, 116 aa, Glycine max
  Clone ID: PAT_MRT3847_75151C.1.pep
ARVELTWIQTLLTELHVYFQTPLIYCDNQSAVSIAHNPVFHSRTKHIEIDVFFVREQVLAKQLSVVHLPALDQWVDVLTKPLSSTRSEVLRDKLNAKYFSLEKPCPCVSGGFRMHV

SEQ ID NO: 258172 - protein, 36 aa, Glycine max
  Clone ID: PAT_MRT3847_75152C.1.pep
ESIKWPIPNIACTPYSRISKTLFYVIELDHGCNTAH

SEQ ID NO: 258173 - protein, 280 aa, Glycine max
  Clone ID: PAT_MRT3847_75153C.1.pep
EKVLTDQSDCLYEAMVRQVAVRNTKGWQFLVHYLGWKKRWDEWLDLDRLMKHTEENMRKKHDLDEKLGNDKNAKVPRGSLAKSKPTNVSRGRKRRNESVIKGKPAVDPDKLVNIQIPPTLKKQLVDDCEFITHLGKLVKLPRTPNVKGILKNYFDYRFKKCGSVGDSVEEIMKGLSCYFDKALPVMLLYKNERQQYQEACPANVFPSAIYGAEHLLRLFVKLPELLFHASVEEETLMELQAHLIDFLRFLQKNQSTFFLSTYHVAEGIENSTNKQVCLPC

SEQ ID NO: 258174 - protein, 312 aa, Glycine max
  Clone ID: PAT_MRT3847_75154C.1.pep
MGKSKVLVVGGTGYIGRRIVRASLALGHETYVVQRPELSLQIEKLQRLLSFKKQGAHLIEASFNDHKSLVDAVKQVDVVISAISGVHIRSHSITLQLKLVEAIKEAGNVKRFLPSEFGLDPARMGHALEPGRVTFEDKMAVRKAIEEANIPFTYISANLFAGYFAGSLSQMGSFVPPRDKVHLFGDGTLKAIFLDEDDVATYTIKAIDDPRTLNKTLYLRPPENIISQAELIGIWEKLIGKELEKTYIPPEGFLTTLKGLDYKLQVGIGHFYHIFYEGCLANFEIGEEGEEASKLYPEVNYTRMDEYLKIYV

SEQ ID NO: 258175 - protein, 61 aa, Glycine max
  unsure (1)..(61): unsure at all Xaa locations
  Clone ID: PAT_MRT3847_75155C.1.pep
KDXEIEXQXGXXXKDYXDPPXXELYDPXELRKGDXYRALXAERGXTLXCLYGTILTALGYN

SEQ ID NO: 258176 - protein, 188 aa, Glycine max
  unsure (1)..(188): unsure at all Xaa locations
  Clone ID: PAT_MRT3847_75156C.1.pep
PPGLPVDHRGVDFCIIFGGSMWCPHVTGLTAVIKWAHLHWGPPPVLWAFIPRGYPVLKPGEKIXNRATGKPSPPFDHGSGPVGPVLALNPGLVSDXPGEGFLGFFCGLKYSASGINPLAKEKFHCLRGDQHSVAPLLAPLFAVLFEFGGVVKPPRVFSKVGPRGPSKVSVQSQMASVKIPVGPQVLSF

SEQ ID NO: 258177 - protein, 154 aa, Glycine max
  unsure (1)..(154): unsure at all Xaa locations
  Clone ID: PAT_MRT3847_75157C.1.pep
TDCNIVGALLXVDTYHTSPXNCSSLIFVAPFRSCWPIRVVTFPNTIVLIEPHLNSRFQLLSTSTNGDFVKXNDLAMDNDNETCAAVGLTXSYTPTPLIGXSDLQIDRAANRVSIIERCVTLLITVNQPQEKDLPEGKISFDIKSRSRLDKVSST

SEQ ID NO: 258178 - protein, 46 aa, Glycine max
  Clone ID: PAT_MRT3847_75158C.1.pep
SEHAIFSSLHCCDTMSSPVRTVSCKFCQGMPKPFLGIHVNDNRPVQ

SEQ ID NO: 258179 - protein, 70 aa, Glycine max
  unsure (1)..(70): unsure at all Xaa locations
  Clone ID: PAT_MRT3847_75159C.1.pep
AHAXXGMDDHQHQHHHGHGFMNGRRQPXNNXPRPSHTTFPFMPPYPTEEXIPCHHHLNLTPLPTHHSQQQ

SEQ ID NO: 258180 - protein, 76 aa, Glycine max
  Clone ID: PAT_MRT3847_7515C.1.pep
KKDFLYMKRFCFALGKKGPKTNLFLNLWFKGNPPFGKKIGISLKGGKPPPLWKRGWKSKSQPPPKGVRIRFLWGPL

SEQ ID NO: 258181 - protein, 350 aa, Glycine max
  Clone ID: PAT_MRT3847_75160C.1.pep
KHLFMDGKKLVAIISEAGSVDVCVRADRRAANQKRRVHLTLELPWSADRAIQQFGRTHRSNQASAPEYRILFTNLGGERRFASIVAKRLESIGALTQGDRRAGPSLSAYNYDSAYGKKALTIMYKGIMEQDSLPVVPPGCSSHRPDTIQDFIVQAKAALVSVGIVRDTLGNGKSGRIIDSDMHEVGRFLNRILGLPPDIQNGLFELFVSILDLLVRNARIEGNLDTGIVDLKANVIELQGTPKTVHVDQLTGASTILFTFILDRGITWELASTMLNEKQKDGLGSANDGFYESKREWLGRRHFILAFESSASGMYKTVRPPVGESNREMPLSELKSKYRKISSLEKAQSG

SEQ ID NO: 258182 - protein, 35 aa, Glycine max
  Clone ID: PAT_MRT3847_75161C.1.pep
MATLCRYSAQLNIQFSAEINACLNSTSSQPQRGLL

SEQ ID NO: 258183 - protein, 50 aa, Glycine max
  Clone ID: PAT_MRT3847_75162C.1.pep
ILRLLSPMIITNTTLPQRMLHVNSSRIFVNVCFKFNVAIMGLMYVSNRSV

SEQ ID NO: 258184 - protein, 48 aa, Glycine max
  Clone ID: PAT_MRT3847_75163C.1.pep
GKPVYAYGSPLSVIYESVIGINEGSVQYRDESRCLIMHILVFNNPNVV

SEQ ID NO: 258185 - protein, 78 aa, Glycine max
  unsure (1)..(78): unsure at all Xaa locations
  Clone ID: PAT_MRT3847_75164C.1.pep
GSRFRMYTFKVKPCHTASSHDRPXRPFAHPWLNARRRDPWKYHYSXTPXSSFRKVSRSQGHDSKYAYGLFERWLHTAQ

SEQ ID NO: 258186 - protein, 65 aa, Glycine max
  Clone ID: PAT_MRT3847_75165C.1.pep
RGPLPLLSSGLARPCLRSCSCSCPSVLPVSLPVPWWSPSCFFCWWGSGGSFLLLPPPLSSSGGCQ

SEQ ID NO: 258187 - protein, 125 aa, Glycine max
  Clone ID: PAT_MRT3847_75166C.1.pep
LVQLGLCVNLFFTFPIMMNPVNEVMERRFFGSRYCLWLRWMMVLIISLVALLVPNFADFLSLVGSSVCVVLSFVLPAMFHCLVFKEELGWRCVLWDGAIVVFGFVIAVTGTFTSVMEILWPTPTA

SEQ ID NO: 258188 - protein, 381 aa, Glycine max
  unsure (1)..(381): unsure at all Xaa locations
  Clone ID: PAT_MRT3847_75167C.1.pep
MASLLNMVSVPPRISPTSHTRIASLQARPVLPPFSVSFSRRRLSIRATETDTNEVQSQAPGAAPSKDGSSFNQLLGIKGAAQETNKWKIRLQLTKPVTWPPLVWGVVCGAAASGNFHWNFEDVAKSIVCMMMSGPFLTGYTQTMNDWYDREIDAINEPYRPIPSGAISENEVITQIWVLLLGGLSLAGILDIWAGHDFPIVFYLAVGGALLSYIYSAPPLXLKQNGWIGNFALGASYIRLAMVWATGQALFGTLRPXIVFVLTLRYXALAELXLPIVNGYKCFEWDRTLGLQSGSSASXLPVDFGAVTAKWICVGAIDITQLSVAGYLLGADKPFYXISSNWSYKFKYFFXDPVKYDVKYQASALPILVLGLLVTALATSH

SEQ ID NO: 258189 - protein, 113 aa, Glycine max
  Clone ID: PAT_MRT3847_75168C.1.pep
IFVLGIAIVNDFKSVEGDRALGLQSLPVAFGAETAKWICVGAIDITQLSVAGYLLGADKPFYALALLCLIIPQVFFQFKYFLQDPVKYDVKYQASAQPFLVLGLLVTALATSH

SEQ ID NO: 258190 - protein, 35 aa, Glycine max
  Clone ID: PAT_MRT3847_75169C.1.pep
PVWNEQTCFMYGVIPLRGRLLQPTDSYDAAVLSMS

SEQ ID NO: 258191 - protein, 54 aa, Glycine max
  unsure (1)..(54): unsure at all Xaa locations
  Clone ID: PAT_MRT3847_7516C.1.pep
KKFYFHWMRKFGGVFLXXRIKKWGRRLFKNLWLVFWVIKECLNXXKCXXGAARV

SEQ ID NO: 258192 - protein, 66 aa, Glycine max
  unsure (1)..(66): unsure at all Xaa locations
  Clone ID: PAT_MRT3847_75170C.1.pep
KKSCCGGNFVCGSSCKNGNGCGGCXMXPDLSXXVXPTVTLVLGVFPCLAHFFLKKKKKICFVLPFF

SEQ ID NO: 258193 - protein, 60 aa, Glycine max
  Clone ID: PAT_MRT3847_75171C.1.pep
LKLEKLANEVEEVDQLNYKLLKKLLCASLVNTKPDSNGQSTMSKICSKSISRLTTCIYDL

SEQ ID NO: 258194 - protein, 265 aa, Glycine max
  Clone ID: PAT_MRT3847_75172C.1.pep
MRYLSLTDQKSFQEAIMAREYTLSDPPLGFLAVEVDIYRPPGDPFNQSTWPFPLIREKVIGTSEAQIVTNGNYEDAFIDRFVQAAIRLAERGAVGIITSCGFLAAAQTRLAALSPIPVATSALVQVPSLLAISPVNRPIGVLTYDSARLGSAHLLELGIDPSRVRVWGLSDDSHLRDICARGANYDADRLERELVAEAKSLVLQHPDVAAVVLECTNMPPYADRIHDAIQIPVYDVYTMGMWFYSGLTRRNPLSWKASDARDTLK

SEQ ID NO: 258195 - protein, 49 aa, Glycine max
  unsure (1)..(49): unsure at all Xaa locations
  Clone ID: PAT_MRT3847_75173C.1.pep
PSAQFTDMDLDXCEETTLHDVNMEEESRWTRRRSQEAYDEDDDMPAGAH

SEQ ID NO: 258196 - protein, 409 aa, Glycine max
  Clone ID: PAT_MRT3847_75174C.1.pep
MATEKLRGCAKFFASSKPYLAMISLQFGYAGMNIITKVSLNQGMSHYVLVVYRHAFATAVIAPFAFIFERKGQPKITFPVFMQIFILALLGPVIDQNFYYAGLKLTSPTFSCAMSNMLPAMTFVMAVFCRMEKIDIKKVRCIAKIVGTLVTVAGAMLMTLYRGPIVEMVWAKHPHNKTNATTTTGSLDKDWFLGCTFLIIATLAWASLFVLQAKAIQTYKNHQLSLTSLVCFIGTLQAIAVTFVVEHNPSVWRIGWDVSLLAAAYAGIVTSSISYYVQGLVIKMKGPVFATAFSPLMMIIVAIMGSFILAEQIYLGGVIGAILIVIGLYSVLWGKHKEQIESKVADEIPLPVKDSQIAVIAGPIIDATDNFTEEKYGQKGEANNNKLSSLIITIPIPEPPTKANQERKA

SEQ ID NO: 258197 - protein, 84 aa, Glycine max
  unsure (1)..(84): unsure at all Xaa locations
  Clone ID: PAT_MRT3847_75175C.1.pep
XRXKXXEQFALHQXRXSKQWPINLXXNRSPSSXKXVXLFXXXGDGCITTKGAWNCYXVHWXXTQLRQSSXXXCNDXDXXGXVXH

SEQ ID NO: 258198 - protein, 80 aa, Glycine max
  unsure (1)..(80): unsure at all Xaa locations
  Clone ID: PAT_MRT3847_75176C.1.pep
MGKVKIGIXGFGRIXRLVARVALQRDDVELVAVNDPFITTDYMTYMFKYDSVHGXXXHHDVTVXXXXXLLFGXKPVTXFX

SEQ ID NO: 258199 - protein, 55 aa, Glycine max
  Clone ID: PAT_MRT3847_75177C.1.pep
DGKDQTGNKLSFPLHTSDDLSKSCLEPDSTSYNDNKTYLHSSIFVDNLHCFHWGY

SEQ ID NO: 258200 - protein, 115 aa, Glycine max
  unsure (1)..(115): unsure at all Xaa locations
  Clone ID: PAT_MRT3847_75178C.1.pep
SVLLKEASYDEIKIAFKEEYTGHXKGILGYTADDVASTDFIGDGRSRVSDAKAGIAXNKNYGNIVSWFYNLWGYSVRVIDHFVFVDKTLFDGVTSEERCLHTSSVCSWLAGTYCF

SEQ ID NO: 258201 - protein, 72 aa, Glycine max
  Clone ID: PAT_MRT3847_75179C.1.pep
TCRGSPHTPRSGGGISVMLQNQPRLYKILCLQEFTSLERVPSLLSDAVCDHLPCPCLFSYLRQKKDEGARQA

SEQ ID NO: 258202 - protein, 134 aa, Glycine max
  Clone ID: PAT_MRT3847_7517C.1.pep
LDANCICLQLALTYTVLLMTGKLSAPKGGIVQSSFVGSLRKHVEELLNCSQELKDDYLNYLKLGKWPDGESQDKRSILLSWCVQWIDVPSSSAIRTAVDRVKPSLMSSLHLPFLQLLIERTHIHVISDIDRCLS

SEQ ID NO: 258203 - protein, 42 aa, Glycine max
  Clone ID: PAT_MRT3847_75180C.1.pep
TVFSYEWVYNFDISAFPDVTNVPDLYVHIDYDTNIIIDFEKF

SEQ ID NO: 258204 - protein, 101 aa, Glycine max
  unsure (1)..(101): unsure at all Xaa locations
  Clone ID: PAT_MRT3847_75181C.1.pep
XXXTXXXXXXXSAQXPRDXXTTLXTXRGXTXXXPXXAXCDXPXXXGXXQXPTAQYXXTSXSXRYXTXXIXXXXQXPXVHKLAXXXSXSSSXIPSXXXXARS

SEQ ID NO: 258205 - protein, 68 aa, Glycine max
  Clone ID: PAT_MRT3847_75182C.1.pep
QVAHKNLNLLIEGKAKVSKLGTSKAQPPNSIVTLERHITVAQFPLIIVLESHPGKIKPRGFFLLVHPQ

SEQ ID NO: 258206 - protein, 98 aa, Glycine max
  unsure (1)..(98): unsure at all Xaa locations
  Clone ID: PAT_MRT3847_75183C.1.pep
LSLSLSLSLSLSLSLSLSLEEEEQGEHCESAXDVGTHVFCHVGGLCQEGRELRRRLPHPGXNAQPEQEMRPRGEETMGCEAGKVSPSYRKGYARVYYR

SEQ ID NO: 258207 - protein, 91 aa, Glycine max
  unsure (1)..(91): unsure at all Xaa locations
  Clone ID: PAT_MRT3847_75184C.1.pep
YGNQTVVVRIDPCKAYVKDPNDEQLKAIRVSSPGSNGEEYAWNTCSVNGGREVGSIGVYALAKTVXXLGAGELLLNCXECAGQGTAILCSI

SEQ ID NO: 258208 - protein, 62 aa, Glycine max
  Clone ID: PAT_MRT3847_75185C.1.pep
CVFIVKNDCMTRQCAHPEKPNRTQNRCGLNNENKTGAWADTRENRGTGGRDRRATRPAKSEP

SEQ ID NO: 258209 - protein, 47 aa, Glycine max
  Clone ID: PAT_MRT3847_75186C.1.pep
MAQETFLFTSESVNDGHPDKLCDQISDAVLDACLEQDPDSEVTCETC

SEQ ID NO: 258210 - protein, 132 aa, Glycine max
  unsure (1)..(132): unsure at all Xaa locations
  Clone ID: PAT_MRT3847_75187C.1.pep
DPETQPWIKGSXTMIRKANAVWKYNNATNXIGRTQLAELVNEEYNVEKPNTIGTSGTSVFNRQIXAAHLEKMPLGQNAILXGMGQCLRRKSKETMENVGXKEKSAQTIKNIIENXVTNRPKPMKIXSGTILA

SEQ ID NO: 258211 - protein, 223 aa, Glycine max
  Clone ID: PAT_MRT3847_75188C.1.pep
MPYSTCDNHLGSLWLIEANQNNHPYLLDWYYTSRSHDTNLGDVPLEEPFGSHDVNLGDVHLEPFGAIEHRSREYLMLSNLTQNESGYEEYSNEFQDGRAASHLGASTSAPIFRESMIQDQHSIDMPLTARSRWWARSDPQSGQGQTSFFEPPDFNHQPVYNYHDNRGSEDQDQEHHLYWGDYHKLSSTAHADDLYAGEFNLLFDDVYSSPPENPTVNPSTATF

SEQ ID NO: 258212 - protein, 130 aa, Glycine max
  Clone ID: PAT_MRT3847_75189C.1.pep
GAGPENLGRPTPPKSYRTEKTQRATEDIKRQPPDITRQQQTQATNTHPAQPTAEKNKKRKPRNNQITGQHHDGRDKHRTKHEKQPAKTEEEKKEAKRNKGTHADDPAKRAQETEKHAAHESPKEQHPADD

SEQ ID NO: 258213 - protein, 50 aa, Glycine max
  Clone ID: PAT_MRT3847_7518C.1.pep
KINKNTFIIIFLPKHPFYFFKHKGNYQYHNKIGDMIRKTKIDLCRRICHM

SEQ ID NO: 258214 - protein, 86 aa, Glycine max
  Clone ID: PAT_MRT3847_75190C.1.pep
QRYHFRNFFPSKLLIHHWPALVCIRELVKFAYSRVWPAYTSVFPHLEVLGSYLPIAKHSGASGEHIVDNCKCYARYGYDLNINAKI

SEQ ID NO: 258215 - protein, 275 aa, Glycine max
  Clone ID: PAT_MRT3847_75191C.1.pep
MSSMLRFPFSFPQPRRPQFPRPFTAFAAAVAGASAAVVAVSSSDRSFLRNALNSFFSSDLSMPLWGSLSLADSGVSVVESKTGTSFPSVLDSSQKLCGIGLRKKSILGLKNIDVYAFGVYATDEDIKRHLSEKYGKLSASELQGNKEFTEDLMESDISMTIRLQVVYGRLSIRSVRSAFEVSVGSKLQKFGGSDNKELLQRFTSQFKDEFKIPRGSVIHLSRDKGHVLRTSIDGQEVGSIQSKLLCKSILDLYFGEEPFDNQAKEEIELNMASYL

SEQ ID NO: 258216 - protein, 70 aa, Glycine max
  Clone ID: PAT_MRT3847_75192C.1.pep
NVSHFGLSSVCLVFNITSFNVLFPNKKLLTFNNIKPLFFNNIKLSMRMIYHYYNIYKLLSCSDALLDLVI

SEQ ID NO: 258217 - protein, 48 aa, Glycine max
  Clone ID: PAT_MRT3847_75193C.1.pep
SKQVQTSRMNRSAVVLFALCRGSLRCAIRGIGTGILGVENLGQLNIPY

SEQ ID NO: 258218 - protein, 53 aa, Glycine max
  Clone ID: PAT_MRT3847_75194C.1.pep
AASIFQNRGKKNMQLHSVLFITFELGLSFLSSDIDVALFSSNDKNYSNIILKS

SEQ ID NO: 258219 - protein, 43 aa, Glycine max
  unsure (1)..(43): unsure at all Xaa locations
  Clone ID: PAT_MRT3847_75195C.1.pep
IRRRELYLDNQYCENLNISSFITLFXXSSVXNGSARRALRRCS

SEQ ID NO: 258220 - protein, 78 aa, Glycine max
  unsure (1)..(78): unsure at all Xaa locations
  Clone ID: PAT_MRT3847_75196C.1.pep
LLRWWWRLRAWAGGPLAGRRGGALXVVVXGSRPAPLLVLPGXGPLPLGCWSGLGCRCACGSPPGKGSPGGGKAGSLLT

SEQ ID NO: 258221 - protein, 340 aa, Glycine max
  unsure (1)..(340): unsure at all Xaa locations
  Clone ID: PAT_MRT3847_75197C.1.pep
YTGFIYNEFFSVPFAIFAPSAYDCRDLSCRDATTVGLIKVRDTYPFGVDPVWHGTRSEXLPFLNSLKMKMSILLGVAQMNLGIVMSYFNAIFFRNSVNVWFQFIPQMIFLNSLFGYLSLLIIVKWATGSQADLYHILIYMFLSPTDDLGENQLFAGQKNLQLVLLLLAVISVPWMLLPKPFILKKQHEARHGVESYAPLQSTDESLQVESNHDSHGHEEFEFSEVFVHQLIHTIEFVLGAVSNTASYLRLWALSLAHSELSSVFYEKVLMMAWGYNNVIILIVGLIVFIFATVGVLLVMETLSAFLHALRLHWVEFQNKFYEGDGYKFHPFSFSWLDDEE

SEQ ID NO: 258222 - protein, 160 aa, Glycine max
  unsure (1)..(160): unsure at all Xaa locations
  Clone ID: PAT_MRT3847_75198C.1.pep
YDCRDLSCRDATTVGLIKVRDTYPFGVDPVWHGTRSELPFLNSLKMKMSILLGVAQMNLGIVMSYFNAIFFRNSVNVXINLHTNSTLMYFFIQCFPLRFQFIPQMIFLNSLFGYLSLLIIVKWATGSQADLYHILIYMFLSPTDDLGENQLFRVRKIARH

SEQ ID NO: 258223 - protein, 84 aa, Glycine max
  Clone ID: PAT_MRT3847_75199C.1.pep
HSELSSVFYEKVLMMAWGYNNVIILIVGLIVFIFATVGVLLVMETLSAFLHALRLHWVEFQNKFYEGDGYKFHPFSFSWLDDEE

SEQ ID NO: 258224 - protein, 128 aa, Glycine max
  Clone ID: PAT_MRT3847_7519C.1.pep
KQSSIDIQGKMGEKKVLALVMLVVAYGLAVTTFTACQLPPTCNGYEPLICQCVPYLVNPGPSTPTPHCCDGARVAIHRANNAQAIKNFCSCLEDAGPNLYFQKQSLVLLPAACNIKPSFDFSKCVYGD

SEQ ID NO: 258225 - protein, 90 aa, Glycine max
  Clone ID: PAT_MRT3847_751C.1.pep
QETLGLQKMLLPQDFPLSNPRNDSWRPWRQTFSPCLNPLLPLWEPSAFFLPNVFKLQAKAKKGLSHFPKADHPWNSTYSLFSHISTVINL

SEQ ID NO: 258226 - protein, 37 aa, Glycine max
  unsure (1)..(37): unsure at all Xaa locations
  Clone ID: PAT_MRT3847_75200C.1.pep
RHQXRMSQLAXXQXMDAVVXSXHDCSSRXRPXERCSR

SEQ ID NO: 258227 - protein, 37 aa, Glycine max
  Clone ID: PAT_MRT3847_75201C.1.pep
QDSTRLLHGKPVDNFVLFSIGLIDIYMHKVFKYGIMD

SEQ ID NO: 258228 - protein, 95 aa, Glycine max
  Clone ID: PAT_MRT3847_75202C.1.pep
NDVEVNEGFETFHLAWGRTANDGDHWRVAPYASSHPSASAPCLNDIGSITPFILLTGTAEVAFQKRVPMGSFSDLWVKEYNEALKLGDDISGSDY

SEQ ID NO: 258229 - protein, 77 aa, Glycine max
  Clone ID: PAT_MRT3847_75203C.1.pep
DLKRGGNNRFLKTAAYGHFGREDPDFTWEVVKPLKWNEWEFFSVALIMSIIHNFPRPLLCVFLSSSSSYFVSPAFHL

SEQ ID NO: 258230 - protein, 98 aa, Glycine max
  Clone ID: PAT_MRT3847_75204C.1.pep
KNGTCPWLRPDGKTQVTVEYYNDNGARVPIRVHTVLISTQHDETVTNDEIAADLKEHVIKPVIPHGDAGLTGRKIIIDTYGGWGAHGGGAFSGKDPTK

SEQ ID NO: 258231 - protein, 105 aa, Glycine max
  Clone ID: PAT_MRT3847_75205C.1.pep
MAETFLFTSESVNEGHPDKLCDQISDACLDACLEQDPDSKVACETCTKTNLVMVFGEITTKANVDYEQSPDIAQGVHGHLTKKPEEIGAGDQCHMFGYATDETPE

SEQ ID NO: 258232 - protein, 91 aa, Glycine max
  Clone ID: PAT_MRT3847_75206C.1.pep
KNPCFINKIIREPQFLHLIIQDHPMEPYGAVDRDLALPLTETGYKESEYKRIQPIFIGTGCYGLEIQEHGYMAIKADLFTGTCGTYTVGVL

SEQ ID NO: 258233 - protein, 166 aa, Glycine max
  unsure (1)..(166): unsure at all Xaa locations
  Clone ID: PAT_MRT3847_75207C.1.pep
NEGHPDKLRDQIYDAVLDARLEHDPHSKEAXETCTKTNSVMGSGEITTKANVDYEKIGRDTCRNIGFNSNDAGLDADNCKVHVNIEQQSPDIAHGVHGHLTKKPEEIGAGDQGHMFGYATDETPESMPLSHVLATKLGARVTEVSQNGTCPWLTPEGKTPVNREYY

SEQ ID NO: 258234 - protein, 132 aa, Glycine max
  unsure (1)..(132): unsure at all Xaa locations
  Clone ID: PAT_MRT3847_75208C.1.pep
MAYTFLFTSDAVNEGHPDKLCDQIYDAVLDACLEQDPDSKVACETCTKTNLVMVFXEITTKANADYEKIVRDTCRNISFISNDVGLDADNCKVLVNIEQQSPDIAQGVHGHLTKXPEKIGAGDQGHMFGYAT

SEQ ID NO: 258235 - protein, 48 aa, Glycine max
  Clone ID: PAT_MRT3847_7520C.1.pep
GPPHMLAPPLRVVIAEITLRGYVICGNVVLVSVGGNVLINYCLGSANP

SEQ ID NO: 258236 - protein, 136 aa, Glycine max
  unsure (1)..(136): unsure at all Xaa locations
  Clone ID: PAT_MRT3847_75210C.1.pep
AETFLFTSESENEGHPDKLCDQISDADLDACLEQDPHSKVACETCTKTNLVMVFGEITTKANVDYEKIVRDTCRNIGFIXNDAGLDADNCNVLVNIEQQSPDIAHGVHSHLTKKRXEIGAGDQGHMSGYATDQTPD

SEQ ID NO: 258237 - protein, 393 aa, Glycine max
  unsure (1)..(393): unsure at all Xaa locations
  Clone ID: PAT_MRT3847_75211C.1.pep
MAETFLFTSESVNEGHPDKLCDQISDAVLDACLEQDPDSKVACETCTKTNLVMVFGEITTKANVDYEKIVRDTCRSIGFISNDVGLDADNCKVLVNIEQQSPDIAQGVHGHLTKRPEEIGAGDQGHMFGYATDETPEFMPLSHVLATKLGARLTEVRKNGTCPWLRPDGKTQVTVEYYNDNGARVPVRVHTVLISTQHDETVTNDEIAADLKEHVIKPVIPEKYLDEKTIFHLNPSGRFVIGGPHGDAGLTGRKIIIDTYGGWGAHGGGAFSXGKDPTKVDRSGAYIVRQAAKSIVASGLARRCIVQVSYAIGVPEPLSVFVDTYGTGKIHDKEILNIVKENFDFRPGMISINLDLKRGGNNRFLKTAAYGHFGREDPDFTWEVVKPLKWEKA

SEQ ID NO: 258238 - protein, 44 aa, Glycine max
  unsure (1)..(44): unsure at all Xaa locations
  Clone ID: PAT_MRT3847_75212C.1.pep
LKALNHSIWVFFGKRKHCIFKYLDIWIPLKFGMSTKLDGTGKXK

SEQ ID NO: 258239 - protein, 113 aa, Glycine max
  Clone ID: PAT_MRT3847_75213C.1.pep
MAETIVVTSEPGNEGHPDKLWDQIPDAGLDACLEQDPDSKVACETCTKTNLVMGFGEITTKANVDYEKIGRDTCRNIGYVSNEGGLDADNCKVLGNIEQQSPDIAQGVHGHLT

SEQ ID NO: 258240 - protein, 47 aa, Glycine max
  unsure (1)..(47): unsure at all Xaa locations
  Clone ID: PAT_MRT3847_75214C.1.pep
MSEGGFFHVKMSCCGGHXGCGSACKCCNGCGCCXMYPELIYTKSTTN

SEQ ID NO: 258241 - protein, 112 aa, Glycine max
  unsure (1)..(112): unsure at all Xaa locations
  Clone ID: PAT_MRT3847_75215C.1.pep
EARQAPLNHHTSSRSRYPFLLFLYLSRVKSIKSGETLLFTSXSVNEGHPDKLCDQIFDAVLDACLEQDPYSKVACETCTKTNLFMVFXEITTKANVDYEKIVRDTCRNIGFV

SEQ ID NO: 258242 - protein, 72 aa, Glycine max
  Clone ID: PAT_MRT3847_75216C.1.pep
FTTYGSAKFNLHRNKLRFSIVFQFNRNVHTDFARPSIKCIKKNSPNPNSKAIYNLLYIINYSKINKTQFINL

SEQ ID NO: 258243 - protein, 68 aa, Glycine max
  unsure (1)..(68): unsure at all Xaa locations
  Clone ID: PAT_MRT3847_75217C.1.pep
KTPAPPTPHPKPPAPPKVPAPPGTTGPPNPPPPPPTAGIPQPYAPPPPLPTLPGPPXKPPKPPFPPPT

SEQ ID NO: 258244 - protein, 145 aa, Glycine max
  Clone ID: PAT_MRT3847_75218C.1.pep
HASGEEFRAVSWCLIQALDYLQSKMSVVEVSLNGRDFIGVWRSLAAGIDQLIFNGILISNVKFHNSGVERFGSDLDVLFGVFGAWCLRPEGFFPKSSEGLKLLKMDENRLQECMGGGKRWLKENGLRRLSVTEAEKILKNRVFTS

SEQ ID NO: 258245 - protein, 74 aa, Glycine max
  Clone ID: PAT_MRT3847_75219C.1.pep
SYTELIDCELTLHVIHWVPLDLIHIFLVSGGAILIDQKIEKYVLMTYNTWPHARNGLRQTGHYILLLVIYLLMR

SEQ ID NO: 258246 - protein, 90 aa, Glycine max
  Clone ID: PAT_MRT3847_7521C.1.pep
EDPENIPGMLELPQEGDVLISLALHNGTILAEAVEVLVEVRRPCPICSSPVSCMLMTLWMTFFNIASLLILVKSFFCNSMPKLNTGLASR

SEQ ID NO: 258247 - protein, 81 aa, Glycine max
  Clone ID: PAT_MRT3847_75220C.1.pep
HAYIYYVPGSHAYIMTRVAPMLPSFISKHKSNYPWGNVSTTKTFYRGQALIIGHHCILSKTNSSERLFRSKSFLTISLNFS

SEQ ID NO: 258248 - protein, 78 aa, Glycine max
  unsure (1)..(78): unsure at all Xaa locations
  Clone ID: PAT_MRT3847_75221C.1.pep
PFPKTPPNSCWPXXPLXAXGXXXFXGXXGXYQSYXVRGRWXXFMTFRDKDGWPKRPLPMSLSRACTXTXRTCCCGXCE

SEQ ID NO: 258249 - protein, 66 aa, Glycine max
  unsure (1)..(66): unsure at all Xaa locations
  Clone ID: PAT_MRT3847_75222C.1.pep
SVTNSTDLKDATMNSIECIEELWVIFRGIDGKPECDQNTXSIQXCSRQLGTVNEGRIQXSKHGWEY

SEQ ID NO: 258250 - protein, 65 aa, Glycine max
  Clone ID: PAT_MRT3847_75223C.1.pep
KDQETSEYAFIVMCRCNSDTSDPFICMETQLPSSSCEAVCLGFSMNPINYRFVCHVHQSPLINSW

SEQ ID NO: 258251 - protein, 97 aa, Glycine max
  Clone ID: PAT_MRT3847_75224C.1.pep
VDPRVQTGVSTGVSGAPTGPQKGLQVYISTSTVLRSTNNTTSSIIFDDNMSNLTSASCHASASSRYLSQFCICYMAPPPIHVQPPHELKRPPWRSIQ

SEQ ID NO: 258252 - protein, 42 aa, Glycine max
  Clone ID: PAT_MRT3847_75225C.1.pep
KVTFAFLPYNGTVVNMVYGIEGFMSSTTLLCKLIFFFILFLL

SEQ ID NO: 258253 - protein, 401 aa, Glycine max
  Clone ID: PAT_MRT3847_75226C.1.pep
KRSVSAIFDIGNRIGQAGADFGASLNGLVQQFFRSLPVPMPFKHEESSVRVEGGDKGWQRGGVVVAVQEDLGLLSERLKNRGFAESVSGSGGGSAEEEGGGGFNLGSIGLLGRRQGIINFTSTYDSRTQEVEGSLVARGDLWRVEASHGGSASRNENSSLFLVQLGPLLFIRDSTLLLPVHLSKQHLLWYGYDRKNGMHSLCPAVWSKHRRWLLMSMLCLNPVACSFVDLQFPNGQLTYVSGEGLSTSAFLPVCGGLLQAQGQYPGEMRFSFSCKNKWGTRITPMVQWPDKSFSLGLAQALAWKRSGLMVRPSVQFSVCPTVGGSNPGLRAELIHSVKEKLNLICGCAFMTYPSAFASVSIGRSKWNGNVGNSGLVLRVDVPLSTVGRPSFSIQINSGIEF

SEQ ID NO: 258254 - protein, 96 aa, Glycine max
  Clone ID: PAT_MRT3847_75227C.1.pep
YHIILFPIILIYLGMATPGFGLAEAYMTRKIYKEKMKKIAQEEQEGEKNSNMKISTIKTGSEDKTSSGCFSWVSKQQHKKNSRISDYNETLAAANS

SEQ ID NO: 258255 - protein, 53 aa, Glycine max
  Clone ID: PAT_MRT3847_75228C.1.pep
FRWFPSFFFLKSRKKRKGFFLQIKVIDSLPPQEKRARFPFPAKVIKHVFPLNL

SEQ ID NO: 258256 - protein, 107 aa, Glycine max
  Clone ID: PAT_MRT3847_75229C.1.pep
MTREKEVQTGGSCMKLVIKVLTVFAIILGGTAYYLNTKTEGVHAFVDNFFSNKEIQDYYAVIDKGEKKDGEYLYTFKGYTEDGKLQVIKRMMNRELHTGAFIKIYAK

SEQ ID NO: 258257 - protein, 59 aa, Glycine max
  Clone ID: PAT_MRT3847_7522C.1.pep
QREGIVPFPITPISGGACLIGGKQSIKEKKNPQKDYNKKSMKGKVLGSAGSLILLVGVV

SEQ ID NO: 258258 - protein, 62 aa, Glycine max
  Clone ID: PAT_MRT3847_75230C.1.pep
REGNSVKPSYSRLLLFVLTARRCGGDRRKTFEKWLPHSLGCLVLILCPFTLIFESNLGEYKT

SEQ ID NO: 258259 - protein, 509 aa, Glycine max
  Clone ID: PAT_MRT3847_75231C.1.pep
MIEMIVFLFLVLLISLILSSSSNNSLQLPPSPPSIPLLGHLHHLTPSLYKSLYTLSSKHGPLLLLRLGPSRRLLLLVSSAAVATDVFKTHDLAFSSRPAFAFAERLPFGTSGFVTAPYGPYWRFMKKLCVTELLSTRQLERSRSIRREEILRSIKRVIDNARETVALDLGSEFTKFTNNVTCRTAMSTSCAEKCEDAERIRKLVKESFELAAKLCFGDVLGPFKELSFWVYGKKAIDMSTRYDELLEEVLKEHEHKRLSRANGDQSERDLMDILLDVYHDAHAEFKITMAHIKAFFMDLFIAGTHTSAEATQWAMAELLNHPEAFQKVRKEIELVTGNVRLVDESDITNLPYLQAVVKETLRLYPPAPITTRECRQHCKINSFDVPPKTAVAINLYAIMRDPDSWDNPNEFCPERFLQEQDHEDLSDDGKRMKFNFVPFGGGRRGCPGTALAFSLMNTAVAAMVQCFDWKIGKDGKGEKVDMESGSGMSLSMVHPLICVPVVHFIPYDI

SEQ ID NO: 258260 - protein, 86 aa, Glycine max
  unsure (1)..(86): unsure at all Xaa locations
  Clone ID: PAT_MRT3847_75232C.1.pep
AYSSFGSSFTLIKSTPIPXXXTYPXAXDHCSXXGLXDXXXIAHVXXAXAXXXXGMXXIXRLXPXXHGXXRTXDNXXXTYLGXXEXL

SEQ ID NO: 258261 - protein, 39 aa, Glycine max
  Clone ID: PAT_MRT3847_75233C.1.pep
KLYKQIKELKGAIGPLSGRSLMYCTDSCFKRYLEARNWN

SEQ ID NO: 258262 - protein, 72 aa, Glycine max
  unsure (1)..(72): unsure at all Xaa locations
  Clone ID: PAT_MRT3847_75234C.1.pep
MGKKTFGFLFLLLLXLGSDVTVIRLGANDCLTKMHGFHSRCLFDKQCAHFCKNHRFIGCQCQRPLHKCFCNK

SEQ ID NO: 258263 - protein, 161 aa, Glycine max
  Clone ID: PAT_MRT3847_75235C.1.pep
MATAKTLSPAEGSLRKYYATKIREAEQTFADKLQNTRCLQAQRNELNNKVRALKEELMQLHEQGSNVGELAKVMDKQKALVKVHPEGKYVVDIDKSIDVAKLTTGCRVALRADSYALHMILPNKVDPLVSLMMVEKVPDSTYEMIGGLDTQIKEIKEVIEL

SEQ ID NO: 258264 - protein, 279 aa, Glycine max
  Clone ID: PAT_MRT3847_75236C.1.pep
MEDHAHAALPPGYRFYPSEEVLVGYYLTKKNENREEGFYGSDLIRELDLYDHDPFELPDAAACFSYGYKGRKKHWFCYAKETKRRNRRKVKSGFWLRKGKVRDISDHNGDDVVLGTRTRFVFYVGNSLKNAARTDWILYEYALVDRFLASFVLCRVVNKPPHKNSPSEIGLSCCAEESVVAVVRHVGVQCDGCAESDVVEAKVCDEGFVNRENEIAENPISGEHGDPAAPVSVAQGSHQVQERLSKLPSGSALFVGAMTSQQLMLSILEEDFIELDDIA

SEQ ID NO: 258265 - protein, 67 aa, Glycine max
  Clone ID: PAT_MRT3847_75237C.1.pep
ENIHQFFFVLGMQIFSCAYCRAIGSKGIKLKLNIGIGNWNMRFTLVCYEQLPRTSCFHCSLDRPVPI

SEQ ID NO: 258266 - protein, 71 aa, Glycine max
  Clone ID: PAT_MRT3847_75238C.1.pep
STSRYSHRLHIVSLTLVVDESVIPHQSYAMCARILCVSTSIDHVQLRPMIRPFVLRHIRSFTCYAEHRYAP

SEQ ID NO: 258267 - protein, 65 aa, Glycine max
  unsure (1)..(65): unsure at all Xaa locations
  Clone ID: PAT_MRT3847_75239C.1.pep
GSSLTXTIWRSIXLAASVMEPLLPTFTPSHSSSNFLRCFASVYEGRSGGAAKLLSLQWALSFPPC

SEQ ID NO: 258268 - protein, 138 aa, Glycine max
  unsure (1)..(138): unsure at all Xaa locations
  Clone ID: PAT_MRT3847_7523C.1.pep
MCVHLLLCILVLCGTLVEFNLYFWFQWLSPQNRVINPAMSGGYPQQGYQSRPPSDWAPPAPMQQAGYGYVQPGAYSGPSPQYNMPQXPYAGYPAQQPGGYSTNCDQSTAPPXQQSTHGGGYDYYSHQPQQPQKFCGYC

SEQ ID NO: 258269 - protein, 62 aa, Glycine max
  unsure (1)..(62): unsure at all Xaa locations
  Clone ID: PAT_MRT3847_75240C.1.pep
PGTHPRPSAXRHVLTSHRSTLTAHTAXCADRSLIHPRTIAFSLLTEWTTIPISHIQNRYKLP

SEQ ID NO: 258270 - protein, 58 aa, Glycine max
  Clone ID: PAT_MRT3847_75241C.1.pep
PPFNQPHHLSFLPVFLLPPQRNKHGIGSISYTRSEKHKYHFILTNTPHHIIIITHIFH

SEQ ID NO: 258271 - protein, 95 aa, Glycine max
  Clone ID: PAT_MRT3847_75242C.1.pep
FFVGVLAYNWLSYMLYQINKNLGRITPEKLAVVVGGAKVLINPSLESHTSYMGFKSHTLLLDSSTHIMSMIVLDFDAVFFCYLNLVVLLILSATF

SEQ ID NO: 258272 - protein, 100 aa, Glycine max
  unsure (1)..(100): unsure at all Xaa locations
  Clone ID: PAT_MRT3847_75243C.1.pep
FHLYARADAKARTMSFNANPCAEAWSLRLMKRTXFHCDNICVNGWTDSPAHDVQVTKDSAIGYHERVASTYREKNPQNPFVXNRWMGKLTLHQGASRRGK

SEQ ID NO: 258273 - protein, 72 aa, Glycine max
  unsure (1)..(72): unsure at all Xaa locations
  Clone ID: PAT_MRT3847_75244C.1.pep
FFFSFSIPDRKFFRMKHSHILPLASCIFFLTLVILVQARHHSHHAKHKHSHPHKSSKTPKPAPPXSPSHNQN

SEQ ID NO: 258274 - protein, 79 aa, Glycine max
  unsure (1)..(79): unsure at all Xaa locations
  Clone ID: PAT_MRT3847_75245C.1.pep
TNECVCVSLLVFFFFFPIYFYIYIYIYIYIYIYIYIYIYXGGGLKKGPLPIYIYIAGVKLYSYSKPPFKPRGRGRSHGN

SEQ ID NO: 258275 - protein, 56 aa, Glycine max
  unsure (1)..(56): unsure at all Xaa locations
  Clone ID: PAT_MRT3847_75246C.1.pep
XNEVTPESTRIGPMSSQEAKAPKPCDGLNRGSHDPLLLLRSANPFLERQTELQQKR

SEQ ID NO: 258276 - protein, 49 aa, Glycine max
  Clone ID: PAT_MRT3847_75247C.1.pep
TAISSLRSKSLPVERAARESRSDDLRYRFVPNSTLFTQIHRLRHYPMQQ

SEQ ID NO: 258277 - protein, 104 aa, Glycine max
  Clone ID: PAT_MRT3847_75248C.1.pep
TVQIKSLRLPMKFGSHRGFAFVEYVTQQEAKNAREALASTHLYGRHLLIEHAKEDETLEELRAKTAAQFSDEQNGFQSAMKLSKKRNQVDILDEGNMKFGRMAD

SEQ ID NO: 258278 - protein, 76 aa, Glycine max
  Clone ID: PAT_MRT3847_75249C.1.pep
QRITVVAFRTHDGQRHTMDLQSLAWIGNISRLGYMCIWTMSMTCGTIVRLIESMNLGELLIVQPVCFRDNFFLPRA

SEQ ID NO: 258279 - protein, 57 aa, Glycine max
  Clone ID: PAT_MRT3847_7524C.1.pep
CESPSRIPSKLLKLTFSSRILCKILIALYTLQYLPIFFIFEFLILQWLLMLNYFDFD

SEQ ID NO: 258280 - protein, 126 aa, Glycine max
  Clone ID: PAT_MRT3847_75250C.1.pep
SLFTIHITKNQCFPNRSGQKFRITYKNLIKNMYLIKSHNNTHKCERSKKWVKLKVKSIKPTIPEINKGEKKKRTEAFPELRCAGIDNHGGLPCKANGFRIHLGSQINNFHICPSPQTGAVGVPKNN

SEQ ID NO: 258281 - protein, 197 aa, Glycine max
  unsure (1)..(197): unsure at all Xaa locations
  Clone ID: PAT_MRT3847_75251C.1.pep
TWALSMLLNNPPCLKKVKXELDEHVGKERLVNESDINKISLPSSWVKETLRLYPAGPFSGPREFTENCTLGGYKIEAGTRFMLNIWKLHRDPRVWSNPLEFQPERFLNTHKNVDVKGQHFELLPFGGGRRSCPGISFGLQMSHLALASFLQAFEITTPSNAQVDMSATFGLTNMKTTPLEVLVRPVLSHQLLFVDEA

SEQ ID NO: 258282 - protein, 75 aa, Glycine max
  Clone ID: PAT_MRT3847_75252C.1.pep
KKIRWGSSSSKNFLPQIIRCWKKEPKIFLLNPVKCSNLNALKIFFLKGKLKKVKKIFPKKIGSIDAGPLLMAPGS

SEQ ID NO: 258283 - protein, 52 aa, Glycine max
  Clone ID: PAT_MRT3847_75253C.1.pep
HLKLRIQIYTQIKRYYSFCIQIDNCNGSNTIGLAIQSQNQKPMCVYSKSQFS

SEQ ID NO: 258284 - protein, 85 aa, Glycine max
  Clone ID: PAT_MRT3847_75254C.1.pep
GKMSQTSTVLPAFHSIKSLPPEFNPVLVEKHGDVKFRHTNPIGSNGLENGALVAEISKEVNCRAGGMDLFDEDSPYGGKGRSLKD

SEQ ID NO: 258285 - protein, 124 aa, Glycine max
  Clone ID: PAT_MRT3847_75255C.1.pep
NSARASRSINKTKTTMSANPTTTPTPTPTLTSTPTTPTMLPYLQGRVVTRLQQFVLLPEAAQREILDLEVYLTNHQTVIFSQHHVKLVKSVRGVRVKELVDRIDAWLQDKQTPTSDTPTTNAAR

SEQ ID NO: 258286 - protein, 50 aa, Glycine max
  Clone ID: PAT_MRT3847_75256C.1.pep
SGERIHGKMEAHVYNDDIEITATLLDAMNIKVIALAGALQTVNDHQSTSK

SEQ ID NO: 258287 - protein, 84 aa, Glycine max
  Clone ID: PAT_MRT3847_75257C.1.pep
DIHRVKVHRGITILSHLLSVNFYFLFCRTIDKEADVLKNILTTFEASSGLVVNLLSIWVVIKDGITLLGDGNRMNIWRDQVAYM

SEQ ID NO: 258288 - protein, 65 aa, Glycine max
  Clone ID: PAT_MRT3847_75258C.1.pep
NANACISHRVSPFLPIPPSQNLVIINKPYLKSRFCSSFPDPNIRIYYLAFNNTCVDQFPFSVHLV

SEQ ID NO: 258289 - protein, 73 aa, Glycine max
  unsure (1)..(73): unsure at all Xaa locations
  Clone ID: PAT_MRT3847_75259C.1.pep
DLRVCHGISXQGFIVGEYVPNLTLYKCNHIIGNCRNIRDFSSHIDGPPLMMSLDSSMLMLLHFVLLSFEMLLK

SEQ ID NO: 258290 - protein, 75 aa, Glycine max
  Clone ID: PAT_MRT3847_7525C.1.pep
VKHQQETNGEYRSFCPGGGRHDALCRPIGHKFPELQRCPYTYLRQAHYCAIMNTLDSHSLNRKFWHSRISRHRPT

SEQ ID NO: 258291 - protein, 67 aa, Glycine max
  Clone ID: PAT_MRT3847_75260C.1.pep
HLASYTINTLERFLCAKRPLLPSQVCHWVFSTRHFTPYPNKASTAPLLNCCVKKSQLSTFMRRTFSN

SEQ ID NO: 258292 - protein, 186 aa, Glycine max
  Clone ID: PAT_MRT3847_75261C.1.pep
QFAFTLNFTLQIMPSGARKRKAAKKNKAKKNSINPSTNKPKGNGDLKSRDEKGSDGGEGNSPAFREHGDHRNPFNDGSEDLEERGPSAAQPHAPDVVGSLEEVVSDVKIDQVLGGKEDGVVLVERGLKSEECFESKNASFENGNGWHTPKGQSLAEKKLKDGNCNSVEEAAASHKVVSPLILPLQK

SEQ ID NO: 258293 - protein, 98 aa, Glycine max
  Clone ID: PAT_MRT3847_75262C.1.pep
LHSYFTLQIMPSGARKRKAAKKNKAKKNSINPSTNKPKGNGDLKSRDEKGSDGGEGNSPAFREHGDHRNPFNDGSEDLEERGHQLLNHMLLMSSGPWK

SEQ ID NO: 258294 - protein, 66 aa, Glycine max
  Clone ID: PAT_MRT3847_75263C.1.pep
VSEELLEGKELEFYKWEGDVPELLKDVHDKLNMLSEHWSLDDKNRCLKETTKAFRYMGQIVRLIVS

SEQ ID NO: 258295 - protein, 48 aa, Glycine max
  Clone ID: PAT_MRT3847_75264C.1.pep
PIYGHIVKSVNFLVLLRQKVTLRLKCRLIPKKFSLPSKQVVFFQNSND

SEQ ID NO: 258296 - protein, 100 aa, Glycine max
  Clone ID: PAT_MRT3847_75265C.1.pep
LGILLELEPIRLEKKTHNSDNIIPSHRTLHLGMVLGQQKIDLTPPSSCLQLRRRSLTSLHLRRILTCVQERGQHHDRHGHQAGAEPPRSVLLRGGAGVHD

SEQ ID NO: 258297 - protein, 76 aa, Glycine max
  Clone ID: PAT_MRT3847_75266C.1.pep
HPSLLLPHDHSRVQTLVKTTERYNANFSTKSTLLRCFLCSFPHSIFHSAQRFSGRYEVTRSTCCSIIISARNPQRR

SEQ ID NO: 258298 - protein, 58 aa, Glycine max
  Clone ID: PAT_MRT3847_75267C.1.pep
SEFHTLLVDAVLWHCFTSCCSSRRSYSDEGDKTLRRSFCESCNNTIKYTYLCDLVIIL

SEQ ID NO: 258299 - protein, 48 aa, Glycine max
  Clone ID: PAT_MRT3847_75268C.1.pep
LLRSVVACFSKCSYTDIKQVSNVQRGSSDGSFSNGGSDQKSVGRLFVS

SEQ ID NO: 258300 - protein, 144 aa, Glycine max
  Clone ID: PAT_MRT3847_75269C.1.pep
HEERERERERERERERERERERERETHAEFDTRQDDDNNAPHLCTCAGHSRYAYGELNTETDTGGATGVLSVYRGPEFSLLLETRSLSQDIWRRPSEMHVSRIVSSSVADTRAALSAIEPTFQNLREGLKSSDADTQREATADL

SEQ ID NO: 258301 - protein, 37 aa, Glycine max
  Clone ID: PAT_MRT3847_75270C.1.pep
NVPFLKNKIKLGESQLLLFPTVMLSRVVLAQFLEITV

SEQ ID NO: 258302 - protein, 152 aa, Glycine max
  Clone ID: PAT_MRT3847_75271C.1.pep
ETKLSEKYPRLYTISTQQHQLIQQLGVFNEEGWEWQFQWRSPLFDNKIELAIAFLQDIEGTTIRSDSQDHWIWVAEPSGCYSARSAYRVISEGIPTEGQDGGFKELWKLKVPPKVAMFVWRLIKDRLPTRDNLKKKRVELQDYLCPFCRLED

SEQ ID NO: 258303 - protein, 107 aa, Glycine max
  Clone ID: PAT_MRT3847_75272C.1.pep
AKERLIECQGLRLDHDLTANYVYNYAGETAHMSVDYAGDTAQNTKDYAGDTAHKTMDYASDTCTYVKGLMFPGDAVQKSLAHVRDAAHKTSEYNGDAAHNTIDYTTD

SEQ ID NO: 258304 - protein, 67 aa, Glycine max
  Clone ID: PAT_MRT3847_75273C.1.pep
VLFVYTSLYDKVTRHPKSSQIGPSFDNNRIEKMKPLSSNLHGMHETTKENDINSPGTRTPKFLEANR

SEQ ID NO: 258305 - protein, 385 aa, Glycine max
  Clone ID: PAT_MRT3847_75274C.1.pep
MPESYCVKESKPCVGWVEKYLDDCLCNLKDKISFGFGFISLVCWGVAEIPQIITNFRAKSSHGVSLAFLLTWVAGDIFNLLGCHLELATLPTQYYTALLYTITTIVLVLQSFYYDYIYKWGKPLRKINIDEAHEEEEKKPLRQKPGRDSGIPIQNDGPKETPRRDYYYRSARSLAANDTPPFGTYLRAAKSVPSAMEMNNDSSSDDEAPPLSSTKPVTQPRPIPRSVPASYGTFLAASMNLPRQGNALMEGYKRFNGRQLLSQEHNMHSALGQWLGWLMAVIYMGGRLPQIWLNIKRGSVEGLNPLMFIFALIANATYVGSILVRTIEWESIRANMPWLLDAIVCVALDLFIILQYANYRYVRKKTGSDDADYGDYKEASKTFVS

SEQ ID NO: 258306 - protein, 40 aa, Glycine max
  Clone ID: PAT_MRT3847_75275C.1.pep
LLLTLTVPRGQLDRYDVLKQRRSPYETHVNNPDHTCSNRS

SEQ ID NO: 258307 - protein, 93 aa, Glycine max
  Clone ID: PAT_MRT3847_75276C.1.pep
VNSLVNWRGINIKTFFLFIFFNYFSQRKRHFYLRGRRVVIIGGGAQIPQFLSSICDLGVEIAHRGKFGFEGSIGKGNLRGWRQKQSITFIKRG

SEQ ID NO: 258308 - protein, 60 aa, Glycine max
  Clone ID: PAT_MRT3847_75277C.1.pep
KTYLHCICKRSILELVLNVTCQCVSYFWLVAQSIHPLKSYIKSCVNCRFFDLFRFNDFIS

SEQ ID NO: 258309 - protein, 46 aa, Glycine max
  Clone ID: PAT_MRT3847_75278C.1.pep
RMDASFHHISTIDTSLWEGPLVYTEYQISCASGLMATNENLAPHVL

SEQ ID NO: 258310 - protein, 106 aa, Glycine max
  Clone ID: PAT_MRT3847_75279C.1.pep
MDGAELSNIKKWIVMYPVYINSKKTMAEGRRIGLAKACENPTCAEIGDCCSYLKLPFAIEIDKAYPRDFMQRGRVRVLLKKEDGTLFNSTISSKNKILNDKWVLLT

SEQ ID NO: 258311 - protein, 116 aa, Glycine max
  Clone ID: PAT_MRT3847_7527C.1.pep
MGGETVNGTWLSAFWSLSRKSASDGKEVIGVLAFEVAGLMSKVVNLWRSLSDREIMNTKAWIMKSVGVKMLMSDDDYFLMDLALCEILNNFESLAWSVARLSKKCKGPVYHGYEHF

SEQ ID NO: 258312 - protein, 225 aa, Glycine max
  unsure (1)..(225): unsure at all Xaa locations
  Clone ID: PAT_MRT3847_75280C.1.pep
RFGQIEXGPFGFAPPPGKRNAVCLFVCRSPESARRALEEPHKDFEGHILHCQKAIDGPKAGKLQQHGNVNAQAQRAQFQRNGSVGTNAAAGYGGGAALQPGHLMAPAGPGIGFNQSAAAAQAALNPAMAQALTALLASQGTLGLTNLLGSIGTSAAVNPGVPSAGAAVQGGYSAQPNISPGVVGGYGNQVGLQVAYPNQNQNQQIGQGGSGRGQYGGGSAPYMGH

SEQ ID NO: 258313 - protein, 98 aa, Glycine max
  Clone ID: PAT_MRT3847_75281C.1.pep
AKPILHPKSNSQTLTHKYTLLGSPLNLLAVTTFFFYGQNCSYEVNSHKNNQSLINPKTKKKRGKSICIFFNSDIPDHEFLSNQTAYQLDLASEILENP

SEQ ID NO: 258314 - protein, 45 aa, Glycine max
  Clone ID: PAT_MRT3847_75282C.1.pep
TISHYKLRRRKKHLSPSKNKILNYLHHPHSLLLTNLISKLAPIKQ

SEQ ID NO: 258315 - protein, 90 aa, Glycine max
  unsure (1)..(90): unsure at all Xaa locations
  Clone ID: PAT_MRT3847_75283C.1.pep
KWVNHPVLQCAHCDTVNFPGTDAGIVVMDXDRMVSRSGRRMFERDYRAVTKHVSPLCEGTPLNVMVSAITRSEVDILVKNLAKSPEVLES

SEQ ID NO: 258316 - protein, 74 aa, Glycine max
  Clone ID: PAT_MRT3847_75284C.1.pep
FLQSWSRRMLHFLSQLLVCVVASSSVTIWHAKRFSNKIDGLEEPSMTSKGKLNGCIVVVDHERSASDLSFSPRA

SEQ ID NO: 258317 - protein, 148 aa, Glycine max
  Clone ID: PAT_MRT3847_75285C.1.pep
PWSTPRVRIRLREDDRREPVDRYTRPEFTENGPLAIDSGRHPILESIHNDFVANNIFLTEASNMAIVMGPNMSGKSTYLQQVCLIVILAQVGCYVPARFSTVRVVDRMFTRMGAVDNLESNSSTFMTEMKETAFIMQNVSQRNLIVMD

SEQ ID NO: 258318 - protein, 56 aa, Glycine max
  unsure (1)..(56): unsure at all Xaa locations
  Clone ID: PAT_MRT3847_75286C.1.pep
MLYNYHILLTFLLHLLLPQRGHQQFWESQNFXTXFSSDVNGGTREDLFWSDVAVQT

SEQ ID NO: 258319 - protein, 138 aa, Glycine max
  unsure (1)..(138): unsure at all Xaa locations
  Clone ID: PAT_MRT3847_75287C.1.pep
LVACARHSPFLLSVDLPSRLLVDLDGVAVPRVPDPCPWVLSVSSCRAYWLVVADSLGRCGGSGLSLRVSPSGSAMLCXCLRLLMLLRGLLLXRFRFQXLWLLVAGGVXRCFPLNLTLLXXPXPRFRNXASFFSRAXVR

SEQ ID NO: 258320 - protein, 64 aa, Glycine max
  Clone ID: PAT_MRT3847_75288C.1.pep
IWGIKWVYLTGGYFCLGPLICCFFLKCKWVFLMKKCGGLFVFRDLGHEGYKILPRSPIYMKIYR

SEQ ID NO: 258321 - protein, 247 aa, Glycine max
  unsure (1)..(247): unsure at all Xaa locations
  Clone ID: PAT_MRT3847_75289C.1.pep
SRFPDIRKTNGNSVIELASTPTKISGVHYVQGVVIFHDVFDNEYDVGGSQIRIEGVYIWPFRQLRMVANSGKEGDLNQNEDYILSNPYHLLGVFSSQVLQDSSRDKMLRRKHSLIHDMEKHCNIEIAAQISHLPSQNNEGEHDHFHLEGLMESPSADDDGDCFSPLLLNATSVKIEVYYNKAVNYTLMVTFVSFLQVLLLIRQMEHSSTQSGAAKVSILMIGQQAIMDAYLCLLHLTAGIXLVESLF

SEQ ID NO: 258322 - protein, 75 aa, Glycine max
  Clone ID: PAT_MRT3847_7528C.1.pep
HMLHHYIQQVYPGLISPYTHPYNSPHSFPSTNTTYLPIITSLIPPNRLDFNISSIQNTYLTNILHLKPIITQIHH

SEQ ID NO: 258323 - protein, 60 aa, Glycine max
  Clone ID: PAT_MRT3847_75290C.1.pep
IHLQIMRSAQPEAHYSTRTSHYYRQILYQHSISHLRWSLDTLPTGSRHRSGLLVSHIACS

SEQ ID NO: 258324 - protein, 80 aa, Glycine max
  Clone ID: PAT_MRT3847_75291C.1.pep
MKDYKGDLFYPVTAMDSSSYEYYRSASYTDADIVLTVNDSHIADRILRPEIMGDLGTATPDYYGCPTIDDCYYHRMRRRE

SEQ ID NO: 258325 - protein, 60 aa, Glycine max
  Clone ID: PAT_MRT3847_75292C.1.pep
QPPLFSQLPHSSSPLFHGCGHSENVQQQQQHGRYGNDDANGKVPRIIILRRPFLYHHTHL

SEQ ID NO: 258326 - protein, 66 aa, Glycine max
  Clone ID: PAT_MRT3847_75293C.1.pep
DYALPEYRDVEAAHRYSQWFSLNGTCQLGCLGSQCCSPAVLKNMIRSASEGRYIGLAVVFCFSRRI

SEQ ID NO: 258327 - protein, 56 aa, Glycine max
  Clone ID: PAT_MRT3847_75294C.1.pep
DDDSELSVGPAPPAIDSDAELSNESQRLEDATSIIEAEANRHHDVLGANHNMTNDN

SEQ ID NO: 258328 - protein, 58 aa, Glycine max
  Clone ID: PAT_MRT3847_75295C.1.pep
SRAKIRQLVHHISVVKLEKVNKTRFLLVASSMSERVRKQRRCPMFTGIGGDVYRARAR

SEQ ID NO: 258329 - protein, 60 aa, Glycine max
  unsure (1)..(60): unsure at all Xaa locations
  Clone ID: PAT_MRT3847_75296C.1.pep
VXAXGNLNFPXTRXTLAXAGNPGXFPLIKLKXRQXKKALGRKIHWVPLSLVXPSLVENFX

SEQ ID NO: 258330 - protein, 47 aa, Glycine max
  Clone ID: PAT_MRT3847_75297C.1.pep
RNFVTLYIEAGHTKGQKPNGLNTNAWLNLLYLTQRTLLRAILLAIKM

SEQ ID NO: 258331 - protein, 214 aa, Glycine max
  unsure (1)..(214): unsure at all Xaa locations
  Clone ID: PAT_MRT3847_75298C.1.pep
QVTNHSKERPDVWVDSPEKSIILSITSDIRTIESEVFSAPYSLRFPRIDRVRYDKAWYECLDVQSFIELVHSSNGTTQRDTEYGSKQDSKPKRSKSSTRGEKKNLSIVPSHLIQTDVSSIKGGSLIFSNMDVLFXNVPLSHSLESLHKIIAENGGTFSMNLNNSVTHCVAADSKGFKFEAAKRHGDIIHILGIDCXDXKKLVCLQPKYFLFYLN

SEQ ID NO: 258332 - protein, 85 aa, Glycine max
  Clone ID: PAT_MRT3847_75299C.1.pep
GGSTWVLHSSGRGFPLCQFPSSTTSLSRFSLSLKPFSSFSLPAFSTSCVDAAFESLLIFRRVILLSCFHFCIQLSSLCMFNVYNG

SEQ ID NO: 258333 - protein, 219 aa, Glycine max
  unsure (1)..(219): unsure at all Xaa locations
  Clone ID: PAT_MRT3847_7529C.1.pep
QLLSSLNPPHVWNQPSPVSASPYLQTTNPPHHISCTTLSQHQTTSNLNSTLSPLNQTQTPNEESQSNSNNLYTCSSLPANANALPPCSKTSLSTYPMVTRSKNGIFKPKQVHLATKFPFPSLVEPTCVTQAMKHLEWKKTMLEELNALIANGTWTLVPSXLNLNVIGNKWDFRLKHNTDGSISRHTACLVAKGYHQRCGIDYHETFSPMVKPQTITLVL

SEQ ID NO: 258334 - protein, 86 aa, Glycine max
  Clone ID: PAT_MRT3847_752C.1.pep
ASAQLIEALFARAFDNPALREGNDGAVLPAPPAGHRLVLATDAHVISPLFFPGGDIGALSVHGTVNDVAMMGAQPLYLSASFILEE

SEQ ID NO: 258335 - protein, 142 aa, Glycine max
  Clone ID: PAT_MRT3847_75300C.1.pep
YNREKSPHGREKSAYMRNWDRSRQHDHKLRSPMRAEQSPPDRSSHHDRRDCTPNLAEASPLQRARKDCRQESSSKTLSSEKHDSQNSCKDREDKQIQRESNCSSTESQNEKSVQVTIKSVEKDICSEPLKEQHSCSPTVSHK

SEQ ID NO: 258336 - protein, 787 aa, Glycine max
  unsure (1)..(787): unsure at all Xaa locations
  Clone ID: PAT_MRT3847_75301C.1.pep
LFRAETPYLVLAVQGEVLQSVTGLGGAEPEAGVDDAGGGDAVALGVATGGGEIYLPEVDLLDLEPCEGMEFESEEAAKAFYNSYARRVGFSTRVSSSRRSRRDGTIIQRQFVCAKVGXVFPKTHHSFCKGHMRPRTITRVGCKASLSVKMQDSGKWIVSGFVREHNHELVPPDQVHCLRSHRQISGAAKTLIDTLQAAGMGPRRIMSALIKEYGGISKVGFTEVDCRNYMRNNRLRSLEGDIQLVLDYLRQMHAENPNFFYAVQGDEDQSITNVFWADPKARMNYTFFGDTVTFDTTYRSNRYRLPFAPFTGVNHHGQPVLFGCAFLINESEASFVWLFKTWLMAMSGRPPVSITTDHDSVIRSAIIQVFPETRHRFCKWHIFKKCQEKLSHIFLQXRYNTLRHEALKFVDEGARSAETYDVAIDXYKKLQKEFLREYKMRAKIPISNGKVRSHVLNDESHANYTSGCQEASLSQHMSKDDLDKFIRKLMNELECANRKCEIYRSNLLSVLKAVEDHKPELSVKVENIKISMKDGIXRLWIINIETDTSKADDDGEVITYHVAKYGEDHKGYCVKFNVLEMKATCSCQMCEFSGLLCRHVLAVFRVTNVLTLPSHYILKRWTRNAKSNVILEEHACDVYTYYLESHIVRYNTLRHEAFKFVDEGARSAETYDVAMDALQEAAKRVSQGMQNEGKIPINNGKVRSHVLNDESHANYTSGCQEESLSQHMSKDDLDKNIRKLMNELECANRKCEIYRSNLLSVLKAVEDHKLELSVKVENIKISMKDGI

SEQ ID NO: 258337 - protein, 486 aa, Glycine max
  Clone ID: PAT_MRT3847_75302C.1.pep
ARNSARVAFFTGVNHHGQPVLFGCAFLINESEASFVWLFKTWLMAMSGCPPVSITTDHDSAIRSAIIQVFPETRHRFCKWHIFKKCQEKLSHIFLQYPNFEAEFHKCVNLTESTEEFKSCWSTLVDKYDLRVHEWLQAIYSSCRQWVPVYLRDTFFAEMSITQRSDSMNSYFDGYINASTNLSQFFKLYEKALESRNEKEVRADYDTMNTLPVLRTPSPMEKQASELYTRKIFMRFQEELVGTLALMASKADDDGEVITYHVAKFGEDHKGYCVKFNVLEMKATCSCQMFEFSGLLCRHVLAVFRVTNVLTLPSHYILKRWTRNAKSNVILEEHACDVYTYYLESHTVRYNTLRHEALKFVDEGARSAETYDVAIDALQEAAKRVSQGIQNEGKIPISNGKVRSHVLNDESHANYTSGCQEASLSQHMSKDDLDNIRKLMNELECANRKCEIYRSNLLSVLKAVEDHKLELSVKVENIKISMKDGI

SEQ ID NO: 258338 - protein, 89 aa, Glycine max
  Clone ID: PAT_MRT3847_75303C.1.pep
YQSFGSGYRFYPIQIFFFVLCPGLCFCPCSIISVLIYILFHSCLHLVLCYMRSCSCSCHVLVLVSCVFYTLCQKKSCRTFEKTTPVFDL

SEQ ID NO: 258339 - protein, 101 aa, Glycine max
  Clone ID: PAT_MRT3847_75304C.1.pep
REAHEVYLAALTVRRGFGPQTHAQLSEFYWPPTPRLWWFYPSESWYSETYPMMCWVHRCFSTRALVFIPRDPISVVNPCTKKGLMNFKSGCKGPYVLAMCL

SEQ ID NO: 258340 - protein, 65 aa, Glycine max
  Clone ID: PAT_MRT3847_75305C.1.pep
PHILNYNYSIYSTKYIQLYTCDILTTLCQSIIYLTDPYYNINITHMIIFLSILNLIKTIFSSNST

SEQ ID NO: 258341 - protein, 56 aa, Glycine max
  Clone ID: PAT_MRT3847_75306C.1.pep
TKSSDACPQTPCTRTRTQTRIGCSCETMHAYTQLGAWSFGEITDQGSMLTTEKISA

SEQ ID NO: 258342 - protein, 86 aa, Glycine max
  Clone ID: PAT_MRT3847_75307C.1.pep
LQVHGLGISRSDFTRSETTTQNHGQGLIHFGQNFRTLPQSRRRRSKTLNMMGSKNEGKHTSVSNTKCRGESSSTKTLKWYKKKICN

SEQ ID NO: 258343 - protein, 58 aa, Glycine max
  Clone ID: PAT_MRT3847_75308C.1.pep
SSSEAYIVNLIYQSDVIIHSFMLYALKSSQTERSNNYMGVCKIYNLSFTEQYNVVQVP

SEQ ID NO: 258344 - protein, 97 aa, Glycine max
  Clone ID: PAT_MRT3847_75309C.1.pep
NAHFRRLGTSARALGQAQSYSNHLLLFGHDLLASIYCLLWVMIDPLTCDSNHLSSESLGAYNMEHSCCTIQFGGHSPFGTQIHKGACPYITRIARLS

SEQ ID NO: 258345 - protein, 94 aa, Glycine max
  Clone ID: PAT_MRT3847_7530C.1.pep
GTRGAFNQALPPGVPARRNRAGVKWGPSSGVKKPREPFHLDLPETWAPRATGGGFTQEQGGFKMHPGPWAPTFGGKEVPPGDPKKPALKKAQGL

SEQ ID NO: 258346 - protein, 85 aa, Glycine max
  Clone ID: PAT_MRT3847_75310C.1.pep
LCYTRGRSLCMNAIYAAFFRVLALFWRYAYMVFPALSPDSVYTSIVAFELADAVILSRATECNESVSRNRKSAECAKRLSPSVGR

SEQ ID NO: 258347 - protein, 63 aa, Glycine max
  Clone ID: PAT_MRT3847_75311C.1.pep
MSNRGRGNSAGDKFRMSLGLPVAATVNCSDNTWAKNLYIISVKGIKGRLNRLPSAYISYIVIA

SEQ ID NO: 258348 - protein, 69 aa, Glycine max
  Clone ID: PAT_MRT3847_75312C.1.pep
GGTMAGRTAKARGWESGGSRNPGPNSRPAPGAHYCFLPGTEDQHFLAKKFHPLKPINGFPKEAKEGASG

SEQ ID NO: 258349 - protein, 70 aa, Glycine max
  Clone ID: PAT_MRT3847_75313C.1.pep
TETLILEILSFLARLFIKHSILLHYIVKILTKSIIIIMRQLYNYYIYICIYSYITFFILICLSLVLYLIM

SEQ ID NO: 258350 - protein, 61 aa, Glycine max
  Clone ID: PAT_MRT3847_75314C.1.pep
MATCIYMKGLDLFIATIFFTCQFHPFDIFPFRMITDFGVLSPELKCACLMLSIETHNIFVF

SEQ ID NO: 258351 - protein, 211 aa, Glycine max
  unsure (1)..(211): unsure at all Xaa locations
  Clone ID: PAT_MRT3847_75315C.1.pep
MHPLVFMVFMLLALYSPSSISTREAGEGLRGFSIDLIHRDSPLSPFYNPSLTPSERITNAALRSGSRLNRVSHFLDENNLPESLLIPENGEYLMTLYIGTPPVERLAIADTGSDLIWVQCSPCQNCXPQDTPLFEPLKSSTFKAATCDSQPCTSVPPSQRQCGKVGQCIYSYSYGDKSFTXGVVGTETLSFGSPGDAQTVSFPSSIFGWGV

SEQ ID NO: 258352 - protein, 356 aa, Glycine max
  unsure (1)..(356): unsure at all Xaa locations
  Clone ID: PAT_MRT3847_75316C.1.pep
MNSTPANLESSLSVPSVQELAFQRPEKVPARYIRDQDGDGIIATYPSHPSLRVPFIDMAKLVNADTHQKEELRKLHLACKDWGVFQLVNHGLSNSSLKNMGNQVKRFFELPLQEKKRWAQRPGTLEGYGQAYVTSEDQXLDVYCMSESMINDVFCASFSMYHSYPPAFWDTLVADSVGRAQGSLSVVKFLTMSLGIQDKEISESFREGLYDIRMNCYPPCPEPERVLGIAPHADNSGITLLLDCADFPGLQFLKDKKWVNVEPIEGAIVVNIGQIIEVMSNGIYKAPEHRAVVNKLKERFSIVTFCYPSPHMDIGPADKLTGEGKVAVFKKLTHAEYFRKFFNRDLDESFIDSLRV

SEQ ID NO: 258353 - protein, 50 aa, Glycine max
  Clone ID: PAT_MRT3847_75317C.1.pep
RLGRAMTRFMLLLDSFEGGSQAMVWGEMSARFKAIPAAWGPGDSLWDDLD

SEQ ID NO: 258354 - protein, 57 aa, Glycine max
  Clone ID: PAT_MRT3847_75318C.1.pep
SAHSADLYHELLHKSADVHTRVNVLFHLYVSSHLSRYLMGVSCDQLTPAIVSRVSPN

SEQ ID NO: 258355 - protein, 56 aa, Glycine max
  Clone ID: PAT_MRT3847_75319C.1.pep
IQARAYARAMKATLFFSSATHNINVNKIFKFIMAKLFNLPWTVERNLRVGEPIIDF

SEQ ID NO: 258356 - protein, 116 aa, Glycine max
  Clone ID: PAT_MRT3847_7531C.1.pep
MKTKTPPSLLSLTVDSAVLNLSDISDLSHVPDHILLDLFLRILKAGKLTEKMSQAVINDNEVDIVIGALHSDLTTFMNEWRPIFSRFHLIIVKDPDLKEELQIPVGFSVDVYTKSQ

SEQ ID NO: 258357 - protein, 101 aa, Glycine max
  Clone ID: PAT_MRT3847_75320C.1.pep
FRLHSFSQDGLKPAGGGLPVRRHHEGDMDHLHPLDCQNAPGYLSLTLGRMLILRCVYIYILDGLLNEPVFKVKCSPIPMVWSKTLFICTVFPLLVLALTVT

SEQ ID NO: 258358 - protein, 183 aa, Glycine max
  unsure (1)..(183): unsure at all Xaa locations
  Clone ID: PAT_MRT3847_75321C.1.pep
PAIEELVAGIGLSPLIACSVDTGDRGLLSSFVERWHWXTSSFHLPVGELTITLDDVSSLLHLPMVGDLHAFEPLHVDDAVEMLMDLLMVFTESARAETAQCRGPYVHLQWVRDIYECRCQAGHWTAAARAYLLHLLGCTLFANKSATNVHVVYLEALHDLSMTERYAWGMGALVDMFEKMPPA

SEQ ID NO: 258359 - protein, 487 aa, Glycine max
  unsure (1)..(487): unsure at all Xaa locations
  Clone ID: PAT_MRT3847_75322C.1.pep
SGTAFDGRLDMRMRQAAMSRASDGNHQGDLLYDHFSEKDDFRFDFMADTGRAGNSSYAVARLLAKPFIRTLKDDSELTLPRGNLLLIGGDLAYPNPSAFTYERRLFVPFEYALQPPPWYKAEQIAVNKPEVPFGAQLKQYNGPQCFVIPGNHDWFDGLQTFMRYICHRSWLGGWLMPQKKSYFALQLPKRWWVFGLDLALHGDIDVYQFKFFTELITEKVQEDDSVIIITHEPNWLTDWYWNDVTGKNISHLISDYLRGRCKLRMAGDLHHYMRHSHVKSDGPVHIHHLLVNGCGGAFLHPTHVFSKFNKLDEVSYECKAAYPSFEDSSRIALGNILKFRKKNWQFDFIGGIIYFVLVFSMFXCELNHILQDDTFSGHIKSFLGTVWNGFIYILQHSCVSLAGAILLLIAAYSFVPPKLSRKKRAIIGVLHVSAHLAAALILMLLLEIGVEICIQHKLLATSGLVFLYVEQFVLIQRFVTCFAQVDK

SEQ ID NO: 258360 - protein, 304 aa, Glycine max
  Clone ID: PAT_MRT3847_75323C.1.pep
WSLLSDQIVGVNSKLLQEALQSLERPAKRWKVAELVSAIEAKLINSIQIPEEYFLNGSENKFFRDMQEKGAELMSKGKMAIVFLLNEEERQGSISDSNMIENEAIDTSVLRMFQKVKDHVSVPLILVSSAQQIQSLRNLFPSNNYFAFDSEKVWFLEEEKLPVISSLPKGQNKYKILMKSPWEILQSPVGSGGLISLFSKHSIVDNLIDMGVEYIEFCCPSEKTAGGNSLLLGLINSREAEIGIQIYPKITDLEENFDMIFSMDFVKKLTKQSNKLQFDAIPKAHCFVEKVVKEWVNLSSSTPN

SEQ ID NO: 258361 - protein, 203 aa, Glycine max
  unsure (1)..(203): unsure at all Xaa locations
  Clone ID: PAT_MRT3847_75324C.1.pep
MDSKNVVAFQVVTFCICLAVANSVEFSYPAVFNFGDSNSDTGELAAGMGFLVVPPYGKNYFKTPSGRFCDGRLIVDFLMDAMKLPFLNAYMDSVGLPNFQHGCNFAAAGSTILPATATSISPFGFGVQVFQFLRFRALALQFLQVSRKKFDQYVPTEDYFEKGLYMFDIXQNDLAGAXNSKTLDLILATIPTILLECETGIKK

SEQ ID NO: 258362 - protein, 58 aa, Glycine max
  Clone ID: PAT_MRT3847_75325C.1.pep
SVQNYIQKKKKRGGCRLVSSSTRKLFRARNLKGYKFSQKGAVLKLGEIMAKAVPSEKL

SEQ ID NO: 258363 - protein, 60 aa, Glycine max
  Clone ID: PAT_MRT3847_75326C.1.pep
STKNFFKEYYTCLRFSALLSNLIFYFDFFYTKNISHTLLMTIFYEYILQPYEFGKQTLEL

SEQ ID NO: 258364 - protein, 52 aa, Glycine max
  Clone ID: PAT_MRT3847_75327C.1.pep
ASAKKNISIHMKKVRYNANVHINRSSKISLDAGVLNRASAYDMRGGQFFQSK

SEQ ID NO: 258365 - protein, 73 aa, Glycine max
  Clone ID: PAT_MRT3847_75328C.1.pep
KDANFTYISGASHCGHEVNVTEEQEHPQWTEATVLQLRYSAGKEAHAHMAPKWNKMPAGEAGTAKGSKLGPKI

SEQ ID NO: 258366 - protein, 91 aa, Glycine max
  Clone ID: PAT_MRT3847_75329C.1.pep
IETTLARLVPPTELKGCADAASLLADAIADKRHLLVVADYDCDGATACAVAVRGLRMFGAQIDYLVPNRFEYGYGLTPEIVELAAPLKDPS

SEQ ID NO: 258367 - protein, 92 aa, Glycine max
  Clone ID: PAT_MRT3847_7532C.1.pep
MKTKTPPSLLSLTVDSAVLNLSDISDLSHVPDHILLDLFLRILKAGKLTEKVLRLFIATGKDEVLSFVQALNIQHILTPVLPTRCSEAKSDF

SEQ ID NO: 258368 - protein, 43 aa, Glycine max
  unsure (1)..(43): unsure at all Xaa locations
  Clone ID: PAT_MRT3847_75330C.1.pep
EKLNSLYXIFSLISVYEEAYPNRILSIIFFGNSYIDIVVMCXM

SEQ ID NO: 258369 - protein, 40 aa, Glycine max
  Clone ID: PAT_MRT3847_75331C.1.pep
YITAVFLITCLHCMCDMESDNYSLLTLVKKSVRISQNILR

SEQ ID NO: 258370 - protein, 72 aa, Glycine max
  unsure (1)..(72): unsure at all Xaa locations
  Clone ID: PAT_MRT3847_75332C.1.pep
ELGSFYAEFLNGRAESGGDQLVKDFDFLSNIESANLYVEQPXPDVYSTCMRNISRLLYIEASLNNTDYTFYS

SEQ ID NO: 258371 - protein, 65 aa, Glycine max
  Clone ID: PAT_MRT3847_75333C.1.pep
KSPSYRFWSPVQTAKKRSFWDITTANSPSVTTLNGRKTRSHLISEPTAHPSMLLQPGFARKKGDI

SEQ ID NO: 258372 - protein, 88 aa, Glycine max
  unsure (1)..(88): unsure at all Xaa locations
  Clone ID: PAT_MRT3847_75334C.1.pep
MPDLDGYLEREIQRDYQWIADQCATRNSTLYRECFRNHADRLXSCATDRCFDYTEDGALGLQCIRCGCHQVFHRKVKYLAAAENPATE

SEQ ID NO: 258373 - protein, 65 aa, Glycine max
  Clone ID: PAT_MRT3847_75335C.1.pep
ACWFSADRYCKRRIILKIWLGLIAGLKRYRHHGYSKSVSLSHSCPNCTTDDRVRNCHQAFAARCA

SEQ ID NO: 258374 - protein, 60 aa, Glycine max
  Clone ID: PAT_MRT3847_75336C.1.pep
SSTHCDCMNGTSLLQHTHKEILLCLYSTQENKLSKRKLPKWKNLKTVRCWPSTNLSENCF

SEQ ID NO: 258375 - protein, 132 aa, Glycine max
  Clone ID: PAT_MRT3847_75337C.1.pep
METSSSVSNKTITLEEWNGSSPTKLSKTFTIKASSSSVLITRSGARFTHVWRRLLQAFVPEGFPSSVTADYVPFQIWDLLQGLSTYIRTMLSTQALLSAIGVGEKSATVIGATFQWFLRDLTGMLGGILFTF

SEQ ID NO: 258376 - protein, 165 aa, Glycine max
  unsure (1)..(165): unsure at all Xaa locations
  Clone ID: PAT_MRT3847_75338C.1.pep
MAPQLALTHSSLLYVSPSSASLGFRRNKVLIPQRCTITNEKKNHAITAFAANSLGKSSIQLTPVSTSLFTDKEANLSLRLPISQRFNSKICGQAFKYHASGFRIPANAEKPEWWWRTLSCIPYLIALQMSSTGYYLDPFIQKFPFFRILLFYIPXGVNRLPICFP

SEQ ID NO: 258377 - protein, 62 aa, Glycine max
  Clone ID: PAT_MRT3847_75339C.1.pep
SQAEHLNLQLDLRFIYLNKLNLKTWVCLVLKKFKLLFWFSNLFFRFNLVHLLLKGSIDPVIF

SEQ ID NO: 258378 - protein, 146 aa, Glycine max
  unsure (1)..(146): unsure at all Xaa locations
  Clone ID: PAT_MRT3847_7533C.1.pep
QFRKLFSSSGLDMHEGSRLQTLVMGGGMGSGGGRICGGGRGSHGRDGTDAYYQNMIQANPNNALLLGNYAKFLKEVRGDYPKAEEYLERAILANPGDANVLSLYADLIWQTEKNADRAEGYFDQAVKTXPDDCYVLASYAKFLWDC

SEQ ID NO: 258379 - protein, 134 aa, Glycine max
  unsure (1)..(134): unsure at all Xaa locations
  Clone ID: PAT_MRT3847_75340C.1.pep
AYGGNLSIRAESADSVDPAQREEANDMDLLTXLHEKAEGRDPGINGSVYNAXPSYSGNICFYNFTPTCRLGISKPWLIQTXPALSWPIDDLVGLDNPAETAAMPSPTPLNLYPQAVLDPGAIDQTWRQLQYAYL

SEQ ID NO: 258380 - protein, 495 aa, Glycine max
  Clone ID: PAT_MRT3847_75341C.1.pep
EVEAMEAIRKVNLFESAHVREVKLRKEAEDALTDTVQEQQKLLNASEEIAGELQMTMRNIALLDSRAQEAHRRCDEAADELSLIQESISTLWQERQQIRRQKMEALRWLERWRSRGKVGAAHCNGVIGFAEELPELAEFSLSDLQNATCNFSNSFIIEQGGYVCIYKGEMLGRTVAIKKFHQHNMQGPLEFRQEVQVLGSLQHPHLITLLGVCPEAWSIVYEYLANGTLQDYLPRKSNNSPLTWNTRARMIAEIASALCFLHSFKPETIIHGDLKPETVLLDSSLGCKMCGFGLCRLVSEESLLRPSFRLSTEPKGAFTYTDPEFQRTGILTTKSDIYSFGLIILQLLTGRTPVGLAVLVRNAVSCGKLSSILDSSAGEWPSAVAMQLVELGLQCCQQYHRDRPELTPTLVRELEQLHASEERPVPSFFSCPILQEIMHDPQVAADGFTYEGDAIREWLENGHDTSPMTNLKLSHLFLTPNYALRLAIQDWLCKS

SEQ ID NO: 258381 - protein, 57 aa, Glycine max
  Clone ID: PAT_MRT3847_75342C.1.pep
KIYHLQPMPLNICKDIYILPRIILTEPKDSLTDVLLYTWHIIYWKNYLMEELLFMSS

SEQ ID NO: 258382 - protein, 70 aa, Glycine max
  Clone ID: PAT_MRT3847_75343C.1.pep
CLLRISVYNLLGTSPRGPFTQAHAWVKGFKGHLSKAHPIKGLAPLIKGPFLFFLPHFLFVTQNANPTNYW

SEQ ID NO: 258383 - protein, 160 aa, Glycine max
  Clone ID: PAT_MRT3847_75344C.1.pep
MATKHSLMSLFHRTSSQGEHNPLNMSDEQILDQIYSTHVHSHTKFDVDSLFILVENTLRRSTLIVDNVVQGSKASLEQVEDKIPQANFNSPLYTLKQIYSEMSCKPPGEEIAHITTMAILVKLSNYEWDAKAVLTLAAFAMEYGEFWLLAQHQPTDPIAN

SEQ ID NO: 258384 - protein, 246 aa, Glycine max
  unsure (1)..(246): unsure at all Xaa locations
  Clone ID: PAT_MRT3847_75345C.1.pep
KFETTKYYCTVIDAPGHRDFIKNMITGTSQADCAVLIIDSTTGGFEAGISKDGQXYDEIVKEVSSYLKKVGYNPDKIPFVPISGFEGDNMIERSTNLDWYKGPTLLDALDQISEPKRPSDKPLRLPLQDVYKIGGIGTVPVGRVETGVLKPGMVVTFAPTGLTTEVKSVEMHHEALTEALPGDNVGFNVKNVAVKDLKRGYVASNXKDDPAKEAANFTAQVIIMNHPGQIGKGYAPGLDCHTSHIA

SEQ ID NO: 258385 - protein, 174 aa, Glycine max
  Clone ID: PAT_MRT3847_75346C.1.pep
NLPRRIFWSYVFYLSRFLHLLRTFFVVLRHRRLSFFRLFNNSVLLIMSFLWLEFSQSLQVLAILFYTAVYSVVYAFRLWTEIGLPTKTPLALSFTANFQIVLLGFNLMCHVGVLSLHYLRGGCNGIGAWVFNSVLNAAFLVQFLKSYVKTHCHSQSIVACSSSKREVSMHASKT

SEQ ID NO: 258386 - protein, 176 aa, Glycine max
  unsure (1)..(176): unsure at all Xaa locations
  Clone ID: PAT_MRT3847_75347C.1.pep
GXXLXDAXXQISEXXXXXDKXXRLXXQDVYKIGGIGTVPVGRVETGVLKPGMVVTFAPTGLTTEVKSVEMHHESLTEAHPGDNVGFNVKNVAVKDLKRGYVASNSKDDPAKEAANFTAQVIIMNHPGQIGNGYAPVLDCHTSHIAVKFAELMTKIDRRSGKELDRRWQNCFYLSVF

SEQ ID NO: 258387 - protein, 87 aa, Glycine max
  Clone ID: PAT_MRT3847_75348C.1.pep
QKCNQGFRQPHHFKPQIIKGIFATVDQEPSSGNNSCEMMVETSNFVRKTGYLERKTQESRKEPTFYVNQHPLMNQPARFTSSSGQPW

SEQ ID NO: 258388 - protein, 89 aa, Glycine max
  Clone ID: PAT_MRT3847_75349C.1.pep
MDERYETLKELGSGNFGVARLAKDKETGELVAIKYIERGKKIDANVQREIVNHRSLRHPNIIRFKEVKSLFLYLNCSLSVIFSRYGIGQ

SEQ ID NO: 258389 - protein, 63 aa, Glycine max
  Clone ID: PAT_MRT3847_7534C.1.pep
FVLAPSTSNYWTFLHLICSLYKSFYSLFHISSNYLTQDSTIFSSVTQLSPKCIHSNSKLSSVP

SEQ ID NO: 258390 - protein, 208 aa, Glycine max
  unsure (1)..(208): unsure at all Xaa locations
  Clone ID: PAT_MRT3847_75350C.1.pep
TRNLDWYKGPTLLDALDQISEPKRPSDKPLRLPLQDVYKIGGIGTVPVGRVETGVLKPGMVVTFAPTGLTTEVKSVEMHHESLTEAHPDDNVGFNVKNVAVKDLKRGYITSNSNDNPTKETTNFTAQVIMMNHPNHIRNSYTPILNYHTSHITIKFTKLMSKINKQSXNKLQKEPKCLTNXYTGFIKDMATRTHIIRTFLEDGALRRF

SEQ ID NO: 258391 - protein, 54 aa, Glycine max
  Clone ID: PAT_MRT3847_75351C.1.pep
QKRCLALRFEKFCFFSLFKNVKSTVVSCGGFGARESSHHRSVSGSDMSMCFSDA

SEQ ID NO: 258392 - protein, 244 aa, Glycine max
  unsure (1)..(244): unsure at all Xaa locations
  Clone ID: PAT_MRT3847_75352C.1.pep
MDERYETLKELGSGNFGVARLAKDKETGELVAIKYIERGKKIDANVQREIVNHRSLRHPNIIRSFLQVFLTPTHLAIVLEYAAGGELFERICNAGRLSEDEARFFFQQLISGVSYCHSMQICHRDLKLENTLLDGNPAPRLKICDFGFSKSALLHSQPKSTVGTPAYIAPEVLSRKEYDGKVADVWSCGVTLYVMLVGAYPFEDPEDPKNFRKSIGRIMSVQYAIPDYLRVSXECRHLISRIFV

SEQ ID NO: 258393 - protein, 88 aa, Glycine max
  unsure (1)..(88): unsure at all Xaa locations
  Clone ID: PAT_MRT3847_75353C.1.pep
QTVAVGVIKNVEKKDPTGAKVTKAAQKKXESCGLVHQGMSFLMVTINVGFLLLCLLSSLKSPPSSRNCCSQNWVLDRRWQNCFYLSVF

SEQ ID NO: 258394 - protein, 59 aa, Glycine max
  Clone ID: PAT_MRT3847_75354C.1.pep
TAISRSHSTTISTKNALFPWLTEICVVYLLIIRTMQYQENTHDPIVHNALPIRKNPNPF

SEQ ID NO: 258395 - protein, 187 aa, Glycine max
  Clone ID: PAT_MRT3847_75355C.1.pep
NNIGIITTHQHLFQFPSRVSAHLATLTTTMFSSRGNMAMASPSSIFSVYASMTASIMLLRSVTNDLIPQPFRGYLTNAFRYFFKARCKVLTLTIEEYCSGIARNHVYDAAEVYLSTKITPENERLNISKSPKEKKLTIRLEKGEELVDWFNGIKLNWKLICSESEKSNSFNDHSRNKPTTEKKYFEL

SEQ ID NO: 258396 - protein, 339 aa, Glycine max
  Clone ID: PAT_MRT3847_75356C.1.pep
MEERYETLKELGSGNFGVARLAKDKETGELVAIKYIERGKKIDANVQREIVNHRSLRHPNIIRFKEVFLTPTHLAIVLEYAAGGELFERICNAGRLSEDEARFFFQQLISGVSYCHSMQICHRDLKLENTLLDGNPAPRLKICDFGFSKSALLHSQPKSTVGTPAYIAPEVLSRKEYDGKVADVWSCGVTLYVMLVGAYPFEDPEDPKNFRKSIGRIMSVQYAIPDYVRVSKECRHLISCIFVANPAKRISISEIKQHLWFRKNLPREIIEPERRGYVDHKRTQPSQSVEETMRIIQEARTKIHTGEQAGTGTSDAVHGDEANEEVDINDHYAKYLALN

SEQ ID NO: 258397 - protein, 158 aa, Glycine max
  unsure (1)..(158): unsure at all Xaa locations
  Clone ID: PAT_MRT3847_75357C.1.pep
MGKEKVHISIGVIGHVDSGKSTTTGHLIYKLGGIDKRVIERFEKEAAEMNKRSFKYAWVLDKLKAERERGITVDIALRKFETTKYYCTVIDAPGHRDFIKNMITETFQADCADLIIDSTTAGYEAVISNDAQTLEHALLSFTLGVKQMIXCCNMMDAT

SEQ ID NO: 258398 - protein, 379 aa, Glycine max
  Clone ID: PAT_MRT3847_75358C.1.pep
MQQSHINATPYLWCEQGCPNLQLASFEFWSEICCFGERVDMDERYETLKELGSGNFGVARLAKDKETGELVAIKYIERGNQIDANVQREIVNHRSLRHPNIIRFKEVFLTPTHLAIVLEYAAGGELFERICNFYEFPILQARFFFQQLISGVSYCHSMQICHRDLKLENTLLDGNPAPRLKICDFGFSKSALLHSQPKSTVGTPAYIAPEVLSRKEYDGKVADVWSCGVTLYVMLVGAYPFEDPEDPKNFRKSIGRIMSVQYAIPDYVRVSKECRHLISCIFVANPAKRISISEIKQHLWFRKNLPREIIEAERRGYEETQKDQPSQSVEEIMRIIQEARTKIHTGEQAGTGTSDAVHGDEANEEVDINDHYAKYLALN

SEQ ID NO: 258399 - protein, 176 aa, Glycine max
  Clone ID: PAT_MRT3847_75359C.1.pep
GKEKVHITIVVIGHVDSGKSTTTGHLIYKLGGIDKRVIERYEMEAAEMTTMSYKYAMVLDKLKAERERGITIDIALWKLETTKCYCTDIDAHRHRDFIKNMITETSQADCAVLIIDSTTGGSEAGISKDGQTREHALFSFTLGVTHMIWCCSTMDATTLQYCTVRYDELATDAPAY

SEQ ID NO: 258400 - protein, 89 aa, Glycine max
  unsure (1)..(89): unsure at all Xaa locations
  Clone ID: PAT_MRT3847_7535C.1.pep
ASEILPVSVTNKAPIVSTAAAMLASNLLSLTISGPDINAIVPPXISRKLHAISGSSLPYQTVSQLSSTVLGSSTSIHTETLTPSLVTPG

SEQ ID NO: 258401 - protein, 187 aa, Glycine max
  unsure (1)..(187): unsure at all Xaa locations
  Clone ID: PAT_MRT3847_75360C.1.pep
MDERYETLKELGSGNFGVARLAKDKETGELVAIKYIERGKKIDANVQREIVNHRSLRHPNIIRFKEVFLTPTHLAIVLEYAAGGELFERICNAGRLSEDEARFFFQQLISGVSYCHSMQICHRDLKLENTLLDGNPAPRLKICDFXGFSKSALLHSQPKSTVGTPAYIXAPEVXSRKEYDGKVGRCF

SEQ ID NO: 258402 - protein, 72 aa, Glycine max
  Clone ID: PAT_MRT3847_75361C.1.pep
SGFATGDQEPSFGNNNCEMMGETSNFGRKTSYLEKKTPEGRKETHLYCDQHPLGKQPPRITFFFGETWGTWV

SEQ ID NO: 258403 - protein, 123 aa, Glycine max
  Clone ID: PAT_MRT3847_75362C.1.pep
SCNNFLYLSRFVSCTLRIPLCFSTYYFSSLLKRINISEIKQHLWFRKNLPREIIEAERRGYEETQKDQPSQSVEEIMQIIQEARTKIHTGEQAGTGTSDVVRGDEANEEVDINDHFAKYLTLD

SEQ ID NO: 258404 - protein, 805 aa, Glycine max
  Clone ID: PAT_MRT3847_75363C.1.pep
MATDRLTRVHSLRERLDETLTANRNEILALLSRIEAKGKGILQHHQVIAEFEEIPEENRQKLTDGAFGEVLRSTQEAIVLPPWVALAVRPRPGVWEYLRVNVHALVVEELQPAEYLHFKEELVDGSSNGNFVLELDFEPFNAAFPRPTLNKSIGNGVQFLNRHLSAKLFHDKESLHPLLEFLRLHSVKGKTLMLNDRIQNPDALQHVLRKAEEYLGTVPPETPYSEFEHKFQEIGLERGWGDNAERVLESIQLLLDLLEAPDPCTLETFLGRIPMVFNVVILSPHGYFAQDNVLGYPDTGGQVVYILDQVRALENEMLHRIKQQGLDIVPRILIITRLLPDAVGTTCGQRLEKVFGTEHSHILRVPFRTEKGIVRKWISRFEVWPYLETYTEDVAHELAKELQGKPDLIVGNYSDGNIVASLLAHKLGVTQCTIAHALEKTKYPESDIYWKKLEERYHFSCQFTADLFAMNHTDFIITSTFQEIAGSKDTVGQYESHTAFTLPGLYRVVHGIDVFDPKFNIVSPGADQTIYFPHTETSRRLTSFHPEIEELLYSSVENEEHICVLKDRSKPIIFTMARLDRVKNITGLVEWYGKNAKLRELVNLVVVAGDRRKESKDLEEKAEMKKMYGLIETYKLNGQFRWISSQMNRVRNGELYRVICDTRGAFVQPAVYEAFGLTVVEAMTCGLPTFATCNGGPAEIIVHGKSGFHIDPYHGDRAADLLVDFFEKCKLDPTHWDKISKAGLQRIEEKYTWQIYSQRLLTLTGVYGFWKHVSNLDRRESRRYLEMFYALKYRKLAESVPLAAE

SEQ ID NO: 258405 - protein, 149 aa, Glycine max
  Clone ID: PAT_MRT3847_75364C.1.pep
MLPLSLLKTAQGHPMLVELKNGETYNGHLVNCDTWMNIHLREVICTSKDGDRFWRMPECYIRGNTIKYLRVPDEVIDKVQEETKSRTDRKPPGVGRGRGRGRDDGPGGRQPKGIGRGIDEGGAKGQGGRGRGGPGGKPSGNRGAGRGRG

SEQ ID NO: 258406 - protein, 337 aa, Glycine max
  unsure (1)..(337): unsure at all Xaa locations
  Clone ID: PAT_MRT3847_75365C.1.pep
MEERYEPLKELGAGNFGVARLAKDKKTGELVAVKYIERGKKIDENVQREIINHRSLRHPNIIRFKEVLLTPTHLAIVLEYASGGELFERICTAGRFSEDEARYFFQQLISGVSYCHSMEICHRDLKLENTLLDGNPSPRLKICDFGYSKSALLHSQPKSTVGTPAYIAPEVLSRKEYDGKISDVWSCGVTLYVMLVGAYPFEDPEDPRNFRKTIGRIIGVQYSIPDYVRVSSDCRNLLSRIFVADPAKRINISEIKQYLWFMKNMPKEIIEAERKGFEETKKDQPSQNVEEIMQIIQEARIPGQGSKAGEGGQAGTGTSDVVLXANEEVDINDHFAK

SEQ ID NO: 258407 - protein, 86 aa, Glycine max
  Clone ID: PAT_MRT3847_75366C.1.pep
CEKTTEGRRSGKTTYGSRWHESSFYCNKDHLRETASYTIHTYNGVDSNLMFSIEPPLLYSGAVQLHNFDWLDVGASQFDRRALNAT

SEQ ID NO: 258408 - protein, 64 aa, Glycine max
  Clone ID: PAT_MRT3847_75367C.1.pep
GRQLDLGFQNGPAKRQKRLLNWYFKSKPITIQKRLGIWGDYKSKPLWVFKKIYLASKILIALGF

SEQ ID NO: 258409 - protein, 109 aa, Glycine max
  unsure (1)..(109): unsure at all Xaa locations
  Clone ID: PAT_MRT3847_75368C.1.pep
MTIVAIVLLLTVFVGYSVLHMSMISYYNAHXSRCSTWRTEEELMSMCEQGLVKHGKVCSALREKEKRLQILKDNLRLINELXLAVDRTYQLGLNRFADLTNEEFWANDL

SEQ ID NO: 258410 - protein, 179 aa, Glycine max
  Clone ID: PAT_MRT3847_75369C.1.pep
MARPQQRYRGVRQRHWGSWVSEIRHPLLKTRIWLGTFETAEDAARAYDEAARLMCGPKARTNFPYNPNEPLSSSSKLLSATLTAKLHKCHMASLSLQMSKQKQSQTEPHQGSSSDSGNAIAGTSSDNTGFRWPEEEAQVEVPPAQQQQFQPVLQDDHIEQMIQELLDYGSMELSFVDSA

SEQ ID NO: 258411 - protein, 68 aa, Glycine max
  unsure (1)..(68): unsure at all Xaa locations
  Clone ID: PAT_MRT3847_7536C.1.pep
RQTVHNLKXMKFFVSPVVQSSVEVKNAQDLPKLVEGLKRLSKSDPCVLTMINEFGEHVVAGAGELHLE

SEQ ID NO: 258412 - protein, 54 aa, Glycine max
  Clone ID: PAT_MRT3847_75370C.1.pep
YITCCGFLPHHCASCEIKMEGLCGDCFNMILHMLCCRNLEHSVCSKCIGMDLDS

SEQ ID NO: 258413 - protein, 52 aa, Glycine max
  Clone ID: PAT_MRT3847_75371C.1.pep
IKKRVFLIPTPYIKNKWMIFMCIGTGSMCKVFRKVCHIFKSLNHMYRFIITK

SEQ ID NO: 258414 - protein, 72 aa, Glycine max
  unsure (1)..(72): unsure at all Xaa locations
  Clone ID: PAT_MRT3847_75372C.1.pep
GAGVATAYGNGASTETKKSPFTVEVGMVQKHGGGRTMEDVNEERRRIAEXEVGACAIMCRERGTPRCPTLLF

SEQ ID NO: 258415 - protein, 64 aa, Glycine max
  Clone ID: PAT_MRT3847_75373C.1.pep
SCYINCKKKKKWPVARCSHLMVSRRVRCTQPYPCKQRLFPRFEPVTFKSQGSNLSAVPKLALIC

SEQ ID NO: 258416 - protein, 105 aa, Glycine max
  Clone ID: PAT_MRT3847_75374C.1.pep
SAHASAHASAHASGLFGSLSLHSAGLVLVAFLFIFSLKDSPLCLCLCASGSPPASFPCTGFRQLIILWLSISTHNPFCRPLVPSAQPSLLSAFRAMVHIRIKGSN

SEQ ID NO: 258417 - protein, 70 aa, Glycine max
  unsure (1)..(70): unsure at all Xaa locations
  Clone ID: PAT_MRT3847_75375C.1.pep
MKRQSSTQTRKPRTPTXLKDVYTKLKAIKLKCQTPCASIKPFAQYAVXLYIHISGYPCNAKWILSDKHTF

SEQ ID NO: 258418 - protein, 67 aa, Glycine max
  unsure (1)..(67): unsure at all Xaa locations
  Clone ID: PAT_MRT3847_75376C.1.pep
MQAMPDLNVTQLTRGHDNDTYTMDLLLEHPSYETVQPGLYMASALREEDTTVMXEELTIDMNVVKNI

SEQ ID NO: 258419 - protein, 119 aa, Glycine max
  unsure (1)..(119): unsure at all Xaa locations
  Clone ID: PAT_MRT3847_75377C.1.pep
HLLNHIPHKTTFDWLPYCEQLHCTIAQDNVLELHRTNINVCSIHGMRHEEQQTIXCPMQSPIVTTYIALSTPDTMNDLRDKGTYLNHNEFIAAMLIKITDHILEHAIAGTGLYVLILDD

SEQ ID NO: 258420 - protein, 140 aa, Glycine max
  Clone ID: PAT_MRT3847_75378C.1.pep
EQDFEMGKLGRVLDTFCLSFGSNTCFCMNSMEFEDEFEKKPLIVSDSDHKLRLKDVVDGKQTLAFQLKPQIVTLRVSMHCHGCAKKVEKHISKLEGVSSYKVDLETKIVVVMGDILPSEVLQSVSKVKNAELWNFQASKE

SEQ ID NO: 258421 - protein, 37 aa, Glycine max
  Clone ID: PAT_MRT3847_75379C.1.pep
GPARVNASRHSSSGVRAFARGIFDIVVSIKEGTVCYV

SEQ ID NO: 258422 - protein, 50 aa, Glycine max
  Clone ID: PAT_MRT3847_7537C.1.pep
LKIKINLFSSVSSEILEPVITDNYHHSKATKLIDIKVNFATDIEFSHVTY

SEQ ID NO: 258423 - protein, 382 aa, Glycine max
  Clone ID: PAT_MRT3847_75380C.1.pep
MLPPDSSKLNTMELSKFTLEIFSKLEQQWLSHYEASTKTRILSIDGGGTTAIVAGASLVHLEDQIRAQTSDPHAQITDYFDIIAGTGIGAILAVMITADDGFGRPLYTVRDAVNFLAENNRELYKPKRAGVFRRRRRFSARSMENTLKRVFKRKEGEERLLTLKDTCKPLLIPCFDLKSSAPFVFSRADASESPSFNFELWKACRATSATPGLFTPFHFSSVDGKTSCAAVDGGLVMNNPAAAAVTHVLHNKRDFPSVNGVEDLLVLSIGNGAQAKRMNNAGECSTSTVVDITLDGISETVDQMLGNAFCWNRMEYVRIQAFGLGDQGKDEKVLNERVLESLPFGGKRLLQETNGNRIESFMQRLVATGKTSLPPSPCKLPP

SEQ ID NO: 258424 - protein, 51 aa, Glycine max
  Clone ID: PAT_MRT3847_75381C.1.pep
SLVAISHGPSSLQIGKSHQPFRVTIIFKLRCFSVAAKTLRLIPPVRYRTRG

SEQ ID NO: 258425 - protein, 36 aa, Glycine max
  Clone ID: PAT_MRT3847_75382C.1.pep
ILAFFTKYFEDYVSVTFFNNLMSCLIFCFFLYLTFI

SEQ ID NO: 258426 - protein, 98 aa, Glycine max
  unsure (1)..(98): unsure at all Xaa locations
  Clone ID: PAT_MRT3847_75383C.1.pep
MATATLSPADADKLSNLKSSVAALSQISENEKNGFTSLVARYLSGEAQHVEWXVLKLNGGLGTTMGCTGPKSVIEVRDGLTFLDLIVVQIENLNSKYG

SEQ ID NO: 258427 - protein, 41 aa, Glycine max
  Clone ID: PAT_MRT3847_75384C.1.pep
FILLGCESNMLDAILVKILLVSRIQVDFYKLTYKMREQSSV

SEQ ID NO: 258428 - protein, 504 aa, Glycine max
  unsure (1)..(504): unsure at all Xaa locations
  Clone ID: PAT_MRT3847_75385C.1.pep
MATATLSPADADKLSNLKSSVAALSQISENEKNGFTSLVARYLSGEAQHVEWSKIETPTDEVVVPYDSLAPTPDGSLEVKNLLDKLVVLKLNGGLGTTMGCTGPKSVIEVRDGLTFLDLIVVQIENLNSKYGSNVPLLLMNSFNTHDDTQKIVEKYKNSNIEIHTFNQSQYPRLVVDDFLPFPSKGHTDKDGWYPPGHGDVFPSLVNSGKLDALLSQGKCICCQSNLGILSIFIVCLSQGKEYVFVANSDNLGAIVDLMYLTHXVEILNHLIQNKNEYCMEVTPKTLADVKGGTLISYEGRVQLLEIAQVPDEHVNEFKSIEKFKIFNTNNLWVNLNAVKRLVEADALKMEIIPNPKEVDGIKVLQLETAAGAAIRFFDKAIGINVPRSRFLPVKATSDLLLVQSDLYTLEDGFVIRNKARANPENPSIELGPEFKKVSNFLGRFKSIPSIVELDSLKVAGNVWFGAGVILKGKISIVANPGVKLEVPDGAVISDKEINGPEDL

SEQ ID NO: 258429 - protein, 95 aa, Glycine max
  Clone ID: PAT_MRT3847_75386C.1.pep
MVITTFNGTGVGFGFGVGCGFGIGWGFGGMPLNLLGLGAGGGCGVGVGLGWGFGTAFGSKYRSSRVTFQGVDFDSKEKVNSTELSKPRTEVGGAR

SEQ ID NO: 258430 - protein, 48 aa, Glycine max
  unsure (1)..(48): unsure at all Xaa locations
  Clone ID: PAT_MRT3847_75387C.1.pep
EILAHALGEYVIMNDSFILDYFYHLDILTVELNKXXKYYLDLFDLSTI

SEQ ID NO: 258431 - protein, 54 aa, Glycine max
  Clone ID: PAT_MRT3847_75388C.1.pep
VSVQILTRPTQVNGSAQGWLLSSADMFRSNAVISAVSIVPAQPSNLSAPVSLEN

SEQ ID NO: 258432 - protein, 239 aa, Glycine max
  Clone ID: PAT_MRT3847_75389C.1.pep
KLEDDLKLCKGELRVTEETIKSLRSDKLILEQKLSELEKKSAEEINSLQWKLEQERKTLNSKVYDLERKLDVFRQELTVAESTLSVKDSELAALKNNLDELEELREMKEDIDRKNEQTAAILKMQAVQLAEMELLYKEEQVLRKRYFNTIEDMKGKIRVYCRVRPLSEKEIASKERDSLTTTDEFTVEHPWKDDKPKQHIYDRVFDGDATQEDIFEDTRYLMQSAGDGYNGCIFAYGQT

SEQ ID NO: 258433 - protein, 36 aa, Glycine max
  Clone ID: PAT_MRT3847_7538C.1.pep
AYICPFEIRCADTWLLYMIGKIGYQTLHLDIFTALI

SEQ ID NO: 258434 - protein, 70 aa, Glycine max
  Clone ID: PAT_MRT3847_75390C.1.pep
SEACVLPVIKVDKGTVELAGTNGESTIQVLDGLCQRCVMFYIAGARVAKWCAELKIDHNKPSHLVIHLNS

SEQ ID NO: 258435 - protein, 315 aa, Glycine max
  Clone ID: PAT_MRT3847_75391C.1.pep
MKTISGHCVSVKDISVSKAAKILTKFVSADNGASHVINAYLHRASASFNELKQLHKELGSSHSHKKHKRHRTENGNGSGKVVENSVQSVDINKELSIGHVKSDLFKRQQTGSGNADQDDENFSQELDGFIGYQTENVDGGEMHKKKKKKKQEVESLHDIDSTVKFGVREADGKLPNGSQNEVESAREQGNEGDIKTGMEEGRKQKSGKKPKVTTSSFSSYKGEAENGKDLEQRKEMEKTLCNSLEGENGVLGSSQYLQIKKKKKYKKGSETKLYAEEVKLEQSKNRRSDDAEGRPEDPTGDLSKKKRKKTHNGDI

SEQ ID NO: 258436 - protein, 518 aa, Glycine max
  Clone ID: PAT_MRT3847_75392C.1.pep
MKVISFSGGITKPCFFIAQTEMPILTFAHCKLSATLALRRMGSITRLQYSVADRTFTSGSVDLPASKTDSGRVNRRRGGGSSSVYSRPSLSEMKKEKAAIREKVYEFLRAIGIVPDELDGLELPVTVDVMRERVDFLHSLGLTIEDINNYPLVLGCSVKKNMIPVLDYLGKLGVRKSSITQFLQRYPQVLHASVVVDLMPVVNYLKGMDIKFDDVPRVLERYPEVLGFKLEGTMSTSVAYLIGIGVGRREIGGVLTRYPEILGMRVGRVIKPFVEYLESLGIPRLAIARLIEQRPYILGFGLGEKVKPNVKYLEEYNVRRTSLPSIIAQYPDIIGTDLNQKLEKQRSLLNSVLDLDPEDFGRVVEKMPQVVNLSSGPMLKHVDFLKNCGFSLPQMRQMVVGCPQLLALNIDIMKLSFDYFQMVMKRPLEDLVTFPAFFTYGLESTIKPRHKMVVKKGLKCSLSWMLNCSNEKFEQRMDYDTIDMEEMEMEPSFDMNSLTQPRSDESDFDYEDSDEDDE

SEQ ID NO: 258437 - protein, 73 aa, Glycine max
  unsure (1)..(73): unsure at all Xaa locations
  Clone ID: PAT_MRT3847_75393C.1.pep
TSVGFRXSRAKDXXSFCICSKLDTGNNLLIKQVSMELTSSLTDDIKVTQKLLRTPKQRIILCRLLELDPGVXX

SEQ ID NO: 258438 - protein, 132 aa, Glycine max
  unsure (1)..(132): unsure at all Xaa locations
  Clone ID: PAT_MRT3847_75394C.1.pep
ADYTLMSDIISAFPYILSYLKGKWTATVPLCSFVDTNAYYTIFYMTADCMPGHHKPPYLDGAAPDNCITNPVPHREETEKHKRYTESELIHCRWALLAVAMIXVPQAXGLGNXEKADDWTVVPGGQATYLGQ

SEQ ID NO: 258439 - protein, 231 aa, Glycine max
  unsure (1)..(231): unsure at all Xaa locations
  Clone ID: PAT_MRT3847_75395C.1.pep
MSNPQDQKPWKAEYAKSGRSSCRTCKSPIASETLRLGKMVQSTKFDGLVPMWNHAACVLKKANQIKLVEDVENLESLRWEDQQKIRKYIESGGGGGSSSGGGSAAKSDSKTVKDTKCGIEVSQNSRATCKDCGQKIIKGEVRISTKQGGQGAKGLAWHHAKCLIDLSPSIEVDKLSGWNNLSSSDQSAVIDFAKKGGSDTXIETEEGKESTPQQTXKGGIKRXKDVDSERK

SEQ ID NO: 258440 - protein, 208 aa, Glycine max
  unsure (1)..(208): unsure at all Xaa locations
  Clone ID: PAT_MRT3847_75396C.1.pep
MSNPQDQKPWKAEYAKSGRSSCRTCKSPIASETLRLGKMVQSTKFDGLMPMWNHAACILKKANQIKLLEDVENLESLRWEDQQKIRKYIESGGGGXAGSSSSGSAAKSDSKTVKDTKCGIEVSQNSRATCKDCGQKIIKGEVRISTKPGGQGAKGLAWHHAKCLMELSPSIDVYKLSGWNNLSSSDQSAVSDFAKKGGSDTKIETEGG

SEQ ID NO: 258441 - protein, 209 aa, Glycine max
  unsure (1)..(209): unsure at all Xaa locations
  Clone ID: PAT_MRT3847_75397C.1.pep
MSNPQDQKPWKAEYAKSGRSSCRTCKSPIASETLRLGKMVQSTKFDGLMPVTLTCIFFSFLFPSIFLTLVQCKCSFSYANAFHTFLLFFTCKNNPAVGFDFFFFYLLNIPYFNLYFIFNQMWNHAACILKKANQIKLLEDVENLESLRWEDQQKIRKYIXSGGGGGGGSSSGSAAKSDSKTVKDTKCGIEVSQNSRATCKDCGSKIIKG

SEQ ID NO: 258442 - protein, 95 aa, Glycine max
  Clone ID: PAT_MRT3847_75398C.1.pep
MWNHAACVLKKANQIKLVEDVENLESLRWEDQQKIRKYIESGGGGGSSSGGGSAAKSDSKTVKDTKCGIEVSQNSRATCKDCGQKIIKGEDRIST

SEQ ID NO: 258443 - protein, 86 aa, Glycine max
  unsure (1)..(86): unsure at all Xaa locations
  Clone ID: PAT_MRT3847_75399C.1.pep
PDARERKXGKRHVVATVDIPQNTGIWGACAKGGGXKRSARSDIYTICFQDXELRNPGWTKAKTNAIKPNPGSDAWSLKYQKRTGIN

SEQ ID NO: 258444 - protein, 90 aa, Glycine max
  Clone ID: PAT_MRT3847_7539C.1.pep
SPHAWPSSSFRYSYSMTLDSLQRGSDQRSACIARDEHAVQGAQVAYAKQKERLSDKESRLIAHNEARGLEAFACAKTTEWPNIEVNERIT

SEQ ID NO: 258445 - protein, 54 aa, Glycine max
  Clone ID: PAT_MRT3847_753C.1.pep
KNRLIAILLQSLLYKKMEDLVTIRKKLSIYLSIDPFVILKKIRIIDPIPKTYVS

SEQ ID NO: 258446 - protein, 94 aa, Glycine max
  Clone ID: PAT_MRT3847_75400C.1.pep
VTTSCCCDPSPSRSYLAGAHARGGGNLIFSFLNLTSHLILILLNLNHSSLSTLLHTRLFTPLISTPVFTHFPTITIISFSFLFHIPLKNYYKHK

SEQ ID NO: 258447 - protein, 69 aa, Glycine max
  Clone ID: PAT_MRT3847_75401C.1.pep
FLILHFNINKQWIQVGTESLMLCLIEIEGEEKAKRKHREYTRSFILFDTVQIERPGKRVSISHHVISLL

SEQ ID NO: 258448 - protein, 134 aa, Glycine max
  Clone ID: PAT_MRT3847_75402C.1.pep
RGRVGDHRLSRAKFFFIALECSFSWYVVPGYLFTTLTNISWVCWIFSKSVTAQQIGSGMRGLGVGALTLDWAAVALFLFSPLILPFFAIVNVFGGYALIVYVVIPLLYIFFLVYNDFQFLFFFLLLIFYLLISI

SEQ ID NO: 258449 - protein, 46 aa, Glycine max
  Clone ID: PAT_MRT3847_75403C.1.pep
TNQFGESLTPITLLIKNSQYLFFLYSFKRVFYTLFLSSVKKFPQLF

SEQ ID NO: 258450 - protein, 39 aa, Glycine max
  Clone ID: PAT_MRT3847_75404C.1.pep
ILKSFFRHKNPNSMTQEIKPLCINYMINGHNLDRVCLQR

SEQ ID NO: 258451 - protein, 137 aa, Glycine max
  unsure (1)..(137): unsure at all Xaa locations
  Clone ID: PAT_MRT3847_75405C.1.pep
RGANVCFSDVTNLDVFEESLNRLGKSFDVVVSCLASRNGGVKDSWKIDYEATRNSLVAGRKXGASHFVLLSAICVQKPLLEFQRAKLKFEDELVKLAEEDGGFTYSIVRPTAFFKSLGGQVELVKDGKPYVMFGDGK

SEQ ID NO: 258452 - protein, 122 aa, Glycine max
  Clone ID: PAT_MRT3847_75406C.1.pep
WGENFFDSATKKWTNRHIGASTCKRGFVRFCYEPIKQVIELCMNDQKDKLCPLLQKLGLNLKFEKELTGKAFMKCVMQSWLPASSAILEMMIFHLPSPASAQKYRVENLYEGPLDDPYASAI

SEQ ID NO: 258453 - protein, 154 aa, Glycine max
  Clone ID: PAT_MRT3847_75407C.1.pep
MDRAKDPRIKALLPCIRHHMRRRSGRHRREMVMAWKWIVRRTRESKPFFLAFATVCGVVPGVIGYGVMQLTNTRNEKLESHLRTNARPESLMMGQVNKERLAEYLGELQRKEDTNDRYVAALRGETLTRKPYVRIQPIPEQTDTKANKEQKKMN

SEQ ID NO: 258454 - protein, 93 aa, Glycine max
  unsure (1)..(93): unsure at all Xaa locations
  Clone ID: PAT_MRT3847_75408C.1.pep
LAVLQHLIGHNVFLLDAPVLSSSIGVKDDSALMSAEITGVVNAEATCDSIYDADKWSWTRPFLECGVQMVISQXVVVLSICIYVSALAWSWGP

SEQ ID NO: 258455 - protein, 42 aa, Glycine max
  Clone ID: PAT_MRT3847_75409C.1.pep
STVGSLPHPTSTRLIAYEEPKEATTNLKQRAYLGEEGLVEFL

SEQ ID NO: 258456 - protein, 106 aa, Glycine max
  unsure (1)..(106): unsure at all Xaa locations
  Clone ID: PAT_MRT3847_7540C.1.pep
ALTHPEKFNEPFIDNPNLKHNADLCALHNLNYISIELXMINMLLXIDNELITDDPHYAKQPVEEPWTKHNDADNASXEEADNNMENEESXDDPVDSDAHDEQEDAD

SEQ ID NO: 258457 - protein, 54 aa, Glycine max
  unsure (1)..(54): unsure at all Xaa locations
  Clone ID: PAT_MRT3847_75410C.1.pep
YLSWRSYIMYAVHGESISQFVFFSMDAYSSGIVFELALRSVGPGMKCAKLXXPL

SEQ ID NO: 258458 - protein, 59 aa, Glycine max
  Clone ID: PAT_MRT3847_75411C.1.pep
TLDKTFSYNFLKHIFLLFHLLKEGALRVFNGGDCALKCHTFRVLNLITMPLSYFFECRL

SEQ ID NO: 258459 - protein, 56 aa, Glycine max
  Clone ID: PAT_MRT3847_75412C.1.pep
GPWRVLPAAKIESRTPQCHIVGQAITMRRSPIHFIIPHTSSLTSKSSRKLHVTSDR

SEQ ID NO: 258460 - protein, 80 aa, Glycine max
  unsure (1)..(80): unsure at all Xaa locations
  Clone ID: PAT_MRT3847_75413C.1.pep
FLGKLKILSAFGCIKLRSFPTMKLTSLEDLHPSCYTXEFSKNIRKDGKCKGTSFAVHSHKYVCLVVELFSYQVALSCYQN

SEQ ID NO: 258461 - protein, 58 aa, Glycine max
  Clone ID: PAT_MRT3847_75414C.1.pep
MMGPVISNTEKKFSLALIYRGFSRMILYFHTSMMLIEEAAIIPSNRLWIMIEVFSTHL

SEQ ID NO: 258462 - protein, 60 aa, Glycine max
  Clone ID: PAT_MRT3847_75415C.1.pep
MLPVSTCPPCFSIFGYECWGYHLHLGENCVLCFPGILFRGTLVLSFNQENRFVVFLLLNF

SEQ ID NO: 258463 - protein, 61 aa, Glycine max
  Clone ID: PAT_MRT3847_75416C.1.pep
NMLYPTFAGGRKINNSHFLPYFTSFCLKLEKQKFWEFTSPPVPIGLARPTFNGGVQWRARV

SEQ ID NO: 258464 - protein, 108 aa, Glycine max
  Clone ID: PAT_MRT3847_75417C.1.pep
NLSTSRSLPVRVFPFLPVPHQQQNTRHSKLSSEFNCIPSFLLSPLSSYVNRNSPRLVFYRFLCLSPYVIYFVLHSPFAATTSPIILSLLVFPSLPAFAVVPPPPPPPS

SEQ ID NO: 258465 - protein, 35 aa, Glycine max
  unsure (1)..(35): unsure at all Xaa locations
  Clone ID: PAT_MRT3847_75418C.1.pep
KIGTTHLYWKDXFPVFRYQIGPLTTIMRLVAVTDR

SEQ ID NO: 258466 - protein, 141 aa, Glycine max
  unsure (1)..(141): unsure at all Xaa locations
  Clone ID: PAT_MRT3847_75419C.1.pep
QRPPTNAPPQPHPGQTPQTKNPTQPDTRKKKKVSPXTPGPPKPPKPKKKPPPGQKRGRDNKAATQGKKQNPNPRGEATKTQTRQGRAPTEGGLPRKGLKGAPGQLRGPEQKAFXGNPTAGNQQHKPRKPRAGPPXKREGRS

SEQ ID NO: 258467 - protein, 51 aa, Glycine max
  Clone ID: PAT_MRT3847_7541C.1.pep
LNNLNISFNKNSFNQYFCNIIYLKLILKKKYFLLKMKTITIIITNIINNIM

SEQ ID NO: 258468 - protein, 41 aa, Glycine max
  unsure (1)..(41): unsure at all Xaa locations
  Clone ID: PAT_MRT3847_75420C.1.pep
LMDEGQKRIGFGRFNLSYKLPKMPELVIXVNVKKKKKGGRK

SEQ ID NO: 258469 - protein, 192 aa, Glycine max
  unsure (1)..(192): unsure at all Xaa locations
  Clone ID: PAT_MRT3847_75421C.1.pep
GSRNNLEEAFLLLMILLRKISLNKIEWDPSILDHLSFALSVSGDLTTLAHQWEELLPGTINRRERYHALSLCYYGAXENPDLAKDGASLARKVLENLDGRCDRLESLSSCLLGVSLSAHSKIDISNSERVEKQSEALHSLETASKVTKMSNPLVIYYLSLECAEQRKLDAALHYAKCFLNLEVXSNIKGWLL

SEQ ID NO: 258470 - protein, 273 aa, Glycine max
  unsure (1)..(273): unsure at all Xaa locations
  Clone ID: PAT_MRT3847_75422C.1.pep
LADSPRDVILSYRRALLHRRNLDAKTIAKIQKEFVVFLLYSGGEAILSNLRSHMDSSFVPRNNLEEAILLLMILLRKISLNKIEWDPSILDHLSFALSVSGDLTALAHQWEELLPGTINRRERYHALSLCYYGAGNDLVALNLLRKLLSSREDPKHVPSLLMASKICSMNPDLAKDGASLACKVLENLDGRCDQLESLSSCLLGVSLSAHSKIAISNSERVEKQSEALHSLETAXKVTRMRNPPVIYYLSLECAEQKKLDVALHYAKCFLNLE

SEQ ID NO: 258471 - protein, 73 aa, Glycine max
  Clone ID: PAT_MRT3847_75423C.1.pep
TSPPPFPPPKPPPAPPPAPPPPPIPAPAPPPKPPPAPPPNPPPPKPSTNSVSFIFLHSATPITNTNATASTET

SEQ ID NO: 258472 - protein, 109 aa, Glycine max
  unsure (1)..(109): unsure at all Xaa locations
  Clone ID: PAT_MRT3847_75424C.1.pep
THARFWAYFDNNKIFYLIRAIRTSNGTKIYEPATKEFIAALKLSXEQLGDKTYLARYYLRFHDIALIPLTTQFNTLSCLNIQSECAKYDAWINMSLQIHMCSKSLSDQH

SEQ ID NO: 258473 - protein, 177 aa, Glycine max
  Clone ID: PAT_MRT3847_75425C.1.pep
QKKKKKKKKKKKKKKKKKKKKKKKKKKKKKKKKKKKKKKKKKKKKKKGGPLLKEKNFTTPELKKKIFFLGHQKKKKGAGFKKRGKGKNRGVPKKNALEKNPFFQSGEKKKKPHTNPLSKNCPPLKGKGTPPLTGKKTAGGGGFPPGDPLNFKSPKPPFFWFFPFLFSQGCAVFPQKY

SEQ ID NO: 258474 - protein, 112 aa, Glycine max
  Clone ID: PAT_MRT3847_75426C.1.pep
VRLQGKPVGHTPVSVNVKDGASHDHTPVDSFSFVIRTKTKNNQDKKVGGETENFAVKIVNQGPKEEVKTVKIPDVSDGTYVVTYNLPQAGNYDINVLLNGKHIKGSPWKQHM

SEQ ID NO: 258475 - protein, 30 aa, Glycine max
  Clone ID: PAT_MRT3847_75427C.1.pep
TLRHLKSKLYMVNRNAFIEGKTNIEKERTH

SEQ ID NO: 258476 - protein, 143 aa, Glycine max
  unsure (1)..(143): unsure at all Xaa locations
  Clone ID: PAT_MRT3847_75428C.1.pep
MMASTIIKGLRPLSSRMSEFLLGSGFDGLLQYVSXIEINNLGKVENLPVLNVALESMPTVEITESLVATETHSAVCKEXLAREMSCKHLYHSNCLCPVCCRRSRPCRKRESSVXVEEELVGLSIXRLTSDRFAVGRFADENHL

SEQ ID NO: 258477 - protein, 38 aa, Glycine max
  Clone ID: PAT_MRT3847_75429C.1.pep
ELLLQVIFKLLCLILNIHHVKIKTMLQSKKITSVAKIL

SEQ ID NO: 258478 - protein, 225 aa, Glycine max
  Clone ID: PAT_MRT3847_7542C.1.pep
MAATQEDVTLLGVVGSPFVCRVQIALKLKGIECKFLEENLANKSDLLLKSNPVYKKVPVFIHNEKPIAESLVIVEYIDETWKNNPILPSDPYQRSFARFWSKFIDDKIVGASWKSVFTVDEKEREKNVEESLEALQFLENELQDKRFFGGDEFGFVDIAGVFIAFSIPIFQEVAGLQLFTSEKFPKLFKWSQELINHPVVKDVLPPREPLFAFFKSLYESLSASK

SEQ ID NO: 258479 - protein, 35 aa, Glycine max
  Clone ID: PAT_MRT3847_75430C.1.pep
IKLNLNLPPMISQSQISRYSSDLSAQRRNASLKFC

SEQ ID NO: 258480 - protein, 42 aa, Glycine max
  Clone ID: PAT_MRT3847_75431C.1.pep
IVHVNINCAADDTMLNSFTIKIGIECQLSAEELAQQIQQTFC

SEQ ID NO: 258481 - protein, 40 aa, Glycine max
  Clone ID: PAT_MRT3847_75432C.1.pep
NYSSKLFRHLSLSVFQAGIKIGPSGTLRGSMLKTLKGKAT

SEQ ID NO: 258482 - protein, 62 aa, Glycine max
  Clone ID: PAT_MRT3847_75433C.1.pep
IVFMYMRTCSSSREDSVASKSLSKIRGCLNATLQRMCQEESEQECKIQGSATEFFFQNHPAD

SEQ ID NO: 258483 - protein, 63 aa, Glycine max
  Clone ID: PAT_MRT3847_75434C.1.pep
NSARAVNGTSLLEEDETDVFTSEDQRERRKKRSAVGTPDYLAPEILLGTGHGSYSPIFMFKVV

SEQ ID NO: 258484 - protein, 43 aa, Glycine max
  Clone ID: PAT_MRT3847_75435C.1.pep
RDIDAHPPLCECNDELDKCWYDPLHNVEFSHVIYHSLVVFMIN

SEQ ID NO: 258485 - protein, 56 aa, Glycine max
  Clone ID: PAT_MRT3847_75436C.1.pep
NNSYLMLAQRIFIQIILVSFFPQTIEKLLGYAGCFLITAERITINITPVKKKTKYS

SEQ ID NO: 258486 - protein, 54 aa, Glycine max
  Clone ID: PAT_MRT3847_75437C.1.pep
VIFYLPMALKFTDNSIFYYEHVFFGVINSSGKYGLIMNVCAILPPSGVSLKSDY

SEQ ID NO: 258487 - protein, 164 aa, Glycine max
  Clone ID: PAT_MRT3847_75438C.1.pep
SPRGDPSLSFTFAKSEQHDQHQRSKSFEAYGDVSKSGVWGVLAQKAKEILEDDKSSSPQHNDVINIMPPVVDIDKLKSHSFNTFAPPPQENNKTTRPDQSNQTAAAGTWNPWQPQPAAQTGGGASQTIHQTQLKASRDVAMATAAKAKLLLRELKTVKADLAFS

SEQ ID NO: 258488 - protein, 63 aa, Glycine max
  Clone ID: PAT_MRT3847_75439C.1.pep
IPEMPETTLIAFCLILGLCTSTFNTTFCYRKNKYLLQLYNTFEPHFVPKLSKTRAHGKTPTLG

SEQ ID NO: 258489 - protein, 122 aa, Glycine max
  Clone ID: PAT_MRT3847_7543C.1.pep
MAAGQEDVKLLGVVGSPFVCRVQIALKLKGIEYKFVEENLANKSDLLLKSNPVHKKVPVFIHNEKPIAESLVIVEYIDETWKNNPILPSDPYHRALARFWSKFIDDKVTQLFKNLLIFLDLS

SEQ ID NO: 258490 - protein, 71 aa, Glycine max
  Clone ID: PAT_MRT3847_75440C.1.pep
MSRVTIRPMSIAPYLKEIGRGKDGARSLSREQAHDLMSRILDGRVTDLVLGGFALTMRIKGETPEELAGFV

SEQ ID NO: 258491 - protein, 47 aa, Glycine max
  Clone ID: PAT_MRT3847_75441C.1.pep
VWAFSWFFLLSFTHSFLSSTHNLEVSIPPFCHLLNLIPYAFYHYTKH

SEQ ID NO: 258492 - protein, 69 aa, Glycine max
  Clone ID: PAT_MRT3847_75442C.1.pep
ARTTLPHSSPIRNSLRVAARKKGCLMVKIVMSGNAAVKRSYWASSLHVFLTNSICTDHFHACNSTQSEP

SEQ ID NO: 258493 - protein, 30 aa, Glycine max
  Clone ID: PAT_MRT3847_75443C.1.pep
FYVYIFFFILFFFTVYITLDRIPSLRPADS

SEQ ID NO: 258494 - protein, 145 aa, Glycine max
  unsure (1)..(145): unsure at all Xaa locations
  Clone ID: PAT_MRT3847_75444C.1.pep
IFLYFIHAFFFPFCECIIPYIYPQGXVWPWXXCVFPXDXSRSHKVRXWWAXNLVKDFHSXNGVDGIXWNDMNEPAIFKVLTKTMPESNVHRGDTELGGCQNHFFYHNVIYFVPYYDFGVAFLLFIISLLIEHFDYIIRYQLPTAS

SEQ ID NO: 258495 - protein, 162 aa, Glycine max
  Clone ID: PAT_MRT3847_75445C.1.pep
KPQELRSWASYFLLGRGENRLFDFFYERIVKEAEKDPLVVVAHFAKKFLKLKGKSRPPIKEVPSELESIQKSRNPFVSQKHHDAGIDEGPFWFGVFPPSNLGGTSDSKASPLGIMPPPPNPWTIFLTCLYWGEKKTPFGFLPPAKRGGPFKKLFLSLKKTLF

SEQ ID NO: 258496 - protein, 281 aa, Glycine max
  Clone ID: PAT_MRT3847_75446C.1.pep
MEASLVERGRERAGHVNKVGYVRRVIAKKKKQLYRRVRRPELSVSKTLHQLFDSCREAFKGPGTVPSPQDVQRLTHILDNMKPEDVGLSRDLQFFKPGNIVKENQRVTYTTVYKCDNFSLCIFFIPEGGVIPLHNHPDMTVFSKLLLGLMHIKSYDWVDPEASDDNMLQPQSQLRLAMLKVDKVFTSSCDTSVLYPTTGGNIHEFTAITPCAVLDVIGPPYSKEDGRDCSYYRDHPYTCFPNERIIGEAKEENDSYTWLEEIEMPENSEMNGVEYLGPTPS

SEQ ID NO: 258497 - protein, 220 aa, Glycine max
  Clone ID: PAT_MRT3847_75447C.1.pep
MEATSLVERGRERVGHVNKVSYVRRVIAKKKKQLYRRLRRPELSVSKTLQQLFDSCREVFKGPGTVPSPQDVQRLRHILNNMKPEDVGLSRDLQFFKSGNMVKEKQRVTYTTVYKCNNFSLCIFFIPEGGVIPLHNHPDMTVFSKLLLGLMHIKSYDWVVHEASDDNSKQIRSQLIMACITNDTEHIDRISLCQYSRNECCTCWLLFFYVENVPMIRSFL

SEQ ID NO: 258498 - protein, 979 aa, Glycine max
  Clone ID: PAT_MRT3847_75448C.1.pep
MGGGGGGGSKMWHKKWWEKISGQGCKIHQQYYQYIGSKKVKRALWRKLLLTWVVGWFIVSLRIFCYMSSQGTEKRKETLASMCDERARMLQDQFNVSMNHIQAMSILISTFHHAKSPSAIDQKTFAKYTERTAFERPLTSGVAYAVRVLHSEREQFEKQQGWTIKRMDTLEQNPVHKDDYAPEALEPSPVQEEYAPVIFAQDTIAHVISVNVLSGKEDRENVLRARESGKGVLTAPFRLLKTNRLGVILTFAVYKRDLPSNTTPNERIQATDGYLGGVFDVESLVEKLLQQLASKQTVIVHVYDTTNRTHPIAMYGSNESGDFFYHVSTLNFGDPFRKHEMHCRFKQKPPWPWVAITTSIGILVIALLVGYIFHATVNRIAKVEDDYREMMELKKRAEAADVAKSQFLATVSHEIRTPMNGVLGMLHMLMDTDLDVTQQEYVRTAQESGKALVSLINEVLDQAKIEFGKLELEAVLFDIRAILDDVLSLFSEKSQGKRVELAVYVSDHVPELLIGDPGRFRQIITNLMGNSIKFTDKGHIFVTIHLVEEVVRSIEVDKESNSENTLSGSPVADSRRSWEGFKAFSQEGPLGSFSSPSNDLVNLIVSVEDTGEGIPLESQPLIFTPFMQVGSSISRKHGGTGIGLSISKCLVGLMNGEIGFVSIPKIGSTFTFTAVFTNGHRSSSECKIQQINNQPQSASSEFEGMTALIIDPRSVRAEVSGYHIQRLGIHVEMVSDLKQGLSTISNGNVVVNMVLIEQEVWDRDLGLSSHFVNNTRRIDHGVPPKLFILVNSSSSFKASVNLGVHNPTVITKPLRASMLAASLQRAMGVQNKGAPHRELQSLSLRHLLRGRKILIVDDNGVNRAVAAGALKKYGADVVCVSSGKDAISSLKPPHQFDACFMDIQMPEMDGEMEDSVNREVSMDDFENITNWHVPILAMTADVIQATHEECLRCGMDGYVSKPFEAEQLYREVSRFFQSS

SEQ ID NO: 258499 - protein, 987 aa, Glycine max
  Clone ID: PAT_MRT3847_75449C.1.pep
MGGGGGGGSKMWHKKWWEKISGQGCKIHQQYYQYIGSKKVKRALWRKLLLTWVVGWFIVSLRIFCYMSSQGTEKRKETLASMCDERARMLQDQFNVSMNHIQAMSILISTFHHAKSPSAIDQKTFAKYTERTAFERPLTSGVAYAVRVLHSEREQFEKQQGWTIKRMDTLEQNPVHKDDYAPEALEPSPVQEEYAPVIFAQDTIAHVISVNVLSGKEDRENVLRARESGKGVLTAPFRLLKTNRLGVILTFAVYKRDLPSNTTPNERIQATDGYLGGVFDVESLVEKLLQQLASKQTVIVHVYDTTNRTHPIAMYGSNESGDFFYHVSTLNFGDPFRKHEMHCRFKQKPPWPWVAITTSIGILVIALLVGYIFHATVNRIAKVEDDYREMMELKKRAGAADVAKSQFLATVSHEIRTPMNGVLGMLHMLMDTDLDVTQQEYVRTAQESGKALVSLINEVLDQAKIEFGKLELEAVLFDIRAILDDVLSLFSEKSQGKRVELAVYVSDHVPELLIGDPGRFRQIITNLMGNSIKFTDKGHIFVTIHLVEEVVRSIEVDKESNSENTLSGSPVADSRRSWEGFKAFSQEGPLGSFSSPSNDLVNLIVSVEDTGEGIPLESQPLIFTPFMQVGSSISRKHGGTGIGLSISKCLVGLMNGEIGFVSIPKIGSTFTFTAVFTNGHRSSSECKIQQINNQPQSASSEFEGMTALIIDPRSVRAEVSGYHIQRLGIHVEMVSDLKQGLSTISNGNVVVNMVLIEQEVWDRDLGLSSHFVNNTRRIDHGVPPKLFILVNSSSSFKASVNLGVHNPTVITKPLRASMLAASLQRAMGVQNKGAPHRELQSLSLRHLLRGRKILIVDDNGVNRAVAAGALKKYGADVVCVSSGKDAISSLKPPHQFDACFMDIQMPEMDGFEATKRIREMEDSVNREVSMDDFENITNWHVPILAMTADVIQATHEECLRCGMDGYVSKPFEAEQLYREVSRFFQSS

SEQ ID NO: 258500 - protein, 84 aa, Glycine max
  Clone ID: PAT_MRT3847_7544C.1.pep
NTTNALLILKTMATSQGGNSYRNARTSLKPHVKSKPSQQRRNSTGSVNGKEHAAAGKLFHHLSLSLFEIFVSYFPFSDYLYAFR

SEQ ID NO: 258501 - protein, 97 aa, Glycine max
  Clone ID: PAT_MRT3847_75450C.1.pep
RLLNFSHGLILSTLFIHYSLADVGTAAQYGPPFLPTTCFGRDASQFPSSNMFAAAGEGIWDNGAACGRQYQVRCISAAAPRTCVPGQTLQIKIVDRA

SEQ ID NO: 258502 - protein, 59 aa, Glycine max
  unsure (1)..(59): unsure at all Xaa locations
  Clone ID: PAT_MRT3847_75451C.1.pep
PXPIPPPSYTSSPLXLILLPSLLHXSQTLPHLNLLYTHQHPXIFSTPWGHLLPPXNHIN

SEQ ID NO: 258503 - protein, 52 aa, Glycine max
  Clone ID: PAT_MRT3847_75452C.1.pep
YGGNHWNLRLLSIRVKLMFLTISSDWEFLHFTQRFEECFFLYIKLCYENKCG

SEQ ID NO: 258504 - protein, 95 aa, Glycine max
  Clone ID: PAT_MRT3847_75453C.1.pep
SSVPAPFSFFHFLHFFSSSDQDSLQLKCKEWRKRQIRKITDRVFDRVKNPAQNNLRFGDLYIAILLVYNDINKYIPGPHFDPPSKDRIKQVITVI

SEQ ID NO: 258505 - protein, 149 aa, Glycine max
  Clone ID: PAT_MRT3847_75454C.1.pep
FEFPLRGRVRQFLPPFTSMFFEHPAAQAYRLLLALAASVLQQPIAQLQQQSLAHLNLQTIATQQQQQFLPSLSHLAVVNPVAYLQQQLLASNPLALANVAAYHLQQRLQQFMPALIQLAMVNPVTYLQQQQLLSSNPLAVDNAPTYLQQ

SEQ ID NO: 258506 - protein, 67 aa, Glycine max
  Clone ID: PAT_MRT3847_75455C.1.pep
GAKGPRKWKHAQSDGFFVQFESPSLRASGFIPSSNEKGQTLCRDPEVLDIGAHEVLPRLLKENLPHS

SEQ ID NO: 258507 - protein, 483 aa, Glycine max
  Clone ID: PAT_MRT3847_75456C.1.pep
MSLLNEERKPHAVVTPYPVQGHVNPLFKLAKLLHLRGFHITFVHTEYNYKRLLKSRGPNALDGLPDFRFESIPDGLPPLDDDNVTQHVPSLCDSIRKNFLKPFCKLVHRLNHSSATEGLIPPVTCLVSDGCMPFTIQAAQELGLPNFIFSPASACSFLGIMNYPTLVDKGLIPLKDESYLTNGYLDSKVDWIPGMKNFRLKDIPDFIRTTDLNDVMLQFFIEVANRIQRNTTILFNTFDGLESDVMNALSSMFPSLYPIGPFPLLLNQSPQSHLTSLGSNLWNEDLECLEWLESKESRSVVYVNFGSITVMSAEQLLEFAWGLANSKKPFLWIIRPDLVIGGSVILSSEFVSETRDRSLIASWCPQEQVLNHPSIGVFLTHCGWNSTTESVCAGVPMLCWPFFAEQPTNCRYICNEWEIGMEIDTSAKREEVEKLVNELMVGEKGKKMREKVMELKRKAEEVTKPGGCSYMNLDKVIKEVLLN

SEQ ID NO: 258508 - protein, 67 aa, Glycine max
  Clone ID: PAT_MRT3847_75457C.1.pep
KLRALPNKTDSYFSQSTTKLTKSHYSLNNHRYPIPNSQNQLLLLRRSLRPFLHIFRRASHVSTNTQK

SEQ ID NO: 258509 - protein, 162 aa, Glycine max
  Clone ID: PAT_MRT3847_75458C.1.pep
DISAALSQLKHRGWSSSTTLAKALRQLEAAGFLRATRRTVGVERGSKVCNLYRFTDLPVFEQPKKNIAAEVASRDWEAFTTVRDAERAIEQASAPAPMPPEKLEARKKRTLQKLHRDAAETASMAGFDAAVSAVRGLVPTAETAPITGPPKARIAKRDKALE

SEQ ID NO: 258510 - protein, 176 aa, Glycine max
  Clone ID: PAT_MRT3847_75459C.1.pep
MMLTLLKQRSLISTLAPSFPFITTQTHFSSLLQQQQQHKPSIFLNPFSSKSKSKSQTKNPNFTLSYLINTCNLSPAWALKLSKRVHLKSPDQPNAVLNLLKTFGFSELQLSLLVKRFPIVLKIKPEKTILPKLQFFLSIGLSTSDLPKLLIGNSVLLEGSLKYCPVPRYNILSTVL

SEQ ID NO: 258511 - protein, 89 aa, Glycine max
  unsure (1)..(89): unsure at all Xaa locations
  Clone ID: PAT_MRT3847_7545C.1.pep
FHTTKANNNSFKTLISAHYNSIQLXFSPNFQIILSNTTPQFLKINPIRNVPFIETPNFPVFYTNSIARYDSRLKIYNSLVSSSSIDNSH

SEQ ID NO: 258512 - protein, 160 aa, Glycine max
  Clone ID: PAT_MRT3847_75460C.1.pep
ARVLEDSCLMKKHEESSSYSSRLSRRGKRHICNGKENTTVARPSRKGRRLASDLVDKVVLGPSILDLITDDHLFRMDSQQTDAEATSSLSVGVNNNIILQNSEGPNAGLSNQSRTIIGGSNDIEQIKDSSHISKPRNSTSFIEDPLPVPQTSIDLCSSDD

SEQ ID NO: 258513 - protein, 129 aa, Glycine max
  Clone ID: PAT_MRT3847_75461C.1.pep
ICPIKETISRKVTKSKRNCCYKSVHAQNAVPRPVVMPHPMFSQPSAPVNLNDRTLRLPNCLGLEDLISREPQPPSTNSACFFAPLVDFATAIVLKLSRCEGLVANRSCARGTLQVVELCIKAVKKGIRV

SEQ ID NO: 258514 - protein, 69 aa, Glycine max
  Clone ID: PAT_MRT3847_75462C.1.pep
AKFPRILAPRGMELSTPALFVCFVYELFMTLVLDSCMPLLLPRSLNALQERIGLRELNGVKLLVSPIFS

SEQ ID NO: 258515 - protein, 32 aa, Glycine max
  Clone ID: PAT_MRT3847_75463C.1.pep
FLNHPNVKKSLPQKDPVFSFFKGLYESLFVSK

SEQ ID NO: 258516 - protein, 58 aa, Glycine max
  Clone ID: PAT_MRT3847_75464C.1.pep
SSSLEVETPEKSPTISAIGRGVFLLYTLHSHSTNFPVFFVFFFFFFLLFSLMIIGRVA

SEQ ID NO: 258517 - protein, 73 aa, Glycine max
  Clone ID: PAT_MRT3847_75465C.1.pep
ATEWGDTLIKLVPPVRFRFKHSSALSKTICLQVYSTEASPGIERVTHEVLIEFLATAVNVTNIQCNSLIRIYR

SEQ ID NO: 258518 - protein, 53 aa, Glycine max
  Clone ID: PAT_MRT3847_75466C.1.pep
LCNKTTEIFCACLTFLVPLNSNFEVQWGLVFWALPKKKRLIGHEQRKKTGNIF

SEQ ID NO: 258519 - protein, 86 aa, Glycine max
  Clone ID: PAT_MRT3847_75467C.1.pep
STDTRAAKENNGCTYEATILYNRQLDTHLNKEISNLLTKLYTSNHQCKLQSPSYFTSKRIGCIWKSGLHTTAKDPQSEMHDLISNT

SEQ ID NO: 258520 - protein, 63 aa, Glycine max
  Clone ID: PAT_MRT3847_75468C.1.pep
ILLVPKHAPNLMVTVVNDISHDSDTSQVSKFSLRYEEYPPTLKLVPKNTITPRAQPILQKIEK

SEQ ID NO: 258521 - protein, 117 aa, Glycine max
  Clone ID: PAT_MRT3847_75469C.1.pep
LGLTPFSTMMTAESLSSPRLVCYHSSVKPRSSGSEWLLSQSGALHKQGSVFYRGPGATLLMGPSERRYSQRRKFCMGLRESIRRSDFTHAYIQVSCHRRYRGGTIVRMSDEAPIVSL

SEQ ID NO: 258522 - protein, 50 aa, Glycine max
  Clone ID: PAT_MRT3847_7546C.1.pep
DTEVVLMIALNMQTVTKITDLDFIDSHNLGSHGNTTAYEEVHSSDIDTRI

SEQ ID NO: 258523 - protein, 39 aa, Glycine max
  Clone ID: PAT_MRT3847_75470C.1.pep
RQWFTDLVPFSAAALQDQYLRKRARDFIALPSRHVASRA

SEQ ID NO: 258524 - protein, 63 aa, Glycine max
  Clone ID: PAT_MRT3847_75471C.1.pep
LKLIFVIPVMWLMQSWDSPPACRSRFFSMFSCCVIPSSGSAHFRELLNIPSCVISNNNNKADI

SEQ ID NO: 258525 - protein, 62 aa, Glycine max
  Clone ID: PAT_MRT3847_75472C.1.pep
LLYPFAFPTRVFHCPEPYPHLSSLQVALLLLFLFPFPPHVLTTIEPYPHLHSIHIVIQFLFP

SEQ ID NO: 258526 - protein, 68 aa, Glycine max
  Clone ID: PAT_MRT3847_75473C.1.pep
FMNEGKLIDLLNGSDYVPTCEDKDGDWMLVGDVPWEILVESCKRLRIMKGSAAIGLAPRAVQKCKNRS

SEQ ID NO: 258527 - protein, 137 aa, Glycine max
  Clone ID: PAT_MRT3847_75474C.1.pep
FRFARVGSVVLALHDASDVFLEIGKMSKYSGAETMASFAFILFVLSWIILRLIYYPFWILWSTSYEVLLTLDKEKHRVDGPIYYYVFNSLLYCLLVMHIYWWVLIYRMLVKQIQARGKVSEDVRSDSEDEDAHEHED

SEQ ID NO: 258528 - protein, 310 aa, Glycine max
  Clone ID: PAT_MRT3847_75475C.1.pep
MTTMSSLSLSLDWHNESYPAYHDFYLLPIFALFFPSLRFFLDRFIFEKVARRLIFGKGHAALDYQTDERRKKISKFKESAWKCVYYLSAEILALSVTYDEPWFTDTKNFWVPGIQVWLDQKIKLKFKVVYMYAAGFYSYSIFALIFWETRRSDFGVSMSHHVATVILIVLSYIFRFARVGSVVLALHDASDVFLEIGKMSKYSGAETMASFAFILFVLSWIILRLIYYPFWILWSTSYEVLLTLDKEKHRVDGPIYYYVFNSLLYCLLVMHIYWWVLIYRMLVKQIQARGKVSEDVRSDSEDEDAHEHED

SEQ ID NO: 258529 - protein, 79 aa, Glycine max
  unsure (1)..(79): unsure at all Xaa locations
  Clone ID: PAT_MRT3847_75476C.1.pep
AAFFQRVMLTTGTFYSDKGIILQXLVTNACDASTKIRLESLTDKITPHAXAELGIFIMRDKTYYSLTIDDRGSVMTKSC

SEQ ID NO: 258530 - protein, 58 aa, Glycine max
  Clone ID: PAT_MRT3847_75477C.1.pep
SPLHTSHQNGSSLYQSPATPSPAKSRPIQVRSASPRFIIDDRSYHTSQTPSLRSNYHY

SEQ ID NO: 258531 - protein, 42 aa, Glycine max
  Clone ID: PAT_MRT3847_75478C.1.pep
QCMYVDTLACYCVGTGAPLDFFCQRCFMLPLYLELSICTHHM

SEQ ID NO: 258532 - protein, 79 aa, Glycine max
  Clone ID: PAT_MRT3847_75479C.1.pep
EHPQGDLVLVIKINAFRLSHPSFCNLLNQAQSRGNSVYNRNSQDPDGKYGPFHDSQRLDSEVQPVEEKDKEYNENGLFA

SEQ ID NO: 258533 - protein, 59 aa, Glycine max
  Clone ID: PAT_MRT3847_7547C.1.pep
VVMTQPLALSLSIAPFRAPIRLLVSSSGSIRHVYLASKMACGDALAAAIPAVYHVASHV

SEQ ID NO: 258534 - protein, 81 aa, Glycine max
  Clone ID: PAT_MRT3847_75480C.1.pep
HGYHLHSVMLPLHHRHYLLLLYLSILSLSRERTIPLARKTASCRRVRSVKLACSESSGMTLFAQFPIIHFSTLSRFLWSSP

SEQ ID NO: 258535 - protein, 55 aa, Glycine max
  Clone ID: PAT_MRT3847_75481C.1.pep
YVPQWAPERSFGSKLHSWWCIGLPTPFLYVRCCQSVPVVNRAVMSAITYYISKVS

SEQ ID NO: 258536 - protein, 147 aa, Glycine max
  unsure (1)..(147): unsure at all Xaa locations
  Clone ID: PAT_MRT3847_75482C.1.pep
MLHLTLSPTMFCIPSSYWVYFILWQIYNYGEVFSEDYNISNTPAPPEVPASTPALLAQNEVGNDFDDDDDDEPPLNEEDDDDLDDMEQGDDQNTHHLVLAQFDKVTTFLHFXELDVARTKSRWKCTLKDGIMHINNKDILFNKVCYS

SEQ ID NO: 258537 - protein, 67 aa, Glycine max
  Clone ID: PAT_MRT3847_75483C.1.pep
PHKLSLPLSQSVLSLNHSHAHDASALSPSQYTSSLRSSFPLSHSHAPHVALCHNIRCQLFKLLDLYT

SEQ ID NO: 258538 - protein, 37 aa, Glycine max
  unsure (1)..(37): unsure at all Xaa locations
  Clone ID: PAT_MRT3847_75484C.1.pep
XKRXRPEXSTPPXSSXPGRAGSEPXQXHYLXHCFVHG

SEQ ID NO: 258539 - protein, 63 aa, Glycine max
  Clone ID: PAT_MRT3847_75485C.1.pep
GKVSTSLHFVHPENKTKSPDSVTCMQPGLKAGQLSLLPASSLGERLLLKSRAPRTLCSSFPHG

SEQ ID NO: 258540 - protein, 204 aa, Glycine max
  Clone ID: PAT_MRT3847_75486C.1.pep
MATRVIPPRILKNLRYNTTTKPLNAAQPSISPAIASPSLFERSPSPPAADVIPASAAGTAALNLDDAERLFASVSTKRLLRSSAVLHATAVGPMVDLGMWMMKSRVFQSGVLKDLVMAATKETFFSHFCAGEDAASAGRSIRALNDAGLRGMLGYGVEDAHENDGCDRNLNGFLHTVDVSKSLPPSSGSFDIDYITAICPMAFQ

SEQ ID NO: 258541 - protein, 464 aa, Glycine max
  unsure (1)..(464): unsure at all Xaa locations
  Clone ID: PAT_MRT3847_75487C.1.pep
MVTCAVKGGCPSDYIAIALSILSITVLLLWSIFPFLVHKVPRTKGSGFWLPVIQVVASFNLLLSIVMSNNFLKMGKRHWLRSCYLWGVWVEGPLGFGLLLSCRITQASQLYFIFVKRRLPLIRSYIFLPLILLPWIAAGGVIHSMKPLSSRCHMKAQWTIPVVCLHSLYIAILVGVTAAVHHIEFRFDELKDLWRGILVSVVSIAVWVTAYILNEIYHQLXSMRYCHKFLLLVVASILVVAFFSISSSQPLLSQISLRRRESREFRTMSQALGIPDSGVLAQSEPISRIDPNEPLDKLLLNKRFRLSFMAFADSCLAGESVHFFDEVYELSKIPEDDCVKRIYMARHIIEKYIVAGAAMEVNISHRSRQEILSTSNLTRPDLFHNALNEIIQLMRTNLARDYWSSMFFLKFQEDSNVRSNEYELEQITGWNFSPRLSSVHGTDDPFHQDHLLKSSGCSNDTTNL

SEQ ID NO: 258542 - protein, 89 aa, Glycine max
  Clone ID: PAT_MRT3847_75488C.1.pep
RQSFGAKQRLVRGAFLHTNQRRREREREDTHTQKEPSKPHTKKGTSVPSHICDSSLPRQKKKNTNRGRPGRSKGTNLTYAEHADVITLL

SEQ ID NO: 258543 - protein, 48 aa, Glycine max
  unsure (1)..(48): unsure at all Xaa locations
  Clone ID: PAT_MRT3847_75489C.1.pep
YRDPLKLPWAKLGINIVIEGTRMFMDSPGAGKHIQAGAXKVIITAPAK

SEQ ID NO: 258544 - protein, 38 aa, Glycine max
  Clone ID: PAT_MRT3847_7548C.1.pep
ALKKLPYDKKRWIYCLKIIDIPLPWGFLINVSGLLFSY

SEQ ID NO: 258545 - protein, 88 aa, Glycine max
  unsure (1)..(88): unsure at all Xaa locations
  Clone ID: PAT_MRT3847_75490C.1.pep
MPKCLCTIYYLNLSRXDVFINRLYHENGPGNMXDAFMTHTVRTMELATYPLMKIGGCCVFYMRNSYAYIGIIASYIAFVACAFKHVGE

SEQ ID NO: 258546 - protein, 97 aa, Glycine max
  Clone ID: PAT_MRT3847_75491C.1.pep
SSCTPGVNRANVETLTGKCVNRLSYLIQIGYPRRYRLYYRQLQLYAGRLDPTNATMAASRGNPAPLQATSTITKFANQPMGLEYHKTCSNILDTMAE

SEQ ID NO: 258547 - protein, 36 aa, Glycine max
  Clone ID: PAT_MRT3847_75492C.1.pep
YVASDELIEVTPKSIRLRKKYLDVNKRKAMSKKPKE

SEQ ID NO: 258548 - protein, 103 aa, Glycine max
  unsure (1)..(103): unsure at all Xaa locations
  Clone ID: PAT_MRT3847_75493C.1.pep
VIGLHAFMPTGLGVLKIAQSVWSVLHSAGFWGXVSTRARCYEMVMALSLYTPVAFLAWFPIVAQFQTRMLYIQVFSAGLQMFRILGCQMNELPSRSIEDVVTT

SEQ ID NO: 258549 - protein, 102 aa, Glycine max
  Clone ID: PAT_MRT3847_75494C.1.pep
TRPEIAFSFQFSSFLSWRHHCNTFLFYSQSVFSVFQASEYGTILFYSLTYVHILSLSLSLSLFFCVLWWLIIRKLLQKETFLLNFHSPNSFLKGFFFLSFLL

SEQ ID NO: 258550 - protein, 214 aa, Glycine max
  unsure (1)..(214): unsure at all Xaa locations
  Clone ID: PAT_MRT3847_75495C.1.pep
MGIAAEAHNVKILGSGTEYIVLAHGFGTDQSVWKHFVPYLVDNFRVILYDNMGAGTTNPDYFDFERHSILEGYASDLLAILEELQVESCIFVGHSVSAMIGAIASISRPDLFTKLIMVGASPRXNLVFNFVRHYSSRNNLRVYLTXGGEFKAWRYGFAPLAVGGGGQSXPVLCRDRTLFNMRPDIALXVSRTIFQSDMRQILXLFSVPCHIIQA

SEQ ID NO: 258551 - protein, 54 aa, Glycine max
  unsure (1)..(54): unsure at all Xaa locations
  Clone ID: PAT_MRT3847_75497C.1.pep
ELEGEXXLFKHXLSXFIXXXXXFIXNTAXNHXKXVXVLXIXILXILXXFVTXYY

SEQ ID NO: 258552 - protein, 75 aa, Glycine max
  Clone ID: PAT_MRT3847_75498C.1.pep
MSSLQLFQLTQHGRSFLASRRKTLLLATGILVAGGTTAYVQSRFRVNRDDLLGDSYECNNDKELTKEEVMKGTSA

SEQ ID NO: 258553 - protein, 99 aa, Glycine max
  unsure (1)..(99): unsure at all Xaa locations
  Clone ID: PAT_MRT3847_75499C.1.pep
MSSLQLFQLTQHGRSFLASRRKTLLLATGILVAGGTAAYVQSRFRGNRDDLLGDSYERNNDKELTKEEVMKGTSAPKNKQKKGGVKSLQVLXAILLSEM

SEQ ID NO: 258554 - protein, 46 aa, Glycine max
  Clone ID: PAT_MRT3847_7549C.1.pep
HETFCTAIEYGSPLTGGWGLGIGRVTMLLNDQQNIKEALFCSAMKP

SEQ ID NO: 258555 - protein, 101 aa, Glycine max
  Clone ID: PAT_MRT3847_754C.1.pep
QSAEIISIKLCMEVISGFHSLVCMRLLADPRTGVVRIQETPVFSCQEGQVMGRTSFLRMEARSQFPIQKPRWLSGFDSSDKCVMDVLFLYTPAVFVSRCRL

SEQ ID NO: 258556 - protein, 71 aa, Glycine max
  unsure (1)..(71): unsure at all Xaa locations
  Clone ID: PAT_MRT3847_75500C.1.pep
FRVSWADAWAMMSSIPYILLASPLAXXIAADTSSISPSQSLSFGKTIVSPSGTFELGSFHLGNPNKSYLGI

SEQ ID NO: 258557 - protein, 64 aa, Glycine max
  Clone ID: PAT_MRT3847_75501C.1.pep
TDPEPSEGQVEQHQQATQPQMIDVEAMDDDERECTRRAFVEAKNNLIRVHRKTIAGVDLDEQTR

SEQ ID NO: 258558 - protein, 41 aa, Glycine max
  Clone ID: PAT_MRT3847_75502C.1.pep
ARLIQLSVTGLGNDTHATAAIHSYDGMSTDLVPVCRLLAAV

SEQ ID NO: 258559 - protein, 199 aa, Glycine max
  Clone ID: PAT_MRT3847_75503C.1.pep
MDCLYMNPQESIEARVKHLLSLMTLNEKIGQMTQIERSVATPSAIKHFSIGSVFSAPHNGRFEKVLSSDSADMVDGFQKLALESRLAIPIIYGVDAIHGNNSVYGATIFPHNVGLGATRDEDLVQRIGAATSLELRASGIHYTFAPCVAVCKDPRWGRCYESYSENTEIVREMTSFVLGLQGNPSQRHPKGYPFVAGRN

SEQ ID NO: 258560 - protein, 174 aa, Glycine max
  unsure (1)..(174): unsure at all Xaa locations
  Clone ID: PAT_MRT3847_75504C.1.pep
LCSYGQQIYLAKAEPHEPWRIIFRERTQVNVLQHAQNHCPDCYGGYNQLSLTDLDVXVQFYSTFIIIPTHGIYMTLKGYXSSLISDPTLALAYTNRDDSAGIHASFHEPKDNXPLDASFHPADHQPPALVNHDFTIKDPTANAHIYANLTTMYRLIESNQPTPTWLLPNTLQCY

SEQ ID NO: 258561 - protein, 61 aa, Glycine max
  Clone ID: PAT_MRT3847_75505C.1.pep
MDCLYMNPQESIEARVKHLLSLMTLNEKIGQMTQIERSVATPSAIKHFSIGIYKICCAFIS

SEQ ID NO: 258562 - protein, 103 aa, Glycine max
  Clone ID: PAT_MRT3847_75506C.1.pep
EILRVTGKNELLQNQGFSDFDRMRFINLSHMASPNSTPNFTGWNSLSHEVRTSVLCSIQCKILYHSTVSISYFFLSPQHKIYVSFMHCFKKKNLILNLSSSGT

SEQ ID NO: 258563 - protein, 52 aa, Glycine max
  unsure (1)..(52): unsure at all Xaa locations
  Clone ID: PAT_MRT3847_75507C.1.pep
TLRDLTSGQMMQIHPSFVFLSKTQECVIFNKLVQTNHKYVXNLAIVDYIWLT

SEQ ID NO: 258564 - protein, 83 aa, Glycine max
  Clone ID: PAT_MRT3847_75508C.1.pep
LSYHRVKKHKKAVDISIKYKRSNYGNKQTLFLFLPLGRDPNYKIKTKQDLENKVKTSLRENHKNFVQEEKFFGRPERAKSHTT

SEQ ID NO: 258565 - protein, 97 aa, Glycine max
  Clone ID: PAT_MRT3847_75509C.1.pep
FICSLTFSTPLVASHIVLGPSFHSFLVVAAVHDVIYISLYFSVRNPDHSPPHCFTSDCGQSDYYPHRHPPFYPRPCSIYPSRTTFHLFIYSLYRYAP

SEQ ID NO: 258566 - protein, 88 aa, Glycine max
  unsure (1)..(88): unsure at all Xaa locations
  Clone ID: PAT_MRT3847_7550C.1.pep
QGGGGPKTGPPFFGRGGSPVLVNLPLPSQKQRKQHPPPPGETKRPPFHGPPPGIGKNGPFPLKKVGELPPRXDPPGGLPPPGGERGAP

SEQ ID NO: 258567 - protein, 76 aa, Glycine max
  Clone ID: PAT_MRT3847_75510C.1.pep
SLHTNSYYYNNIGKLNYVLEIHSMPYDKHEMRNEIMSQDWNMFLANPGEISTTLSRATSSISGWQAATVTLVFVDI

SEQ ID NO: 258568 - protein, 82 aa, Glycine max
  Clone ID: PAT_MRT3847_75511C.1.pep
GTTVSTMLCITCFCYFIAGTNTFFNASRERIVLLMVIVEEYLGHQADLHINFLQSYVHSKPNINPGTVTDYGSLVLVILILE

SEQ ID NO: 258569 - protein, 149 aa, Glycine max
  Clone ID: PAT_MRT3847_75512C.1.pep
SSRNASTCMKGGVSNFASHDRNTGCHETVSCGNVRAHVDNNGLGLSVKLVEENIQKPSFESSMLAPNSEGKILAGKNLEDTNHISSLEDTEIRDGKAVKDDKQQIICSRDQTEIKDVSTDVKLQSSSEGCSLVSSHNELNTSKNNMDKT

SEQ ID NO: 258570 - protein, 74 aa, Glycine max
  Clone ID: PAT_MRT3847_75513C.1.pep
GKKITFEFFKPFSHCGGLRKTRCSAHSRPNLCHRGCGTFCVRGKCVPPGTFGNRELCGPCSPYKTPLGNKTKGP

SEQ ID NO: 258571 - protein, 55 aa, Glycine max
  Clone ID: PAT_MRT3847_75514C.1.pep
LVTEAHPRTVGELAHFQSRSAQVPARILFVTLDLDLDPMPGKKKKEEEEEVLERE

SEQ ID NO: 258572 - protein, 154 aa, Glycine max
  Clone ID: PAT_MRT3847_75515C.1.pep
VGPGDPPRKPGPDPAGAPASPKKSRRKPGQSEGQSKSRSEKKTPTKNNTKKKPEKKRGKKGGPKKKKNQKKKGRAHSPKTRRETGRTKWIKEPAKARGEAGPRGGPKAAIHTTKKKGHSTVRPTDRPRKRPTKGPPPGRQNREKAGKGGVNGGK

SEQ ID NO: 258573 - protein, 77 aa, Glycine max
  Clone ID: PAT_MRT3847_75516C.1.pep
GYIYINFTLFNLVKMQKEKNVEINIEATKKYCVPRASAEQGQQTIQSKRKGFISLFYPLPMFPYFILWQCNVIRYKY

SEQ ID NO: 258574 - protein, 63 aa, Glycine max
  Clone ID: PAT_MRT3847_75517C.1.pep
VPFVACKKFKVSMLSMMQFRAIDSIFHSCFLVTKFWWNCVHHVNLGVISNQFWFACKELKCHG

SEQ ID NO: 258575 - protein, 62 aa, Glycine max
  Clone ID: PAT_MRT3847_75518C.1.pep
KGAKHPQAVLQMLLLSFHRKISNVFITSSHILTNSLSNIVSLLMFFHDYFSRDSFMKRYYVT

SEQ ID NO: 258576 - protein, 127 aa, Glycine max
  Clone ID: PAT_MRT3847_75519C.1.pep
VLQHHSIGGFWSHCGWNSTREGVFSGVPFLAFPILMDQPLNGKLIVEEWKVGWRVKKEVKKDTLITKDEIANLIKRFMHLGGDEVRDMRKRSRELKQICHRAIASGGSSESNINAFLLHILQDAKPH

SEQ ID NO: 258577 - protein, 91 aa, Glycine max
  Clone ID: PAT_MRT3847_7551C.1.pep
NLIILEQKTPLFGPKFNLHIFLLRKNGGEKLAIHTLLNETLGQRIPQNNPFFSNTLKGVKNKLWGGSLELQAQTHWFVVGLKVGRTPHTTY

SEQ ID NO: 258578 - protein, 43 aa, Glycine max
  Clone ID: PAT_MRT3847_75520C.1.pep
NHTLYGLVLYINYPPQTLSISTYNLILSSTSIYFNNPTYLFSN

SEQ ID NO: 258579 - protein, 67 aa, Glycine max
  Clone ID: PAT_MRT3847_75521C.1.pep
HPQPHTLSLSLAAARANPSLPLPNLNLQRKGHEEGAIGELRPGAIGIEKGTNARLTKKESYEILQER

SEQ ID NO: 258580 - protein, 80 aa, Glycine max
  Clone ID: PAT_MRT3847_75522C.1.pep
QHSATDYGNERPCLLRSASTTRGNRRRSLAYVLMLNGRPAQSAAHNAFDMGNPYTDHTNLHATRLQRLRIERHRGELTYF

SEQ ID NO: 258581 - protein, 77 aa, Glycine max
  unsure (1)..(77): unsure at all Xaa locations
  Clone ID: PAT_MRT3847_75523C.1.pep
GGEKMFPFKKGLTREGNXGNKNSIGLKEKPPQGEGFLFYXWPTKGQIDPPSPHGSCPVIKGEKGGAPKGIKDQERDV

SEQ ID NO: 258582 - protein, 36 aa, Glycine max
  Clone ID: PAT_MRT3847_75524C.1.pep
RNQFSSSISVLDLIQFFLLNSIYEEERELLTLHYTC

SEQ ID NO: 258583 - protein, 47 aa, Glycine max
  Clone ID: PAT_MRT3847_75525C.1.pep
LEGISFCFKSIMCVNIDLDHYLLVCELATVGQRQDNRGRSPARELAL

SEQ ID NO: 258584 - protein, 60 aa, Glycine max
  Clone ID: PAT_MRT3847_75526C.1.pep
TAMVRIPATAMARITATAMTWVTISIASSGIFGIIHTICLLYCNRGCHVRVGQMEHEGKS

SEQ ID NO: 258585 - protein, 70 aa, Glycine max
  Clone ID: PAT_MRT3847_75527C.1.pep
LEPKGFNLSQSSTRLHCALEGKYLVHASCHDLIGGADAPIQHLSFSCQIPSVTGRGFIEVVSIHHTPKVF

SEQ ID NO: 258586 - protein, 87 aa, Glycine max
  Clone ID: PAT_MRT3847_75528C.1.pep
PSTRPTLFGFSQSITHLGFGLIINAHCDHHAKNKTYRDTRDDLRHWALLIHARLCSYVRNSLKCTEHGCLSIQLTPCSTTYNANPCA

SEQ ID NO: 258587 - protein, 81 aa, Glycine max
  Clone ID: PAT_MRT3847_75529C.1.pep
TIITLSMSDCNAQLTESATGSTVMLVQCSGAHLLSTITTTCKLYTCVDIGDWIQKMLGTRASSMTTKAPAGARSGTITLSS

SEQ ID NO: 258588 - protein, 349 aa, Glycine max
  Clone ID: PAT_MRT3847_7552C.1.pep
MGGDSALKSGQVSAMIKQGFIPAPNLSFSPSRTFSPPPSSTRPSQTQSHPHTQTLFNMMSEEHKFSDEKRRNTHDRVSRLLDEPALRSASGDVRLTVVGRDGFRVSMEVRKTVLADKSRFFADKLRCCGGGLSHSVEISDCDDVEVYVEAVVLMHCDDLKPRLRSMAEGVPKILSLLKVSSAIMFDLGVVSCLEYLESIPWTEDEQEEVISQLEHLQIDDSATEVLLRVSSDPSTADRADDIFLNLLSGVLQAKDDKARREMKALLSRLLKENVSNDSSRLDVSKDTLYHLCHKCIGSLLLCLSEAASSDEKLDRGAIMSDITREADNIQWIVDLLIGQKMIDEFVKIW

SEQ ID NO: 258589 - protein, 116 aa, Glycine max
  unsure (1)..(116): unsure at all Xaa locations
  Clone ID: PAT_MRT3847_75530C.1.pep
LGDVVCGMAAVRVTAKDVVFWFRSHTAAEIRWGGAKHEAGEKDDGRRMHPRSSFKVFLDVVRGGSLPWKEYEXMQELEAVTSEIVRLIETATVPILAVDVDGLVNGWNIKIVELSG

SEQ ID NO: 258590 - protein, 49 aa, Glycine max
  unsure (1)..(49): unsure at all Xaa locations
  Clone ID: PAT_MRT3847_75531C.1.pep
NWXANXAILETXLTNWLXXXRFXRCGNPVNRGLSKXPRTXXXMXLXXXV

SEQ ID NO: 258591 - protein, 43 aa, Glycine max
  Clone ID: PAT_MRT3847_75532C.1.pep
IPNVFHQSTMQVIALLQESIHSPLVEDIKSMRLYESDATSKVI

SEQ ID NO: 258592 - protein, 541 aa, Glycine max
  unsure (1)..(541): unsure at all Xaa locations
  Clone ID: PAT_MRT3847_75533C.1.pep
PRAPTSITYSAPRLSDCLVEIKCIKLHERAQELEAVTSEIVRLIDTATVPILAVDVDGLVNGWNIKIAELTGLPIGEATGKHLLTLVEVAASARLEVLVTSLSQVMAERNGKSIPIVNDVAEQXSWKLYMVIVLGFSRRGLAVGVCXCALAPTARQVVVEGILTNEGDYKAIVQNRNPLIPPIFGTDEFGWCCEWNPAMMKLTGWKRXEVMDKMLLGEIFGTQMAACRLKNQEAFVNLGVVLNKAXTGSETDKVKXGFDDRNGKYXECLVSHIENWPXRAIASNVTLICSHVTEAVNKKRRNQLASQAASTRMRTLLXNQRRSKYAVYGIVSSPHTVEGTDLGTEQKQLXRTSAQCQQQLSKILDDSDRTRGFNSYLDLEMAEFTLHEVLVTSLSQVMTKSNGKSIRIVNDVAEQIVMETLYGDSLRLQQVLADFLLISINFTPNGGQVVVAGSLTKEQLGKSVHLVKLELSITHGGSGVPEVLLNQMFGNNGLESEEGISLLISRKLLKLMNGDVRYLREAGKSAFILSAELAAAHNLKA

SEQ ID NO: 258593 - protein, 865 aa, Glycine max
  unsure (1)..(865): unsure at all Xaa locations
  Clone ID: PAT_MRT3847_75534C.1.pep
RALYLLHLTCGPSHPNTAATYINVAMMEEGLGNVHVALRYLHKALKCNQRLLGADHIQTAASYHAIAIALSLMEAYPLSVQHEQTTLQILRAKLGPDDLRTQDAAAWLEYFESKAFEQQEAARNGTRKPDASIASKGHLSVSDLLDYINPNTKGRDAAAKRRSQITKVRATSYPNVGMSSSDESSKEIPKEASDEEVQIPILVGSADSEQESNSGPDLEQAILKQISDEKLQIYDEIFSEAHAEGEDGWQSVQRPRSAGSYGRRLKQRRAALGKVYSYHKNVEVGTESPFVRSPNPNSRYYFLKKRTISHGSYTDDHTINITQGNKFGRKVVKAVTYRVKSVPSTSKPCANEKLENGDKLLSSLPEPDPTDANPVKKSIVSLGKSPSYKEVALAPPGTISKFQVYNPQSVISVSSEHDSGKHEEEVEADRNVNVDPTPIEVNDTVKEKNDDSLSDSVDDSLDDTGVAIEGKEETELIVAVQDNCMSAEGQSGDVEAQGAVDSSILIHAVDDHVDSYKQELDTSNSSGSLEPSANTNPISQGGEDLRVNVSPSSQIRTGGIPYKKLSASAAPFNPSPAIARAAPIAMNMTLPSGPRAVPAIGPWPVNMNVHPGPTTVLSAVAPLRHTPQWPXAPPGTISKLQVSNPQSVXPLALSTRVAPSNFPVTNSAFHANHFTYLNPTISKFGPSAVWPGCHPVEFPLPVPIVEPIPDPISESQALCHGLESPSSASVLPEDIDNIGDSNQVVKTLSSEISEDEAVRSGSESIKENGNMNFHGSENAGNKQHQNIASNGNSSSSGTNMDGEKTFSILFRGRRNRKQTLRMPISLLTRPNGSQSFKVIYNRVVRGSHAPKSMNLSSSKDCTATS

SEQ ID NO: 258594 - protein, 621 aa, Glycine max
  Clone ID: PAT_MRT3847_75535C.1.pep
VCGMAAVRVTAKDVVFWFRSHTAAEIRWGGAKHEAGEKDDGRRMHPRSSFKVFLDVVKARSLPWKEYEIDAMHSLQLILRNAFKDTESMDLNTKAINTRLSDLKIEGMQELEAVTSEIVRLIETATVPILAVDVDGLVNGWNIKIAELTGLPVGEAMGKHLLTLVEDSSTDRVKKMLNLALLGEEEKNVQFEIKTHGSKMDSGPISLVVNACASRDLRDNVVGVCFVAHDITAQKNVMDKFTRIEGDYKAIVQNRNPLIPPIFGTDEFGWCCEWNPAMTKLTGWKREEVMDKMLLGELFGTHMAACRLKNQEAFVNLGVVLNKAMTGLETEKVPFGFFARNGKYVECLLSVSKKLDVEGLVTGVFCFLQLASPELQQALHIQRLSEQTALKRLNALSYMKRQIRNPLCGIIFSRKMLEGTALGTEQKQLLRTSAQCQQQLSKILDDSDLDSIIDGYLDLEMAEFTLHEVLVTSLSQVMTKSNGKSIRIVNDVAEQIVMETLYGDSLRLQQVLADFLLISINFTPNGGQVVVAGTLTKEQLGKSVHLVKLELSITHGGSGVPEALLNQMFGNNGLESEEGISLLISRKLLKLMNGDVRYLREAGKSAFILSAELAAAHNLKG

SEQ ID NO: 258595 - protein, 203 aa, Glycine max
  Clone ID: PAT_MRT3847_75536C.1.pep
GRVGGRVGAIGPWPVNMNVHPGPTTVLPTVAPMCSSPHHAYPSPPATPNMMQPLPFVYPPFTQPQSVAPSNYPVTSSAFHANHFTYLNPTISKFGPSAVWPGCHPVEFPLPVPIVEPIRDPISESQVLCHGSESPSSASVLPEDIDSIGDSNQGVKTLSSEISEDEAVRAGSENIKENGNMNFHGSENAGNKQNQNFWFKWQL

SEQ ID NO: 258596 - protein, 1131 aa, Glycine max
  unsure (1)..(1131): unsure at all Xaa locations
  Clone ID: PAT_MRT3847_75537C.1.pep
MSTSRPSQSSSNSRRSRHSARMAQATVDAKIHATFEESGSSFDYSSSVRVSGTADGVNQPRSDKVTTAYLRGKMIQPFGCLLAIDEKNHMQTCKVIAYSENEPEMLTMVSHAVPSVGDHPALGIGTDIKTLFTAPSVSGLQKALGCADVSLLNPILVHCKTPGKPFYAIVHRVTGSYIVDFEPVKPYEVPMTAAGALQSYKLAAKAITRLQSLPSGNMERLCDTMVQEVFELTGYDRVMAYKFHEDDHGEVIREITKPCLEPYLGLHYPATDIPQASRFLFRKNKVRMIVDCHAKHVRVLQDEKLQFDLILCGSTLRAPHSCHAQYMANMDSIASLVLAVVVNDNEEDGDTDAVQPQKTERLWGLVVCHNTTPRFVPFPLRYAREFLPQVFADHVHKEIELEYQIIEKNILHHPGHLLCMLMRDAPLGIASESPNIMDLVKCDGAALIYRNKVWRLGVTPSEPQIREIALWLSEYHMDSTGFSTDSLFDAGFPSALSLGDVVCGMASVRVTAKDMVFWFRSHTAAEIRWGGAKHEAGEKDDSRRMHPRSSFKAFLEVVKARSLPWKEYEMDAIHSLQIILRNAFKEDTESLDLNAKAINTRLSDLKIEGINDLKIERMQELEAVTSEIVRLIDTATVPILAVDVDGLVNGWNIKIAELTGLPIGEATGKHLLTLVEDSSTDRVKKMLNLALLGEEEKNVQFEIKTLGSKMDSGPISLVVNACASRDLRDNVVGVCFVAHDITAQKNVMDKFIRIEGDYKAIVQNRNPLIPPIFGTDEFGWCCEWNPAMMKLTGWKREEVMDKMLLGEIFGTQMAACRLKNQEAFVNLGVVLNKAMTGSETEKVPFGFFARNGKYVECLLSVSKKLDVEGLVTGVFCFLQLASPELQQALHIQRLSEQTASKRLNALSYMKRQIRNPLCGIVFSRKMLEGTDLGTEQKQLLRTSAQCQQQLSKILDDSDLDTIIDGYLDLEMAEFTLHEVLVTSLSQVMAKSNGKSIRIVNDVAGHIMMETLYGDSLRLQQVLADFLLISINFTPNGGQVVVAGSLTKEQLGKSVHLVKLELSITHGGSGVPEVLLNQMFGNNGLESEEGISLLIXAKLLKLMNGDVRYLREAGKSAFILSAELAAAHNLKA

SEQ ID NO: 258597 - protein, 71 aa, Glycine max
  Clone ID: PAT_MRT3847_75538C.1.pep
TFNGELKTYVLCLGWFSRPPGFCFKPTPLKKKGHVFPFTQFKCFGPVKGVLNPRGPPFFFFFLKFGKWSLL

SEQ ID NO: 258598 - protein, 61 aa, Glycine max
  Clone ID: PAT_MRT3847_75539C.1.pep
VIHIVKVCIIKVKLEFSLEKHSQEYLIMIPHLSFVLYCFSAKLKTMIQNQIRLGKCSTHKS

SEQ ID NO: 258599 - protein, 56 aa, Glycine max
  Clone ID: PAT_MRT3847_7553C.1.pep
SFNALMKYSVMVKNPMIFYSKPPTCELHLLTTGTIAQFSFVDSTRETYVSLMLPKF

SEQ ID NO: 258600 - protein, 85 aa, Glycine max
  Clone ID: PAT_MRT3847_75540C.1.pep
SLGKPVIANLFFFFRFRPLSFHGLWVFRDFGFTHPLSILSRNLRLILPRYILSPLIFQLYYGFSFFPKKKKKIKKPTKKKKNPPK

SEQ ID NO: 258601 - protein, 126 aa, Glycine max
  unsure (1)..(126): unsure at all Xaa locations
  Clone ID: PAT_MRT3847_75541C.1.pep
CLVGSGCPFGGCRGPLGGPSGHLQGYLRACCWCLVPPPCWGLPVLVNLCAGRARSFLGTSPLSCSWVLCFASSQMASRWVFCFLFSPVLLPCVFGFSVSWXLLFLLVRVCXFVFFPVAASLVLKKL

SEQ ID NO: 258602 - protein, 58 aa, Glycine max
  Clone ID: PAT_MRT3847_75542C.1.pep
IIFSYNIVGLCLKFCSILISSNVMSFLKSVFLLSTKLLKICPHILRFLLYIYLNTSAS

SEQ ID NO: 258603 - protein, 117 aa, Glycine max
  Clone ID: PAT_MRT3847_75543C.1.pep
GNYSWDLLASLLQRSHKLEVLTIYKEPQKYAKGQEPRWIHPLLVPECLLHLKTFCLREYQGLETELDFVGYIMQNARVLETMTIYISSSLGSEEKLQIRRHLSILQRNFETCQIVFH

SEQ ID NO: 258604 - protein, 42 aa, Glycine max
  Clone ID: PAT_MRT3847_75544C.1.pep
LGIVGYHIYNCENNHNSCLFSLKYNTNLITIMKKKKKGGRSR

SEQ ID NO: 258605 - protein, 51 aa, Glycine max
  Clone ID: PAT_MRT3847_75545C.1.pep
ITNDRSTHRLLCLTIDPPILSNQLWFSLMVNYILDWEEFEHPRPILIIHRG

SEQ ID NO: 258606 - protein, 73 aa, Glycine max
  Clone ID: PAT_MRT3847_75546C.1.pep
RALFAFVSFSITQISLLPTIHLPKLTLLYRSRFTSSELPLTPLPLSPAWINHHYKNILIMVLKSAKTLTIAVR

SEQ ID NO: 258607 - protein, 98 aa, Glycine max
  unsure (1)..(98): unsure at all Xaa locations
  Clone ID: PAT_MRT3847_75547C.1.pep
CFFSKVLIENPPSFSFSLSPFLTVNFYFFLIFEYHGVIIYTLSFLFFSFFILKIYGDPLVRVRYNFSVAFFKSFKSLSFFFPKRKNIFFXRSLNFXLL

SEQ ID NO: 258608 - protein, 64 aa, Glycine max
  unsure (1)..(64): unsure at all Xaa locations
  Clone ID: PAT_MRT3847_75548C.1.pep
KKIYWSRXFHSFKNEYIKDGCLNLYNYKITQPAKKSLIVRMKFLSLTAKGVVSFTYLFRRNSSF

SEQ ID NO: 258609 - protein, 62 aa, Glycine max
  unsure (1)..(62): unsure at all Xaa locations
  Clone ID: PAT_MRT3847_75549C.1.pep
GTRXSLTAXLKPGSXLQAGLXAAAVSGXXVHLRGDXIRRVPFXALRXPGXRAVPXSLLTEQX

SEQ ID NO: 258610 - protein, 63 aa, Glycine max
  Clone ID: PAT_MRT3847_7554C.1.pep
KCNNLPRIFLIPIERLPFPWWFPESNFQPIWTKVSQPNKIPLKPKMAYFIASPIITHSRQSPA

SEQ ID NO: 258611 - protein, 66 aa, Glycine max
  Clone ID: PAT_MRT3847_75550C.1.pep
LCICLLHTPSPQTQLSHPYHTGHCIGTANVFRTLKGPISLVTFSVYFCGRPSTHMDGSILFSEAHK

SEQ ID NO: 258612 - protein, 79 aa, Glycine max
  Clone ID: PAT_MRT3847_75551C.1.pep
FDLFRFLAMMSNEEFDYSYLSDDDGDVADDDKLCIDLDTVMSVLDEDADPSESSPEDFSLKNISPGESGIHDNFYFKMG

SEQ ID NO: 258613 - protein, 36 aa, Glycine max
  Clone ID: PAT_MRT3847_75552C.1.pep
LKAIIATGTSAITIAINAHLDKTTAKAKSLSTHPEA

SEQ ID NO: 258614 - protein, 85 aa, Glycine max
  Clone ID: PAT_MRT3847_75553C.1.pep
MPIRNIAVGRPEEATHPDTLKAALADFISTLIFVFAGSGSGIAYNKLTDNGAGTPAGLMCACIAHAFALLVAVCVGANICGGHVN

SEQ ID NO: 258615 - protein, 43 aa, Glycine max
  Clone ID: PAT_MRT3847_75554C.1.pep
NSSVTRFFRDVGATLRSVTQAMAPQYTCHTVTLPPFEPIILGE

SEQ ID NO: 258616 - protein, 130 aa, Glycine max
  Clone ID: PAT_MRT3847_75555C.1.pep
MANRVQIPTNNSALIAMIADEDTVVGFLLAGVGNVDIRRKTNYLIVDSKTTVKQIEDAFKEFTTREDVAIVLISQYVANMIRFLVDSYNKPVPAILEIPSKDHPYDPAHDSVLSRVKYLFNTESVASGRR

SEQ ID NO: 258617 - protein, 41 aa, Glycine max
  Clone ID: PAT_MRT3847_75556C.1.pep
LMHKFSFLWEKLILFFLPIFSPVSAYEKVDLNRLLVHLCSS

SEQ ID NO: 258618 - protein, 67 aa, Glycine max
  Clone ID: PAT_MRT3847_75557C.1.pep
SHSLTWGLKMRICGAAISSSYTTTSNSLLVFASSYLSSLDKTKFVTSLSRLTVKRLCFLSQTRAHIS

SEQ ID NO: 258619 - protein, 57 aa, Glycine max
  Clone ID: PAT_MRT3847_75558C.1.pep
TSWIHGQLQTHLIAMEDTDWQTQVFQKHILIILWAHLLHSQSFWGTKLPSVYDLVLA

SEQ ID NO: 258620 - protein, 60 aa, Glycine max
  unsure (1)..(60): unsure at all Xaa locations
  Clone ID: PAT_MRT3847_75559C.1.pep
ANSKLGFFFXTYPSQTPAHRSNGIPHNNGPLEMNKHAQQVLKIGPFPTAHAHFTSVLQQR

SEQ ID NO: 258621 - protein, 91 aa, Glycine max
  unsure (1)..(91): unsure at all Xaa locations
  Clone ID: PAT_MRT3847_7555C.1.pep
AARRRQKGAGARRRQKGTAARRRQKGTAARRXQKGTAAKRRQKGTGARRRQKGAAARRRQKGAGARRPQKGTGARRRPEGGEGYRLTLGGR

SEQ ID NO: 258622 - protein, 74 aa, Glycine max
  Clone ID: PAT_MRT3847_75560C.1.pep
FIAYDPKNDPKMEVLKEGVLESDVLDYVDGNMYCIMYDLMKERYELDSEGGGRNGCQEVAHRHDYMHHHGYLHP

SEQ ID NO: 258623 - protein, 269 aa, Glycine max
  Clone ID: PAT_MRT3847_75561C.1.pep
MANNFLDVFCWIQNLPPISEWETSSMSLNICSSSSSCQPRLNLTAILLYGSNKNSTTFIRFPNLDSTASDNLSDVFNLSDLYCHLMVMDVENSKSSPASERLQFSLRYHHVEGVLQFNHKVLIKDEWAEIMVDIDNVRCDVIELVNEFLMKQRGAGAAEKHFPSRISLQLTPTIQDQVLSLSVGKSSENPRKEIGVDKSVEASFEASNPLALKVSAGESPQPLVYGYSANLNWFLHDCVDGKEVLSSKPSKFAMLNPKSWFKNRYSSAY

SEQ ID NO: 258624 - protein, 133 aa, Glycine max
  Clone ID: PAT_MRT3847_75562C.1.pep
APYALIYRNMAVLGVEGFSALPHHCLQLCYGFFAFAVAVNMVRDLSPKKIGKWMPLPMVMAIPFLVGAYFAIDMALGTLVVYVWHKLNSKKAEAMIPATASGLICGEGLWALPASILALSKIKPPICMNFLAS

SEQ ID NO: 258625 - protein, 92 aa, Glycine max
  Clone ID: PAT_MRT3847_75563C.1.pep
NKGGLEKESVYGFFYGGGYRFFLVGQVVLKGAVLPGSWVVVLFFFFFSEVGLNGLIRGVRGYFLWITDLKFWVSRIDICVPPRKGGCLVFEE

SEQ ID NO: 258626 - protein, 296 aa, Glycine max
  Clone ID: PAT_MRT3847_75564C.1.pep
MANNFLDVFCWIQNLPPISEWETSSMSLNICSSSSSCQPRLNLTAILLYGSNKNSTTFIRFPNLDSTASDNLSDVFNLSDSRQASHMIMKLLGSNLEELWMRSLNLALYCHLMVMDVENSKSSPASERLQFSLRYHHVEGVLQFNHKVLIKDEWAEIMVDIDNVRCDVIELVNEFLMKQRGAGAAEKHFPSRISLQLTPTIQDQVLSLSVGKSSENPRKEIGVDKSVEASFEASNPLALKVSAGESPQPLVYGYSANLNWFLHDSVDGKEVLSSKPSKFAMLNPKSWFKNRYSSAY

SEQ ID NO: 258627 - protein, 103 aa, Glycine max
  unsure (1)..(103): unsure at all Xaa locations
  Clone ID: PAT_MRT3847_75565C.1.pep
KKGGKEGEVLDVVGPTTCDISMXDETREIVQGVSQDVLETVIPKRGGPVLVLAGKYKGVYGSMAERDLDQETAIVRDADTHELLNVKLEQIAEYIGDPSLLGH

SEQ ID NO: 258628 - protein, 43 aa, Glycine max
  Clone ID: PAT_MRT3847_75566C.1.pep
LELAERDFDRETAIVRDADTHELLNVKLEQIAEYIGDPSLLGH

SEQ ID NO: 258629 - protein, 143 aa, Glycine max
  Clone ID: PAT_MRT3847_75567C.1.pep
MTISPPFPTISNPSTKVLEKTRVYHYKRLILEAGYSKEQHSLFCTVTLGFKLTKQSMWRSTPNWLAVSTSRYATGHFLANQGGIGLQFAQLGRDASAIGVTRRLATQKKNLDFNILTIFLSFMFLLFLDMTVILARDRQKDAC

SEQ ID NO: 258630 - protein, 136 aa, Glycine max
  Clone ID: PAT_MRT3847_75568C.1.pep
HSPVPSTVNHPPSTARAPRHQHPATRTRTAPPIVDAQSSRPSHSRPPVHSRSRTSHQVVGALMGKMCKNKKQAGGHGPPREQTDTQEQEMDIRKIMKDVENFSNVHFLFFILTFFPFSLTVVFIFSLNLLSVVDAF

SEQ ID NO: 258631 - protein, 55 aa, Glycine max
  Clone ID: PAT_MRT3847_75569C.1.pep
HGQHFSPYCPHLCSVWKPTSDCRELVSVNFSSNHTSNFSYFKFKPLKLLAKENLS

SEQ ID NO: 258632 - protein, 83 aa, Glycine max
  Clone ID: PAT_MRT3847_7556C.1.pep
PTRTPESRKQTAAPVLVPAKVIHALNLKIDDLNSQPRFLGAFDVDYDALLARRNALLLQQKLSMLREEAANYEALSLPQEWTY

SEQ ID NO: 258633 - protein, 65 aa, Glycine max
  Clone ID: PAT_MRT3847_75570C.1.pep
MASSVMAFVASKPATFTVEKSSVRGLPSLSRNSSSFRVVASGGKKIKTDKPYGIYGGMSLKARFD

SEQ ID NO: 258634 - protein, 90 aa, Glycine max
  Clone ID: PAT_MRT3847_75571C.1.pep
TPIFPTFSLSKRVVFLNPGSLEPPALNGKKGFNSPQTLKVKKIKSPPRALKTFTRGKRFIKHWGGEKGVAKKKLGGNPSFIDKIFGEVVP

SEQ ID NO: 258635 - protein, 151 aa, Glycine max
  unsure (1)..(151): unsure at all Xaa locations
  Clone ID: PAT_MRT3847_75572C.1.pep
MSVSNNNIMSFKALTLWCILLSLLQLSLGAVRHRIRFNVEYMYREPDCHEHVVMGINGQFPGPTITAEAGDTLEILLTNKLSTEGTVIHWXHGIRQYGTPWADGTAAISQCAIAPGETFNYTFTVDRPGTYFYHXHFGMQRAAGLYGSLIV

SEQ ID NO: 258636 - protein, 76 aa, Glycine max
  Clone ID: PAT_MRT3847_75573C.1.pep
TLRRQTHAPPPDAIVRQTPCTLSPHDPSHTSPGLPSRRATPAETRDKDQTQRTLPELAAPFPPHISLFARTPNSAR

SEQ ID NO: 258637 - protein, 76 aa, Glycine max
  Clone ID: PAT_MRT3847_75574C.1.pep
MTMKLHPDVPYVVRRFEIQCGLIKLVQTHSEFSVHSAAGNFYDCYCTHHLFFTSSMIYGIFSFTDNLLLRLLPVNL

SEQ ID NO: 258638 - protein, 50 aa, Glycine max
  Clone ID: PAT_MRT3847_75575C.1.pep
PPPPHTPIYIFFFLYIYIYIYPVPICVGYMLFQVSFIVTTGLCFFKLIYV

SEQ ID NO: 258639 - protein, 51 aa, Glycine max
  Clone ID: PAT_MRT3847_75576C.1.pep
DSIEQYSGSHPSLAPVFSVGEYPAFHLHSAHGYPSSTSILLCGIRRGITFF

SEQ ID NO: 258640 - protein, 62 aa, Glycine max
  Clone ID: PAT_MRT3847_75577C.1.pep
IFLGLTTKLKQIHKVSIKPYFKPSQNQLTTLKKTHILKKNVTSPQLKLKIKNLHYGTSPILH

SEQ ID NO: 258641 - protein, 88 aa, Glycine max
  Clone ID: PAT_MRT3847_75578C.1.pep
KTFWLLLIKKSNFYKKHWLKLFNFKKSFKILTWQLLFFEQLPIYGGGEPLRRKGGPRKKDHIILSIISLELPEKRVGGRLSKIKSPFG

SEQ ID NO: 258642 - protein, 148 aa, Glycine max
  Clone ID: PAT_MRT3847_75579C.1.pep
SQGTRYTAPEDPYAKQVTKRLDAEKGEWSGWNWRSEGDVLLNGAFFVASGAVAEPNYQNAYSTQPKNVDRISLLTMSAGVLGVARDNNLGMWIRGPNDGTVYFSDSGPEYTDEMSRSTMPLLPSRILILVSALLCFLGHTTTLTTLPN

SEQ ID NO: 258643 - protein, 99 aa, Glycine max
  Clone ID: PAT_MRT3847_7557C.1.pep
VLPPGNLLGALPVFRWGCAPGGLAFGPGGSFSGGVNLRGALCSQFFGAGAPLNRGDFGFGSFFPKSPPPPPPPPPPPPPPPPAPPPPPPPPPKKEDVIQ

SEQ ID NO: 258644 - protein, 55 aa, Glycine max
  Clone ID: PAT_MRT3847_75580C.1.pep
FSAIACECFGSETPPSPLGVCPSVRLKALVVGQILVLIPALFFFCRILAAVRTRG

SEQ ID NO: 258645 - protein, 259 aa, Glycine max
  unsure (1)..(259): unsure at all Xaa locations
  Clone ID: PAT_MRT3847_75581C.1.pep
PGRPTRPGNYTANSSYQTNLNTLLSTLSSSNTQIDSGFYNFSEGQNSDKVNAIGMCRGDVKPDACRSCLNDSRVLLTQRCPNQKEAIGWYDDCMLRYSNRSIFETMEPNPTYFLWTQSNATDMDQFNEALRGLVDGLRSKAASGDSLKKYAAGSAAGPSFQTIFALLQCTPDLSEQQCNNCLVRAITDISSCCAGRTSGRIGKPSCNLRFDTSXFYDSAADASPXLSPPQAPSXXXXSDTNTXPLXGKSNTTQIVVAVV

SEQ ID NO: 258646 - protein, 65 aa, Glycine max
  unsure (1)..(65): unsure at all Xaa locations
  Clone ID: PAT_MRT3847_75582C.1.pep
INKLGRVFTGFDRENPGLTQVNXLDSHAPFPRLANKRKGQNDWPFQPFEHLNGQMDTALSPSLSP

SEQ ID NO: 258647 - protein, 67 aa, Glycine max
  Clone ID: PAT_MRT3847_75583C.1.pep
KKITKLNSLMNRKMFHRNSHFVMTYETLRKKYRHYKIYNVKKNIGVVFKISKCLCIITLINISCWIL

SEQ ID NO: 258648 - protein, 154 aa, Glycine max
  unsure (1)..(154): unsure at all Xaa locations
  Clone ID: PAT_MRT3847_75584C.1.pep
LSTKRLXAGDSVLFIXGIKRANRQQPALSSSVISSDSMHIGILAAAAHAASNNSPFTIFYNPRASPSEFVIPLAKYNKALFNQVSLGMRFRMMFETEESGVRRYMGTITGITDLDPVRWKNSQWRNPQVGWDESTARERPSRVSIWDIEPVVTW

SEQ ID NO: 258649 - protein, 92 aa, Glycine max
  Clone ID: PAT_MRT3847_75585C.1.pep
KKKPPTNGINFILPKHKTKREFGKQEAFVCSYKKKHFWAKKSHKALGDDKGQKGKNPLFLFENTKKLQIQLVRDKTTKRALKPKGCLNPKSY

SEQ ID NO: 258650 - protein, 231 aa, Glycine max
  Clone ID: PAT_MRT3847_75586C.1.pep
MWRYAFWSWRLRSIPFAISGLFMKPLQLRGLVPADSKKALTPETVASGVQVMEASNGRDDCFCLKAELRDKSSNDHSKSKSATQIFEQFLRFLNDMKELWLDKVYVVNVLGYIAYNFVIGAYSYWGPKAGYNTYHMLLSMTTFIGAAFCFGAFLFRSMYGFLALFSIGELLVFATQEYFCIVWIDLMKTVNIKYQTLKGQTPCRCFKRRLEKHQHLLLNPNNEFLLMPDQT

SEQ ID NO: 258651 - protein, 106 aa, Glycine max
  Clone ID: PAT_MRT3847_75587C.1.pep
LIFGGITIVCGIVGTLAGGFVLDYMSNTLSNAFKLLSITTFIGAAFCFGAFLFRSMYGFLALFSIGELLVFATQGPVNNVVCNSVHPIFLSDQEYWLLMVITSWHK

SEQ ID NO: 258652 - protein, 84 aa, Glycine max
  Clone ID: PAT_MRT3847_75588C.1.pep
IPVPYWCLYECPTLYQCCSFYMHHFFLYFPKIHLFIRLFFLFVFPFLFPLFACSFFLETTFSKSRQLLAYLLTVLLRFVTYYPF

SEQ ID NO: 258653 - protein, 79 aa, Glycine max
  unsure (1)..(79): unsure at all Xaa locations
  Clone ID: PAT_MRT3847_75589C.1.pep
GGGVFIDWKYIFFDDVFSAVDAHTGTEIFKECVRGALKGMTVIFXSHQADSLHNADFIGVKRDGMIFQSEKYDDLLASG

SEQ ID NO: 258654 - protein, 122 aa, Glycine max
  unsure (1)..(122): unsure at all Xaa locations
  Clone ID: PAT_MRT3847_7558C.1.pep
XXXXXXXFXXXXXXXXXXGXVXXXXXXXXXXXXXXXXXGXXXXXXVXXXWVXXXLXXVGXXLVXXXWXXXVXXXGXXXXXXXLXXXXXXXXXXVCCVVEXXXIRVFGXXXXGLXDXXXVXXX

SEQ ID NO: 258655 - protein, 166 aa, Glycine max
  Clone ID: PAT_MRT3847_75590C.1.pep
LFLSIRWLWRKTFRLSSREDCSSDAEHRALLAKRGESGPNLNESRGERARRKAEEKRQARLEKELLEEEERKQREEVSRLVEERTRLRDEKMEAEKERSKSSYPSKEKDSRKEAERKHQEKRKEKDKGSSKSNSDVEEVDRRASKESERKCDFDKKSETDRRELQK

SEQ ID NO: 258656 - protein, 57 aa, Glycine max
  Clone ID: PAT_MRT3847_75591C.1.pep
CHSNNENIIDKNFIIAMTSGRTRGPPREELDCNLLAYQPIQRCDVLGLGELLALAGK

SEQ ID NO: 258657 - protein, 163 aa, Glycine max
  Clone ID: PAT_MRT3847_75592C.1.pep
MSDHHPRLQHLRSASHLLKESFSSFSSNFLIFLFLSLLTLSFRTLVETGTAHVTSFIDRDPSLRALLSRLDLAGNSHNHHNGHDLPSPNNHRHRRRPFLHLTRVGTLDDDFFSGDDDDARSLFGSIPKPSANATLLALSPFKTTSGFSDLFPDDGIRVSQVIR

SEQ ID NO: 258658 - protein, 287 aa, Glycine max
  Clone ID: PAT_MRT3847_75593C.1.pep
MPRYDDKYGNTRLYVGHLSSRTRSRDLERAFSRYGRVRGVDMKNDFAFVDFSDPRDADDARYNLDGRDVDGSRIIVEFAKGAPRGSREYLGRGPPPGSGRCFNCGLDGHWARDCKAGDWKNKCYRCGERGHIERNCKNSPKKLSTRRGRSYSRSPVRSHSPHRGRSRDRSYSRDRSYSRSRSPVRREESPVREDRSQSPQHKNSPQPSKTRKHSPSPDRSPQKRGDTSPDNDRLSRSPARDPEDRGYDSPKVNGRSGSPSCSPRDDDRSPIDDDNNHRHSPRGSESP

SEQ ID NO: 258659 - protein, 63 aa, Glycine max
  Clone ID: PAT_MRT3847_75594C.1.pep
MPRYDDKYGNTRLYVGRLSSRTRSRDLERVFSRYGRFLRFSLNLEVFVGRLALVEFVEIPVEY

SEQ ID NO: 258660 - protein, 50 aa, Glycine max
  Clone ID: PAT_MRT3847_75595C.1.pep
GLCDLSSPVRSHSPRRGRSRDRSYSRDRSYSRSRSPVRREESPVCDLSSR

SEQ ID NO: 258661 - protein, 74 aa, Glycine max
  unsure (1)..(74): unsure at all Xaa locations
  Clone ID: PAT_MRT3847_75596C.1.pep
MRRCDDKYGNTRLYVGHLSSRTRSRDLERAFSRYGRVRGVDMKNDFAFVDFSDPRDADDARXXLDGRDVDGSRI

SEQ ID NO: 258662 - protein, 108 aa, Glycine max
  Clone ID: PAT_MRT3847_75597C.1.pep
LFFSIPPFFLDFILFPFNSIHLFTFGSESLSDSVSACLFSSISSIPDSTIYRARRNQRCLAMMINMVIPASMLDACLRGLVPVTWSVSSADMEGNFPFMIHHYLSNYV

SEQ ID NO: 258663 - protein, 51 aa, Glycine max
  Clone ID: PAT_MRT3847_75598C.1.pep
KGLGFILNLFGFRLSGHDLYQVIFYFFCSLYCLIHDLCNWVTIIVVSAILI

SEQ ID NO: 258664 - protein, 71 aa, Glycine max
  Clone ID: PAT_MRT3847_75599C.1.pep
SRFVQYSINVQLNIKINIIYFEINNILEQGEHFHTVGINNILVSFNCYFFKTYFVSRTMPFQILLIFFITL

SEQ ID NO: 258665 - protein, 117 aa, Glycine max
  Clone ID: PAT_MRT3847_7559C.1.pep
MLSVAKRGAFKFAFINAPNFWRCYAFKFTVPVQSSNLALTPPGFKKIKVANPVVDLDGDEMARFFWQMIKDYLGLPYLDIDIKYYDLSFQKRDETDDQITVDSANAILKYNVGIKMR

SEQ ID NO: 258666 - protein, 45 aa, Glycine max
  Clone ID: PAT_MRT3847_755C.1.pep
AASTEHEAADEGALVYVPVATIVAFPQPPNVQMTTLQPSNHKIPT

SEQ ID NO: 258667 - protein, 57 aa, Glycine max
  Clone ID: PAT_MRT3847_75600C.1.pep
ARADNGKDMMKVYSLLYLLPGVALSWPPWVAPSVFTTLTEGLDSPHILTSIGRPRPR

SEQ ID NO: 258668 - protein, 69 aa, Glycine max
  unsure (1)..(69): unsure at all Xaa locations
  Clone ID: PAT_MRT3847_75601C.1.pep
YLQLELYSLGGDLAKNSSADIIGTRTELGDEKSTPFQPYSEGIGLHRVRECXSFTGRWAMLARVGALTG

SEQ ID NO: 258669 - protein, 39 aa, Glycine max
  Clone ID: PAT_MRT3847_75602C.1.pep
LIHRCQTKYYLTFHPCTHLYSKVYTSKYSFSATVKQNGK

SEQ ID NO: 258670 - protein, 60 aa, Glycine max
  Clone ID: PAT_MRT3847_75603C.1.pep
GGYKGELICRVLKLLWGLNFRFLFPIKINIFYYESDILDVLPLPTMKRSNCHPLRSLLYC

SEQ ID NO: 258671 - protein, 166 aa, Glycine max
  Clone ID: PAT_MRT3847_75604C.1.pep
PCAVSKLCNITGILVLTTVSEMDRFDWIASMCMRLVVVRLATKRIVAVLHHVTTLANIMGVNLYVGPVFKLQLRCVTVQTPIARKVGRWMGTIGIGRLKNAITNPTIMALGAAIIFSVGHIRRHQFQCKINRSVQWQVGWTTNYGEHSVHASEKYTGCGDHADNSQ

SEQ ID NO: 258672 - protein, 56 aa, Glycine max
  Clone ID: PAT_MRT3847_75605C.1.pep
DPLVYPGNAGRDPEGYQLSLIGGPFKPGGNTRKTWSREKIVCGLNYKPNSDPKHKR

SEQ ID NO: 258673 - protein, 117 aa, Glycine max
  Clone ID: PAT_MRT3847_75606C.1.pep
YQPNRNPFVVPPEYAALIWKQPVFNTNSPNNNASPKKKEFGMFQHKKNLFGYKLEKLFKTFLLKRKNFFYQRSSQKLSLHGFVPMQAHSILVHHSPKVNLCLAPRINKKDKTPQKHK

SEQ ID NO: 258674 - protein, 49 aa, Glycine max
  Clone ID: PAT_MRT3847_75607C.1.pep
SLVLIFLCSSLIWSLDLVLGFFYPANSNAIVYAINYFPSLFYFCSLTHT

SEQ ID NO: 258675 - protein, 617 aa, Glycine max
  Clone ID: PAT_MRT3847_75608C.1.pep
TLLCCFCRLETGPARFHDGYSRLRTWTYSSLDLYKHELLRVLYPVFIHCFMDLVAKGHVQEARNFFNTFREDHEMMHLRDLQKLEGVLSPNHLKEMEFAHSLRKSKFNIKICEYSYELLLQHLHSTQSTTILGIINEHINFQVTPGQPSLISDDPEAVTLTGSSQEAANQINQKEIHWGLLEDSLEERLEKAGALLLDSEKGEGEAKEGENDETKKRSIEGGKQGGASVKKVKKDKGGSATGKSAKPEASTVPAAPRVKPELPLPVIPAEAEQSVLEDLRNRVQLSSVALPSVSFYTFINTHNGLSCSSISHDGSLIAGGFSDSSLKVWDMAKLGQQQTSSLSQGENEQIFGQGGGKRQYTLFQGHSGPVYAASFSPVGNFILSSSADSTIRLWSTKLNANLVCYKGHNYPVWDVQFSPVGHYFASSSHDRTARIWSMDRIQPLRIMAGHLSDVDCVQWHANCNYIATGSSDKTVRLWDVQSGECVRVFVGHRGMILSLAMSPDGRYMASGDEDGTIMMWDLSSGRCLTPLIGHTSCVWSLAFSSEGSVIASGSADCTVKLWDVNTSTKVSRAEEKGGSANRLRSLKTLPTKSTPVYSLRFSRRNLLFAAGALSKSG

SEQ ID NO: 258676 - protein, 49 aa, Glycine max
  Clone ID: PAT_MRT3847_75609C.1.pep
HNFHSFLVSNYCMPIMYNLEKPQRDDKQFLTPSFSSTLLDQIYRSIDEG

SEQ ID NO: 258677 - protein, 67 aa, Glycine max
  Clone ID: PAT_MRT3847_7560C.1.pep
TSGIHTLEELFRSLQKRNVQLVLANPGPIVIDKLHTSNFAALLGEDKIFLTVAEAVAYCSPKLAEEP

SEQ ID NO: 258678 - protein, 111 aa, Glycine max
  unsure (1)..(111): unsure at all Xaa locations
  Clone ID: PAT_MRT3847_75610C.1.pep
MNILRSFWNSPTGLKTTHFWGPAYNWXLPFAAAMDTKNPPETISVNMTXSEQMCGYSALCMRFVWMVRSRNPHLLVYHVSNETVHLYQLLRWFRAQRGLEQNKKDADADAE

SEQ ID NO: 258679 - protein, 81 aa, Glycine max
  unsure (1)..(81): unsure at all Xaa locations
  Clone ID: PAT_MRT3847_75611C.1.pep
MAAASPMAXQLKSTFTRTLVAPKGLXXXXXLHLVPARXQXSFXVXAIQSEXXTYXVIXPIXGDPFIGSLXTPVTSXPLIXW

SEQ ID NO: 258680 - protein, 167 aa, Glycine max
  unsure (1)..(167): unsure at all Xaa locations
  Clone ID: PAT_MRT3847_75612C.1.pep
LGGPWGKIPLWHKTKIVFXFLFPPVFLPPFVVFYKMLKEMGARALFPFVFPEMSQGFPPLMGTFGHERDPDMSPPFFKGGGGKSPLVSVVGKGPLPGIKNPWDPPVVLKGLMTVPFPQPAVFAPKNVSSFGVPGPGGGLFSGLFFSSKKNLSLGKNVVPPRDVCVGI

SEQ ID NO: 258681 - protein, 51 aa, Glycine max
  Clone ID: PAT_MRT3847_75613C.1.pep
NHLSLLHPLNNSKYCTAAAAFFARSQTLTYKNIYFVWKSYNKMSKTKSTTS

SEQ ID NO: 258682 - protein, 150 aa, Glycine max
  Clone ID: PAT_MRT3847_75614C.1.pep
MSMQTYEDLEAKYGTEETPESILLLVQIPDGFAREHIGAKIEYEFARVRVHGERSLGNNRRSRFNVLYQIPEYCDINRIKAKFDGKIVTITIPTIPGKVSKKEAESNPGDEKEGTPTDDDQKKTIVSDQVPKLIVECKEEIDHEASTPSN

SEQ ID NO: 258683 - protein, 126 aa, Glycine max
  Clone ID: PAT_MRT3847_75615C.1.pep
RSWKIPRRIHTNTDTMNDEMLDEVLNRLEYKHSSCNSTFTTAFESAAESTGRQKKKKKSGRSRRSKLSNLTFPCIRCYISSIKLTKLNALVQRLQCQNCENPELTQLTRHAAYASLGSCHNTQNDR

SEQ ID NO: 258684 - protein, 40 aa, Glycine max
  Clone ID: PAT_MRT3847_75616C.1.pep
EWLQQTYAGEKISIRHSVEASVDRQSRVITWLNIMCTFQW

SEQ ID NO: 258685 - protein, 123 aa, Glycine max
  Clone ID: PAT_MRT3847_75617C.1.pep
KTLLRGPMLKPPSPRGGSSSFRMGRVFFPLRFRPLRRPGYLPVWPLFGPPRFSLFYSGGFFWGFWVGPFFFPARPAVSLHLAILFFPSFKGIWFSFRYALPCFRGAPPPRVLLNLKNHRVILF

SEQ ID NO: 258686 - protein, 67 aa, Glycine max
  Clone ID: PAT_MRT3847_75618C.1.pep
RSGLERKFMTESMVREPSTKAPCSLPPPLEPTSRRVFYANKLNSIRRVERWEDNYWKNSTQQLHTRI

SEQ ID NO: 258687 - protein, 69 aa, Glycine max
  Clone ID: PAT_MRT3847_75619C.1.pep
PKSRKPMESTVIEKSATSKLICYQHPNEVHDPIISRFSFKQNSLYPWLRRHYPPSLSPYHFMTRQLRLI

SEQ ID NO: 258688 - protein, 69 aa, Glycine max
  unsure (1)..(69): unsure at all Xaa locations
  Clone ID: PAT_MRT3847_7561C.1.pep
IDTSGIHALEELFXSLQKRDVQLVLATLGQIVIDKLHTSNFATLLGEDKIFLTVAEAVAYCSPKLAEEP

SEQ ID NO: 258689 - protein, 60 aa, Glycine max
  Clone ID: PAT_MRT3847_75620C.1.pep
STSAEKNGSSQTVQNGQIPQTTRKYPDVQAKNGSNLGSNKSKQCTQRTKHPLHSAQEHPQ

SEQ ID NO: 258690 - protein, 72 aa, Glycine max
  Clone ID: PAT_MRT3847_75621C.1.pep
LKGNKPDFHVAMAPQRAKPFYASLVDRFRNAYNSDAIKGMLCYLSFNFHFSFSIIINKYSKFIIKNKDSKLN

SEQ ID NO: 258691 - protein, 286 aa, Glycine max
  Clone ID: PAT_MRT3847_75622C.1.pep
SFHFFFGGGGGGGAPFFFFFFLFLYFSIFFSCWTEQEDTYLWEDDDDRYSVEKIPVYDSAEDEPVSNFNGQTEPSLDVIIKAEQLLESTAFHVQPLDSVQMKDLDVKKIKTDVADEHMNLYYQDGEQTLSRKNAISRIRSNTAGRNYLLGPRSMSTKRSRSYNGVRFKNLTEKKIDAKFAAALLAFKEAQEEILNCEKIKDDATSALDSLYDEIRPAIEEHERDSQDSVSTTVAEKWIQACCLKLKAEFDLYSSIVKNVACTAQRAPGQGKPTEVDNENEIKLLTG

SEQ ID NO: 258692 - protein, 50 aa, Glycine max
  Clone ID: PAT_MRT3847_75623C.1.pep
GGPYCEREMRYHAEHPGMNYHHAGHCAEDAGEERIVTSQYAGRVAIESSI

SEQ ID NO: 258693 - protein, 275 aa, Glycine max
  Clone ID: PAT_MRT3847_75624C.1.pep
MASSVVVANGNLNPNDTRGKTITCKAAVAYGPGEPFVVERILVHPPQKMEVRIKILFTTICHTDLTAWQGENEARRAYPRIFGHEASGIVESVGEGVSDMNEGDLVVPIFNGECGDCKYCKCEKTNKCERFGVDAMKKVMVSDGATRFYTMDGKPIFHFLNTSTFTEYTVVDSACIVKIHIDGSNGDLNRNIKRLTLLSCGVSSGVGAAWNTADVHFGSTVAVFGLGVVGLAVAEGARARGASRIIGVDINSDKFIKAREMGITDFINPKDDERP

SEQ ID NO: 258694 - protein, 62 aa, Glycine max
  unsure (1)..(62): unsure at all Xaa locations
  Clone ID: PAT_MRT3847_75625C.1.pep
KKNYSCGKYYSGPAATAAVKKTKRPENAGKLIVAVFPSFRERXMGGVLLPREEKTEGMVFGP

SEQ ID NO: 258695 - protein, 63 aa, Glycine max
  Clone ID: PAT_MRT3847_75626C.1.pep
NWPLHLACSTMAKKTSPLSQKIEFEFVTIVLVVIIDWWQCCFFTFLFGVSFKTTSLSQIPCGD

SEQ ID NO: 258696 - protein, 130 aa, Glycine max
  Clone ID: PAT_MRT3847_75627C.1.pep
VRKSRLDHIRKIATTARDEFGVRAVIHPHAGGYIEFADEIDRIVADITADTVGLCLDTGHLHYSGMDPETWLRRHAARLDYVHFKDIDAAVYDAVMGEHIAFFAACARGVMCPIGKGVLHYPSIRRALYD

SEQ ID NO: 258697 - protein, 38 aa, Glycine max
  Clone ID: PAT_MRT3847_75628C.1.pep
MWWRIHCRLYFTMVSSLACGPSLWSMVFNEIRAGYMVF

SEQ ID NO: 258698 - protein, 86 aa, Glycine max
  unsure (1)..(86): unsure at all Xaa locations
  Clone ID: PAT_MRT3847_75629C.1.pep
MASLKVACVAVMCMAMVSAPMMVQAVTCNVPXLTLMQGGSVSIGXCCGGVRNILGSANTTTDKQTVCKCLQQAAXTMESLKFSGAG

SEQ ID NO: 258699 - protein, 231 aa, Glycine max
  Clone ID: PAT_MRT3847_7562C.1.pep
MKSKFLFVFLLLGILNCEAQYFNANPYDYLQLALRWPNSYCLTHEGGCREIVPQYFTISYLHPMRRGGPDLQNCPSPFNMPNSTMEINKNDLLKYWPDLRTDNFIESKSLWRDQWRKFGSCYSMMPDDYIVYALNSRKRNDLKKILTNAGIVASGNPYPTRRILQAFRKALGVNVDIVCEPDRSGNVYLAEVHQCVDAAGTTSIDCDNKARGCDDDPIFPYMGFQPDKDPK

SEQ ID NO: 258700 - protein, 32 aa, Glycine max
  Clone ID: PAT_MRT3847_75630C.1.pep
FAWIRWPKLCNFIPIDDLVTQISIFIYSSPRA

SEQ ID NO: 258701 - protein, 114 aa, Glycine max
  unsure (1)..(114): unsure at all Xaa locations
  Clone ID: PAT_MRT3847_75631C.1.pep
MEEASPKIFIPNTIQGVSEHVTGQIELLWELVKVPLIVPLLKLGVYICLAMSLMLFMERLYMGIVIILVKLFWKKPEQRYNYKPLQDDVELGSXHLPTVLIQIPMFNEKEVTKR

SEQ ID NO: 258702 - protein, 72 aa, Glycine max
  unsure (1)..(72): unsure at all Xaa locations
  Clone ID: PAT_MRT3847_75632C.1.pep
VSIVTEDAKTTXPYRKRTATPSKAXGKAAEDTIKPEAXPHKRGQXGEXQEKGXPKQTQEEXPTAGATQGXPT

SEQ ID NO: 258703 - protein, 61 aa, Glycine max
  Clone ID: PAT_MRT3847_75633C.1.pep
GITGNLASWRSRAPPSRTAGHQCVNFSVWWLFEPLITTLVLNLNNPYSLRSVTLNRWDSIM

SEQ ID NO: 258704 - protein, 46 aa, Glycine max
  Clone ID: PAT_MRT3847_75634C.1.pep
SGRPFFYLYIEVIYENIILLFFKFYKNLFFFYLLFIFLVFFFFFFF

SEQ ID NO: 258705 - protein, 302 aa, Glycine max
  Clone ID: PAT_MRT3847_75635C.1.pep
MCAHVRQTLADLSSQEVADATRIQYGGSVKPNNIKEYMAQSDIDGALVGGASLKVEDFVQLLEDGFANRESEHGNAVKQAHKPNFDRYYEKYPTTQIEASGLDVGLPEGQMGNSEVGHMNIGAGRIVYQSLTRINKSIEDGEFFDNTVLNNAVKHVKDNGSALHVFGLLSDGGVHSHYKHLFAILELAKKQGIDKVYVHAFLDGRDVDQKSALKYIEETEDKFKELGVGQFASVSGRYYAMDRDKRWDREERAYNAIRNFEGPTFTSAKAGVEANYKNDVTDEFVEPFIVEGQNDGVNDGDA

SEQ ID NO: 258706 - protein, 49 aa, Glycine max
  Clone ID: PAT_MRT3847_75636C.1.pep
NICSTNNTMSTKITYIVRHEKILNFFVFQMGNIHVIDIKIRLFRIGFWL

SEQ ID NO: 258707 - protein, 46 aa, Glycine max
  Clone ID: PAT_MRT3847_75637C.1.pep
DAQMDGGGGSPAQDESMDACTEAQQRMDNYLTQMNATSNREGTSLM

SEQ ID NO: 258708 - protein, 55 aa, Glycine max
  Clone ID: PAT_MRT3847_75638C.1.pep
QAKYIQELSKNLRNPQWRIRNHDHRIYERNIMGTVPLQQSPKRCLGFSKPERQQS

SEQ ID NO: 258709 - protein, 86 aa, Glycine max
  unsure (1)..(86): unsure at all Xaa locations
  Clone ID: PAT_MRT3847_75639C.1.pep
ILTLPKSTLIYPAHDYKGFTVRTPLSFFLPDLLGVXLYKLLIXVSTVGEELQNNPRITKDEVMLDDIHIYMKVKVVNHEKRLFWIS

SEQ ID NO: 258710 - protein, 104 aa, Glycine max
  Clone ID: PAT_MRT3847_7563C.1.pep
DYIVYALNSRKRNDLKKILTNAGIVASGNPYPTRRILQAFRKALGVNVDIVCEPDRSGNVYLAEVHQCVDAAGTTSIDCDNKARGCDDDPIFPYMGFQPDKDPN

SEQ ID NO: 258711 - protein, 68 aa, Glycine max
  unsure (1)..(68): unsure at all Xaa locations
  Clone ID: PAT_MRT3847_75640C.1.pep
DAXSXVQCVGRLRXXXPXGLRGXQGSVTFPIATPTVRKRQCELSXMHGGQTPQFRIYPDRSRXXQCLC

SEQ ID NO: 258712 - protein, 87 aa, Glycine max
  Clone ID: PAT_MRT3847_75641C.1.pep
LARYDSDLNASYDLHDHYHAYEDFHGRDCRHDGAFSNREGGGRGREAAGRRRQIAAAGGRALRPPSIIFSRPCKHINQPKGSKPGSK

SEQ ID NO: 258713 - protein, 83 aa, Glycine max
  Clone ID: PAT_MRT3847_75642C.1.pep
GIHNSLSSSASHSLLFSHRVRVFFSSGLSLSFYFHGSARCSQWWVRECRCCCVVCRFEAAAPHRTLPTRTTPFCSTRPRLPLT

SEQ ID NO: 258714 - protein, 149 aa, Glycine max
  unsure (1)..(149): unsure at all Xaa locations
  Clone ID: PAT_MRT3847_75643C.1.pep
GVDNTHNPEXSTCEFYEVGATLPDVIERTEQLIHGLHTAVEALRATYFPTLSAPEGIDFTAPFAQLPFIPTIEKAINRTXPTCADQXATNDILALLNDLDLVIPPNPTLARLLDTLAEQYIEPLCTNPTXITHHPEPLSPSAMLTCAKP

SEQ ID NO: 258715 - protein, 90 aa, Glycine max
  unsure (1)..(90): unsure at all Xaa locations
  Clone ID: PAT_MRT3847_75644C.1.pep
AQGXLATRMVLVXXWFAPCAIPXSLLALAAQKIPEKQKGTCFWRKLLXSITCGXTSSNTXKSELEASSLLLRFXIARSSTKQGRIHFXEI

SEQ ID NO: 258716 - protein, 167 aa, Glycine max
  Clone ID: PAT_MRT3847_75645C.1.pep
DTAFHIQTKLGGFAIPKEAQGKVAKFDFHGQPAELKHGSVVIAAITSCTNTSNPSVMLGAGLVAKKAHELGLKVKPWVKTSLAPGSGVVTKYLLQSGLQKYLNEQGFHIVGFGCTTCIGNSGELDESVASAISENDVVAAAVLSGNRNFEGRVHALTRAYYLASPPL

SEQ ID NO: 258717 - protein, 43 aa, Glycine max
  Clone ID: PAT_MRT3847_75646C.1.pep
IGKSFRALKQKIPWQRGVCVHKRIPYNKNLCIALYYCINFKIK

SEQ ID NO: 258718 - protein, 64 aa, Glycine max
  Clone ID: PAT_MRT3847_75647C.1.pep
SILYVIHMDHHTSISVSIAKSIRLRIFSQEAWRFIRLMCDTKNRPFINMTGRRFMMQAIFQDST

SEQ ID NO: 258719 - protein, 259 aa, Glycine max
  Clone ID: PAT_MRT3847_75648C.1.pep
MATQEDEEDEIINPFTMLLIHEEDKPSVSATLPAAAPNHHLLQHHPLRSIQSTVAIRQLPSEGLSFQLWPAATSLVSLLDLHRENPPSASPLSAALHGRRRIIELGSGTGLVGIAAAATLGAHVTLTDLPHVVPNLRFNADANAAVVGPTGGVITVAPLRWGHAADVEAIGREFDLVLASDVVYHDHLYEPLLETLRLMMLSERNGKMVFVMAHMRRWKKESAFFKKARKHFNVDVLHTDTPCDGSRVGVVVYRFVAKG

SEQ ID NO: 258720 - protein, 112 aa, Glycine max
  Clone ID: PAT_MRT3847_75649C.1.pep
RLREDDRRGISCAQEVIQYLVRDTLSFWFISATMFAQDGGKSGDMGAKLKGYALAFCVFHSATFAWGIDNSYSPTQRTEVVLSHLKFRARTLHRHGAVFSRCSTWKAYVSGI

SEQ ID NO: 258721 - protein, 138 aa, Glycine max
  Clone ID: PAT_MRT3847_7564C.1.pep
LEIGGSQMFFALAQHLRQYKAPSFPEDIVEQSIEEIGGKVVSQVGFQESAIPIGQNPEKFRPKKAAVLICLFEGDDGDLRVILTKRSSKLSTHSGFKRRYSVSFIFCHFAQGVRLKFRCPISEGCARLRIAYRKHYSG

SEQ ID NO: 258722 - protein, 105 aa, Glycine max
  unsure (1)..(105): unsure at all Xaa locations
  Clone ID: PAT_MRT3847_75650C.1.pep
MGGVTGTPRDANVKSKVAGDTTNTQDGVSVKDNAKAIIRGAHRRTQEQDSEHLHIKRQLITDKNCXRKLKGDDHFNDDXTCRRIRTVLKHEEKLLIRATKGYRYK

SEQ ID NO: 258723 - protein, 115 aa, Glycine max
  Clone ID: PAT_MRT3847_75651C.1.pep
NPILVEMLHRKLPMAGLKNGFNTLEPASSQMETNSGINASQQVTDGRAENEGEKECELMSLEFSGEKSKTPNSRKRKHLSEPLSEAQLDINGSAASSPNVHLTQIGNKMKTRKRK

SEQ ID NO: 258724 - protein, 173 aa, Glycine max
  Clone ID: PAT_MRT3847_75652C.1.pep
HGEGGNYSKQIEDTGISDTSDDEDWNDAAAPSRKKKLTGNVTPVSPNANASNNSIHTLKRNAHQNKVENTNSSPTKSLDGRSKSGSRDKRSGSSAHKRLGEAVVQRLHKSFKENQYPDRSTKESLAQELGLTYQQVAKWFDNTRWSFRHSSQMETNSGRNASPEGTEGRAEKG

SEQ ID NO: 258725 - protein, 56 aa, Glycine max
  Clone ID: PAT_MRT3847_75653C.1.pep
WSNLHLRSYVVFSGFGCPFSCLTTFICKFYLDWVKKEINAHNLNNFQVYFSYVFLL

SEQ ID NO: 258726 - protein, 43 aa, Glycine max
  Clone ID: PAT_MRT3847_75654C.1.pep
PVRTHPSDRHHPKNPFKIYDTVKSTSYQSSFRAYITYVLHTPT

SEQ ID NO: 258727 - protein, 53 aa, Glycine max
  unsure (1)..(53): unsure at all Xaa locations
  Clone ID: PAT_MRT3847_75655C.1.pep
IGKLYGSLAILREIKAEFVNLVNASRIIGYCFSAYLSIKVYDRKRWFISSCKX

SEQ ID NO: 258728 - protein, 116 aa, Glycine max
  Clone ID: PAT_MRT3847_75656C.1.pep
MDYTLEHATTRGWWVASPLEQAASASDKYPFAEHPQPSASSIVRYRRRCAPVLLASSPRASDVMYCDGIRLRINARKQMVTEFTESPSHYSLHRFTQGDREACIRMTTRPDVRREA

SEQ ID NO: 258729 - protein, 127 aa, Glycine max
  Clone ID: PAT_MRT3847_75657C.1.pep
VSFFDASCQIFTLSAVPLERMPKSVKECFIVLKPGGMVFFRDYGLYDMTMLRFEPDKQVGFREYMRSDGTRSYFFCLDTVRSLFLGAGFTELELDYCCVKSVNRQKGKSMQRVWVHGKFQKPALSCQ

SEQ ID NO: 258730 - protein, 51 aa, Glycine max
  Clone ID: PAT_MRT3847_75658C.1.pep
KRTRNSFTSLCRDSLNFSSSRTWSIRDTGWSAQCRSFGTLNSRAAPLIGIS

SEQ ID NO: 258731 - protein, 79 aa, Glycine max
  Clone ID: PAT_MRT3847_75659C.1.pep
YFLWENPKKNKKYCQDFYAFEPCIAQHLHFFITKTHLLEGGLSPHFCINKKLGIQNQFRPLVARCNSSSPKHFFFFCSY

SEQ ID NO: 258732 - protein, 137 aa, Glycine max
  Clone ID: PAT_MRT3847_7565C.1.pep
VSVGVYQFNLTTPRATGQSVEIDINHEPEETASSSVTINKAFWASILGYLLLLILSIAIITRFLDRPERSQQTSSSVTTTPSIAAPTTPDRSTPSSVVNDSSPRTPQPFVDYVRKTIDETPYYKREGRRRINPQNTF

SEQ ID NO: 258733 - protein, 516 aa, Glycine max
  unsure (1)..(516): unsure at all Xaa locations
  Clone ID: PAT_MRT3847_75660C.1.pep
SLEFIALMAFSLAWLVIEAGVGVAVFVRFFVNKRGMESEIIDRLGNGFSRPPFAAVVVVCTVVSILACVPLGELFFFHRKMXRHLTSTDAQDGSISVNLPQEPRYKRDSLSNQLPVFVPGGFENNLQPRSGXINLCCFEIPMSGQSFCWNRKDSVPHLEPGMLXTRVEPFAAGIAERGQKMPKRPVRISAWKLAKLDSQEAVRAAAKARASSSVLRPVDNHRLPDGELSSSGNMSIRSSLSTETGTNKEIKHELRLSPVRNSIAPSQGSRDEYETGTQSMSSFSSPSHVQEAVTLSPLPQDHSLGGFRAGTSIPSLVPERPLTSKATLSNFRNPISSPSLGFDGRTAMPKGIGNDPLLLSTSNTSILRDVKRASVVWDQEAGRYVSVPLLPSEARNRSSMRIEFPNVNAETSSIGRKSVIPQQELSSSAPKSPGQHIQNLMYTGDSIFYGGPFLSAPVKDGLRNERHLASTDAQEGSISVNLPQEPRYKRNLLSNQLPVFVPGGFENILQPRSGMN

SEQ ID NO: 258734 - protein, 169 aa, Glycine max
  Clone ID: PAT_MRT3847_75661C.1.pep
MPEMVDSNSTPSSSTGSRTVLLLLRVLTFVFLLIALILIAIVKQTDDETGVEIKFNDIYAYRYMISTIIIGFAYNLLQMALSIFTVVSGNRVLSGDGGYLFDFFGDKIISYLLISGSAAGFGVTVELGRGVPSNSFMDKANASASLLLIAFLFTAVASTFTSFALPKKD

SEQ ID NO: 258735 - protein, 39 aa, Glycine max
  Clone ID: PAT_MRT3847_75662C.1.pep
DRQWHSYHQSQPDTIAQVGHITPVRARHADHSCWYFLCT

SEQ ID NO: 258736 - protein, 81 aa, Glycine max
  unsure (1)..(81): unsure at all Xaa locations
  Clone ID: PAT_MRT3847_75663C.1.pep
ISSSTSAKGVIGTGIIISESVIDTVTALASHISIQLSNHSKADVHEKGILGQATXFQGXIPRXTXAXXXDXYDLNFEWDST

SEQ ID NO: 258737 - protein, 92 aa, Glycine max
  unsure (1)..(92): unsure at all Xaa locations
  Clone ID: PAT_MRT3847_75664C.1.pep
GPYCALLAGSSPELXLTSGITXIXXEPRELXELLKXVDTPTIWGGEPXHXHLXTXLQXRRLKSENIEGAFXTFPYYLSDTTKKGXIASTFIH

SEQ ID NO: 258738 - protein, 92 aa, Glycine max
  Clone ID: PAT_MRT3847_75665C.1.pep
VRYRIKPYLLSGSFFVYSTASFSALCFSGTTATVSATSFYVSKVVSTLLVAAFFKKATNANTNFNSSRLNLTIETPTGFFLTSSLVSLSLSL

SEQ ID NO: 258739 - protein, 158 aa, Glycine max
  Clone ID: PAT_MRT3847_75666C.1.pep
SDGQVGIIAIEIMPISSRITAEALLKDEMCEEINRILKAHGWSRIVLVSHSYGSVLAAHLLHTPQTAQKIGPVVFVDPVSFLLHLPDVAYNFICRKPARANEHLLSYFGSKDMGISHTLFRRFFWTDNVLWKEDIRDHRVSVVLAGRDIVIDTKTIGA

SEQ ID NO: 258740 - protein, 49 aa, Glycine max
  Clone ID: PAT_MRT3847_75667C.1.pep
SPKLLIQAHHIHYPISLNAQSSSAYPPLITLRHSSIKPTFPTCKFTIQA

SEQ ID NO: 258741 - protein, 140 aa, Glycine max
  Clone ID: PAT_MRT3847_75668C.1.pep
PSPEEDVFPLVICAETTSNSVIDASPHMQITQAVLEKSNGIGPFQVKVVRQILWIDDIRYELRELYGIGSSTVADFDDNDPGKECVICMTEPKDTAVLPCRHMCMCGDCAKALRLQSNKCPICRQPIEELIEIKINNGNE

SEQ ID NO: 258742 - protein, 56 aa, Glycine max
  unsure (1)..(56): unsure at all Xaa locations
  Clone ID: PAT_MRT3847_75669C.1.pep
ARYDEIVKEVSSYLKKVGYNPDKFLCSISGLGXTNMMRXTNLDWTXVHLLLDSQSL

SEQ ID NO: 258743 - protein, 87 aa, Glycine max
  Clone ID: PAT_MRT3847_7566C.1.pep
MIGVVVEAHDLQVSSQQRHHFLDGHHLDHLPFKETKSATLSKVQGFAEPLMRNFSVCFLTMGIGLSGSVECAGRVEAKLSSHPSLST

SEQ ID NO: 258744 - protein, 53 aa, Glycine max
  Clone ID: PAT_MRT3847_75670C.1.pep
TDKKVGRSLSDSRILEVSFNSCREAVRGSYPSKGLTGSCSTWSPYKKKKENPK

SEQ ID NO: 258745 - protein, 45 aa, Glycine max
  unsure (1)..(45): unsure at all Xaa locations
  Clone ID: PAT_MRT3847_75671C.1.pep
ITTIEEAKLFYPLFRLXANIALMFSFLTVKYFFNLMHNLSPLIYS

SEQ ID NO: 258746 - protein, 58 aa, Glycine max
  Clone ID: PAT_MRT3847_75672C.1.pep
LAIHIVCLTFDMHVYILQDSPKKFEISKLKNMIVTNLHQTQSPLSYITYNCYRYVTVS

SEQ ID NO: 258747 - protein, 191 aa, Glycine max
  unsure (1)..(191): unsure at all Xaa locations
  Clone ID: PAT_MRT3847_75673C.1.pep
XEXGGXRXXXXXXNEXXEXXXKKXDLXNGVXXXGGWXVXGXYLDXXGXIFKKXLEKNDXGDYFLLIXXXLGGXXVIRXVXEXXDIXEXFNGXSLXSXXILWKEGNGKGNXFERFCXDLLKKVKKDCXLXXNXXYGIXXGKVXYNXKLFEFFEILEKFEDRDGKIFVLKGRGRKXXENVKLWKKEENDIEWG

SEQ ID NO: 258748 - protein, 35 aa, Glycine max
  Clone ID: PAT_MRT3847_75674C.1.pep
FIFFFFFFFFFFFFFFFFFFFFFFFTKVCHRTCLQ

SEQ ID NO: 258749 - protein, 89 aa, Glycine max
  Clone ID: PAT_MRT3847_75675C.1.pep
FFFFFFFFFFFFFFFFFFFFFFFFTITAGNMPKRVINTNKYKRVFLRKVKLGTIMGVLGPLNIILQEKGYSFQGIQNPILIVLFGRLQL

SEQ ID NO: 258750 - protein, 162 aa, Glycine max
  unsure (1)..(162): unsure at all Xaa locations
  Clone ID: PAT_MRT3847_75676C.1.pep
QLLHQPSLSSISSLACGGAHVIALTSAGKVLSWGRGNSGQLGHGLVVSNSLYPKAVTSLDGYFITHVSAGWGHSGFVSNNGCVFTCGDGSFGQLGHGDHASHCSPVKXSCFIDQHVKXVAYNMHHSLILLKNYTRNQVYRLYSRKHNQLDIINDKIKSINIS

SEQ ID NO: 258751 - protein, 59 aa, Glycine max
  Clone ID: PAT_MRT3847_75677C.1.pep
FYAIYQLSRDSDRICQLFMRYVHLGCSTLRLGNWDAHALCNQVITGFQYHAWPKSVGVC

SEQ ID NO: 258752 - protein, 57 aa, Glycine max
  unsure (1)..(57): unsure at all Xaa locations
  Clone ID: PAT_MRT3847_75678C.1.pep
GGGRKXKKKREGKKGKKKREKKKKREKKKKREKKKKEKKKXKKKKKKKKTQRAAALE

SEQ ID NO: 258753 - protein, 387 aa, Glycine max
  Clone ID: PAT_MRT3847_75679C.1.pep
METVCLKSGMVPTISISGSLDARANPSQVSTVGRAAGDKPPQRSVFSRFSFWYPLESLWPRGNNSRYKGLALDDAVLADNNAEAKAVRDDGQGDGTERQTGNWVLKILHVKSLWEGKQRNEEDGTVHDQTQTNFDEEEVCECDACGVDEDDGYCEEEEAEFDRGSFSRMLRRVSLGEARLYAQMSHLGNLAYDIPRIKPGKLLKHHGLRFVISSIEKKELAVAATAEKDPQKVGSSIEKKEFAAIAEKDPQKVGSSTEKKEFAAIAEKDPQKVETDEKVEEKEETKDPKNAGYKISATAAYNIAASAATYLHSQTSSIFPFKSSNAVTGEGSLEGSNESLDTVNMLNTEVASLMATTDSVTAVVAAKEEVKQACADDLNSAHSTPCE

SEQ ID NO: 258754 - protein, 144 aa, Glycine max
  Clone ID: PAT_MRT3847_7567C.1.pep
MNFNLALVIIVSTILGIGLEGCDSKVVQFIFGDSLSDVGNNMHLSRSLAQASLPWYGIDMGNGLPNGRFTNGRTVADIIGDNMGLPRPPAFLDPSVNEEVILENGVNYASGGGGILNETGAYFIQRFSLDKQIELFQGTQKLIR

SEQ ID NO: 258755 - protein, 52 aa, Glycine max
  Clone ID: PAT_MRT3847_75680C.1.pep
LHDKRFVLKSEPTLYMYHLSSVSPYTLSRPLMYTIDDRVPSLDGRWVVTFHV

SEQ ID NO: 258756 - protein, 136 aa, Glycine max
  Clone ID: PAT_MRT3847_75681C.1.pep
METMCLKSGIVPTISISGSLDARANPSQVSTVGRSASDKPPQRSVFSRFSFWYPLESLWPRGNNSRYKGLALDDAVLSDNNAEAKAVGDDGTERQTGNWVLKILHVKSLWEGKQRDEEEGSGRDQTQTNYKEEEEV

SEQ ID NO: 258757 - protein, 68 aa, Glycine max
  Clone ID: PAT_MRT3847_75682C.1.pep
KTPTPNGPLVPRAIKKLSPLPAKGFRKNARIVSSKKTNPSHKWPQNCRLNLRTNTSKFIKKIAMSIKS

SEQ ID NO: 258758 - protein, 502 aa, Glycine max
  Clone ID: PAT_MRT3847_75683C.1.pep
MEKMLGRNCGKLKTKIVCTLGPSSRSVEMLEKLLKAGMNVARFNFSHGTHSYHQETLDNLRTAMNNTGILCAVMLDTKGPEIRTGFLNEGKPIQIHRGQEITITTDYSIKGDENMISMSYKKLAHHLSPGSNILCADGTISFTVLECDKENGLVRCHCENSAVLGERKNVNLPGVVVDLPTLTEKDKEDILEWGVPNKIDIIALSFVRKGSDLVEVRNLLGKHAKSILLMSKVENQEGVANFDEILENSDAFMVARGDLGMEIPIEKIFLAQKVMIHKSNIKGKPVVTATQMLESMIKSPRPTRAEATDVANAVLDGTDCVMLSGETAAGAYPDIAVQTMARICSEAESFIDYGDLFKRVMETAPTPMSPLESMASAAVRTANCINAALILVLTRGGTTSKLVAKYRPSMPILSLVVPEITTDSFEWFCSQEAPARHSLIYRGLIPVLGTGSFGDSMTESTEETIQLALSYAKKNDLCKPGDSVVALHRLESGTVIKILDVC

SEQ ID NO: 258759 - protein, 184 aa, Glycine max
  Clone ID: PAT_MRT3847_75684C.1.pep
MDFYFGNSPPYPNNYAHNSLNMALSSPEIALSDYLMLDDYVDHQDSRSSQSTESSEKATFNDATHGFSTGATSKNNNINCKNGINENKGGVGPRIAFRTKSELEIMDDGYKWRKYGKKSVKSSPNLRNYYKCSSGGCSVKKRVERDRDDYSYVITTYEGVHNHESPFTTYYSPISFVHSDTTFK

SEQ ID NO: 258760 - protein, 84 aa, Glycine max
  Clone ID: PAT_MRT3847_75685C.1.pep
VFNIYCKHALRQGLTTTADGGPHQAMRVAVFLCRQVNPKPTKHCVHTKVLAYLDNSATAPTGTELLAQLLVLDLCQSPSPVSNK

SEQ ID NO: 258761 - protein, 78 aa, Glycine max
  unsure (1)..(78): unsure at all Xaa locations
  Clone ID: PAT_MRT3847_75686C.1.pep
FLSLSFFQDQTLXISPSTTPTTFHSPLPTTPSATIEPFLHLTCNKNFXXXXXXXXXXXVXCLDLRLAAHSQNTVESVN

SEQ ID NO: 258762 - protein, 65 aa, Glycine max
  unsure (1)..(65): unsure at all Xaa locations
  Clone ID: PAT_MRT3847_75687C.1.pep
GGNXXSXXXLXVENREFHGVGLLVWXILYCYIRIMFSYSXXXFLIXLQXRXRXRERNIERXTWXI

SEQ ID NO: 258763 - protein, 149 aa, Glycine max
  unsure (1)..(149): unsure at all Xaa locations
  Clone ID: PAT_MRT3847_75688C.1.pep
STQDKQIPELXTLSLLPKSXWLNLINWDIIKVRNRPIEPPKKPKEAPFFLPSVPSLSKKILFESNKLSCKKNNKTDNEKQINTRLDIPQSRVLYLLQYSKKTDNYAACTNYIKKLSPSTLDIKLLICQIINNNDDQRKTDKRPELVSIQ

SEQ ID NO: 258764 - protein, 51 aa, Glycine max
  Clone ID: PAT_MRT3847_75689C.1.pep
GFHSRLKALFYKIPFSIWEPRKTMVTPKISTLSKNLGYCVFQTRVIKFLKT

SEQ ID NO: 258765 - protein, 81 aa, Glycine max
  Clone ID: PAT_MRT3847_7568C.1.pep
IFQEEGTPPRFEADSLVHAPGIKPFNACPVNPSTYFRGKEGVHLFCINSFLSIFSFLVTPPLSCVHNPRDPLWGVAHYKRE

SEQ ID NO: 258766 - protein, 97 aa, Glycine max
  Clone ID: PAT_MRT3847_75690C.1.pep
MANHSSSPSLLCASFNQDHSYFAVGTRDGVRIFDTNTGRLCYERAVGAFVIAEMLFSSSLLAIVGAGDQPSLSPRRLCLFNTTTGAALKELNFLTSI

SEQ ID NO: 258767 - protein, 133 aa, Glycine max
  Clone ID: PAT_MRT3847_75691C.1.pep
KGNPPKKESKPRGGGQKNPKDNPRAEPRGHPPQTGGPPPGGPRLPARPLLKRAGGLPQEGLTGTLVAPDHSSPRANPKQPEKRPAKPPGGKKLTKKLTPHSRPPPKKKRTTGGPMRAPTPRKRPPPERGQRGK

SEQ ID NO: 258768 - protein, 58 aa, Glycine max
  Clone ID: PAT_MRT3847_75692C.1.pep
SPFFLLIFSPFLRVAVGAFVIAEMLFSSNLLAIVGAGHQPSLSPRRLWLFNTTTGAAL

SEQ ID NO: 258769 - protein, 316 aa, Glycine max
  Clone ID: PAT_MRT3847_75693C.1.pep
MVNLVAAQRPLLHGLMKMAGVRPYTVEIEPGTVMSFWVPSETLTKPKKKNEKPRISSKPSRPAVVLVHGFGAEGIMTWQYQVGALTKKYAVYVPDLLFFGGSTTDKPHRSPAFQAQCVVAGLRKLGVEKCIVVGYSYGGMVAFKMAEMYPEVVEALVITGSILAMTDSISATSLQELGFSSSSELLLPTSVKGLKALLTVASHKKQWYPNRLLKDYLEVMITNRKERGELLEALVVSDKDIIIPNFSQRIHLLWGENDKIFNLELAQNMKEQLGDGTTFEAIKKAGHMVNMERPRLFNRCLKQFIASFLAPNGPKK

SEQ ID NO: 258770 - protein, 75 aa, Glycine max
  unsure (1)..(75): unsure at all Xaa locations
  Clone ID: PAT_MRT3847_75694C.1.pep
VLFSFVFAPSFVSPSFTLLCFSLPLLSFLLSSASFSPVPRWGPVFPCCHPSLCSVHWFAGWFLFENPWSTLESXA

SEQ ID NO: 258771 - protein, 108 aa, Glycine max
  unsure (1)..(108): unsure at all Xaa locations
  Clone ID: PAT_MRT3847_75695C.1.pep
LIPGFFFSLXXXHTLVILTHGCERLRIPSRLSISRRFPLEATLFPSLFQPCRLPYTWPSFSLPYASCSFICNTVCFLLHSPCFTSCCSVFSFTSFYLISVSYIVNNFS

SEQ ID NO: 258772 - protein, 45 aa, Glycine max
  Clone ID: PAT_MRT3847_75696C.1.pep
GNFVLCKKQVQSSKAAPQSELVSQKSNGGWKAWLNKSFSLKILSH

SEQ ID NO: 258773 - protein, 164 aa, Glycine max
  Clone ID: PAT_MRT3847_75697C.1.pep
HGAVEDHPWQVSTQQPQPASTRKLQWGTPAPEYIKCNVDVAIFQDSRSFGVDCCFKDSTSHFIRAKTSWYQGIPTTHEAEVSSLLAAISSTSEIHLQNIIFEIDCRANVDVLSSKNFTNSEVGIILRCCARKLSYLRNCSVQFVGKQVNHVVYCLTRTSRSFAC

SEQ ID NO: 258774 - protein, 547 aa, Glycine max
  unsure (1)..(547): unsure at all Xaa locations
  Clone ID: PAT_MRT3847_75698C.1.pep
LIRSHGVPSFTYAPIPLSGLVSIGFRLHRTEAEPSLSLESNKWLRLTYDIQSDQSGKLECLSVIAKIGSHLAICCRAESPASLDSLPLWTLEHHXQTVPIKDPILVLSGQKSTQVXEPDPQVDLHLGAAGPALVGEVFLVPVTLVSKGHDVYSGELKINLVDVKGGGLFSPRDSEPYALDSHHVQLLGISGPEGEDDSQLDSDKIKKIQQSFGLISVPILKNGASWSCKLEIKWYRPKPIMLYVSLGYTPFSTELNAQMVHVHKNLQIEGLTAILLKHHYLMPFRRDPLLLSKNKQASESDQSESLPLNQKNVLIVSAKNSTELPLRIKSISIEVEDDAERTCSIQHGTKELSNPSLLVPGEEFKKVFSVSSDMNISKLKLGTMCLSWRRDLGVEEQSASTSTLPWVVTKQKLPDVNVELPPMIVSFECPPYAVVGDPFTYNIRISNQTQLLQEIKYSLADAQSFVLSGYHNDTIYVLPKSEHILSYKLVPLVSGMQQLPKLSMTSVRYSAAYQPSNSSNSVFVFPSKPHFKATVSTNSRVESVANE

SEQ ID NO: 258775 - protein, 140 aa, Glycine max
  unsure (1)..(140): unsure at all Xaa locations
  Clone ID: PAT_MRT3847_75699C.1.pep
RGRVGTFPLKFNGELRRVDHVDHFPKSTXQAVRAPKAPGEGKPVWGYDSLPNFYSRSFDLSWQFYGANVGAPVLFGDTNLGLSKPKFGPTWIKNGKVFGVFFEGGTPEKNPAFFKVFKVPPPVPNVDPLVKEGLSFVSKK

SEQ ID NO: 258776 - protein, 34 aa, Glycine max
  Clone ID: PAT_MRT3847_7569C.1.pep
NPLHLPYRSRRPQTKLLNHWESPSALVMNSQLHS

SEQ ID NO: 258777 - protein, 73 aa, Glycine max
  Clone ID: PAT_MRT3847_756C.1.pep
IFTVPSTRPMNYSFQSMMLYVKTRIRGFFCSIFSHKKKGACNSDTGVYTMTPQGHLPAAYEILCSNCVLSDYT

SEQ ID NO: 258778 - protein, 54 aa, Glycine max
  Clone ID: PAT_MRT3847_75700C.1.pep
KCSPGTLFLKIFFHFLFYVKILHYFLSPVKKPPLKFFLKKLIKLFLIAKKLINN

SEQ ID NO: 258779 - protein, 30 aa, Glycine max
  Clone ID: PAT_MRT3847_75701C.1.pep
YYMKYIKVIKSLFDTQIFYSRIRCEDSICK

SEQ ID NO: 258780 - protein, 37 aa, Glycine max
  Clone ID: PAT_MRT3847_75702C.1.pep
MVTYQCFRNSQVSLSSNITCLTIIDPSQEHNNPPQWS

SEQ ID NO: 258781 - protein, 45 aa, Glycine max
  Clone ID: PAT_MRT3847_75703C.1.pep
DFRLLVLNIYFCFRQGVCVIEIAPLTHLSESDGPKSRVFCSSLWI

SEQ ID NO: 258782 - protein, 245 aa, Glycine max
  Clone ID: PAT_MRT3847_75704C.1.pep
TRPFTSREDNLVLGGVDNKGNNVLHLAAAKQQSSSHLLRNAKVEMQNDLAWFKEIEKKFHEFSYNTMVNDKGKTPEEVFYDQHEDLSDKIKDDSKEIANSGMIVAILVATVAFAAALTVPGEKTNAWFVVFIFTNAVALFASSASILSFLSNFTSLRFGQREFVKSLHPSLTFGPVLLFISVVAMVVAFTAASFLIFDHTSKWVSYAVASMGFFPLLLFILFQFRFFDDSLWSRYYRLSKFEKFE

SEQ ID NO: 258783 - protein, 42 aa, Glycine max
  unsure (1)..(42): unsure at all Xaa locations
  Clone ID: PAT_MRT3847_75705C.1.pep
MGVPTHLLXLLLLWITHAICDIRMTQSPXPLSASXGETVNXE

SEQ ID NO: 258784 - protein, 85 aa, Glycine max
  Clone ID: PAT_MRT3847_75706C.1.pep
FIFLKKGLEQSILTQHGPLKTGFSATKWKHMFPPAGGIMDGQTFLKSKTHLSAKSACHCFRTIKQGTCYNNVWHTGKRYPQRRTQ

SEQ ID NO: 258785 - protein, 129 aa, Glycine max
  unsure (1)..(129): unsure at all Xaa locations
  Clone ID: PAT_MRT3847_75707C.1.pep
MDLYWLIASMGTIEEAYDTYTKILRRWPVFYYGMGHMLTDISAARRFTYLSSILTDIGLSPXDRCSKEKDNEQNAPAVTLTGQVADGSATILGGELIDRLGHLKIWHGAGSSWDASTFSSVFGGRLPCK

SEQ ID NO: 258786 - protein, 193 aa, Glycine max
  Clone ID: PAT_MRT3847_75708C.1.pep
MEAGLESMGVSEAWKAHVGMALVQLFYGGYHVLTKVALNVGINQLVFCFYRDFLAFTIVAPLAFFLERRTRPPITKKLLMSFFFLGLTGIFGNQLLFLIGLSYTNPTYAAAVQPAIPVFTFLFTVIMGIEKVNLLRYEGVAKVGGTLICVSGAILMVFYRGPAGIGWRNLVLCFRCCTSAFISWSATDRVIRN

SEQ ID NO: 258787 - protein, 69 aa, Glycine max
  unsure (1)..(69): unsure at all Xaa locations
  Clone ID: PAT_MRT3847_75709C.1.pep
RCFREAAKXTEGFXGREIAKLMASVQAAVYGRPDCILDAQLFREIVDYKVVEHHQRLKLAAEGGQPCQI

SEQ ID NO: 258788 - protein, 64 aa, Glycine max
  Clone ID: PAT_MRT3847_7570C.1.pep
WDPQTFLAIVAKSAKRAKNYNECFPIGHMLVLPGVSSFSEFCINVPWTVKQLCLMLRVTATLNV

SEQ ID NO: 258789 - protein, 71 aa, Glycine max
  Clone ID: PAT_MRT3847_75710C.1.pep
RVRKIRLGLQTSSAATWLAAVALAPRRIAYLDLGRGACVRAVPPYVAALCFLFLRGSIALPKFALYLGHLA

SEQ ID NO: 258790 - protein, 120 aa, Glycine max
  unsure (1)..(120): unsure at all Xaa locations
  Clone ID: PAT_MRT3847_75711C.1.pep
MDDRGGSFVAVRRISQGLDRSNTCHSSSAEFVTGSTAWLGRGLSCVCAQRRESDARPSFDLTPAQEECLQRLQSRIDIPYDGSVPEHQDALRDLWNAAFAEEXLHGLISEQWKDMGLQGK

SEQ ID NO: 258791 - protein, 222 aa, Glycine max
  Clone ID: PAT_MRT3847_75712C.1.pep
METKSHSGSGISPSASPEFEFWMVRNPSFPQPNILSADQLIVNGVLLPLHLLNKPDPSPAITDSSSSSSSAATASKRWKDIFKKSDKKNTDAKKLKEKKSGVTTSAELNINIWPFSRSKSAGNAATRPKPFVPATRKANSAPCSRSNSAGESMSRIWPSSPARPGVHLGRSSPVWQVRRPKNPVPEPLNPDINKSKRESHRSKVVRGSGSSNTNVLNLNVPM

SEQ ID NO: 258792 - protein, 342 aa, Glycine max
  unsure (1)..(342): unsure at all Xaa locations
  Clone ID: PAT_MRT3847_75713C.1.pep
MVFLFHNQPMEVVLVQMLRLAWVAATLPIIVASIPTPKLNCLRGTLLGFARRGKIMHSSSQKVTISQRFFLHFYVVAFIWTTLLLVGTWAYAYSMVPLVVEPFSYSTITSFLTGGSTIRTDTHKLRQGYVAWQAVFLLLMMEVHVLRRLYETIHVFNYSPSARMHAVGYLTGLFFYVGAPLSLCGGCAVEVFNFLANLVTEFIVKGKNHMQVTELEFWQVVNPLFKLGWNHCIGADAFLWGWIHAXVLQIWQGSLRHSRQADEYVIPHGDWVEIVSSPHYLSEIVIYASFVVATGGSNLTIWLLFVFVVANLSFAAVETHGWYRQKFEDYPSSRFAIIPFIL

SEQ ID NO: 258793 - protein, 77 aa, Glycine max
  Clone ID: PAT_MRT3847_75714C.1.pep
MCNSDGDCRPLGFLLGLPFAFLARLVSIVGLVVWIVGLLLTCICPCCLCVTVIVECALELVKAPLHVMEWCTSQIPC

SEQ ID NO: 258794 - protein, 60 aa, Glycine max
  Clone ID: PAT_MRT3847_75715C.1.pep
NALGLYFFAPVKKTKVFFLPSDHFIKLMKAQSRDFFSFVKNAPDWSKKLRLLVFLANAQC

SEQ ID NO: 258795 - protein, 111 aa, Glycine max
  unsure (1)..(111): unsure at all Xaa locations
  Clone ID: PAT_MRT3847_75716C.1.pep
DAPGSGPYLLDRDRATLQALAFSPGFGSPYDYRVXTPGPDMPSQIXERAYHARLAINHSTYRDGASGGPVPFSTWFKCMKESSGNELWRFHFHYSPVTPSPVVQQMLEAIG

SEQ ID NO: 258796 - protein, 120 aa, Glycine max
  Clone ID: PAT_MRT3847_75717C.1.pep
NSKIFKPFFPQTRSTRRGIFTKGSNVSIFGHGEPMRQPLVEFDTWKDKVFQKKGFNVAFDEYYKPKLDELYARHQCAFVKNNANVLVTITCPNPTCGRVMEVTSVNYKCCHRDASNNGNI

SEQ ID NO: 258797 - protein, 54 aa, Glycine max
  Clone ID: PAT_MRT3847_75718C.1.pep
LLIISSWFWTSPFFFFFDCNNCAQHFKNIKWGFQVSDTYPCHSNKSFSTVKVPS

SEQ ID NO: 258798 - protein, 161 aa, Glycine max
  unsure (1)..(161): unsure at all Xaa locations
  Clone ID: PAT_MRT3847_75719C.1.pep
KFLPHQTQVXAVLIPFPAQGHLNQLIHILRLILSHNIPVHYVCTVTHIRQVTLHDXHNFISNIHLHAXFEALSFVSPPPNPNNEETYFPAHLLSSFEVSLHLLEPERKLLHSLSPQAKRGIVIHDYVMASAAHDATNMPNVENFTFHSTXTXCTAGYYWDK

SEQ ID NO: 258799 - protein, 125 aa, Glycine max
  unsure (1)..(125): unsure at all Xaa locations
  Clone ID: PAT_MRT3847_7571C.1.pep
MRLCDYAFYRKARLFVGPLSRFADPYLVAERTRCIMCIPRNQSDSCNLDLAPFQERATDRLQELSVPRDEEFLSIDWSQKLLVTYICCQEEFTSILLNSXEQVPTPPLDLMISEFVDRSVKELDI

SEQ ID NO: 258800 - protein, 64 aa, Glycine max
  unsure (1)..(64): unsure at all Xaa locations
  Clone ID: PAT_MRT3847_75720C.1.pep
ARARLYKPYLLFXGFDDKNAEILRMAKNKAGDDLGRFNFDPRNIDWMDYVLNAHIPGLVKYVVK

SEQ ID NO: 258801 - protein, 268 aa, Glycine max
  Clone ID: PAT_MRT3847_75721C.1.pep
IFRCFNVFSAGLRGEKLQFSSVRFCLKHKISCKLTDVGNDLSSSKELGKCQPLVKMCGITSAKDAAMAAEAGASFIGMVMWPNSKRSVSLSVAMEISKVARDYGAEPVGVFVDDDSETILRASDAANLEFVQLHGHGSRLAFPSLIQENRVIYVLHVNEDGSLLNTISDEECSLVDWVLVDSAKGGRTNKTFCSGKAFNWDQLKLPNIKSKYGWLLAGGIHPENVSEALSTLRPEGVDVSSGICASDGIRKDQSRIASFMNAVHSFQY

SEQ ID NO: 258802 - protein, 100 aa, Glycine max
  Clone ID: PAT_MRT3847_75722C.1.pep
QIADRGYVKAMGFYAFPRITEGMLTSNPLRIGNKLTLKPKFCFVFTCHSFSSIINLQSLPPFLFSNNLLYMNRNKTIVNSKTTCSRNLPSFRKGTKLKYS

SEQ ID NO: 258803 - protein, 770 aa, Glycine max
  Clone ID: PAT_MRT3847_75723C.1.pep
MKGNNTLLLHLFYTTLFLFLVVSSSSSTGNESNDDTNSKEVYIVYMGAADSTKASLKNEHAQILNSVLRRNENALVRNYKHGFSGFAARLSKEEANSIAQKPGVVSVFPDPILKLHTTRSWDFLKSQTRVNIDTKPNTLSGSSFSSSDVILGVLDTGIWPEAASFSDKGFGPVPSRWKGTCMTSKDFNSSCCNRKIIGARFYPNPEEKTARDFNGHGTHVSSTAVGVPVSGASFYGLAAGTARGGSPESRLAVYKVCGAFGSCPGSAILAGFDDAIHDGVDILSLSLGGFGGTKTDLTTDPIAIGAFHSVQRGILVVCAAGNDGEPFTVLNDAPWILTVAASTIDRDLQSDVVLGNNQVVKGRAINFSPLLNSPDYPMIYAESAARANISNITDARQCHPDSLDPKKVIGKIVVCDGKNDIYYSTDEKIVIVKALGGIGLVHITDQSGSVAFYYVDFPVTEVKSKHGDAILQYINSTSHPVGTILATVTIPDYKPAPRVGYFSSRGPSLITSNVLKPDIAAPGVNILAAWFGNDTSEVPKGRKPSLYRILSGTSMATPHVSGLACSVKRKNPTWSASAIKSAIMTSAIQNDNLKGPITTDSGLIATPYDYGAGAITTSEPLQPGLVYETNNVDYLNYLCYNGLNITMIKVISGTVPENFNCPKDSSSDLISSINYPSIAVNFTGKADAVVSRTVTNVDEEDETVYFPVVEAPSEVIVTLFPYNLEFTTSIKKQSYNITFRPKTSLKKDLFGSITWSNDKYMVRIPFVLTK

SEQ ID NO: 258804 - protein, 366 aa, Glycine max
  unsure (1)..(366): unsure at all Xaa locations
  Clone ID: PAT_MRT3847_75724C.1.pep
MNPVIPCSIGNVSIIPVFIYSTRKNNTLTRFNLSRSTVKPGSSSWRFLLPSFVASGAFPQNKGIRSFHKKSSTSISATETDVTVEEPSPVADEDPGEITSNEVGISEDSSSKSDANPDPAKGRRSRPARKSEMPPVKNEDLIPGATFTGKVKSVQPFGAFVDIGAFTDGLVHISMLSDSYVKDVTSVVSVGQEVKVKLIEVNTETQRISLSMRENADTGKQRKDAPAKTEKAGPGKRNSSKPSPKKDNVTKSTKFAIGQQLVGSVKNLARSGAFISLPEGEEGFLPVSEEPDDGFDNVMGNTTLEVGQEVNVRVLRITRGQVTLTMKKEEDTAGLDSTXTKGVVHVATNPFVLAFRKNKDIASFLD

SEQ ID NO: 258805 - protein, 52 aa, Glycine max
  Clone ID: PAT_MRT3847_75725C.1.pep
IFLFKFLFWPHLISVLTPICLKVEVLSRKFFQTLKQTRTYCMLLSQKYKTNF

SEQ ID NO: 258806 - protein, 113 aa, Glycine max
  Clone ID: PAT_MRT3847_75726C.1.pep
VVPINSSQILNMGCSSRWNCCAWWGSEAFSTLKLLFLVPLIVVVGFASVKGPSLCRWGFIADCSVSFTPLPSSSNSSSQILHQSKETEVFNVSKPEFNLAPVNKPDESHPRLK

SEQ ID NO: 258807 - protein, 51 aa, Glycine max
  Clone ID: PAT_MRT3847_75727C.1.pep
MRCYMKQMNRHGTTTDCACVRSSDKDCYNNTLTRRMKQSSRKRDVRRTIIY

SEQ ID NO: 258808 - protein, 114 aa, Glycine max
  Clone ID: PAT_MRT3847_75728C.1.pep
ASFSIASQFNSIDRLTPIQMGSKPRAGKLRPQITRSAHHLRRQLQSPANAAAPEHDRNNYNFQGMTLKGLRIPRRPLYPYVQTTSSEYPCILNTMLPLYIYPFRNPDYGTHFNG

SEQ ID NO: 258809 - protein, 481 aa, Glycine max
  Clone ID: PAT_MRT3847_75729C.1.pep
MLDSATPHDKITTAASGFVLEDVPHLSAYIPHLQTYPDPLQDNPSYSVVAQYYVNVDDTIAQQIVVHKNSPRGTHFRRAGPAQKVYFDSEEVHACIVTCGGLCPGLNTVIREIVCGLYHMYGVHKVLGIQGGYPGFYSRNTVPLTPKVVNDIHKRGGSILGTSYGGHDTSKIVDSIQDRGINQVYILGGYGTQYEAAMIFEEVRRRGLKVAVVGIPKTIDNDIPVIDKSIGFDTAVEEAQRAINSAHVEAESAENGIGVVKLMGRYSGFIAMYATLASRDVDCCLIPESPFYLEGPGGLLEFIEKRLKEQGHMVIVIAEGAGQELLSGNPSIVNKPDASADKLFPDVGLWLSQKIKDHFEKRQKMAINLKYIDPTYMIRAIPSNASDNVYCTLLAQSAVHGAMAGYTGFTVGPVNGRNCYIPFHLINEGEKRVVITDRMWARLLSSTHQPCFLNPKEITGEREERTENQTTDGQNHSEIAD

SEQ ID NO: 258810 - protein, 186 aa, Glycine max
  Clone ID: PAT_MRT3847_7572C.1.pep
MATYSWSTEIFSFLVLTLLSTSSHTMVAGARNLLESTLSKPEVPTLPKPHELPPLPEIPELPKFESPKIPALPKPELPKVPELSKPDMSKVPELPKVPERLKVPEISKILELSKPELPKGPELLKPELPSVPNIPKVPELPKPELPEVPKLPKPELPKVPELPKPELPKVPEIPELPNLELPKVTQ

SEQ ID NO: 258811 - protein, 62 aa, Glycine max
  Clone ID: PAT_MRT3847_75730C.1.pep
LRDALRALWLIRLSYPIQSGSPTISACMSKAKDELLSTSHLVQIWNKNGIRIVFLKLSCCVP

SEQ ID NO: 258812 - protein, 95 aa, Glycine max
  unsure (1)..(95): unsure at all Xaa locations
  Clone ID: PAT_MRT3847_75731C.1.pep
SSHRTTKPXWLTXRXXSLXRXXTXTPFRGXXXXWGSRXXXWXPHXRPESXXECIEKAEXXXXAVAAEXXLVYXMLVIXXCHSPLPSXLHPAQSNA

SEQ ID NO: 258813 - protein, 76 aa, Glycine max
  unsure (1)..(76): unsure at all Xaa locations
  Clone ID: PAT_MRT3847_75732C.1.pep
MEIITPTATATNATAKSPEPDIETMTRIHQNPNPNPKPVSFSNGVLKRHHVNHRAAXVYKECLKNHVASLGGHALD

SEQ ID NO: 258814 - protein, 123 aa, Glycine max
  Clone ID: PAT_MRT3847_75733C.1.pep
MRVLESASPGESVTHLNMALQKYAPSGNAPSVNMKHLSFSSKVPKKAELDEANLNHNMDVDIDLREIYFLIMHFLSAGPCHKTHLQVWNELLEHQLLPRRYHAWYSRTGACSGDKDDDGLSFP

SEQ ID NO: 258815 - protein, 92 aa, Glycine max
  Clone ID: PAT_MRT3847_75734C.1.pep
TSSLRLMEFSRSFRLSRSHHILLSSESVSSECAKIAGYERLSQSLRLSGEYDFIDKQKKHKRGVGLLGKVFSFRRVSSPHGVGEPNKVRRRW

SEQ ID NO: 258816 - protein, 57 aa, Glycine max
  Clone ID: PAT_MRT3847_75735C.1.pep
SCESSLYKDEKVEAADLLLEERWFFDNLLKIAPTMTRCHSDPYPSFTGLISPPRFFC

SEQ ID NO: 258817 - protein, 192 aa, Glycine max
  unsure (1)..(192): unsure at all Xaa locations
  Clone ID: PAT_MRT3847_75736C.1.pep
LLAVQDYNVPLFDWLPAGVGHHPSPSPASSNVPDSSEVLNTPASPNFSSISSSSNEATVNNNSEQQSGKELQEEEGGNGGRGDNQDQDKTKKQLKAKKKKKKNQKKQREPRFAFMTKSEVDHLDDGYKWRKYGQKAVKNSPYPRSYYRCTSAGCGVKKRVERSSEDPSMVVTTYEGQHTHSCPAXARSSLGF

SEQ ID NO: 258818 - protein, 151 aa, Glycine max
  Clone ID: PAT_MRT3847_75737C.1.pep
MEGNYGSTRRYVPRADSSLSFLYNYNYTPYPGMEVKQQTLAGTSSSMEKVNCGNQEKKKRLTSDQLDSLENSFQKEIKLDPDRKMKLSKELGLQPRQIAVWFQNRRARWKNKQLEHLYDSLKQEFDVISKEKHNLGEEVMKLNTLLREQAF

SEQ ID NO: 258819 - protein, 54 aa, Glycine max
  Clone ID: PAT_MRT3847_75738C.1.pep
LGSNNKNCRERTPMVNNSFISIHQTINMNIAVNCVLQGIGWCKNGAAKVINGRG

SEQ ID NO: 258820 - protein, 71 aa, Glycine max
  unsure (1)..(71): unsure at all Xaa locations
  Clone ID: PAT_MRT3847_75739C.1.pep
TGVAPGPIXTPMIPPSITDEETDQXAAQVPMKRAGKTIEVATYDASLASNLCSYHITGHVLDPNGGTDVNG

SEQ ID NO: 258821 - protein, 153 aa, Glycine max
  Clone ID: PAT_MRT3847_7573C.1.pep
GTIKSVLDSLSEYSQFTIEQMPMSSKLCLTSDYGKTYRKWGFEKLVYKDSKKGIRRDRKYAVQPRSLYATGVHMSQNLAGKTTHKTEGKIMYYHYHGTIAEKKKSCKMLINSTEITYDKTPYVLDTTMRDIAGVIKKFELKMIGDRLQHKTRQ

SEQ ID NO: 258822 - protein, 71 aa, Glycine max
  Clone ID: PAT_MRT3847_75740C.1.pep
MEMKKSWGFFFLVLLLGFGSQGGVPTEGKMGESQSPGFHGLGNKKHHWALVWKNQRFFRGQGQRFPPPLFW

SEQ ID NO: 258823 - protein, 151 aa, Glycine max
  unsure (1)..(151): unsure at all Xaa locations
  Clone ID: PAT_MRT3847_75741C.1.pep
RKPLPVVPTVLLRGATMRTAXLTAGNASNILDRLQGPVNGSCFDARTEMDRQLALARSLFLTXSSPRSSDSSYDRPLPLTEILAAAEHATKHTFSNPDLRKSLSSSXEFDREYLXLTTSAADIHPRCWWRRHGGALDGDIAAVDAMHGWSD

SEQ ID NO: 258824 - protein, 42 aa, Glycine max
  Clone ID: PAT_MRT3847_75742C.1.pep
RTVTFFFQKFSFQPILFRLTQKCLLLVYRRGPYVILKKALHH

SEQ ID NO: 258825 - protein, 91 aa, Glycine max
  unsure (1)..(91): unsure at all Xaa locations
  Clone ID: PAT_MRT3847_75743C.1.pep
WLPISATCRYPVSQLAPDPCAVYVECSSGSCGLLTSAWIISAVNGRSSDINWNQRTSHGIGWIIDXLTRVGPRPAALLAGQFGGNDYLLSS

SEQ ID NO: 258826 - protein, 274 aa, Glycine max
  Clone ID: PAT_MRT3847_75744C.1.pep
GEYLGKSDARRPSIIVVGAGAGGVATAARLAAAGCKVTVVEKNDFSGGRCSLIHRQNYRFDQGPSLLLLPGLFHETFHDLGTTLEDEGVHIVKCEPNYTVHFHDDTAFKMSTDIATMKREIERFEGKEGFERYLGYLQESHRHYELSIIHVLKKNFYSYLSMVRPTFLQYLQTLHPFESVWGRTSMYFKTERLRRVFTFASMYMGMSPFDAPGTYSLLQYTELAEGIWYPIGGFHKVVEALVNIGSPLGVEYHYDRPIKEIQLSADGKRATGVT

SEQ ID NO: 258827 - protein, 38 aa, Glycine max
  Clone ID: PAT_MRT3847_75745C.1.pep
MYVYAVAREGREKARPKLYGSSKKERDSLHSSGSARLG

SEQ ID NO: 258828 - protein, 50 aa, Glycine max
  unsure (1)..(50): unsure at all Xaa locations
  Clone ID: PAT_MRT3847_75746C.1.pep
YSFGVVLVXIITAMKVVDFARPQSEINLAALAVDRIRKGCIDDIIDPFFE

SEQ ID NO: 258829 - protein, 95 aa, Glycine max
  unsure (1)..(95): unsure at all Xaa locations
  Clone ID: PAT_MRT3847_75747C.1.pep
KGSMGTSYXAILXXXATVFVXRVXDXXXSKKEFXAQMEVVGNVNHIYVDAFKAFYYSKDQNLLLYDYMGPGSLSSLLHRSRRLRLTPFDWDTLIK

SEQ ID NO: 258830 - protein, 81 aa, Glycine max
  Clone ID: PAT_MRT3847_75748C.1.pep
HRFSPFSFSLRHQMMATTANENAVVAPIAALLLVVLLAASVVVEAQENSDVTTLVKHMHGTKYCDNGWECKGWSIYCCQLT

SEQ ID NO: 258831 - protein, 378 aa, Glycine max
  Clone ID: PAT_MRT3847_75749C.1.pep
MGEGENTEIETETESEATSTWSLGKHTQIIELSETLTNGNLSAKIEAAREIRKMVRKSSSSSSKTRAKLAAAGVIEPLVLMLSSSNVDARQSSLLALLNLAVRNERNKVKIVTDGAMPPLVELLKMQNSGIRELATAAILTLSAATSNKPIIAASGAGPLLVQILKSGSVQGKVDAVTALHNLSTGIENSIELLDASAVFPLLNLLKECKKYSKFAEKATALLEILSNSEEGRTAISIADGGILTLVETVEDGSLVSTEHAVGTLLSLCRSCRDKYRELILKEGAIPGLLRLTVEGTAEAQDRARVLLDLLRDSPPEKRLTSSVLEKIVYDIAERVDGADKAAETAKRLLQDMVQRSMEHSMKCIQHRAASCTPIPST

SEQ ID NO: 258832 - protein, 515 aa, Glycine max
  Clone ID: PAT_MRT3847_7574C.1.pep
MAKDREKKLYVAVLGNYAAELKLLLTTLLLLCAVATLLQFLPSRFTISASDLRVCISRVTQTTPTLSNSTNATSPPAPPLVASLSSPTTSPPPPPPPPPPPPSEQVLPDGTIKRVFNPYGSAAYNFITMGAYRGGLNTFAIIGIASKPLHVYAKPTYECAWFSLAGDNKKVSSTVGYKILPDWGYGHVYTVVIVNCTFPEPLNADNSGGKLVLFASTSGGGDASFNTTDRIEALTEQPRTLDTTLFSSKPKYDYLYCGSSLYGNLNPQRVREWIAYHVKFFGPKSHFVIHDAGGVHAQVLEVLKPWMDLGYVTLHDIRDQERFDGYYHNQFMVVNDCLHRYKFMAKWMFFFDVDEYIYVPPKSTIKSVLDSLSEYSQFTIEQMPMSSKLCLTADYGKTYRKWGFEKLVYKDSKKGIRRDRKYAVQPRSLYATGVHMSQNLAGKTTHKTEGKIMYYHYHGTIAEKRESCKMLINSTEITYDKTPYVLDTTMRDIAGVIKKFELKMIGDRVQQKTRQ

SEQ ID NO: 258833 - protein, 117 aa, Glycine max
  Clone ID: PAT_MRT3847_75750C.1.pep
GVQVVPHEEDSIFSVRFRVRSDVHCAVQRLGGAPKFFLVLAVHINGGSTEYPRSSADTPVEECAIPRCNPDQRRKEMVVPVKPHKGTGYPFSIWGQPTNQSGKQRVLLGFCPKILVI

SEQ ID NO: 258834 - protein, 65 aa, Glycine max
  Clone ID: PAT_MRT3847_75751C.1.pep
RYEYLSKITLADIFKSNINPNKLMHKTNIKNHGVKKLHFNSYSPSSDVPCAQNQKVQVKFYTQLS

SEQ ID NO: 258835 - protein, 190 aa, Glycine max
  Clone ID: PAT_MRT3847_75752C.1.pep
QNLVHGDAMVTKNPIGSDQCLRITELKRVLGNSDFRNCKLKQNSVHGDAVVTKNTLGSDRQLKSVKITEPKCVTGNSDSKHCKALHNWVHGDAMVTDNAVADVIDTAVDDGIQKVGSLYKSLLQIPPLTYDALDSVDEDWLFSSEPTEARPVSKKQKFDSDVFQLSNSMWPRAQYLPEVEIYALPYAVPF

SEQ ID NO: 258836 - protein, 64 aa, Glycine max
  Clone ID: PAT_MRT3847_75753C.1.pep
LQSEIGDVTYEYTSTWLLTYSLIFVENLPSSMDQEPYPDTWSAQPLSESSLLASLTATPPGIQS

SEQ ID NO: 258837 - protein, 228 aa, Glycine max
  Clone ID: PAT_MRT3847_75754C.1.pep
MSSFHVGGKVVDQVDLLRKKRWPWRLDVWPFAILYGAWLSTILPSLDFVDAAIVFGALVSLHILVFLFTGWSVDFKCFAHYSKVKNIDQADSCKITPAKFSGSKEVVPLHSRKSSAASSSAVDLEENYFDFRKQCFVHSKEKGTFCKLSYPTKETFGYYLKCSGHGSEAKVLAATEKWGRNVFDYPQPTFQKLMKEHCMEPFFVFQVFCVGLWCLDEYWYYSLFTLFM

SEQ ID NO: 258838 - protein, 59 aa, Glycine max
  Clone ID: PAT_MRT3847_75755C.1.pep
TKGPEEEGPKTAKPPPNKEHTGPSNANDLTPSDAANLPEENPMGKPALRELVKLQRGRS

SEQ ID NO: 258839 - protein, 73 aa, Glycine max
  Clone ID: PAT_MRT3847_75756C.1.pep
NSPKKNKKIEGKDYNETYLKCSASSFLVQSNLPIHRYYEPIASKILLALPTTDSYASFSWNHVRADLSTDLFH

SEQ ID NO: 258840 - protein, 39 aa, Glycine max
  Clone ID: PAT_MRT3847_75757C.1.pep
LRGDGRKSSCEPRRGIKRGSRVLDPERRIPELEGGGQST

SEQ ID NO: 258841 - protein, 109 aa, Glycine max
  unsure (1)..(109): unsure at all Xaa locations
  Clone ID: PAT_MRT3847_75758C.1.pep
AYRSIISSSKSRHVEAHTLSSFHASNASSSRCTMSADWMPCHPTPTYLDGSPPVDCGFNPIGLGEVPENXLERLKESELIHCRLSMLAVPVILDPDAYGLSNWVKAYEW

SEQ ID NO: 258842 - protein, 37 aa, Glycine max
  Clone ID: PAT_MRT3847_75759C.1.pep
MSRMGLFGTLLLFSERTKLLYDLTLSLGDFYCLKRPL

SEQ ID NO: 258843 - protein, 69 aa, Glycine max
  Clone ID: PAT_MRT3847_7575C.1.pep
PSSRSHKYDKNQSKKGPKLNQNFFLSNHLSTQKIIVQCSFTKKGNKSSAFGFVAYANDKGKQFYFFFKI

SEQ ID NO: 258844 - protein, 76 aa, Glycine max
  unsure (1)..(76): unsure at all Xaa locations
  Clone ID: PAT_MRT3847_75760C.1.pep
EDGVAGSNCPIQPGTNYTYHFQVKDQIGSFIYYPNLGLHRACXCFCGLRMNKRLFIKSSYADSFFYFSLLFDYWST

SEQ ID NO: 258845 - protein, 67 aa, Glycine max
  Clone ID: PAT_MRT3847_75761C.1.pep
DLIISTEIKFSRPWLLFGAIIYHIYIYIYVIFNWRVTILYQSMFGFCRALIGHMRSQPLPSSIGGTS

SEQ ID NO: 258846 - protein, 129 aa, Glycine max
  Clone ID: PAT_MRT3847_75762C.1.pep
KYLTSLSFSRFQRDNLCGRGYFITNLCLGFCLVEMVPSPFLILISLGRWFAGAPNLLNKQNTQRLAIDADYIPDCFFPLIFCCQFLTFLKLSIYSHLPKSLQFPALKSLHLVNVGFTAIDRSCAEPFST

SEQ ID NO: 258847 - protein, 68 aa, Glycine max
  unsure (1)..(68): unsure at all Xaa locations
  Clone ID: PAT_MRT3847_75763C.1.pep
HSRECENLSFIGRALCSECTILXEYFKDSQLVSDCFKXARKTANDATTMVTYSGAVLRVCIRKLVFYP

SEQ ID NO: 258848 - protein, 270 aa, Glycine max
  unsure (1)..(270): unsure at all Xaa locations
  Clone ID: PAT_MRT3847_75764C.1.pep
FSIGIVGTLFIASVLYVCVSLVMTGMVHYTHLDENAPLSQAFFSLGLDWAGYLIAAGSVTTMTATTLVSLIGQPRIFYQMAKDGLLPPIFSATKXVPYWGTIITGIMSGGIAFLLDLGSLANMISIGTLLAFIVVCGGVVVLRTQDEKHPYKPSLLLLGFFFASTIWGVGFTYFKSLQPWSFIFTGLLVIGSYIPLQFLKHTDIPSTFKCPLVPFVPCLGIFMNVWFIITLPADALIRLVVWTFIGMVIYFAYGIKHSTLYLNQKMSKSI

SEQ ID NO: 258849 - protein, 48 aa, Glycine max
  Clone ID: PAT_MRT3847_75765C.1.pep
YKGGLSHPRIIVWNLALCFPSVPFMSLLVIQCIWSSPSDTRGDVTLFS

SEQ ID NO: 258850 - protein, 79 aa, Glycine max
  Clone ID: PAT_MRT3847_75766C.1.pep
AYKAETFLHKMAFSTLTTLSLRMLSYTTPSSSSYPTHLSANPSSLQFPNFSHRATTTRSARFVVVSPVEAPDKITNLCY

SEQ ID NO: 258851 - protein, 175 aa, Glycine max
  unsure (1)..(175): unsure at all Xaa locations
  Clone ID: PAT_MRT3847_75767C.1.pep
ESTCDNIFPTVVFPEPIIXAFIIQNNILAMNANIILLPEKFIKVFYEYQETDQQDIYSVHLNMARSLAIYSAILLVKQKLSSDYRVLMLYCNYSIATLKWLKSIRSDKGHDAIPSKSTFHQQEHENFQIAMSKLTLKKNYVHTQNRQHLLQSTTSYISTKHIYIVHLVKHMHALP

SEQ ID NO: 258852 - protein, 131 aa, Glycine max
  unsure (1)..(131): unsure at all Xaa locations
  Clone ID: PAT_MRT3847_75768C.1.pep
MGRLNPLLGGALFLTLFLNYLPPTFGQLNPNHFAYLCPNXKGLVEQPVPIKSHQTLATVQAPFGFSFNNGLAQGGMPSVWLASTEITQPKKVHQNTLPLPVVGLAPGSKPKAAEIAVLNGKTKVSGPNFLA

SEQ ID NO: 258853 - protein, 50 aa, Glycine max
  unsure (1)..(50): unsure at all Xaa locations
  Clone ID: PAT_MRT3847_75769C.1.pep
YMHCXMRNMLELFPGSIDATIRVPALFFFFYYSCFCFLHRHIYLTEVLKV

SEQ ID NO: 258854 - protein, 76 aa, Glycine max
  Clone ID: PAT_MRT3847_7576C.1.pep
FRSDQNHCVITDTIQFTIVPLESLFMWMSRISSMILMRNIKLSATQNSRQDNLRNLMPLRVFGIHIMKQVCKPNLC

SEQ ID NO: 258855 - protein, 92 aa, Glycine max
  unsure (1)..(92): unsure at all Xaa locations
  Clone ID: PAT_MRT3847_75770C.1.pep
MGNTHGMGAARKLXSHRTRQKWADMSYGISHLGNPWQKSFAGSAHANGTVLESIGIVSGHPNSAIRNCAIVQLINNGXKXAAFVSNDGCMNY

SEQ ID NO: 258856 - protein, 97 aa, Glycine max
  Clone ID: PAT_MRT3847_75771C.1.pep
WNTGKTGAHPNQSKNRWQIGTSLFGNEVETCCKPGPMALLAASSTARTPERSLVLATAVAAPRMRNLRVVTCTITLISLCLRLLPCSLSRPPNGEFD

SEQ ID NO: 258857 - protein, 38 aa, Glycine max
  Clone ID: PAT_MRT3847_75772C.1.pep
RNITKGKMCNEFYSEHIPSKDDLQYCTLKQMDHVSNSI

SEQ ID NO: 258858 - protein, 74 aa, Glycine max
  Clone ID: PAT_MRT3847_75773C.1.pep
CKKPPEGALDITQGLHPLSILKDFEHLHTCFVHIHLPSNYPSLKNIYSHFIYHNPLSQMFFTSPYLESPHTHIL

SEQ ID NO: 258859 - protein, 83 aa, Glycine max
  unsure (1)..(83): unsure at all Xaa locations
  Clone ID: PAT_MRT3847_75774C.1.pep
PWSYQNMDEEIDFESFLRAHLXLXXXXIXKDGGSKSSXXFLKXAXXTVHHAISESEKASYVAHINNXLAXDKFMSQFLXIASI

SEQ ID NO: 258860 - protein, 87 aa, Glycine max
  Clone ID: PAT_MRT3847_75775C.1.pep
FVDLDEFIIVMNGMEKKKKKKFGSGMEHNGGSLKEAFFIFAPAKNGLISAKELQKVLINLGGDNCSFKKGKGIIKGVYKKGNGFVDF

SEQ ID NO: 258861 - protein, 396 aa, Glycine max
  Clone ID: PAT_MRT3847_75776C.1.pep
MLKESKLGVAAKEKKRSRVVKKDRLSNLPDEVLHRILSTLDAKSAVQTCVLSKRWRHVWTSLPVLNFCDSSFDDSLYFQCFVDHVLSRRDASSNVYELNFACTDELEDGHIVDSVVDHVSLTPPITIQGLYIVAECIVGKLPQLSLCQSLTTLKLAHISTETTTFDFLSLTHLHLFDCRFECGLEELLDPFRDCLNLKHLYLHRCQYYGGFQRFKIFAPKLTLLSIALMRVDEMFDSDCTIQLFTPKLQSFTYCDFDLYDFSIEGDLPFIEEVDIDMGCLAKDTYSLLQLIELFQVMGNAQFVSLSPDIIDVLATFPDLLDGRSSPFTRVRTFVLNMDTPSSSFVIPPNVMAYLFSGSRGLDFLISMNGKVWKKVYKTSFQNEKCNTITIFLPKFL

SEQ ID NO: 258862 - protein, 97 aa, Glycine max
  Clone ID: PAT_MRT3847_75777C.1.pep
AVVDVQLQASMALRDTNKVSLSFRNYEIHVVCIMMLSRCFVSKHPPLEYSGHFLPMSKFECFALVTGCVTVTVHCFLSTDIYINVWCLVASVKSRAS

SEQ ID NO: 258863 - protein, 594 aa, Glycine max
  unsure (1)..(594): unsure at all Xaa locations
  Clone ID: PAT_MRT3847_75778C.1.pep
MSSEIEVVEEVQSRDEQSGAEESLRNDVYTAAAYGDLERLQRLVEQEGCPVSEPDGLGYYALQWAALNNRTAAAQYIIEHGGDVNATDHTGQTALHWSAVRGAIQAAELLLQEGAXSAADMNGYQTTHVAAQYGQTAFLYHIVSKWNADPDVPDNDGRSPLHWAAXKGFADSIRLLLFLDAHRGPQDTGGSNPIHXAGSLGNSXACSVQEQAGDYSEEGIGMMHMARSSNLANGDSHNHSEYARGNGNGHHVINVNSNSNRPNLLSTMRPWVLGVGLGMFYRCCQQXDPGYFRMNKHDYHETKDDDTLLKIDINNLALLAGNWSQLCATCKIVRPLRAKHCSTCDRCVEQFDHHCPWVSNCIGKKNKWDFFVFIVLEVLAMLVTGGVCLTRVXTDPLAPHSFGAWIQYVANNHIGAISFLIADFFLFFGVFTLTVVQASQISRNITTNEMANAMRYSYLRGPGGRFRNPYDHGIKKNCSDFLINGYNEDVECIEELGNSEEGIGMMHMARSSNLANGDSHTHTEYARGNGNGHHAINVDSNSNSTNSKIHHGHINGHVHSSHCSHNNHGKTRNDNVPLGLGLGLGRNRSVTASS

SEQ ID NO: 258864 - protein, 261 aa, Glycine max
  Clone ID: PAT_MRT3847_75779C.1.pep
SSEIEVVEEVQSRDEQSAASGGGGDGMGAEESLRNDVYTAASYGDLEKLQRLVEQEGCPVTEPDGLGYYALQWAALNNRTAAAQYIIEHGGDVNATDHTGQTALHWSAVRGAIQVAELLLQEGARVSAADMNGYQTTHVAAQYGQTAFLYHIVSKWNADPDVPDNDGRSPLHWAAYKGFADSIRLLLFLDAHRGRQDKEGCTPLHWAAIRGNLEASTVLVQAGKKEDLMVTDNTGLTPAQLASDKNHRQVAFFLGNARRLL

SEQ ID NO: 258865 - protein, 107 aa, Glycine max
  Clone ID: PAT_MRT3847_7577C.1.pep
RGCGVTLRGSQPRLGVPSGVMLSTLGRLRGDNVTTRGIRRQAWTTHSNNRKQHYTPVQTTSGRPTRWLRLNSLGAAGKGGPGGGLREWLKRGNGEDLPYKHAVTITT

SEQ ID NO: 258866 - protein, 70 aa, Glycine max
  Clone ID: PAT_MRT3847_75780C.1.pep
ISRAMRRASVGLKNPNRPIASLMFPGPTGVANSELAKALAVYYFGSEEAMIRVDMSEFMKRHTGSTLTGS

SEQ ID NO: 258867 - protein, 323 aa, Glycine max
  Clone ID: PAT_MRT3847_75781C.1.pep
LSLLFFFLLARVRSLDSKDPGYIRMNMHDTQDTKDDEPLLKIEINNPALLAGNWSQLCATCKIVRPLRAKHCSTCDHCVEQFDHHCPWVSNCIGKKNKRDFFVFLVLEVSAMLVTGGVCLTRVLTDPLAPQSFGAWIQYVANNHTGAISFLIADFFLFFGVFTLTVVQASQISRNITTNEMANALRYNYLRGPGGRFRNPYDHGIKKNCSDFLINGYNEDIECIEELGSSEEGIGMMHMARSSNLANGDSHNHSEYARGNGNGHHVINVNSNSNSTHSKTNHGHVHSTHCSHNNNHGKTRNDNAPLGLGLGLGRNTRSVTPSS

SEQ ID NO: 258868 - protein, 41 aa, Glycine max
  Clone ID: PAT_MRT3847_75782C.1.pep
KLPLLTPKQKSLYLNSNKRGGTTKTIMPKHFPHLKKKLHLF

SEQ ID NO: 258869 - protein, 62 aa, Glycine max
  Clone ID: PAT_MRT3847_75783C.1.pep
NQVNHGIEKTKIVSVNFGMDVSERIKYIVSKMKEKTLSKEEQNLIKEIRYLRFDLDLVKFNE

SEQ ID NO: 258870 - protein, 86 aa, Glycine max
  Clone ID: PAT_MRT3847_75784C.1.pep
LAAQAGVAVWPLPLLDVPQPPVRNHLGQTVRPLNPVPLFTVCPPTVYNRLGRSKCFWPLWATHLPPPGHVPNGTFLNLMHSTRNTQ

SEQ ID NO: 258871 - protein, 81 aa, Glycine max
  Clone ID: PAT_MRT3847_75785C.1.pep
AYKLLNRLDLQFFTHLHLDFLEKTLGLGLFFFSKKLVTCKKKVYKFVFLRKCKQWNYGFNFRFQKKKKHSRKKKIKIKKIK

SEQ ID NO: 258872 - protein, 96 aa, Glycine max
  unsure (1)..(96): unsure at all Xaa locations
  Clone ID: PAT_MRT3847_75786C.1.pep
DGKGTPSADRVXWMFRVFAHDRFWVLHGGLPRWRASSYDAESSASSDAILKARAASEAIEKVYMGQTVGPLTFQTKYQPSLVRNIDQAKKNIADKT

SEQ ID NO: 258873 - protein, 53 aa, Glycine max
  Clone ID: PAT_MRT3847_75787C.1.pep
MGCYCSTSKKTEAQGYEEPTVLASVTPFTVSEVEALHELYKKLSHSIIEDGLI

SEQ ID NO: 258874 - protein, 467 aa, Glycine max
  unsure (1)..(467): unsure at all Xaa locations
  Clone ID: PAT_MRT3847_75788C.1.pep
MAQESLSETPDISPPSSTAQSQPDPSLSRNVSFSRLNAQAPEFVPTRASPRADFQQPRLVVPPPPPPPASGILHVYSPPPTSQFHVPIQGHVVPVQNHHHHLAHQHHVPAHYRSHHHPHQYYVSSDSAVQHSQVDPDHALSSKSKMSDEASQKILNQVEYYFSDLNLATTDHLMRFVNKDPEGFVPISVVASFKKIKALIASHSQLATVLRNSSKLVVSEDGKKIKRQYPLTESDIEELQSRIVVAENLPEDHCHQNLMKVFSAVGSVKTIRTCPPQTSNSGACSASRLGKVDGMPLSNKLHAFVEYESCELTERALAELNDEGNWRSSLRVRLMLRRMSKPAQGRGKKGLDVEVGCEEDSPYVPEPQASEKQLEDASFPDTQLHEXLGEEHGHDKESGQRKGRSRGRGKGRGRVHCHQNNRVGTPSSNNTIFTDQVVAKQPPGPRMPDGTRGFSMGRGKPVAVNIA

SEQ ID NO: 258875 - protein, 80 aa, Glycine max
  Clone ID: PAT_MRT3847_75789C.1.pep
QGEEHGYDKESGQRKGRSRGRGKGRGRVHCHQNNRVGTPPSNNTIFTDQVIAKQPPGPRMPDGTRGFSMGRGKPVAVNIA

SEQ ID NO: 258876 - protein, 92 aa, Glycine max
  Clone ID: PAT_MRT3847_7578C.1.pep
LMAEERPLNLGIMDSCLSHGAHLSRSLILGASKLPIPPFTLLGHVTFGYLVSLGFGDGSHIKFWEDIWPSRWVTLLFLMLFQDSSLFLPMPL

SEQ ID NO: 258877 - protein, 174 aa, Glycine max
  Clone ID: PAT_MRT3847_75790C.1.pep
MAQESLSETPDISPPSSTAQSLPDPSLSRNVSFSRLNAQAPEFVPTRVSPRGDFQQPRLVVPSPSPSPPPPPPPPPPASGMVHVYSPPPTSQFHVPIQGHVVPVQNHHHHLAHQHHVPAHYRSHHHPHQYYVSSDSAVQQPQVDPDHAPSKSKMSDEASQKILNQVEYYFSDLN

SEQ ID NO: 258878 - protein, 137 aa, Glycine max
  unsure (1)..(137): unsure at all Xaa locations
  Clone ID: PAT_MRT3847_75791C.1.pep
FVNKDPEGFVPISVVASFKKIKALIASHSQLATVLRNSSKLVVSEDGKKIKRQYPLTESDIEEIQSRIVVAENLPEDHCHQNLMKVFSAVGSVKTIRTCPPXTXXVGFFCFKIGKVDGMPLSYKLHAFCEYESAELA

SEQ ID NO: 258879 - protein, 59 aa, Glycine max
  unsure (1)..(59): unsure at all Xaa locations
  Clone ID: PAT_MRT3847_75792C.1.pep
GGGAVLYYNFHFGFKTAVSXTSKVFYTRAHLYFWVGHARPSGPISYPLVRHPGPLGFLL

SEQ ID NO: 258880 - protein, 65 aa, Glycine max
  Clone ID: PAT_MRT3847_75793C.1.pep
KLGYNWVLRDSVMKSESHTQYNPDTYRENPGEPNGCANRDQLHCDYCALTSRLTCGESCVHYSFT

SEQ ID NO: 258881 - protein, 75 aa, Glycine max
  unsure (1)..(75): unsure at all Xaa locations
  Clone ID: PAT_MRT3847_75794C.1.pep
RKCRSPHTVFKTVVGXSGGCAQNKRNKCRHTNHSSGYASMVRVRQEIKECGKRVFNSRDRMKKGCDLSTSSAMRC

SEQ ID NO: 258882 - protein, 94 aa, Glycine max
  Clone ID: PAT_MRT3847_75795C.1.pep
SGSFFHRPKRTHFLQFTQWNNKASINNKWKFLWLALSFSIWHHRNAMIFKNQPFDPGKVMDDTLFHTWSWLKCAEKDSQMHFNFWSTNLKDVFS

SEQ ID NO: 258883 - protein, 75 aa, Glycine max
  Clone ID: PAT_MRT3847_75796C.1.pep
HDPLVWQVIVARPLQLCQARAAQGRHMMARAAQIREFTPAGDPHYASPRGETDPSSNMGVVASPLYCGESAHAQL

SEQ ID NO: 258884 - protein, 48 aa, Glycine max
  Clone ID: PAT_MRT3847_75797C.1.pep
REVESLLMPIMGTTFPPHSRSGSVNIKSSAARILLGPSPQTRSGSLFW

SEQ ID NO: 258885 - protein, 56 aa, Glycine max
  Clone ID: PAT_MRT3847_75798C.1.pep
WKTPYPHHKMNTMSIPESYINFIICTTSPSISIDKAFPDIHSLTRSHAYIPSASIF

SEQ ID NO: 258886 - protein, 60 aa, Glycine max
  unsure (1)..(60): unsure at all Xaa locations
  Clone ID: PAT_MRT3847_75799C.1.pep
GTXVXREXNMVXVGCQASKKRCFMSSXXLVNXXXTXKFLXLDXWGTNKXWGXKXXWXXRV

SEQ ID NO: 258887 - protein, 95 aa, Glycine max
  unsure (1)..(95): unsure at all Xaa locations
  Clone ID: PAT_MRT3847_7579C.1.pep
GADRAXEEGWRQGGGDPLAKSPNVSYLPGGQNLLMGLGPSRGSLGGGWAQRCCVMTCLDHGGGGVFXXWEYFSWVFTWRLSHLSIVHNEFRRGIR

SEQ ID NO: 258888 - protein, 54 aa, Glycine max
  Clone ID: PAT_MRT3847_757C.1.pep
CTLNKDAQLRHEPMQADTIVIADHMMKTRGDNNLECYNYYMGDIYSQFASILRS

SEQ ID NO: 258889 - protein, 59 aa, Glycine max
  Clone ID: PAT_MRT3847_75800C.1.pep
KAKAINLYLGRRNINKTQERTWENPYGLWERNILKSFFFPLGLSNDQTLKTKLRWKTKV

SEQ ID NO: 258890 - protein, 48 aa, Glycine max
  Clone ID: PAT_MRT3847_75801C.1.pep
EGPACIECIIKPLKACFHSKMIVGHSLQIRGEVQHLVGGQCFLNRRPK

SEQ ID NO: 258891 - protein, 52 aa, Glycine max
  unsure (1)..(52): unsure at all Xaa locations
  Clone ID: PAT_MRT3847_75802C.1.pep
NPSNCWEGPAFQALNSIEPKRYRWVRLNHVIYXYCRDKSGFPVAPPESLGGI

SEQ ID NO: 258892 - protein, 46 aa, Glycine max
  Clone ID: PAT_MRT3847_75803C.1.pep
IFFFLYYFEYIVDHVKIEAINKSLFCVFFCYNVNPTNTRFTVSTCL

SEQ ID NO: 258893 - protein, 96 aa, Glycine max
  Clone ID: PAT_MRT3847_75804C.1.pep
TSFFFFFFFFFFVFFFFFFFLFFRVKKENTFFQAKFAKLFFDPPPLQMSCGAKIYSVRAQITGFQLSGANPQTKLTEFNLKGPWFTRENKFSRPGG

SEQ ID NO: 258894 - protein, 30 aa, Glycine max
  Clone ID: PAT_MRT3847_75805C.1.pep
EKERNNGVWINDQLDLEQMITRLIQELIGG

SEQ ID NO: 258895 - protein, 122 aa, Glycine max
  Clone ID: PAT_MRT3847_75806C.1.pep
MRESRIHEFACGGFIVQQAEIGLIGLGVMGSNLALNIAEKGNRIAVFNRTPARTDEFLGEAGDLADRIIGCHTIEEFVAAIRPPRPIIIMIKAGEAVDQQMAALLPHLAKNDIMIDAGNANF

SEQ ID NO: 258896 - protein, 80 aa, Glycine max
  unsure (1)..(80): unsure at all Xaa locations
  Clone ID: PAT_MRT3847_75807C.1.pep
HFXDXVRXXVLGLKAQXILGSGKXAEEKXLEQPQHYGLNIEXNGRLIXXXAEXKKPXDAXXQRTIXXXWXXGXXXPXXPX

SEQ ID NO: 258897 - protein, 64 aa, Glycine max
  Clone ID: PAT_MRT3847_75808C.1.pep
LFHSCAISSHSITYTDVCLHENQQFTKILISMQLVLLMQSINSKCDATKYQVPTSLSPSVVFSQ

SEQ ID NO: 258898 - protein, 53 aa, Glycine max
  Clone ID: PAT_MRT3847_75809C.1.pep
LVLDRYLHFSLLITRPLLTVLATDITQIQISLYRDDVKEKIKEISDLRASSQY

SEQ ID NO: 258899 - protein, 59 aa, Glycine max
  Clone ID: PAT_MRT3847_7580C.1.pep
LWGSVVTTFTLVLCQLKCKEDLNIFSHKNVIRNAGLQRWPMVNPLIQPIVSYRYESITP

SEQ ID NO: 258900 - protein, 395 aa, Glycine max
  Clone ID: PAT_MRT3847_75810C.1.pep
MEDLFKRWSEHLDNTCLRVSQPPLKNCDFCGGEHYNDNCHMYSMNNFGWGRELSPYNQYEEERTPSLESVFEEFMAYHASSKADQTSMINQELQFGKSYSIEDYQGGLKLQPYNQNEAERGSNLDNLLMQFKETTESTQQTFKSAEIQVGKLAEEVTQFVARREEDLVEVEAQEESPVKEHESREKDEEKGEEKVQQWGEYSTVENQQENALSARALKTQTSYGHAKRSCALSAPYETAKYYKAIHCIYPQLASFPCIPAPLLFFAFIYTIQRNVLSATVVLSAFIFSIELSLELAKRGCALSKYYMASRKRKAPTSVSQARYDRSKFTLQDTWDRYTDNILGRKILLERNVKLFYAESDEFRREVERRNWHKELTNFSEGSIDVAIIKEFYANL

SEQ ID NO: 258901 - protein, 50 aa, Glycine max
  Clone ID: PAT_MRT3847_75811C.1.pep
LLKIVTISISMIKKTTKFGFFIPLKGLKKASKNPYLELHKSTNKRRKTIH

SEQ ID NO: 258902 - protein, 52 aa, Glycine max
  Clone ID: PAT_MRT3847_75812C.1.pep
FTHLILIHNNPDTYIDHMLNISYSSTTIQNAQILLAFYNFTSRKFICIYIIH

SEQ ID NO: 258903 - protein, 119 aa, Glycine max
  unsure (1)..(119): unsure at all Xaa locations
  Clone ID: PAT_MRT3847_75813C.1.pep
KGKNIFFIWWITEPRNKMGNGNENLWVKEGERTGTFGANPTLDYYTLLFFSLPNYLTLHYLPFLGGFGFWLVPWTFIYAYISLIYIYPDIYIMYNCYTHMHLDPWTRTTTIIKKNNXYN

SEQ ID NO: 258904 - protein, 119 aa, Glycine max
  unsure (1)..(119): unsure at all Xaa locations
  Clone ID: PAT_MRT3847_75814C.1.pep
KGKNIYFIWWITEQRNQMGNENENIWIKEGERSATFGADPTLDYYTFLSLSLPNYITLHYIHLLGGFGFWLVPWPLYMHIYPLIYIYPDXYIMYNCYTNMHLDPWTRTTTIXKKNXSNN

SEQ ID NO: 258905 - protein, 29 aa, Glycine max
  Clone ID: PAT_MRT3847_75815C.1.pep
IQRTILFPTFRKLVQTDHMLGTYSRRPLS

SEQ ID NO: 258906 - protein, 100 aa, Glycine max
  unsure (1)..(100): unsure at all Xaa locations
  Clone ID: PAT_MRT3847_75816C.1.pep
SRCSPXFRIXVDVEVXXRSXXXXVXVHXXXXRXXXXXADXXXEXHRXXMIXGXXXXXVXALKSXXXXPTEVVGXXYPNGXXXXXEAXLEPNSELTYACXR

SEQ ID NO: 258907 - protein, 52 aa, Glycine max
  Clone ID: PAT_MRT3847_75817C.1.pep
TAAEDDRRGYRFISILLCVKFMFNWIKYFCTLQNQRKINKLKKEINSCFTLK

SEQ ID NO: 258908 - protein, 231 aa, Glycine max
  Clone ID: PAT_MRT3847_75818C.1.pep
MEFTSNNMLPFVSMFWLVFLSPLVNCQLYYNFYDSTCPNLTGIVRSNVWSAMAKDARIAASLLRLHFHDCFVIGCDASVLLDDTGTLKGEKNALPNKNSLRGFEVIDTIKSALEKACPSTVSGADILALAAREAVNLSKGTFWYVPLGRRDGTTASESEANNLPSPFEPIENITAKFISKGLEKKDVAVLSGAHTLGFAQCFTFKPKLFDFGGSGKSDPALDVSLLPNLLK

SEQ ID NO: 258909 - protein, 145 aa, Glycine max
  Clone ID: PAT_MRT3847_75819C.1.pep
MEFTSNNMLPFVSMFWLVFLSPLVNCQLYYNFYDSTCPNLTGIVRSNVWSAMAKDARIAASLLRLHFHDCFVIGCDASVLLDDTGTLKGEKNALPNKNSLRGFEVIDTIKSALEKACPSTVSCADILALAAREAVNLNKGTILEC

SEQ ID NO: 258910 - protein, 86 aa, Glycine max
  unsure (1)..(86): unsure at all Xaa locations
  Clone ID: PAT_MRT3847_7581C.1.pep
MGCTASKLANQDTVXRCKXRNHLMNEAVYARHDLSDVHCDYCRTVCLIGSVLSSLSVCESVYSCDHTLDVFHNKLQHHQQHRRQHR

SEQ ID NO: 258911 - protein, 77 aa, Glycine max
  Clone ID: PAT_MRT3847_75820C.1.pep
RAYPMRKCPFPCSYSFDTMVDISVMIQDVKFVLLNSFKWKLCKSTNVNNELIINQKSKHLMSCSDSIIHIIHETHFH

SEQ ID NO: 258912 - protein, 73 aa, Glycine max
  Clone ID: PAT_MRT3847_75821C.1.pep
SILVSHSPFLEYSMPSSSFRPSVERNWTCIRAFSHFKKNHILFLGNIGVPSQCINVSNVRIQHKLYNHVDITS

SEQ ID NO: 258913 - protein, 443 aa, Glycine max
  Clone ID: PAT_MRT3847_75822C.1.pep
MASTSSLHLSQALLARAVYLHGSSSDRVSLSFPSFSGLKSHSPCKAAATSSRRRGACASTSVVRAAAVETLDQTTEVSLVEKSVNTIRFLAIDAVEKANSGHPGLPMGCAPMGHILYDEVMRYNPKNPTWFNRDRFILSAGHGCMLQYALLHLAGYDSVLEEDLKEFRQWGSRTPGHPENFETLGVEVTTGPLGQGIANAVGLALAEKHLAARFNKPDNEIVDHYTYVILGDGCQMEGISNEACSLAGHWGLGKLIALYDDNHISIDGDTEIAFTENVDQRFEALGWHVIWVKNGNTGYDEIRAAIKEAKAVKDKPTLIKVTTTIGFGSPNKANSYSVHGSALGAKEVDATRKNLGWPYEPFHVPEDVKKHWSRHTPEGAKLEAEWNAKFVEYEKQYSEEAAELKAIITGELPAGWEKALPTYTPESPADATRNLSQQNLNAL

SEQ ID NO: 258914 - protein, 71 aa, Glycine max
  Clone ID: PAT_MRT3847_75823C.1.pep
MLQYALLHLAGYDTVQEQDLKEFRQWGSRTPGHPENFETLGVEVTTRPLGQGIANAVGLALAEKHLAARFN

SEQ ID NO: 258915 - protein, 221 aa, Glycine max
  Clone ID: PAT_MRT3847_75824C.1.pep
MASSSSLHLSQALLARAVYLHGSSSSDRVSLSFPSFSGLKSHSTCKAAAATSSRRRGACPSTNVVRAAAVETLDQTTEVSLVEKSVNTIRFLAIDAVEKANSGHPGLPMGCAPMGHILYDEIMRYNPKNPAWFNRDRFVLSAGHGCMLQYALLHLAGYDTVQEQDLKEFRQWGSRTPGHPENFETLGVEVTTGPLGQGIANAVGLALAEKHLAARFNKPDN

SEQ ID NO: 258916 - protein, 56 aa, Glycine max
  Clone ID: PAT_MRT3847_75825C.1.pep
NCNKPTFNSGCLVCLVLCVSHSCRSFAFSYCSLIVSLLFFNQEKIEYTLKPWKVVC

SEQ ID NO: 258917 - protein, 72 aa, Glycine max
  Clone ID: PAT_MRT3847_75826C.1.pep
KETSSMEQSYPIPVQSACLLESLLRKIRHHVLTRSFCLSGRSTTQAEQRLTRVKMLQKCKPEARSRYRSNAK

SEQ ID NO: 258918 - protein, 82 aa, Glycine max
  unsure (1)..(82): unsure at all Xaa locations
  Clone ID: PAT_MRT3847_75827C.1.pep
VKXLXLXXNSXQXRHXHVMAASVLHCRSXQQSSXEXEWFWXWSSAXSSAXFGTSLKKVIVSRVXNSKVPVXASRLCLXXKTV

SEQ ID NO: 258919 - protein, 83 aa, Glycine max
  unsure (1)..(83): unsure at all Xaa locations
  Clone ID: PAT_MRT3847_75828C.1.pep
NLIDRAQDGHKEGSITERDLAICYKEXMMDQLSNEGTLLKRNMETPGFNQDQGIPHGGAEHTARELHKKVPDAAPAKHVLAGG

SEQ ID NO: 258920 - protein, 160 aa, Glycine max
  unsure (1)..(160): unsure at all Xaa locations
  Clone ID: PAT_MRT3847_75829C.1.pep
MAPPNNPVNSTLGFKSLEKVFDLCDGKFTVRGVPLLSQVPNNVTFSSFSSICEPRDAPPSILQRVIAVSHKGGFFGFSQVSPSDRLTNSLXSFSGRNFLSIFRFKTWWSTQWVGNSGSDLQMETQWVLIEIPEIKSYVVIIPIIEKSFKVALHPGSDGMS

SEQ ID NO: 258921 - protein, 61 aa, Glycine max
  Clone ID: PAT_MRT3847_7582C.1.pep
VNEDSLFQVREVYSQSRRLDGSSWERKLGRAFKTQVCDSQESSSVYIRKGSHHQQHDPHHD

SEQ ID NO: 258922 - protein, 47 aa, Glycine max
  Clone ID: PAT_MRT3847_75830C.1.pep
HCHGREQTFLTGYYSVTRKELLAYCTYITWSQRTNKFFFIHTNLGKL

SEQ ID NO: 258923 - protein, 117 aa, Glycine max
  Clone ID: PAT_MRT3847_75831C.1.pep
MKKVSNLLHTLKPDILMVFVQIAFAAVNVMYKLAINDGMSMRVASAYRLAFASAFTVPVALVFDRKKRPKITWRVLLLAFLCGLVWGSLFSNLYLEAMAFTSATFMLAMVNLIPGIT

SEQ ID NO: 258924 - protein, 205 aa, Glycine max
  Clone ID: PAT_MRT3847_75832C.1.pep
MTLNFLGLIFFPLLVPALLIINNALASDPDIIYDYVSPQNSSVNGSFFTYTGLRGVLHQIPQSFKATKVTLVEFPALNGQSISYALFQYPAGSINPPHIHPRAAEFLFLVSGSLQVGFVDTTRTLYTQNLQSGDMFIFPKGLIHYQYNPQSVPATAISAFGSANAGTVSIPHSIFSTGIDDVILAKAFKTDTYTVKKIRSGLNKP

SEQ ID NO: 258925 - protein, 34 aa, Glycine max
  Clone ID: PAT_MRT3847_75833C.1.pep
LQYLAVISYRYKPFLHSINSLSFNNELVLDMFSN

SEQ ID NO: 258926 - protein, 51 aa, Glycine max
  unsure (1)..(51): unsure at all Xaa locations
  Clone ID: PAT_MRT3847_75834C.1.pep
XVRXFRINSIXXLSKVNXXMRAEAIHMRXAEXQPTLHRLHLXPHGLSXKSP

SEQ ID NO: 258927 - protein, 225 aa, Glycine max
  unsure (1)..(225): unsure at all Xaa locations
  Clone ID: PAT_MRT3847_75835C.1.pep
LHLTASSEGKLENSFLSFQSXLPSWEHAQGKQFLQNLRTATCQDTXSRHEFPPLLFFATWEAMERKQVCXREMPFSTFATGNHLGSLWLIESRNQNNHPYLLDWYYTSQPHDATTQRHIQADDPFEVTEHQSPDWMPSILVQNEQHGHEEYINEYCDERVTSHLGASTSAPIFRESLIQDQHSIDMPLTTRSHWWARSHSQSGHGQTSFFEPPDFNHQPVYNYHE

SEQ ID NO: 258928 - protein, 48 aa, Glycine max
  Clone ID: PAT_MRT3847_75836C.1.pep
AASHEKGASLIQFARDPTEHIIAFLAKPCHHGSVVGPAPDIQTKHFTP

SEQ ID NO: 258929 - protein, 114 aa, Glycine max
  Clone ID: PAT_MRT3847_75837C.1.pep
KSNRALEPPGFQRAPPGKPTKKNRPTLAAPAQSPPKPGQRGEEHSRGGQKGPKGPLGKKKTPPFEPGKGGRQPAAPGAHLTFWEQVGSQPQGPQTGRKTSPTPRGPWGPGPPPV

SEQ ID NO: 258930 - protein, 84 aa, Glycine max
  Clone ID: PAT_MRT3847_75838C.1.pep
NPRHGSRVLTRVPASELSCSNSGFPERGNNFPFPKFYSGYNHRARPLWLVFSLRIFRGAPPFFFFLKYANSLFPPRKVRKLPLF

SEQ ID NO: 258931 - protein, 57 aa, Glycine max
  Clone ID: PAT_MRT3847_75839C.1.pep
KFDLNLGGQCFTLCRGGASPPSEKNSVLRGGYFWVKTFKGPFFYCWFLITPRGSPAW

SEQ ID NO: 258932 - protein, 62 aa, Glycine max
  Clone ID: PAT_MRT3847_7583C.1.pep
GEKCIFLYILTSSVITINFGGFSWNTTMLCEMKITQKLQAIALHALATSLKTNALKRENVLH

SEQ ID NO: 258933 - protein, 68 aa, Glycine max
  Clone ID: PAT_MRT3847_75840C.1.pep
RERIPSPSNLKKFFPLKLCLYGYRQSMWILCSTCFLCVDPHVELSSPIICSIFFYVSFPTEAIELYTT

SEQ ID NO: 258934 - protein, 115 aa, Glycine max
  unsure (1)..(115): unsure at all Xaa locations
  Clone ID: PAT_MRT3847_75841C.1.pep
SGTAYGRRRGQRQNQWQTHNYTTTDQLAGITLSGVHKANVSDRVLIRSIIYRTDRGSGLGGRKARRLGWVKTGRIAYKDAIAXLEINDGSXAGNLHVIREDLLVEICQLGPTGTC

SEQ ID NO: 258935 - protein, 56 aa, Glycine max
  Clone ID: PAT_MRT3847_75842C.1.pep
LFLGFSTSAHMKRVSCMHLILTNCRFFPDLQCQNILISLKKILGISSGTFFAYSVS

SEQ ID NO: 258936 - protein, 119 aa, Glycine max
  Clone ID: PAT_MRT3847_75843C.1.pep
PTRPKKCINDFVPFTICILQLSQLNFRVQLYSDSFPVNNLTAFCYLIASMGLQIIWSFVLALMDLYALVRKKVLLNPVLISLFVVGDWVTATLSLAAASASAGITVLRSTMWRKMLRSR

SEQ ID NO: 258937 - protein, 118 aa, Glycine max
  Clone ID: PAT_MRT3847_75844C.1.pep
MSEEAKKNFAGALTARPNSDEPKPAPVPAVPPKKVIIKSADMIPDMQKEAVDIAVAAFEKYNVEKDVAEQIKKEFDKRHGPTWHCIVGRNFGSYVTHETNHFVYFYLDQKAVLLFKSG

SEQ ID NO: 258938 - protein, 162 aa, Glycine max
  Clone ID: PAT_MRT3847_75845C.1.pep
VRGCKTSAESHVLDRDRLTAASPSGAFHLFLEWIGAQCGSALADGLVNILAFEESRFRQVNPTLKVQMTPPLREVVTLMEANIEEPLTIEQLCDYAGRSRRQVERLFREQLDTAPMRYYLELRITEGRRLLQHSTLSVLEVAVACGFTSVTHFSKRYSAYFG

SEQ ID NO: 258939 - protein, 50 aa, Glycine max
  Clone ID: PAT_MRT3847_75846C.1.pep
LIIFIYKFDEALTHSRKLLTTRCNLTILPAVIGQIAHQRLKKLAPYVKPQ

SEQ ID NO: 258940 - protein, 159 aa, Glycine max
  unsure (1)..(159): unsure at all Xaa locations
  Clone ID: PAT_MRT3847_75847C.1.pep
FKNAPKGIRGRAAILALILDGVILTAIIIIPQLALKGKPRSGAVGVMGTGLKIVMYSSPLWVMKTVVTTKRVEXMPFLLFFFFFFNGPVWLLXTVFVRNVIPGVPNGIGFFLGAMQLVLYAIYKNGKGVLNNKLEEGFQHEPFILKPNNESHQSENRPI

SEQ ID NO: 258941 - protein, 290 aa, Glycine max
  unsure (1)..(290): unsure at all Xaa locations
  Clone ID: PAT_MRT3847_75848C.1.pep
MLGFLSLWLLCGAGYVCIGTIGCTNNNYASXEKCKKCGQPKEVAAMPAIAMTGASFPTYSHYFSRAPGVPEQKMNIGLLGNGAPSQSLHLNSNWPVPGADKYGVQPLSIWLPGGNYGTVHHHENSTNQNLSVPKGWRNGDWICNCGFHNYSSRSQCKKCNAFPPXLGTKRLASEELVYDWDNKRLNIGTTHDQHQIYPGLEEVVGTGADPKPGLFPSYPSMNSTTAPSLPLATWLPPQASAPALLGKGARQWRSGDWMCSNCNNHNYASRLQCNRCKTQRMAPMQPVNVV

SEQ ID NO: 258942 - protein, 153 aa, Glycine max
  unsure (1)..(153): unsure at all Xaa locations
  Clone ID: PAT_MRT3847_75849C.1.pep
HFNSNWPVPRADKYGVQPLSIWLPSRNYGSGHPHENSTNHNLSVPKGWRNGDWICNCGFHNYSSRSQCKKCNAFPPAIDVKLHAVSTFWCEALGTKRLASEELVYDWDNKRLNVGTTNDQQQTYTSLDLXGRDRCRSKTWSLPLLSQHELKYS

SEQ ID NO: 258943 - protein, 100 aa, Glycine max
  unsure (1)..(100): unsure at all Xaa locations
  Clone ID: PAT_MRT3847_7584C.1.pep
ANKFPERQPIVTVGLSHDVCKDFQEPAPAPMVDPTEFTSWSTYRARIAYVEDTFLFVYINDLTRYGSRRGXSKCTTAGIQGIGCAFGGMILFLRYCTDGM

SEQ ID NO: 258944 - protein, 865 aa, Glycine max
  Clone ID: PAT_MRT3847_75850C.1.pep
MFGILGGNKGHKIKGTVVLMSKNVLDFNEIVSTTQGGLVGAATGIFGAATGIVGGVVDGATAIFSRNIAIQLISATKTDGLGNGKVGKQTYLEKHLPSLPTLGDRQDAFSVYFEWDNDFGIPGAFYIKNFMQSEFFLVSVTLEDIPNHGTIHFVCNSWVYNAKSYKRDRIFFANKTYLPNETPTPLVKYRKEELENLRGDGKGERKEYDRIYDYDVYNDLGNPDKSNDLARPVLGGSSAYPYPRRGRTGRKPTTKDSKSESPSSSTYIPRDENFGHLKSSDFLTYGIKSIAQTVLPTFQSAFGLNAEFDRFDDVRGLFEGGIHLPTDALSKISPLPVLKEIFRTDGEQVLKFPPPHVIKVSKSAWMTDEEFGREMLAGVNPCLIECLQVFPPKSKLDPTVYGDQTSTITKEHLEINLGGLSVEQALSGNRLFILDHHDAFIAYLRKINDLPTAKSYATRTILFLKDDGTLKPLAIELSLPHPRGDEFGAVSRVVLPADQGAESTIWLIAKAYVVVNDSCYHQLMSHWLNTHAVIEPFVIATNRHLSVLHPIYKLLLPHYRDTMNINGLARQSLINAGGIIEQSFLPGPFAVEMSSAVYKGWVFTDQALPADLIKRGMAVEDPSSPYGLRLVIDDYPYAVDGLEIWSAIQTWVKDYVSLYYATDDAVKKDSELQAWWKEAVEKGHGDLKDKPWWPKLNTLQDLIHICCIIIWTASALHAAVNFGQYPYGGFILNRPTLTRRLLPEPGTKEYGELTSNHQKAYLRTITGKTEALVDLTVIEILSRHASDEVYLGQRDNPNWTDDTKAIQAFKKFGNKLKEIEDKISGRNKNSSLRNRNGPAQMPYTVLLPTSGEGLTFRGIPNSISI

SEQ ID NO: 258945 - protein, 47 aa, Glycine max
  Clone ID: PAT_MRT3847_75851C.1.pep
LNVRTYGCNLFTYRLAKAFKAKKRFGEAKIIENPLIPDIGQNILTAC

SEQ ID NO: 258946 - protein, 125 aa, Glycine max
  Clone ID: PAT_MRT3847_75852C.1.pep
KGRWDNDQEAEHPEGEDYSPTRNISSSRWAAGDNSPVDEGEILNDEEMPKRRRRVSPELLDGRLRNKLLSPEESKVEGIERARARSSESEEIGVRGRTSSGEDFPGIESDKPCLHADLMLQVRTV

SEQ ID NO: 258947 - protein, 40 aa, Glycine max
  Clone ID: PAT_MRT3847_75853C.1.pep
CLFYVMGGLTNLFDDHMVRVTCSIYNKPSHPLPTLPIGPS

SEQ ID NO: 258948 - protein, 121 aa, Glycine max
  Clone ID: PAT_MRT3847_75854C.1.pep
HKMETVLLLKSRNYINALSVPRFSQVGMDNLIGQGFFQFQHFFKETSIECAGKNDSGKLKNSRVKIEKVFGKNAIHSSFTFLHLYNTKKEKCSLFSIQNEYKAALLGLLMLSLCNVILFKV

SEQ ID NO: 258949 - protein, 118 aa, Glycine max
  Clone ID: PAT_MRT3847_75855C.1.pep
DIWGMLSLYEASYLGAKGEEVLQQAMDFSKAHLHQSLAHLSPELRKLVAKALTLPRHLRMGRLEARNYMEKYSQATNQIPALMELAKLDFAMVQSMHQKELAEISRWWKNLGLVERLG

SEQ ID NO: 258950 - protein, 62 aa, Glycine max
  unsure (1)..(62): unsure at all Xaa locations
  Clone ID: PAT_MRT3847_75856C.1.pep
XPTFXAGTKKEEARVGVWVNIWRKXYQYEXCWXWCYYXWXQXXGNEHNRRSYXKQGXRVLWF

SEQ ID NO: 258951 - protein, 190 aa, Glycine max
  Clone ID: PAT_MRT3847_75857C.1.pep
MSCSREEALVTLFYNASSSFHLLFFFLFSSSVLLFKFINFIGSFTIFQRDHHYEYVSSEYDDEEEEIQESYSYVHDSIESDHLVADIICGGETLLFVHKNQPQRTHSSSDEFTSPRDSLVEDLEENYSTETLSFHKSPLVSDFENEQDAEEFPAEDADSVPNSGPAESRPTWGITLGPDRGDLRGRGRGL

SEQ ID NO: 258952 - protein, 36 aa, Glycine max
  Clone ID: PAT_MRT3847_75858C.1.pep
AASSPSSPFSPAWSPALSLVPTARSVGAWCRHCTCR

SEQ ID NO: 258953 - protein, 37 aa, Glycine max
  Clone ID: PAT_MRT3847_75859C.1.pep
LSTLTRRSFVNMSRDVGYYWIRITNLVALTLSGGKIL

SEQ ID NO: 258954 - protein, 157 aa, Glycine max
  Clone ID: PAT_MRT3847_7585C.1.pep
YAEPSQIHVPPAHDEKGPSNLHASSQVKPVHHASTNSYEQSASGAARKDQSTTSGVSNLEVRSSGTGSQETKFQDSYSGNNSSFPMNRQNWNMGFKDAASAAQAAAESAERASMAARAAAELSNRENMTRQYSSGSHSSSRSGLRDERSQEYTFHDD

SEQ ID NO: 258955 - protein, 65 aa, Glycine max
  unsure (1)..(65): unsure at all Xaa locations
  Clone ID: PAT_MRT3847_75860C.1.pep
FAKLAKNKNIEDLIFNAAGGGAAVAVTAPAGGGGGAXVEAAPAAEEKKEEVKEESGDAMGFGLFN

SEQ ID NO: 258956 - protein, 84 aa, Glycine max
  Clone ID: PAT_MRT3847_75861C.1.pep
SMLSSASVKSLRISNSGKLVASFYQVRMLNRLQHQDEAQWPCSTRDQDDSVTSSFLYPYRVEHFTASKLPSMHQTGPRFRSRAP

SEQ ID NO: 258957 - protein, 41 aa, Glycine max
  Clone ID: PAT_MRT3847_75862C.1.pep
SIFEVGKDLQHHVTLLPLPRKPKISSHRFIVVQKSKKQPPK

SEQ ID NO: 258958 - protein, 54 aa, Glycine max
  unsure (1)..(54): unsure at all Xaa locations
  Clone ID: PAT_MRT3847_75863C.1.pep
PVGGSYGLRHLXWRXXGNGCMVVSGNWWLLXXXKLGHXXHLKLHDSQXXDSSLL

SEQ ID NO: 258959 - protein, 199 aa, Glycine max
  unsure (1)..(199): unsure at all Xaa locations
  Clone ID: PAT_MRT3847_75864C.1.pep
ARGGTDIIYATQQYSSTVPPAEVQKKLKDMADEFFIDKAGQYNSRFNAKEKVMKDNALNFMDIQTRSYYESEAQDIKFMCRRKGGNGKRSLSHSEWCQTVLSQPDVISMSFVPITSLLGGINGSGYLTHAMNLYLRYKPQIEELHQFLEFQLPRQWAPVFGELALGPERNXHKCCFLXVSFMGPKLYVNTTXVDVGKSP

SEQ ID NO: 258960 - protein, 97 aa, Glycine max
  Clone ID: PAT_MRT3847_75865C.1.pep
VNAEVEKNHLPGAPDMDVQAAQDGVIVKVSCPIDVHPVSKVIARGKEAEIGVVESRLTVANDTVFHTFVVKSEGPDQVTKDKLIALFSKESNFIQTL

SEQ ID NO: 258961 - protein, 104 aa, Glycine max
  unsure (1)..(104): unsure at all Xaa locations
  Clone ID: PAT_MRT3847_75866C.1.pep
FSFLHRSIILLLKKRIFMKTLTAKTISLEVECFDTIADVIAXTQDKDGIPPDQQRLIFVVQQFEDGRTLDVYNIHKECTLQLVLRLRGGMHIFAKTLTGPTITL

SEQ ID NO: 258962 - protein, 64 aa, Glycine max
  unsure (1)..(64): unsure at all Xaa locations
  Clone ID: PAT_MRT3847_75867C.1.pep
KQQELFKKPLQGATKNLLSKNKKFPIFVCXSKGEKACLVFAKTKKGGGDPTILDFAKALKKGKC

SEQ ID NO: 258963 - protein, 110 aa, Glycine max
  unsure (1)..(110): unsure at all Xaa locations
  Clone ID: PAT_MRT3847_75868C.1.pep
IIRSDGKVRSEGKYCLKDYVGRDNKNETSTLQRHMGKCDVYLKAXNSDVGNIILDHAGRLRNKKIDQSVVHEMISMMIIEHDLPFSFVEHRRVKELLQYLHLDMKVPFKH

SEQ ID NO: 258964 - protein, 178 aa, Glycine max
  unsure (1)..(178): unsure at all Xaa locations
  Clone ID: PAT_MRT3847_75869C.1.pep
MGLCTSKPTLSSPQSATHSPVAPSQNDAVTLTHSAEPHSNGENQNPKEPENSGKRSPFFPFYSPSPGRYVFPVSPRRFFKRPFPPPSPAKHIKAALARRHGSVKPNEAAIPEAEAVAGLDKNFGFSKHFGNKYELGGEVGRGHFGXTCVAKVKKGELKGQTVXAVKVIPKAKMTTXIA

SEQ ID NO: 258965 - protein, 66 aa, Glycine max
  Clone ID: PAT_MRT3847_7586C.1.pep
NLTGTARYASMNTHLGIEQSRRDDLESLGFVLMYFLRGSLPWQGLKAGTKKQKYERISEKKVSTSI

SEQ ID NO: 258966 - protein, 59 aa, Glycine max
  Clone ID: PAT_MRT3847_75870C.1.pep
EERTNIYHIYWTFLLSSVLQVHTTYAQLNNRLGTSGFMEIGIGIKGLYPLSHVVNLCHS

SEQ ID NO: 258967 - protein, 329 aa, Glycine max
  unsure (1)..(329): unsure at all Xaa locations
  Clone ID: PAT_MRT3847_75871C.1.pep
MKEADEQLCEAAIKGDTKKVRSLIYSGADVTHFDGDGLNPLMHAAKHGHAPVLTLLLSVGAPWNALSPSNLSAGDYAMQEGHNETFELLLNAGIQSELILGTIARKANKNGDSGHDYLEDRVSFSEDKLMDSESKAVMMAWENPLMEAHAKAVCSGGGHVLNIGFGMGLVDXALQRYAPASHTIVEAHPGVYERMLRSGWGXKENVKIVFGRWQXDVLPQLETYDGIFFDTYGEYYEDLREFHQHLPALLKTGGIYSFFNGLCGSNAFFHVVYCHLVSLELENLGYSTQLIPLPVKDCLGEQVWEGVKQRYWQLDTYYLPVCQAIENPE

SEQ ID NO: 258968 - protein, 34 aa, Glycine max
  Clone ID: PAT_MRT3847_75872C.1.pep
RWQNRQGGTAQTINLNSFDHHHGHAKSQLVCFFS

SEQ ID NO: 258969 - protein, 53 aa, Glycine max
  Clone ID: PAT_MRT3847_75873C.1.pep
VFNKESYRIDDKLKLMGFCGDAPLVKRVLVRTQLMPRIQSKMLTVSVTEALTS

SEQ ID NO: 258970 - protein, 378 aa, Glycine max
  Clone ID: PAT_MRT3847_75874C.1.pep
LESLPPPQPIVLPQENNNLCVEIPAGQSDKFEELQVSEGTAKDNGVFQNVSAMDIFKYGGLYFLGFFVLQTIYTVWIVGVYKSNQKDGELEIDGRENRDEKTVSLPVNGASNAFLSEEQLLMEKKIEEIKLMAREARRIESEKKGKEDEDEDFEVDDDDDDEGAVSGNRLGIEKEIGERLLKVQNRINGSAKDISAALQINIRGNSAAGVDRGVNKNVKNKGNEALVFKKKFKFKSPSTKDTKTPKGFPGNRDWKESKATKRGSESKKAAQDHGSDDVSDHAQMLHEDKRANQPELVTQMSVSSVPSEVGGKVVDDKSKVMQDSINGNSRHELAKKNSQANRVKVKQANTKTDVWWLNLHYVFLSSHEFFLFTCFSVG

SEQ ID NO: 258971 - protein, 130 aa, Glycine max
  Clone ID: PAT_MRT3847_75875C.1.pep
MWGLNLRYVFVILMQRDSEEGSEGLYSLKFTSKEQEQSDDDSYTVAFEDHADANNFCFLLKSFFEDLGSFSADAVPMSIQELNEEIISRAKKVVVVKKRQLQLYAGQPLADVEMALGSIIEQDQNAPSSP

SEQ ID NO: 258972 - protein, 82 aa, Glycine max
  Clone ID: PAT_MRT3847_75876C.1.pep
QLLLVFRQRSTQLSNSVFYNPPNLNNTIFFALFLSFAFTTSYLPSSISHFFLYNKPNPPQNNCTYYISSYITSFYRIKSPPT

SEQ ID NO: 258973 - protein, 58 aa, Glycine max
  Clone ID: PAT_MRT3847_75877C.1.pep
TFLLLSFYSALINFKLKLVKSWISAPTLLIGLGLCGVDFFITFLIFQLFSSHLIRIGR

SEQ ID NO: 258974 - protein, 94 aa, Glycine max
  Clone ID: PAT_MRT3847_75878C.1.pep
EQFCLFLSRTYHQKFKKMDQQVERQKRGKEMKRKCSKVNKRNKLMTCCRCPCRAASCMFRGIGRCMFVTCYPVVQCLGLDEHRHRHHHHHGKHF

SEQ ID NO: 258975 - protein, 40 aa, Glycine max
  Clone ID: PAT_MRT3847_75879C.1.pep
ISVPEVQMNVRMERGECSLLSSPTELHKISFEKYVYFCSS

SEQ ID NO: 258976 - protein, 78 aa, Glycine max
  unsure (1)..(78): unsure at all Xaa locations
  Clone ID: PAT_MRT3847_7587C.1.pep
LLKYVAVYRPIGPAQKTVRESVGPNEGVPXLHLRNAPTKLMKAFGYGKGYIYTPDNPPATQTYLPPSLMGHKFLDWPE

SEQ ID NO: 258977 - protein, 74 aa, Glycine max
  Clone ID: PAT_MRT3847_75880C.1.pep
ASTRVNEPLLGCSTSPLLSAPVFEVSSGGSCFAITTPVESCMVNDKIKIGNAKVYTVMFVVWMRPVRIDMVVTI

SEQ ID NO: 258978 - protein, 73 aa, Glycine max
  Clone ID: PAT_MRT3847_75881C.1.pep
PYIFFYFYLILGDIPNPIFGRYKKIITPILLIQTGEEGTFFGKVFPEGNWWGGPREKFPNSKNQLAPAFFGGG

SEQ ID NO: 258979 - protein, 83 aa, Glycine max
  Clone ID: PAT_MRT3847_75882C.1.pep
NKQKQVSKLNLMVANRMKHKTHYKFDAPAIYKRKPRRKKEGISPNFQVDSTLIGIFHGAGKSHRGVITIVKVISQLNLWVLSI

SEQ ID NO: 258980 - protein, 72 aa, Glycine max
  Clone ID: PAT_MRT3847_75883C.1.pep
GGGGPKNYKTTPKKMKTGRNKSGGNPGPQAPKNRGPNQQDGKPGGKEVAPLPPTKKIAPPLTKPKTPKPKWP

SEQ ID NO: 258981 - protein, 57 aa, Glycine max
  Clone ID: PAT_MRT3847_75884C.1.pep
PVIVLPSLVYALVMILYGLSTIWSGVLPVMPCRFMKAVIAATPNPSRRGTPGSGAQR

SEQ ID NO: 258982 - protein, 103 aa, Glycine max
  Clone ID: PAT_MRT3847_75885C.1.pep
FPLSKPAIGPPPFILGKPPHWPPQVFHFFFRVFFLCDIFGKYHFLPGTIFFPFFPQVLIRPPLRKIVPPPGPVPKFRVLPRGPPRVPPRVPPRGPPRVPGGGG

SEQ ID NO: 258983 - protein, 34 aa, Glycine max
  Clone ID: PAT_MRT3847_75886C.1.pep
ARTRTEARTTAREIQWLHLPRRNGNGLKGTSSKE

SEQ ID NO: 258984 - protein, 126 aa, Glycine max
  unsure (1)..(126): unsure at all Xaa locations
  Clone ID: PAT_MRT3847_75887C.1.pep
YLAKWSKHNPTGRGQGHNKRTSHFISSVYYGCKSSKYFNAGRSTHLAIFLKLGAENPNIXSQYMPCDHCSMTPTXSGTALSYIGEGLHLSEQEPTTLDLDSNLSRYPLHHCFIHTITSLLCHHLTI

SEQ ID NO: 258985 - protein, 44 aa, Glycine max
  Clone ID: PAT_MRT3847_75888C.1.pep
TASIIGVCYSTSLPKINHFTTSYKLMKLRSTVLTISLEILGTWQ

SEQ ID NO: 258986 - protein, 129 aa, Glycine max
  unsure (1)..(129): unsure at all Xaa locations
  Clone ID: PAT_MRT3847_75889C.1.pep
MAKDXEXVTEXGEYSAKDYHDPPPAPLIDPYELXKWSLXXXAIAEFIXTLLFLYITVLTLIGYXRXSDXXIPRXTXNVTAFGIFGXSLXPSGXMIFXPVYCXXXIXGGXFXPXVTFGLFLWTPSFWGSF

SEQ ID NO: 258987 - protein, 65 aa, Glycine max
  unsure (1)..(65): unsure at all Xaa locations
  Clone ID: PAT_MRT3847_7588C.1.pep
TKKCVPIKSQSNLFYRXXLNXIYPTADNKLPHPWTTFNKLQQSFPPVHHLXXWFTLDFHKNILRL

SEQ ID NO: 258988 - protein, 57 aa, Glycine max
  Clone ID: PAT_MRT3847_75890C.1.pep
HITNLQQMSWGTRAHASTHTLSFTQMTKISLYLAYPNHSYILPSNKNPLSILHDGHP

SEQ ID NO: 258989 - protein, 166 aa, Glycine max
  Clone ID: PAT_MRT3847_75891C.1.pep
MNYSVRPCSQNKTLGRDAHNLLEYFKKMQAENPGFFYAIQLDEENRMSNVFWADARSRTAYSYYGDTVHLDTTYKVNQYRVPFAPFTGVNHHGQMVLFGCALILDDSEASFLWLLKTFLTAMNDRQPISITTDQDRAMQTAVSQVFPQARHCISKWQILREGQKKL

SEQ ID NO: 258990 - protein, 117 aa, Glycine max
  Clone ID: PAT_MRT3847_75892C.1.pep
TTTFRYGRRIVLRVLHKPSTRTGRCDSRELFPAGNHSFLMSSPVRIPKFRIRRACIRRHRRGRTRALAWRHPRAGNLRHPIPPMYPSRDTLSPSLPLAFTRLHGTPYGGNAPRDRVF

SEQ ID NO: 258991 - protein, 39 aa, Glycine max
  Clone ID: PAT_MRT3847_75893C.1.pep
CPFLRTALLRRGRANKTARGTTPRTQQSSIWLLLESRPP

SEQ ID NO: 258992 - protein, 55 aa, Glycine max
  unsure (1)..(55): unsure at all Xaa locations
  Clone ID: PAT_MRT3847_75894C.1.pep
SPQPPFFTSLHIAEEMALVKPISNXXXXXXXXPKXGXTSXRPNXCACTHTHLIKA

SEQ ID NO: 258993 - protein, 45 aa, Glycine max
  Clone ID: PAT_MRT3847_75895C.1.pep
FFFYFFHSTAHHNTAAWDRQTSLTQITILIPYNRSLEITRVAYLL

SEQ ID NO: 258994 - protein, 77 aa, Glycine max
  Clone ID: PAT_MRT3847_75896C.1.pep
INEYNSSKNYIYIYIYIYIYIYIYIYQMCYYFHTLIFFSQPISSLSLYFPSYLSNISSISPLHRKNEAYIYHLTYLY

SEQ ID NO: 258995 - protein, 417 aa, Glycine max
  unsure (1)..(417): unsure at all Xaa locations
  Clone ID: PAT_MRT3847_75897C.1.pep
MPLRLEIKRKLAQRSERVKSVDLHPTEPWILASLYSGTVCIWNYQSQTMAKSFEVTELPVRSAKFIARKQWVVAGADDMFIRVYNYGTLDKCLVLVVDTDYIPEVALMARSYLLSKVSDEMAIWRKDLNKVNPKAAESLADPEEYPNLFEDWQVALAVESKAVETRNVYPPAEQYVNHADKSQITLVEAFRNMQIEEGEEHLENGDSTHELTEQSGEEHYTEDQEEQNGEEGSQEEAVVVDADSTDGAVLVNGNEADEEWGTNNEGAPSAXAIGWGGVKIKILMLRVVIGYDEGTIMVKLGREEPVASMDNSGKIIWAKHNEIQTVNIKSVGANVEIADGERLPLAVKELGTCDLYPQSLRPNPNGRFVVVCGNGEYIIYTGLAWRNRSFGSALEFVWSSDGEYAVKESTSKVKIFR

SEQ ID NO: 258996 - protein, 509 aa, Glycine max
  Clone ID: PAT_MRT3847_75898C.1.pep
LEFKQWVFQEKRSVRPTFSAERIFGGTLLAMCSNDFICFYDWAECRLIYRIDVNVKNLYWADSGDLVTIASDTSFYILKYNRDVVVSHLDSGRPVDDEGVEDAFELLHEMNERVRTGIWVGDCFIYNNTSWRLNYCVGGEVTTMFHLDRPMYLLGYLANQSRVYLIDKEFNVMGYTLLLSLIEYKTLVMRGDLERANDILPSIPKEHHNSVAHFLESRGMIEDALEVATDPEYRFDLSIQLGKLDVAKSIAIELQSEPKWKQLGELTMSTGKLEMAEECLKYAMDLSGLLLLYSSLGDAEGISKLAILAKEQGKNNVAFLCLFMLGKLEDCLQLLVESNRIPEAALMARSYLPSKVSEIVAIWRKDLNKVNPKAAESLADPEEYPNLFEDWQVALAVESKAVETRNVYPPAEQYVNHADKSQITLVEAFRNMQIEEGEEHLENGDSTHELTEQSGEEHYTEDQEEQNGEEGSQEEAVVVDADSTDGAVLVNGNEADEEWGTNNEGAPSA

SEQ ID NO: 258997 - protein, 278 aa, Glycine max
  Clone ID: PAT_MRT3847_75899C.1.pep
DTALDLSIQLGKLDVAKSIAIELQSEPKWKQLGELTMSTGKIEMAEECLKYAMDLSGLLLLYSSLGDAEGISKLAILAKEQGKNNVAFLCLFMLGKLEDCLQLLVESNRIPEAALMARSYLPSKVSEIVAIWRKDLNKVNPKAAESLADPEEYPNLFEDWQVALAVESKAVETRNVYPPAEQYVNHADKSQITLVEAFRNMQIEEGEEHLENGDSTHELTEQSGEEHYTEDQEEQNGEEGSQEEAVVVDADSTDGAVLVNGNEADEEWGTNNEGAPSA

SEQ ID NO: 258998 - protein, 293 aa, Glycine max
  unsure (1)..(293): unsure at all Xaa locations
  Clone ID: PAT_MRT3847_7589C.1.pep
QQGEALLSWKRTLNGSLEVLSNWDPVQDTPCSWYGVSCNFKNEVVQLDLRYVDLLGRLPTNFTSLLSLTSLIFTGTNLTGSIPKEIGERLELGYLDLSDNALSGEIPSELCYLPKLEELHLNSNDLVGSIPVAIGNLTKLQKLILYDNQLGGKIPGTIGNLKSLQVIRAGGNKNLEGLLPQEIGNCSSLVMLGLAETSLSGSLPXTLGLLKNLETIAIYTSLLSGEIPPELGYCTGLQNIYLYENSLTGSIPSKLGNLKNLENLLLWQNNLVGTIPSEIGYCEMLSVIDVSMN

SEQ ID NO: 258999 - protein, 53 aa, Glycine max
  Clone ID: PAT_MRT3847_758C.1.pep
KKFFLFFSPFLLKKKRKKKKKKKRKKEKEKKKKEKKRKEKKRKEKKKRVRAVF

SEQ ID NO: 259000 - protein, 909 aa, Glycine max
  unsure (1)..(909): unsure at all Xaa locations
  Clone ID: PAT_MRT3847_75900C.1.pep
SPTIDLGRELVHSPICKNALLRLEIKRKLAQRSERVKCVDLHPTEPWIXWLSLYSGTVCXIWNYQSQTMAKSFEVTELPVRSEKFIARKQSVVAXADDFFIRLYNDNTFDNVKVFXAHTDXTRCVKFPTYPSLSAXSSHDMLIXMWVLKKGWTSTRIHEECFNYIIHLXFSSWAFAKISESSLVSSILIWNLGSPDPCANFWLLXHKGIYYFDYFTGGNKPYIITGCDDHTAMGWVYLIKSCVKSLYHSTHNVAXICFHPVLFIXSTGSVDGIVRIWISTTYGFENTLNYGHERVXLIXYINRYGIVMGLCNFMLVFELQSDNLPTSGMSLQALIXDLASLKQLAALSKRSAASSYLEPNKPQPLSFFSAFFSNXLPSITDRPFSSDRNKAIEDGLIDRIQCVAGTRRRRRRILMKEGKXVNENTXKDKILTKKNPQMKNIRSRFSPERIFGGTLLAMCSNDFICFYDWAECRLIYRIDVNVKNLYWADSGDLVTIASDTSFYILKYNRDVVVSHLDSGRPVDDEGVEDAFELLHEMNERVRTGIWVGDCFIYNNSSWRLNYCVGGEVTTMFHLDRPMYLLGYLANQSRVYLIDKEFNVMGYTLLLSLIEYKTLVMRGDLERANEILPSIPKEHHNSVAHFLESRGMIEDALEVATDPDYRFDLAIQLGKLDVAKSIAIELQSEPKWKQLGELAMSTGKLEMAEECLKYAMDLSGLLLLYSSLGDAEGISKLAILAKEQGKNNVAFLCLFMLGKLEDCLQLLVESNRIPEAALMARSYLPSKVSEIVAIWRKDLNKVNPKAAESLANPEEYPNLFEDWQVALAVESKAVETRNVYPPAEQYVNHADKSHITLVEAFRSMQIEEGEEHLENGDSTHELTERNGEEHYTCSSSFGGRRAVVCATWAPRWRE

SEQ ID NO: 259001 - protein, 52 aa, Glycine max
  Clone ID: PAT_MRT3847_75901C.1.pep
NLIPTIIYLVSKKKGKNLYVPSPILGKRGKGIQLGLKAFTFPLTKEWAPMAG

SEQ ID NO: 259002 - protein, 88 aa, Glycine max
  Clone ID: PAT_MRT3847_75902C.1.pep
LITQPVSVFVHWFILVAVVYITLQPLHLKMVNGRQIVAKSYPPIDSINTTLSNLQQLRSHFNDFLSLSDPHTLSQMPTSSTGSFPLHT

SEQ ID NO: 259003 - protein, 46 aa, Glycine max
  Clone ID: PAT_MRT3847_75903C.1.pep
RRQKGYIQSQQSYHNLNYKKHMLPLHVNNEFKLFEIFYNHTIIHSV

SEQ ID NO: 259004 - protein, 161 aa, Glycine max
  Clone ID: PAT_MRT3847_75904C.1.pep
LMCTRIFVGSWNIGGITPPKNLDMEDWLDTQNNSADIYVLGFQEIVPLNAANVLGPQNRKVSMKWNSLIGAALNNRTPTKVVEENKTAEPQKIYPLKEHIYAEGEHGQDFQCIISRQMVGMFITIWVRCDLYQTIRHLSILSVGCGIMGCLGNKSSSIWWE

SEQ ID NO: 259005 - protein, 43 aa, Glycine max
  unsure (1)..(43): unsure at all Xaa locations
  Clone ID: PAT_MRT3847_75905C.1.pep
RRXAIDRVXKLLIFRSMXLKKRKITXKLELFSHXKYILFMFGS

SEQ ID NO: 259006 - protein, 75 aa, Glycine max
  Clone ID: PAT_MRT3847_75906C.1.pep
WLLSPLASLELGSPSFPKSQLGAAVCLLRVHPSLLPAGTDPSYWGGIVLSYPVYSRGVIVTLSFLDFSRYYFPLW

SEQ ID NO: 259007 - protein, 113 aa, Glycine max
  Clone ID: PAT_MRT3847_75907C.1.pep
PPRRSWRDARFPCRGGIFCFPPRKWALGSKPLIGRSSLIMGSGPYFARHGVHFFLPGRTFSIFSRGSPFSPLTTSFHCSPHLSSLYFTGNGSGFPARPFFSGKNTGPRIKKNI

SEQ ID NO: 259008 - protein, 107 aa, Glycine max
  unsure (1)..(107): unsure at all Xaa locations
  Clone ID: PAT_MRT3847_75908C.1.pep
CHSASSLYTLSTHALLRSQGYVERETTLIGSLTVREFLYYSALLQLPGFFCQKKSVVEDAIHAMSLGDHANKLIGGHCYMKGLXSGERRLVSIARELVMRTRILFID

SEQ ID NO: 259009 - protein, 121 aa, Glycine max
  Clone ID: PAT_MRT3847_75909C.1.pep
NFFRVGGGPGRYKKHGLQRGRLLGVPVCQGQGLLKSSWFHRQRRFCPQTIFLSGPFVNHDVPPTSWVGVPLVPLICCFWGNPSKEESAKRACNSDSFFSTVSLRRAMHPSLYNPLFLKGCL

SEQ ID NO: 259010 - protein, 295 aa, Glycine max
  unsure (1)..(295): unsure at all Xaa locations
  Clone ID: PAT_MRT3847_7590C.1.pep
MGMERVQCAYASLDEAFEIGKEAYQGQQYSQIYFARLHLMRTLLYSLVPHWKPNFPVCTVLGLEEGKECVIVGTLYKHMKLKPCILDEYSKERSVXPLVKPHNFIHPDDHLVLEDESGRVKLSGSIILPSEYVTGIVVALLGKETGAGDFLVQDVLHAGLPPQIEFPLKSREDKYVVLVSGLSVGSSSSNPLQFQLLIDHITGHLGDEKEQSIASQMAQLSLHLLSDLPTVLIVIWLYSQIYFARLHLMRTLLYSLVPHWKPNFPVCTVLGLEEGKECVIEGTLYKHMKLKPLHS

SEQ ID NO: 259011 - protein, 112 aa, Glycine max
  Clone ID: PAT_MRT3847_75910C.1.pep
FLEMLCVVRMIQGNLLQQLQHLCINHSNKSLRHVVLDWNCWRSNENIDGGTLVILCKIRGRLSSDGWEEGTREKGGEVVEDTEKEYVRLPGPKLMGSGEGGVGGDDVIGRRG

SEQ ID NO: 259012 - protein, 50 aa, Glycine max
  Clone ID: PAT_MRT3847_75911C.1.pep
ARLEHVGSVIQTRYLMATVGDERQKCVHIAPLRTVSVFGSKAEVLVRDEC

SEQ ID NO: 259013 - protein, 57 aa, Glycine max
  Clone ID: PAT_MRT3847_75912C.1.pep
LKRSHSPSGSILQKYTLPKKKKKKKKKKKKKKKKKKKKKKKKKKKRGAPPWGFFFFF

SEQ ID NO: 259014 - protein, 64 aa, Glycine max
  Clone ID: PAT_MRT3847_75913C.1.pep
RYGSWLKVLPCYLCHFCRIRIYYANQALWGILTTIAGLYFIDGGPRINVGRNYSSLDCDNWSSP

SEQ ID NO: 259015 - protein, 171 aa, Glycine max
  Clone ID: PAT_MRT3847_75914C.1.pep
IKYGHQSDCFVASVLLTLYASVGELVDVEKLFRRIDDKDIVAWNSMILAHARLAQGSGPSMKLLQELRGTTSLQIQGASLVAVLKSCENKSDLPAGRQIHSLVVKSSVSHHTLVGNALVYMYSECGQIGDAFKAFDDIVWKDDGSWSSIIGTYRQNGMESEALELCKEDVG

SEQ ID NO: 259016 - protein, 64 aa, Glycine max
  Clone ID: PAT_MRT3847_75915C.1.pep
MAASLGFPFTSAQWRELERQAMIYKYMMASVPVPPDLLIPTSLTSSSRSSCSMTLCFLWMVVSI

SEQ ID NO: 259017 - protein, 230 aa, Glycine max
  Clone ID: PAT_MRT3847_75916C.1.pep
FRHLLLPLASCIKTKQVYVVELFGDHTSDDKTLHEVENSHHSYLLSVKETEEEARASLLYSYKHSINGFAALLTPKEANKLSEMEGVVFVHKNQPKIYSLHTTRSWNFVGLDGPLNPWEEESDHTDGNLLARAQYGKDIIVGMIDSGVWPDSKSFSDEGMEPVPTKWKGVCQNGTAFDSSQCNRKIIGARYYLHGYQSAFGPLNEKEDYKSARDKDGHGKPHSLNSCRAC

SEQ ID NO: 259018 - protein, 46 aa, Glycine max
  unsure (1)..(46): unsure at all Xaa locations
  Clone ID: PAT_MRT3847_75917C.1.pep
LXFLGLLRFASCVSLFSSWLXFXRSAVXRLGGVVGIXLVXAAXXAG

SEQ ID NO: 259019 - protein, 94 aa, Glycine max
  Clone ID: PAT_MRT3847_75918C.1.pep
HQFIREERMRKSHLQQPSSEVQREGESSKWIEKRNPSSDDGAKKTTEATGQTKKPINEDINASADAFIKNFRQQLLIQRLQSIENYDQMLARGH

SEQ ID NO: 259020 - protein, 40 aa, Glycine max
  Clone ID: PAT_MRT3847_75919C.1.pep
MADKAVTIQTRKFITNMLLSIKQLIPHVLHPRKANISNAE

SEQ ID NO: 259021 - protein, 153 aa, Glycine max
  Clone ID: PAT_MRT3847_7591C.1.pep
RGVPQFPRLPRFPLICRANWVVPNWAFPALFVRKKKAPGPPRVREGFFLGGAPRFLFLGGYFVFPKVYLPRPPPEKVPFLFEPKIMNWGFSPVVLGTLGGKINPGGFNSPPHFEEPEKKPFCPGVPFFKVGGGVLFCPLEGGGPFFLPLGGVF

SEQ ID NO: 259022 - protein, 169 aa, Glycine max
  unsure (1)..(169): unsure at all Xaa locations
  Clone ID: PAT_MRT3847_75920C.1.pep
XVXGXXGXTAXKRVXGXPGXNFPXLPEARXXNGWALKXQIKGXXXNLGNGXFPKFSXIWQXKGIGNWKIGXPXXXFXKLGIXIXXGXPKPGFGRQFXIXXFGGFKPKGXXRVKKGFFXPKNQRIWFFGMDXSLVLGAKTTTQRKFLWNGKIFPVGFXGYPFFVXLSLSW

SEQ ID NO: 259023 - protein, 119 aa, Glycine max
  unsure (1)..(119): unsure at all Xaa locations
  Clone ID: PAT_MRT3847_75921C.1.pep
MAVTKSLSNFLFMEMSCVAASQAGNLNITYYCTYTVWGGAVPSGCAWLNPGEWWNITRDERLQRXRLWGRTNCTFNSAGRGKCLTHDCDGVMVCNKTGAPRNTVVDYALNEHINLDIYN

SEQ ID NO: 259024 - protein, 119 aa, Glycine max
  Clone ID: PAT_MRT3847_75922C.1.pep
GDSKGHPEQPIIMKMLEKLGGLLREAGYCPDGSFVLHDVDEEEKTHSLGYHSEKLAVAYGLLKVPEGMPIRVMKNLRVCGDCHSAIKLIAKVTGREIILRDANRFHHFKDAHWSCKDYW

SEQ ID NO: 259025 - protein, 346 aa, Glycine max
  Clone ID: PAT_MRT3847_75923C.1.pep
MAVESDKVGSDRESLELLQNRTILQKHLIYLQVLLPRYFQYDLLFICTRKVRKETNYLLESLKLCRQFLRPSCRKWQFPLGMEVETEKSGSDGKGWSFCRMPFWQTTHTPSSSTTSMSYMHNVHPQNQNNFQSVDRSSHHSSTTVSSMAKSLLPTKRRLHLDPSNKLYFPYEPGKQVRSAIAIKNTCKSHVAFKFQTTAPKSCYMRPPAGILAPGESIIATVFKFVEPPENNEKPIDQKSKVKFNIMSLKVQGEMDYVPELFDEQRDQVAIEQILRVIFLDPEKPSPVLDKLKRMLAEADAALEARKKPLEEKGPCVAGEGLVIDEWKERRERYLAQQQVQGVDSV

SEQ ID NO: 259026 - protein, 241 aa, Glycine max
  Clone ID: PAT_MRT3847_75924C.1.pep
GDLIKSPLSRPLFIAAESGIPEIVIELLYSYPDLLWKVDGQNRSLFHIAIMHRQEKIFNLIYDIGAHKDLITSYRDNNNHNILHLAGKLAPSEQLHVVSGAALQMQRELLWFKEVEKIIQPLFKEIKDSEGRTPQMLFTEEHKGLAKGEKWLKNTASSCMLVATLLSFSLFPTPQPFSLPLSHLSIASHPLLFSLVSLRPPNLLRIFFLHKGIIIRRRIMVLYFVTFQFFVNKFKKLFSNK

SEQ ID NO: 259027 - protein, 267 aa, Glycine max
  Clone ID: PAT_MRT3847_75925C.1.pep
MTISNHSFSRIDTLELKALIVRKVGRQRADKYFDQLRRLLSSKISKSEFDRICTVIIGRENIPLHNRLIRAILKNACLAKVPPVRGSARVGSATSVKDSNGSQRGSAQSLFGEAFPPSMRRISSLAARDCRFKGRHNAFGPLGKPHFGLASEELVYKTLEQQSATELNSLGSRPPISVEEGEEVEQMAGSPSIQSRSPVTAPLGVSMHFGRRLHFNVSLCSKDYPETCHSNGSLPDTRSLRSRLEQKLEKEGLTATVDSVNLLNNAL

SEQ ID NO: 259028 - protein, 62 aa, Glycine max
  Clone ID: PAT_MRT3847_75926C.1.pep
MTISKHSFSRIDTLELKALIVRKVGHQRADKYFDQLRRLLSSKISKSEFDRICTVIIGRENM

SEQ ID NO: 259029 - protein, 57 aa, Glycine max
  Clone ID: PAT_MRT3847_75927C.1.pep
LEPPLFFFFFLCLTLCADLLPRTGERMTAVSSATLENNEDDTDHNTFLISEISEEEP

SEQ ID NO: 259030 - protein, 304 aa, Glycine max
  unsure (1)..(304): unsure at all Xaa locations
  Clone ID: PAT_MRT3847_75928C.1.pep
LLDEMIDNGFPLTTERRILREMRTAXNMVDKALSIVTGSSSNVSDTLPGAAASCVPWRTAEPKYSNNSAXSVDLVEEMDATINRDGVLVKCEINGEVQVNSHITGLPDLTLSFANPSILDDVRFHPCVRYRPWESNQILSFVPPDGQFKLMSYRVGKLKNTPIYVKPQFTSDGGRCRVSILVGIRNDPGKTIDNVTMQFQLPSCILSADLTSNYGIVNILANKTCSWSIGRIPKDKAPSMSGTLVLETGLDRLHVFPTFQVGFRIMGVALSGLQIDKLDLKTVPYRFYKGFRALTRAGEFEVRS

SEQ ID NO: 259031 - protein, 30 aa, Glycine max
  Clone ID: PAT_MRT3847_75929C.1.pep
SRSTFFLTKHKAHMPCGMTYIRRFLLSGKP

SEQ ID NO: 259032 - protein, 246 aa, Glycine max
  unsure (1)..(246): unsure at all Xaa locations
  Clone ID: PAT_MRT3847_7592C.1.pep
VWRRESHRKFXAPRHGSLGFLPRKRSSRHRGKVKSFPKDDASKPVHLTAFLGYKAGMTHIVREVDRPGSKVNKKEVVEAVTIVETPPMVVVGIVGYVETPRGLRTFKTVFAEHISDECKRRFYKNWHKSKKKAFTKYCKKWQDDTGKKQLEKDFNSMKKYCQVIRIIAHTQMRLLPLRQKKAHLMEIQVNGGTVAEKLDWARERLEQQVPVNQVFGQDEMIDVIGVTXGKGYXGVTSRWHTKKLPR

SEQ ID NO: 259033 - protein, 30 aa, Glycine max
  Clone ID: PAT_MRT3847_75930C.1.pep
MRFALFFFFWKNLCLFNGTYAPWAGDFLRY

SEQ ID NO: 259034 - protein, 94 aa, Glycine max
  Clone ID: PAT_MRT3847_75931C.1.pep
IAFFALSHLGVPRNSLSTIVPIVLTYLIVIKTLEFTDLEAKPIFQIQHIKLKTQIIFKVCILCMELDRNYKGQLVYRVGLIVKSVKLSHLVSKK

SEQ ID NO: 259035 - protein, 81 aa, Glycine max
  Clone ID: PAT_MRT3847_75932C.1.pep
HAFAHASAKCGCFHEIEIIKGKPRPRNAVSSTVEGSSNSTNPLDVALSWVQRCIGFDTKFSTLRCLIAIPVAYEIYLPDFA

SEQ ID NO: 259036 - protein, 66 aa, Glycine max
  Clone ID: PAT_MRT3847_75933C.1.pep
TFDGGEHHYPHLNIVDPVPKQQLTLESSGSPKRMHWYTFVQYLRHPRASGALFHSSYNHVFDFIRS

SEQ ID NO: 259037 - protein, 98 aa, Glycine max
  unsure (1)..(98): unsure at all Xaa locations
  Clone ID: PAT_MRT3847_75934C.1.pep
AWXAXHSIXXNMIXXVQGLCXXGPYLGLVQFVAXLVVLVSXXFSGCVSCWFXRGVIRFLCFVVLLLVGLSGVGCXXSGSFLVXXCSLGLWGFCSFCFS

SEQ ID NO: 259038 - protein, 34 aa, Glycine max
  Clone ID: PAT_MRT3847_75935C.1.pep
VALGKACEPTHSIYDPSDQGLAISWPVAKPPRLF

SEQ ID NO: 259039 - protein, 46 aa, Glycine max
  Clone ID: PAT_MRT3847_75936C.1.pep
DCNSSICLQLSAEILTWCFIPNFCGGGSQLPRIQVTDPVARYYGLK

SEQ ID NO: 259040 - protein, 62 aa, Glycine max
  Clone ID: PAT_MRT3847_75937C.1.pep
IIQNRPKNWIYFDIVITFPSGRITMQSILRVGSTLRNTKAGIKIHSPHLRPTILTYSGLLYT

SEQ ID NO: 259041 - protein, 145 aa, Glycine max
  unsure (1)..(145): unsure at all Xaa locations
  Clone ID: PAT_MRT3847_75938C.1.pep
VALVFFCPSQGILNRWDMGFWIPAPAAALVPSALILGIPSRNLGDEAQETLRSSHFPRAHVKVXWSNNLFLACLCYGRPVCWFPCPFIAFCCPAACGLSSAPPPPVFLSGVACCARSAPFVLVLFRPVVFFYALSAGPFVSGCCV

SEQ ID NO: 259042 - protein, 161 aa, Glycine max
  Clone ID: PAT_MRT3847_75939C.1.pep
KSWAEPIRFPPNQKLKLVFSINVRNRVKPGLPEGYYGNAFVLGCAETRAKELEERGIGFGSGLVKRAKERVGNEHVRGVMGMVWERKACPDPVGVLIVSQWSRLGLENIDLGMGKLLHVGPVCCDRYCLFLPVRDQCLSVKVMLAVPTHALHNYQLFMRNN

SEQ ID NO: 259043 - protein, 64 aa, Glycine max
  unsure (1)..(64): unsure at all Xaa locations
  Clone ID: PAT_MRT3847_7593C.1.pep
PIWFLLIVLPFFGPINSPVESLLVNFTDYLIPALLRMLTYXKFSAKQNASEMPPFFLPRWTEMY

SEQ ID NO: 259044 - protein, 56 aa, Glycine max
  Clone ID: PAT_MRT3847_75940C.1.pep
LQWSVADFYNEVNIISSVEHKNLVRLLGCSCSGPESLLVYEFLPNRSLDRYIFGNY

SEQ ID NO: 259045 - protein, 37 aa, Glycine max
  Clone ID: PAT_MRT3847_75941C.1.pep
KGPGLYSDIGRRARDLPITDDQNDRTSAIATRESTEH

SEQ ID NO: 259046 - protein, 100 aa, Glycine max
  unsure (1)..(100): unsure at all Xaa locations
  Clone ID: PAT_MRT3847_75942C.1.pep
MRTAIPAITLLSKIKTILSSNAIFIPDTVSIKVSFQDHXIQGPLSKLMLDFKHFNLDFHLITDENSKKNLKIYPXIASRKTYTTIHTVLNHIDNLITGIT

SEQ ID NO: 259047 - protein, 76 aa, Glycine max
  Clone ID: PAT_MRT3847_75943C.1.pep
KGGVLSMAKGTQYSPKEFAAAYIQTLPHSKDVKEFNSNACYWEYLKKRRNLYFNEYIDAIDFADSFGKSSVEIDKE

SEQ ID NO: 259048 - protein, 155 aa, Glycine max
  unsure (1)..(155): unsure at all Xaa locations
  Clone ID: PAT_MRT3847_75944C.1.pep
PMDRLICGDVDFGKTEVALHAISCVDSSKKQAMVLAPTIVLAKQHYDVFTXRLSVYPDIKVGLLSRFQTKAEKEENLDKIKNGSXDIIVGTHSLLGDRVTYNNLGLLVDDEEQRIAVKQKEKIASIKTSVDVLTISATAIPRTLYLALTGLRDAS

SEQ ID NO: 259049 - protein, 108 aa, Glycine max
  Clone ID: PAT_MRT3847_75945C.1.pep
NSNPIHQVFYISRSTKGANEKNGFRKHIQIKCFWFLRIRKNKILKHLFPKEFMLSFPGCQKYGNDHIFCNLFLQQEVQDALDPQIVFSLWDAALLVFFCSHMDPVKKF

SEQ ID NO: 259050 - protein, 72 aa, Glycine max
  unsure (1)..(72): unsure at all Xaa locations
  Clone ID: PAT_MRT3847_75946C.1.pep
LEPLRFHLYKENKDTHEALGVIGNMLSVQPKSFGFAGTKDKRAVTXQRVTVYKQRASRLASLNKRLFGIKLG

SEQ ID NO: 259051 - protein, 113 aa, Glycine max
  Clone ID: PAT_MRT3847_75947C.1.pep
MAVSDGNTIAVKEAASAGIHNVEKLVNMILNQHNEGGSELEAVADVAVNRFREVISLLEKPITRTTGHARFRRAPTTVPPVPVVQLQQMVDDDSKHKLQNKTEQKQKQSTSAF

SEQ ID NO: 259052 - protein, 37 aa, Glycine max
  Clone ID: PAT_MRT3847_75948C.1.pep
LFNATLIWLPLKGHFHSTQCSHPRTHTHPQLLLHHIS

SEQ ID NO: 259053 - protein, 100 aa, Glycine max
  Clone ID: PAT_MRT3847_75949C.1.pep
VLRITSNIMSPCFLYGAYSLYLTMDPHLSNKSSQTLLTPNIATIFYTKSTTLTYNHNPYSMQIQLMTFMTLHCTLSTSNDLCYTFYCRMEPVIYELTSTS

SEQ ID NO: 259054 - protein, 264 aa, Glycine max
  Clone ID: PAT_MRT3847_7594C.1.pep
MPSNFLDLQNTKGITVRGRFVRKLKLVPTITNLKKQGLVLQKKFPTPYDDYKGNNLSELVVEDDNHFEEEETTVGSKKITEVAEEKLVGTKMPSCNNNNEYPSLSDFKELCPPGGSNHSIILYTTSLRGIRKTFQECNTIRFLLRSFKIMYHERDVSLHLEFREELWKILGGKVIPPKLFIKGRYIGGADEVVGLHEMGWLGKFLEGTPTHSSDSPCSGCANMRFAICSNCCGSCKVFTDNNDECFVRCSQCNENGLVKCPVCC

SEQ ID NO: 259055 - protein, 142 aa, Glycine max
  Clone ID: PAT_MRT3847_75950C.1.pep
IRRISGGGASNDGFIEESNTEFVSYTVHIPPTPDRRPLTASEDGKSGTSFISGTIFTGGYNSVTRGHVMECSMESDAQAKTSSSVCGMKGCDEEAIKGRLCGGPCECGFKICRDCYLECGGKNGGGKCPGCKEPYKYVSDDD

SEQ ID NO: 259056 - protein, 43 aa, Glycine max
  Clone ID: PAT_MRT3847_75951C.1.pep
NVEYIKCGYTLLGVKLLYTNFACKLLNTFMKLTIHILLAENKT

SEQ ID NO: 259057 - protein, 90 aa, Glycine max
  Clone ID: PAT_MRT3847_75952C.1.pep
PDRPTRPPTHPYISSSHSLFILSSLSSGQLKRALCTSNIDLLYPSSSWSSSDTSIRVTLLSEHHLLLLCNQFHLHFSPSTLTHIPSLLLH

SEQ ID NO: 259058 - protein, 202 aa, Glycine max
  Clone ID: PAT_MRT3847_75953C.1.pep
MENSDISSAPLSHSPTNSSSSSPTPPSPPTVVMSPCAACKILRRRCAEKCVLAPYFPPTEPAKFTIAHRVFGASNIIKFLQELPESQRADAVTSMVYEASARIRDPVYGCAGAICQLQKQINELQAQLAKAQAELVNMQIQQANLVALICMKMAQSPQESPQQLVDDFISTPPHSGGAYQSGMNFFEDNTSLNSLWEQPLWT

SEQ ID NO: 259059 - protein, 114 aa, Glycine max
  Clone ID: PAT_MRT3847_75954C.1.pep
STALRCCDSVNDPYVTVHAGDHRLIKTSVMTNRLNPQWKESFVVPISHHVEALEFRVKDSDFNGAMNLLGKTFLSISDILKLNKEGIPRRTGIHKVVHLDGKPRHGSFAYIVEY

SEQ ID NO: 259060 - protein, 44 aa, Glycine max
  Clone ID: PAT_MRT3847_75955C.1.pep
RSNKKFIIVTAVCKNMVRGYRIGAPAALLVRRRDHNYYSTEMRV

SEQ ID NO: 259061 - protein, 69 aa, Glycine max
  unsure (1)..(69): unsure at all Xaa locations
  Clone ID: PAT_MRT3847_75956C.1.pep
LXSXTLTFIXELPVXXHXDXSSAPATXGXVXIPSGXRSXFGXFXNQXXXPDIXXXQAXDXLNXXMTTHI

SEQ ID NO: 259062 - protein, 249 aa, Glycine max
  Clone ID: PAT_MRT3847_75957C.1.pep
YGCEKTTEGGDCYLQIVRKRGDSWSVWFANRNEPVDAESAVLLLDHSGVLKIESKHRELPIILYFSPQPANNTMATLLDTGNFVLQQLHPNGTKSVLWQSFDYPTDNLLPGMKLGVSYKTSHNWSLVSWLTSEIPNLGAFSLEWQPRTRELIIKRREQLCWTSGELRNKEGFMHNTHYRIVSNENESYFTITTSNEELTRWVLLETQLINRNGGDDVARADMCYGYNTDGGCQKWDEIPICHRGDAFED

SEQ ID NO: 259063 - protein, 308 aa, Glycine max
  Clone ID: PAT_MRT3847_75958C.1.pep
MATPIPPPPAAAAAAAADTKVDYLNLPCPIPFEELHREAMMSLKPDLFEGMRFDFTKMLNQKFSLNHSVLMGPTEVPSQSTETIKIPTAHYEFGSTFIDHPRLLLWGRILTDGRLNARVKCDLSENLTFKANAQLTNEPHMSHAMINFDYKGKDYRTQFQLGNGALLGASYIQSVTQHLSLGGEVFWAGQHRKSGIGYAARYNTDKSVATGQVASTGMVLLSYVQKVSEKVSLASEFMCNYLSRDVTASFGYDYILRQCRLRGKIDSNGCVAAFLEERLNMGLNFILSAELDHRKKDYKFGFGLTVGE

SEQ ID NO: 259064 - protein, 182 aa, Glycine max
  unsure (1)..(182): unsure at all Xaa locations
  Clone ID: PAT_MRT3847_75959C.1.pep
MATLQSLPPSFRPSIPPPNSHSFPATPFNYSPKLIASKGVSVTLRNSITSPRVSVSNSEYSPQIAENLGDVTIFTAAGEPVRFSDLWDQNQGVAVVAMLRHFGCICCWELSSIXSSIKQDLMPAESCQELIATPDDRSGVLQQGGMFVFRGKQLLYARKDEGTGDHAPLDDVFDVCCKAPVA

SEQ ID NO: 259065 - protein, 70 aa, Glycine max
  Clone ID: PAT_MRT3847_7595C.1.pep
SLQVTFDVSVSQLSPDQIGEASVCTNSPGVFHIRPLWTPVRISEFYTVEDRTPIGKSAQEVLDQIGEWER

SEQ ID NO: 259066 - protein, 118 aa, Glycine max
  unsure (1)..(118): unsure at all Xaa locations
  Clone ID: PAT_MRT3847_75961C.1.pep
SFARSIQIDGIFTYWRYVSWANHDKILAWTVYDWRDEHXDRRIPDDVLGMRAQEFVQHVAHERVKGQIPAIGKECCTKDNRLACXMILKQSAGVELTRLTGGSLGSGNRIRRANLNEG

SEQ ID NO: 259067 - protein, 78 aa, Glycine max
  Clone ID: PAT_MRT3847_75962C.1.pep
KKKNFVLFWEQISRGVPTPKPFFSPPPPPKKKLPLKKKPQVPKKNFLNGPPPPLFLFKKPIFKGPQRGFFQFSLNPFF

SEQ ID NO: 259068 - protein, 45 aa, Glycine max
  Clone ID: PAT_MRT3847_75963C.1.pep
QREGSESEQFWDLLGGKSEYPSQKILREPESDPHLFSCHFSKGKG

SEQ ID NO: 259069 - protein, 62 aa, Glycine max
  Clone ID: PAT_MRT3847_75964C.1.pep
SLYIVIFLFSKSEKKNFGDRSLLNYSTRELIPYLYLPFFKFYILFTTLYIVFTKGFTDTFHK

SEQ ID NO: 259070 - protein, 118 aa, Glycine max
  Clone ID: PAT_MRT3847_75965C.1.pep
KSLPTKSIPDSRVGALILAFTSLTLPFNITLIHSQKSFKSYAKSLYLIGECPANKPRVEQPMTSRCLWPAQRVVFPPLNSRTHTSSQKLRDSSSQVTIAFVSGFKVRQPVITVYRKYK

SEQ ID NO: 259071 - protein, 47 aa, Glycine max
  unsure (1)..(47): unsure at all Xaa locations
  Clone ID: PAT_MRT3847_75966C.1.pep
QFVWIEVGSXRNCITVLIGLALIIYMSQFELSWIMHFTNRFFNIHII

SEQ ID NO: 259072 - protein, 96 aa, Glycine max
  Clone ID: PAT_MRT3847_75967C.1.pep
SLIKKLADLGLQSFSPLIFSPYHELLLLNYDLKLILLLFYYNYHWFKYITDLIISDWVWLHGLFPVRPIRPIGLSLPFCRLLAAVSSRFGSARDRA

SEQ ID NO: 259073 - protein, 173 aa, Glycine max
  Clone ID: PAT_MRT3847_75968C.1.pep
LACIAKAIHAVEKEKEQFAFAFTVDCRARLEPPIHDNYFGNCVWGHVVDAEPLDFIKEEAFAIVAKSIHSKIKMILDEGIFHGMESAFSRYESLGKDGVEIMGIAGSNRFGVYGTDFGWGKPAKVEIASVDRALTIGFAESKDGNDGVQVGLVLKKHVMDLFCTLFRQGMLDD

SEQ ID NO: 259074 - protein, 178 aa, Glycine max
  Clone ID: PAT_MRT3847_75969C.1.pep
GRITEEEIKEIICLSATTNKLANIQKQAEEYAALIMEELDPEDTGFIMVNDLEMLLLHGPTHSTRGDSKYLSQMLSLKLKPIDEDNPIKRWYKSTKYFLQDNWQRTWVLLLWIGVMLGLFAYKFVQYRRQPAYEVMGHCVCMAKGAAETLKLNMAIILLPVCRNTITWLRNKTKLGIM

SEQ ID NO: 259075 - protein, 119 aa, Glycine max
  Clone ID: PAT_MRT3847_7596C.1.pep
TPPKGKTPNGGAFWGEPAPLGGFLWGEVKGGTKGGAIPPGNPGEKAPLPRPIWGGPFLPPKGGEPPPPFPGKRGSQGRETGRGGGEKNTAGGARGGEKKKEVWPPPPQPPPPGPPPTPP

SEQ ID NO: 259076 - protein, 58 aa, Glycine max
  Clone ID: PAT_MRT3847_75970C.1.pep
GMCPPATKIMAFTYVTLVTLSKGSYLTIAYILCYTNTLLSTSLQFTWPCITMSLLVNP

SEQ ID NO: 259077 - protein, 79 aa, Glycine max
  Clone ID: PAT_MRT3847_75971C.1.pep
RHPILKRGSHENGDAAHCKKRVRRYSMTRWQNPTMNIRLVCRNNRARHDPRLWVPTSKRCVQYPWEEKQHRGDLNSKRS

SEQ ID NO: 259078 - protein, 51 aa, Glycine max
  Clone ID: PAT_MRT3847_75972C.1.pep
LKERRTNLSYQETTLLGAITLVIALHSLLNSLRATTLMGMCLPTELHIHIY

SEQ ID NO: 259079 - protein, 116 aa, Glycine max
  unsure (1)..(116): unsure at all Xaa locations
  Clone ID: PAT_MRT3847_75973C.1.pep
CCCWCXLAQEVRTGNSYDIIEDKLCRKEVYSSDQQLMSPLPREDVASSKSGTSSPLGNNSSPSMIKPSSPLNSSGFVKGYYSPERSLSTVKEEVPERSKDGTMNPPTPPSIQRESP

SEQ ID NO: 259080 - protein, 74 aa, Glycine max
  Clone ID: PAT_MRT3847_75974C.1.pep
LEIFYNLNKNSHGHPNRKANHNRTNQQFVLSGCNLFRPLRGNPNSFTELFDSSVEVIKDLSTTQLLALLRTPMS

SEQ ID NO: 259081 - protein, 87 aa, Glycine max
  unsure (1)..(87): unsure at all Xaa locations
  Clone ID: PAT_MRT3847_75975C.1.pep
SPRSKAPSKRLIPRSDLEYQPTTTCVYLPHSHGSVTVAIHGMMKXPVHSRTLITKLTIQSLRRRIAKHMKTDMRLQMHSMTGLHEAD

SEQ ID NO: 259082 - protein, 51 aa, Glycine max
  unsure (1)..(51): unsure at all Xaa locations
  Clone ID: PAT_MRT3847_75976C.1.pep
QYPLLNRTNSLHTKLNISVRLEFGIKTARKEKVVVCLRKNGRGGRTEXTGP

SEQ ID NO: 259083 - protein, 51 aa, Glycine max
  Clone ID: PAT_MRT3847_75977C.1.pep
MISSYFDGKKFSYALVLLTFNVFKRQLYSANDWLRLTFTKKMKFTDDRWRK

SEQ ID NO: 259084 - protein, 63 aa, Glycine max
  Clone ID: PAT_MRT3847_75978C.1.pep
YFTQCLIHRSSIPSQSYPNIHSKFQSSRADIYVSLPLQHVLNHSNNIHLRTKNSHLYSILCLF

SEQ ID NO: 259085 - protein, 101 aa, Glycine max
  Clone ID: PAT_MRT3847_75979C.1.pep
RDTNIRTSISTAPNSSVPNFKRFRKAQTQSGNSFENLVPFGKYPYKDSDCGNEDVTELVKEEKRRKKMEAMADDMFNNEARKRGTAGSRGTVGSLRGILTS

SEQ ID NO: 259086 - protein, 90 aa, Glycine max
  unsure (1)..(90): unsure at all Xaa locations
  Clone ID: PAT_MRT3847_7597C.1.pep
MEVLIHQPDSSFYEAQTXNLSWKRQELLNMRETIARVYERRTANPLWVISENMERDVIMSASEAQAYGIEHLVACDKKTSGMDYSKRYRI

SEQ ID NO: 259087 - protein, 52 aa, Glycine max
  Clone ID: PAT_MRT3847_75980C.1.pep
SAKKKSKHLEKARKFFLLLINAPLAFPAAEGFNIFINRDIKVYVPSFGPAKL

SEQ ID NO: 259088 - protein, 46 aa, Glycine max
  Clone ID: PAT_MRT3847_75981C.1.pep
RKLQPHRERVTRKSVVNTTVCGDIVNGERWSQGAYSKLSFEYKLRS

SEQ ID NO: 259089 - protein, 60 aa, Glycine max
  Clone ID: PAT_MRT3847_75982C.1.pep
GDFSPCPRQSAFPLLSNSLVCYQFNKITTTNNTFTTKLRRGVLDRSYKKYLFPRKRICKL

SEQ ID NO: 259090 - protein, 147 aa, Glycine max
  Clone ID: PAT_MRT3847_75983C.1.pep
VLTFIISVRDSCSTRVAILRDREKDRSDPDYDRSYGRYARSIPASAVNLVPFNLQKAQPSFAQYDATFNQLGQMSQTQASLGYAPPSTPIMSPFGTPGLNQTSSEGAYLQWPSAAMMYAHSYDQFRHGVFQAPFGQQPLSFDYSQNY

SEQ ID NO: 259091 - protein, 117 aa, Glycine max
  unsure (1)..(117): unsure at all Xaa locations
  Clone ID: PAT_MRT3847_75984C.1.pep
MMQTEAPSSPSFSFHNNSSDSFPHVDDDFEFSFVPRHTDSSPVSADDIFYNGQIRPIYPLFHQNAVVHASATTETAPHEPRRRRXPLRTLMFEEEEERETVKIDSSNELYGVAEGTY

SEQ ID NO: 259092 - protein, 355 aa, Glycine max
  Clone ID: PAT_MRT3847_75985C.1.pep
MDSPCLSNDSVSGFKDKESMVDPFLVEALQNPRHRLTILRMELEIQKFLNNADQLHFEFHHFPSSYLRLAAHRVAQHYNMQTMVQDNGLDGQGSKILVRKLPESKYPVVRLSEIPAKQLENDKSEQKKIVIRPRPNKNSLNDANGVGRKGNPLRSVEERKEEYDRARARIFSSPRSSESGDTSSVVPMDGRYSSTSKDENETSKNPMADSERYISTRDSCSTRVAILRDREKDRSDPDYDRSYGRYARSIPTSAVNLVPFNLQKAQPSFAQYDATFNQLGQMSQTQASLGYIPPSTPIMGPFGTTGLNQTSSEGVYLQWPSAAMMYAHSYDQFRHAVFQAPFGQQPLSFDYSQNY

SEQ ID NO: 259093 - protein, 182 aa, Glycine max
  unsure (1)..(182): unsure at all Xaa locations
  Clone ID: PAT_MRT3847_75986C.1.pep
MDSLCLSNDSVVSGFKDKESMVDPFLVEALQNPRHRLTILRMELDIQKFLNNADQQHFEFQHFPSSYLRLAAHRVAQHYNMQTMVQDNGLDGQGSKILVRKLPESKYPVVRLSEIPAKQLENDKSELKKFVIRPRPNRNSLNDANGVGTKGNXCRSVEERKEEYDRARARIFSSPRSSESGD

SEQ ID NO: 259094 - protein, 64 aa, Glycine max
  Clone ID: PAT_MRT3847_75987C.1.pep
IELKLYLEPDFMNSTRPESESASKLEFESEFVDFQIFRGVSFFRNFFSGWRLFTTRVWGVLGVV

SEQ ID NO: 259095 - protein, 156 aa, Glycine max
  unsure (1)..(156): unsure at all Xaa locations
  Clone ID: PAT_MRT3847_75988C.1.pep
MGASFSSCVCDGDATPSRPRLGDIPESCVALVLMYLDPPDICKLARLNRAFRDASVADFIWESKLPSNYKFIVEKALKDASVEELGKRDIYARLCRPNSFDNGTKEIXADTGGVCLAISSQALRITGIDDRRYWSRISTEESRXPHSCLSSQIWWL

SEQ ID NO: 259096 - protein, 44 aa, Glycine max
  Clone ID: PAT_MRT3847_75989C.1.pep
RDSVKRGVSEGVCYKKNKYEPHELKALEDMMYAQNQYISVSKYK

SEQ ID NO: 259097 - protein, 134 aa, Glycine max
  Clone ID: PAT_MRT3847_7598C.1.pep
RLGGAKWPSVSDSSRNFWVALRAFWAFPQNARAFFIWGARGGLLRPFSVGEGQMILGGGFHRFPFPGGPRLKGEVFGARKWGCLLLVGGQLRFLKAPLKKGFGFSFKGGGFFLFQFGGFVFEMPLNFVFCFSPF

SEQ ID NO: 259098 - protein, 99 aa, Glycine max
  Clone ID: PAT_MRT3847_75990C.1.pep
TICFVMALLKNHLNKHNHIEEEDQHQDSATADDDSVWKKALRIGTGFYNNVNNKTLGRAATFGGMQLTRRRNSSRWQSISTSDDVANPQSSQSAVKDML

SEQ ID NO: 259099 - protein, 79 aa, Glycine max
  Clone ID: PAT_MRT3847_75991C.1.pep
IATHKILLKYNYCTQSTPPPPPSGFNDQTECGRSSTSNLPPVNHLLVILRNHCSQNRGSIYNLCANFWGKYKFLNLFDG

SEQ ID NO: 259100 - protein, 117 aa, Glycine max
  Clone ID: PAT_MRT3847_75992C.1.pep
RKLLEVTIGLLRQEVSSVAAGPLFPRLRDDCDNFQKDLVLLKERRAIFCEMNNLGSGQIDNEEVSQGAVGPMQLELDDIRKSCYWWKDISDLLNQGDGHIPCTKKKCLGGYLWGSFK

SEQ ID NO: 259101 - protein, 72 aa, Glycine max
  Clone ID: PAT_MRT3847_75993C.1.pep
MVNFSLSNILFILLSTLNTFLNVISCTYCPYLFSYPPITPFFFNPPIKKPPNLLSPPLSSSKLPYIHLSYFS

SEQ ID NO: 259102 - protein, 73 aa, Glycine max
  Clone ID: PAT_MRT3847_75994C.1.pep
LSNTLDTFISGRAYIFYASSLQVTDESAPAIVDVYLMVANGPVTLIQHQALFGLDSEIGLPKHACCALWGSLK

SEQ ID NO: 259103 - protein, 53 aa, Glycine max
  Clone ID: PAT_MRT3847_75995C.1.pep
MRECWDLRVWPTKYSLIFHILLLTLAIWMCLEFLIAKLCLLFDFQIVRTQPSA

SEQ ID NO: 259104 - protein, 101 aa, Glycine max
  Clone ID: PAT_MRT3847_75996C.1.pep
SFICIDEKKKKKKKKKKKKKKKKKKKKKKKKKKKKKKKKKKKKKKKKKKKKRGGRFKNSNFWAPGVKIFFFFFGAPKKITGGGVLKSGEGENPGGPNLKGL

SEQ ID NO: 259105 - protein, 345 aa, Glycine max
  unsure (1)..(345): unsure at all Xaa locations
  Clone ID: PAT_MRT3847_75997C.1.pep
DAGFLMIMITVQKKSXFTQSEFGVNLAIVLLLLLLPLAVVSIEEYKVWQSKRLALVDPSPVKIVTDQGQKVKPNEPTNDGNNSVSDDTKWWENVFSPPARGEDYTILQALFSVDMLILFMTCICGVGGTLTAIDNLGQIGTSLRYPKKTRSTFVSLVSIWNYLGRVFSGFVSEHYLQKYKFPRPLMLTLTMLLSCAGHLLIAFDVPNGLYAASVIIGFCFGAQWPLLFAIISELFGHKYYATLYNFGSAASPLGLYVLNVVMTGHLYDKEAKKQLAALGLERKEGQELNCIGIHCFKLSFIIITAATFFGAIVSLILVARTRTFYKSDIYKRYRDAATEAETEMA

SEQ ID NO: 259106 - protein, 99 aa, Glycine max
  Clone ID: PAT_MRT3847_75998C.1.pep
EQYPCAHRLRSAGQYDRPGPVCFGDSCVTCIDLIAYALGHPQGFPDHGAFKHTPHEFYLAATNSCQCCRFYADVGFDIGHTRSECCRSSFSIHCSPRCS

SEQ ID NO: 259107 - protein, 49 aa, Glycine max
  Clone ID: PAT_MRT3847_75999C.1.pep
MFPGFPRLLTLNRSYLFHFVNYCPPPPPPPPPPKEGGRHTRDDRETSPW

SEQ ID NO: 259108 - protein, 57 aa, Glycine max
  Clone ID: PAT_MRT3847_7599C.1.pep
NNASLPHLPSWLRAKGWCCKGPCLTLNINLGNCLEKNSQKRKTSEPNNLVCIALFFI

SEQ ID NO: 259109 - protein, 253 aa, Glycine max
  unsure (1)..(253): unsure at all Xaa locations
  Clone ID: PAT_MRT3847_759C.1.pep
ELKPRYAHYGPFLDADSTVLDEGLALYFPGPNSFTGEDVLELQGHGGPVVLDMLLQRCLQLGCRLARPGEFSERAFLNDKLDLAQAEAIADLIEASSAQAARNALRSLQGAFSLRVHNLTEQLISLRIYVEAAIDFPEEEIDFLADGHVLAMLDKVRDELSTVLREAGQGALLRDGMTVVIAGRPNAGKSSLLNALAGREAAIVTEIAGTTRDILREHIHIDGMXXLHVVDTAGLRNTDDQVERIGVERALKA

SEQ ID NO: 259110 - protein, 95 aa, Glycine max
  unsure (1)..(95): unsure at all Xaa locations
  Clone ID: PAT_MRT3847_75C.1.pep
SNLSYFXXNIXRXLHFSLSGTXCXXXKEKGKIERXEKGRRSENNMNKXXXXICXFILXSFLXVGFXXAGEXAEKXXXTPKXFAIRYWDKEXXSGL

SEQ ID NO: 259111 - protein, 66 aa, Glycine max
  Clone ID: PAT_MRT3847_76000C.1.pep
TLKKPSIYPICLNLLISIMSIVQYSMGNWLPNHYPTTNTPLFSILLKINNFLCFNTPNKKLSYHIS

SEQ ID NO: 259112 - protein, 202 aa, Glycine max
  Clone ID: PAT_MRT3847_76001C.1.pep
LHETAPHLVDSICAYRGGYGAKERRKIESSFFGGKICGVAATNALELGIDVGEIDATLHLSSRGNIASLWQQAGRGGRRDRPSLAVYVAFGGPLDQYFMKNPKKLFERPIECCHVDSQNKQVLEQHLVCAAHEHPLSVNYDEQYFGPCLESVIISLKARGYLSSVLSSDSSRIWNYIGPEKLPSHAVNIRAIETLRYSVLDQ

SEQ ID NO: 259113 - protein, 108 aa, Glycine max
  unsure (1)..(108): unsure at all Xaa locations
  Clone ID: PAT_MRT3847_76002C.1.pep
GMSGFGAKLIVLLGIITSPKYFFIPKILITFGTAIGMIITPNYSIFMVRPMVXGIQLFYSPNFFFFDLGPPKLFNSIFILXPVLGMAFNPVFIFPFRPARVEPIHLIF

SEQ ID NO: 259114 - protein, 48 aa, Glycine max
  Clone ID: PAT_MRT3847_76003C.1.pep
LYTPSPYTSSTPPPSENCYWLNTFIILGHSFILVDFDSFVLNILCFLV

SEQ ID NO: 259115 - protein, 107 aa, Glycine max
  Clone ID: PAT_MRT3847_76004C.1.pep
MSNERARSPRLEFDLMLSPPRTANSSELSTSESSLCLYSSSDPDSCVSSETNDEEIRSMVLVGCLRCLMYVLFSKDDPNPKCPKCKSTVLLDFLNDNKQKNTNKTTT

SEQ ID NO: 259116 - protein, 76 aa, Glycine max
  Clone ID: PAT_MRT3847_76005C.1.pep
TKSFLRLMDHWLKCVAVSRFLNHVHSKNVASSNSLLPLKVSLEKSMLFLCCHMVYVKANHQHYHLLALIPSAKPNT

SEQ ID NO: 259117 - protein, 315 aa, Glycine max
  unsure (1)..(315): unsure at all Xaa locations
  Clone ID: PAT_MRT3847_76006C.1.pep
MEFSKVTLEIFSKLEHKWLSHCKATNKTRILSIDGGGTTAIVAGEALIYLEDQIRLHTSDPHAQVADFFDIVAGTGIGAILAAMITAGDAFGRPLYTAREAVRLVSERNSELYKLKSGGIFRRRRRFSSSSMDNALKQVFRRKEDGRLLTLKDTCKPVLIPCFDLKSSAPFVFSRADASESPSFDFKLWKVCRATSATPSRFKPFDLASVDGKTYCSAVDGGLVMNNPTAAAVTHVLHNKRDFPLVNGVEDLLVLSLGNGSSNAKACESRTCSTPSVVDIVLDGVSETIDXXVGKCFCWNXTNYXRIHAFGLGNE

SEQ ID NO: 259118 - protein, 97 aa, Glycine max
  unsure (1)..(97): unsure at all Xaa locations
  Clone ID: PAT_MRT3847_76007C.1.pep
TCRCGDCNKRGGALYVDFAIDGIHSIGYANSTLEKNFRMNEVNRLGAISXDXKSETGTRMDMVHYSHXGTFDAIQLDDXHIDYLSSFTEAVMNLEWI

SEQ ID NO: 259119 - protein, 108 aa, Glycine max
  Clone ID: PAT_MRT3847_76008C.1.pep
TRPIHCRIRHSSSISPPLSSIFHSRSLTFFFFLCATLLFHDCFCACISLIFLFFFPVVKTFQSARYVLGSCLNCSSFLSCHKVFEFIGSVIALQFSISSSCDHQNTCP

SEQ ID NO: 259120 - protein, 68 aa, Glycine max
  Clone ID: PAT_MRT3847_76009C.1.pep
IKKKHHLIPQKTKNKKQRKRSSLSEYHLLSNFLPLPFPLSKQYCPLDRKPFLSLEVTSFLIFRFLMEE

SEQ ID NO: 259121 - protein, 233 aa, Glycine max
  Clone ID: PAT_MRT3847_7600C.1.pep
MDRRSLLCLAIIGIVVAAVGGQSPAAAPTTSSASPATAPSKPKPKSPAPVASPTSSPPASSPNAATATPPVSSPTVASPPSKAAAPAPATTPPVATPPAATPPAATPPAVTPVSSPPAPVPVSSPPAPVPVSSPPALAPTTPAPVVAPSAEVPAPAPKSKKKTKKSKKHTAPAPSPALLGPPAPPVGAPGSSQDASSPGPAVSEDESGAETIRCLKKVIGCLALSWATLVLFF

SEQ ID NO: 259122 - protein, 340 aa, Glycine max
  Clone ID: PAT_MRT3847_76011C.1.pep
KHPSLFACFVCFLPKTIFFSEAKVLNFSYGLLLSFCFYCFEKNWIFFQGIGVVKQPTMEGGSKPPPPPMLERRARPQKDQALNCPRCNSTNTKFCYYNNYSLSQPRYFCKTCRRYWTEGGSLRNVPVGGGSRKNKRSTSSAPPPSSASAQAKKLPDLTTPNFPQSASQDPKIHQGQDLNLAYPPAEDYSTVSKFIEVPYSTELDKGTTGLHQNPTSSSTTTSASSHHQLSAMELLKTGIAAASSRGLNSFMPMYNSTHGFPLQDFKPPHGLNFSLEGFENGYGGLQGIQEGPTGGARILFPTVEDLKQQVPSTNEFDQQNRSQEGSAHGYWNGMLGGGSW

SEQ ID NO: 259123 - protein, 55 aa, Glycine max
  unsure (1)..(55): unsure at all Xaa locations
  Clone ID: PAT_MRT3847_76012C.1.pep
MIDLLLLLVATDMMGPTMVAEARTCESXSHRLKGPCLSDTNCGFVCRTERFTRRH

SEQ ID NO: 259124 - protein, 76 aa, Glycine max
  Clone ID: PAT_MRT3847_76013C.1.pep
GQCTFLCFVSLFKPYHKLRGAHKECCIALITLIVLFVNTNLHGSMADYCRGWQSAHATFYRGGDAFNTMLCACRFG

SEQ ID NO: 259125 - protein, 41 aa, Glycine max
  Clone ID: PAT_MRT3847_76014C.1.pep
TSSSLYILVFHNGSTTMNRLLLLPVLLFTPTSYTTISTIFL

SEQ ID NO: 259126 - protein, 51 aa, Glycine max
  unsure (1)..(51): unsure at all Xaa locations
  Clone ID: PAT_MRT3847_76015C.1.pep
DKHHAXVCNVRAVSLTQDRELCLNFFKIQCNQLGTKKKTNPSLSNKHRLNS

SEQ ID NO: 259127 - protein, 85 aa, Glycine max
  unsure (1)..(85): unsure at all Xaa locations
  Clone ID: PAT_MRT3847_76016C.1.pep
SEKLSRLFVGKSSVRMXXRHIRVIVAENGRLNIIVPIAKRFAQLSGAYKGQVQATVSLVVHNKKKEENPHNESILQIMHSGSIGV

SEQ ID NO: 259128 - protein, 54 aa, Glycine max
  Clone ID: PAT_MRT3847_76017C.1.pep
PLHHNYVSHVHIFLFYLSRYIDEHMDFQGSFLLRLRTWCISCSKLFAFIFDSYE

SEQ ID NO: 259129 - protein, 58 aa, Glycine max
  Clone ID: PAT_MRT3847_76018C.1.pep
HMAMKGNEGVQEREKFIHSLPLGSSNNLKVSNPEKRIKPPSFPSFLSVKLYIKLHDMA

SEQ ID NO: 259130 - protein, 145 aa, Glycine max
  unsure (1)..(145): unsure at all Xaa locations
  Clone ID: PAT_MRT3847_76019C.1.pep
MDTSQEGRASHNRELSDFLNQNVVXGIYIDEIITLIIHKRHRLIVNISDLHNFVDLETRXLMSPRAYHAPXETQTRRLLRXSDPNYFKEGEQVLDGFEGPFCISQPRPRSXMYSLSEIIGFMCCIEGIDTKXSLARPKVVKSVHF

SEQ ID NO: 259131 - protein, 77 aa, Glycine max
  Clone ID: PAT_MRT3847_7601C.1.pep
MEGKLGSLSTIKKGQSLFDNRGLKTKLTQSPERTLTLLATGKQFTQQLFFFFWAFCIHQPHRGGPFKKGKGGLAQKG

SEQ ID NO: 259132 - protein, 81 aa, Glycine max
  Clone ID: PAT_MRT3847_76020C.1.pep
FDINEFPWRYNALSTKHSKGLVAMRNDQQAYNRRLLPRRYHHLSTGSHRRWNFRERTPWKHGATMTPKATQRRNKGLLSSR

SEQ ID NO: 259133 - protein, 159 aa, Glycine max
  unsure (1)..(159): unsure at all Xaa locations
  Clone ID: PAT_MRT3847_76021C.1.pep
MFTNDQRQQERTGRYGTSRVEFLQDLXMDNGCFRXLVTQFQNTSEDETREKILANLANFAYDPYNYNFLRQLNVLELFVDCLTEPNEKLVEFGIGGICNSCVDPANSAIVTTWGGIPLIMQCVSSPVRNTENYALGALYYICDESNKEEIVRPRRWWWH

SEQ ID NO: 259134 - protein, 67 aa, Glycine max
  Clone ID: PAT_MRT3847_76022C.1.pep
LNQNQPNFPLTLAIKPLPFPFVGGQTRTRARVPITNNPHFSFSLHWAKKKPPKPDLPTSWRASPQNI

SEQ ID NO: 259135 - protein, 52 aa, Glycine max
  unsure (1)..(52): unsure at all Xaa locations
  Clone ID: PAT_MRT3847_76023C.1.pep
MQKXYXDQXRKVDEYGNVEKQTDEYGNPXHAXXXXDVXXRTGAGGRGTLMAT

SEQ ID NO: 259136 - protein, 65 aa, Glycine max
  Clone ID: PAT_MRT3847_76024C.1.pep
HESTLGFNWPEKKGFVPRIGFNPPTKFFNSLKQQFPLLFSKGVCRTNLSPFPLQKIPFYTIGPPP

SEQ ID NO: 259137 - protein, 476 aa, Glycine max
  Clone ID: PAT_MRT3847_76025C.1.pep
VGLSCGHAFVQRHAELTRKMKSMKGSSSSGEDSREQEEDDNSAGSDQDMDYKILGKAKEKTMKVLEEEEEVPKSGLLSLPFMRRGLEKRKEAAVEEANLAFQEYEDSLKKLENSGGSEDPKAASTSGRRVFGTAKAQIDASNKVKSDNCYDGSDSEDDLGTSKSGNIENEGSDLLHKDVNKDLVVIQDDTDTHQESVFKNIDEIIKKPGPKTTYEVSIFVSDTWKKAKNKNEDMTMKKSPMLTELDMQAIKVTEKEFGEDSDTDCEGQMVDGILSSVSKVPYELPSQEELIRQAFAGDDVDDDFEKDKQEILNEENPEPEKPLLLPGWGQWTHVQQKKGLPSWMLKKHEDAQKKRAEALKKRKDAQLKNVIISEKIDKKAEKLHTKSLPYPFTSKEVFEQSMRVPIGPEFNPATAIGPLNRPEVVKRPGVIIKPIEFKEVNPHEKTEQRNGDKRKFKKNKGNAGNIMKKAKVGGKS

SEQ ID NO: 259138 - protein, 47 aa, Glycine max
  Clone ID: PAT_MRT3847_76026C.1.pep
SVKPTGPRRWSKLFFACNFGTLTFSAQTGQKLFMNEKEKKNIVNNAL

SEQ ID NO: 259139 - protein, 61 aa, Glycine max
  Clone ID: PAT_MRT3847_76027C.1.pep
IKNLHIQILCRPQNKKNLEVFSYYLCNGPFCFFSTIFVNKKCLFYICSIRPQAFSVFLPGL

SEQ ID NO: 259140 - protein, 107 aa, Glycine max
  Clone ID: PAT_MRT3847_76028C.1.pep
MSQEFFLLLFFFPFSLSQTPPRGLLINCGAHSAAQFDNRTWLPDSGFISSGSPKTVTTPVLFPTLHTLRSFPRQVKKHCYNIPVYRGAKYLVRTTYFYAGVNGADHP

SEQ ID NO: 259141 - protein, 79 aa, Glycine max
  Clone ID: PAT_MRT3847_76029C.1.pep
LSPTPHGTVCYIQNFKQGHCCHRTTRFMWRSRHSVCVVTTVYKSVVVGSVGIGRSTTGSSRWCRRRRIHRRPPWELVKE

SEQ ID NO: 259142 - protein, 47 aa, Glycine max
  Clone ID: PAT_MRT3847_7602C.1.pep
RERMREREKVINTWVQYYCVVICHNDVSSKYNVTAPNKNLSIVTKKK

SEQ ID NO: 259143 - protein, 56 aa, Glycine max
  Clone ID: PAT_MRT3847_76030C.1.pep
EWLSYEFGAVERFSVCSYVLKKQISLVKLAVKCSRACFNNHSRHGQVPPRMNRRFT

SEQ ID NO: 259144 - protein, 119 aa, Glycine max
  unsure (1)..(119): unsure at all Xaa locations
  Clone ID: PAT_MRT3847_76031C.1.pep
GTHDWFGQRSVLIITTRDLHLLDLLKGDYXYEIEEMVETESLHLCSWLVLGQPKPREDFNELARDVLAYXGGLPLALEVLGSHVFSTTDTERESALPRLKMTPNDQFQQILRIGADDLY

SEQ ID NO: 259145 - protein, 168 aa, Glycine max
  unsure (1)..(168): unsure at all Xaa locations
  Clone ID: PAT_MRT3847_76032C.1.pep
ARADDIKNWWIWGYWISPLMYGQNAIVVNEFLGDSWNHFTPNSNKTLGIQILESRGFFTHAYWYWIGIGALIGFMILFNIIYTLALTYLNPYDTPQTTITEESESGMTNGIAESAGRAIAVMSSSHKKKRGMILPFEPYSITFXIVYSVDMPLEMKDQGVREDRLVLL

SEQ ID NO: 259146 - protein, 68 aa, Glycine max
  Clone ID: PAT_MRT3847_76033C.1.pep
ATFTWLFIIDLHALLNHPTFINCKDIIKSKHLKFQKFFWSFHSETPIFARFNHDFTSLKKIASSVAAR

SEQ ID NO: 259147 - protein, 141 aa, Glycine max
  unsure (1)..(141): unsure at all Xaa locations
  Clone ID: PAT_MRT3847_76034C.1.pep
MSNTLQQHQQCPESKRLDPGSNARRPGHRRSVSAGAPLIYSGGATLLPSGNICPSGKILKPGLPSRGSNRTDVLGSGTVNYGRGSIVRGVSGNIPVPVGALPPTVKRALSGSDPEELKRAGNELYRGGNXAEALALYDRAV

SEQ ID NO: 259148 - protein, 224 aa, Glycine max
  Clone ID: PAT_MRT3847_76035C.1.pep
FPTFCNHQCRQSRLPNKMQVLQPAAKMLVELSKSQDSAAGDGTTTVASIDGALLEQGLLLLSHGIHPTVVSDALHKAAVKAVDVLTAMAVPVELSDRDSLVKSASTSLNSKVVSQYSTLLAPLAVDAVLSVVDAPKPDMVDLRDVKIVKKLGGTVDDTELVKGLVFDKKVSHAAGGPTRMENAKIAVIHFQISPPKTDIEQSIVVSDYSQMDRILKEERRYILS

SEQ ID NO: 259149 - protein, 77 aa, Glycine max
  Clone ID: PAT_MRT3847_76036C.1.pep
MGDADSPAFNRTTTTKGRRTSTRSGDGDDHRGTKNSDVQKERNAIKHRTEGIDITNLGKTSDKPQLAARIIAARENP

SEQ ID NO: 259150 - protein, 53 aa, Glycine max
  unsure (1)..(53): unsure at all Xaa locations
  Clone ID: PAT_MRT3847_76037C.1.pep
XKKKKIHIFFFXPHNITRWYLKGILRSAANQTRHNCHSLTQTLTNALIESGYQ

SEQ ID NO: 259151 - protein, 60 aa, Glycine max
  Clone ID: PAT_MRT3847_76038C.1.pep
MSTQKKRALQIEAFRHRIVVDPKYAEKTWKVLEHAIHEIYNHNASGLSFEELYRLIHSFV

SEQ ID NO: 259152 - protein, 50 aa, Glycine max
  Clone ID: PAT_MRT3847_76039C.1.pep
AILHPITNLILPIVLTGFGTSYRTNNQQFCNTDQLGEPSNSPMLAFVHAL

SEQ ID NO: 259153 - protein, 51 aa, Glycine max
  Clone ID: PAT_MRT3847_7603C.1.pep
IASLRALLSNRKTDPNVLTQLDIKIQKTVGLMRANRIFHGRGRHNMPRIML

SEQ ID NO: 259154 - protein, 117 aa, Glycine max
  unsure (1)..(117): unsure at all Xaa locations
  Clone ID: PAT_MRT3847_76040C.1.pep
LSSLSQLWDEDDNGETGEDEMGVEDDGEFLXNDXEEDYGAGYLVQPVGQSDALNAGGADVDGGNDDDGEEEDEVDDDDDDQVLPPPDSSHKRKRDDEEDVDDDDDVVAFTKSPKKHH

SEQ ID NO: 259155 - protein, 43 aa, Glycine max
  unsure (1)..(43): unsure at all Xaa locations
  Clone ID: PAT_MRT3847_76041C.1.pep
LRRDRDSSXQYXKSPIQRVRTSXXAXXTIFHRXXEYXXPLXXF

SEQ ID NO: 259156 - protein, 81 aa, Glycine max
  Clone ID: PAT_MRT3847_76042C.1.pep
SQKIRFFRTRNGWHLFCPTLGRSQILKVTNILAPPFTGPISGTNPVPSFPKFKIPQTHGIWPPNPPPGQLGFWLNRNPKLR

SEQ ID NO: 259157 - protein, 54 aa, Glycine max
  Clone ID: PAT_MRT3847_76043C.1.pep
GCQSNLCIVFIIQVLSLILILLSAHRKLILRFHYRRVANEKSQGNSIYQECVYF

SEQ ID NO: 259158 - protein, 465 aa, Glycine max
  unsure (1)..(465): unsure at all Xaa locations
  Clone ID: PAT_MRT3847_76044C.1.pep
MASKKQEERAEAAAKVAAKELEQVNRERRDRDFGVVAEQQQQHHQEDQQKRGVIGSMFKAVQDTYENAKEAVVGKKEATNNAYSNTEVIHDVNIQPDDVSATGEVRDISATKTHDIYDSATDNNNNKTGSKVGEYADYASQKAKETKDAMMEKAGEYTDYARQKAEKAKKTTMEKGGEYKDYXAEKAKERKDATVKRMXKYVSYTAEETQKKGKDATVTKMGRVYGTAEAAKKKAXRGKGVNKRKEYKDXMKSXAKEGKDTTLGKLGELKDTASDAAKRAVGYLSGKKEETKEMASETAEATANKAGEMKEATKKKTAETAEAAKNKAGEIKDRAAETAEAAKNKTAETAEVTKNKALEMKDAAKDRTAETTDAAKQKTAQAKENTKENVSGAGETARRKMEEPKLQGKEGYGGRGDKVVVKVEESRPGAIAETLKAADQIAGQTFNDVGRFDEEGVVNVERRKK

SEQ ID NO: 259159 - protein, 202 aa, Glycine max
  Clone ID: PAT_MRT3847_76045C.1.pep
MAAMFLTRSALFRFSKSLPYAPSLSLKPSMVTFSSTPNSGWRNAAEGGRRDGRTNWTYDSAEARREADEMSESAKETMNEGYDRAKDQAREAKDRTKDFAHDAKEKTKDAAGSMRDRAESAAEKTKEYAYDTKESAKDAAGTVADKSREGAERTKEKTEEVAASAGEALKNVGEKAKQGVQAAWETAKDTTQKIKGDGGWQG

SEQ ID NO: 259160 - protein, 57 aa, Glycine max
  Clone ID: PAT_MRT3847_76046C.1.pep
PQFPSRPTRRPHPTPTPPLTHLITQFHQAYHRSLRNFTFHRSYFHLHTKLSSQLIIL

SEQ ID NO: 259161 - protein, 144 aa, Glycine max
  unsure (1)..(144): unsure at all Xaa locations
  Clone ID: PAT_MRT3847_76047C.1.pep
WIDPRPMFYLAAEGDNYYVPCMEMGDHKAQGGASHLSDVKLGHGPKMXPVLKKDWAPVPFCIYFMLQTESNILIHKADAALEKDKMHAVWANELSTRMEQVXIATIAENVTDQRNNDMPDNVLENTLIKLLSERHPTDIDDPGR

SEQ ID NO: 259162 - protein, 97 aa, Glycine max
  Clone ID: PAT_MRT3847_76048C.1.pep
MLVAGGKRLLYVSVVVMLVVLHMCHTCQVGAIRVFPGNAVANVEFSHGNMDNNKSMEEDLFKKYFSGRTHLGPSNTTQKGFDDSKRRVPSCPDPLHN

SEQ ID NO: 259163 - protein, 63 aa, Glycine max
  Clone ID: PAT_MRT3847_76049C.1.pep
KKLTGFFGLSLQIFRDIFAPWRSILESRLYRNGGAPVSPNNPTQSLIITRRKRGRSFFGSEIN

SEQ ID NO: 259164 - protein, 74 aa, Glycine max
  Clone ID: PAT_MRT3847_7604C.1.pep
LINKIIYIFHGLWGRGEFLRGGSIASFFFIYIFMGSLSADILERLIIIISFTYCGYIVFADLCYLLSLTLPVWA

SEQ ID NO: 259165 - protein, 45 aa, Glycine max
  Clone ID: PAT_MRT3847_76050C.1.pep
IIRGPKSNSETNRIKFVILPKIKEKYHFDHRKIGLTLVWWSLKKV

SEQ ID NO: 259166 - protein, 68 aa, Glycine max
  Clone ID: PAT_MRT3847_76051C.1.pep
LLWCGFPKVLINEKLRYDLITIIRELSQLIIRELSQSLLCFPTLYYYSLKIRIYMCDTTHNYSKYFSI

SEQ ID NO: 259167 - protein, 45 aa, Glycine max
  Clone ID: PAT_MRT3847_76052C.1.pep
TLYAHVSVNHVWFEYLGLKIWILTELLNISFLARRTYRTFCAVFY

SEQ ID NO: 259168 - protein, 61 aa, Glycine max
  Clone ID: PAT_MRT3847_76053C.1.pep
LAAKISPYPYQSLSPHSIIEANVLDCFLYMTRHPLLTTLATKDLSTIPRSINQKRSDSIVC

SEQ ID NO: 259169 - protein, 64 aa, Glycine max
  Clone ID: PAT_MRT3847_76054C.1.pep
GYTEKLAIWSIENIIILIVKIKLKKTTNYNVIQDSPLPCTVVLRFTFDTSKIGAPQKGSISENN

SEQ ID NO: 259170 - protein, 90 aa, Glycine max
  Clone ID: PAT_MRT3847_76055C.1.pep
LTELPRMMPAYRSMDSYPCQRNQIPFPHYYHPGIEAIPPQMKLDPSKPPFSYDQHWPYAGNFGHPTSAHFCCGHSNFPWHYSYMPSYAHA

SEQ ID NO: 259171 - protein, 67 aa, Glycine max
  Clone ID: PAT_MRT3847_76056C.1.pep
LCTRVVQEGRRPHRIQQRRQRNGTETSKYLPRGRASGTQSHRSKPLSRMQPPPPSRSTQCVRVCCSL

SEQ ID NO: 259172 - protein, 88 aa, Glycine max
  unsure (1)..(88): unsure at all Xaa locations
  Clone ID: PAT_MRT3847_76057C.1.pep
MVDEMNLQAGMVNRIRLRRKTLFAYLCIADPRPKVSGVAMVDLESVEVKRHKYXQRRFGGEPFFLPTPGGNGTEDERYVMLSVHDKMT

SEQ ID NO: 259173 - protein, 58 aa, Glycine max
  Clone ID: PAT_MRT3847_76058C.1.pep
FGSRDKHLNILAKQHIETRFVKLNAEKSPFLAEKLKIIVLPTLALIKNAKVDDYVVCI

SEQ ID NO: 259174 - protein, 152 aa, Glycine max
  unsure (1)..(152): unsure at all Xaa locations
  Clone ID: PAT_MRT3847_76059C.1.pep
LNQRTPSPIWTTSKTPLPNSHEHDEWFGKMQQERADFLRDVEMQKRNMNTLIEKRHEEIESCLKEREKSFEEEKNNELEYINALKEKAAKESQQVSFEMRRLETERXXISWXREQRKXEWAELNKCIEELKVXRDKXXNQRXLLHADRIEIM

SEQ ID NO: 259175 - protein, 113 aa, Glycine max
  Clone ID: PAT_MRT3847_7605C.1.pep
CTTELTSHVKKTHKRYQIKPQMKIRLKLKTYKRRNGNFQKLIREPRRANLRNCSVDQENYRSTLQLKLRKRNGKGKEKEEEANNKDCNNKKGHQLQKTRNLAFKKKKRLEREP

SEQ ID NO: 259176 - protein, 70 aa, Glycine max
  unsure (1)..(70): unsure at all Xaa locations
  Clone ID: PAT_MRT3847_76060C.1.pep
ECKELRLHRACMRIDLRTDSLVNQSARDPFPLSVAARRGIWTAAARAISLXRSSSSGNAVNWACKASAHC

SEQ ID NO: 259177 - protein, 73 aa, Glycine max
  unsure (1)..(73): unsure at all Xaa locations
  Clone ID: PAT_MRT3847_76061C.1.pep
MGVYSLGDRTQEPFRPRASAPSGRSGAQLQSHLDAPWRRGNLRQAVQLTAGEXINDWLAVSTVDFSNHVTVLG

SEQ ID NO: 259178 - protein, 39 aa, Glycine max
  Clone ID: PAT_MRT3847_76062C.1.pep
HNSVLLKSLCSATVAEAYEAGELLLYYKNSAEGISVMGP

SEQ ID NO: 259179 - protein, 113 aa, Glycine max
  Clone ID: PAT_MRT3847_76063C.1.pep
GGPRVERYQLLSVALVIKKTQLVPDTPTAPAPALAHYFLRAARRFSPIQRAGGPTELCAVNPSVSTARFLFFSSLIGYAWHCELISRLARRVELSLVHHVSKPLTITMIGTTC

SEQ ID NO: 259180 - protein, 89 aa, Glycine max
  unsure (1)..(89): unsure at all Xaa locations
  Clone ID: PAT_MRT3847_76064C.1.pep
SPRPDPCHSSCSLFSSFTRRQQWDSGSSSTERIGTVAMHMQLLQNDRVLLFDRTDFGLSNLKLADGRCXQQPNELVVERDCTAHSIEYD

SEQ ID NO: 259181 - protein, 159 aa, Glycine max
  unsure (1)..(159): unsure at all Xaa locations
  Clone ID: PAT_MRT3847_76065C.1.pep
MLVLFNLMTLGCLHEKHLEELLEYFRFGLWWVALGVASSIGLGSGLHTFVLYLGPHIALFTLGAVQCGRVDLKSAPYDTTQLKRGASWLDKNCSEFGPPLFXAVYDSQVPLSSILPQVQLEAILWGIGTAIGELPPYFISRAGTFYHCRSLTLTKSLLS

SEQ ID NO: 259182 - protein, 85 aa, Glycine max
  Clone ID: PAT_MRT3847_76066C.1.pep
QHLEELLEYFRFGLWWVALGVASSIGLGSGLHTFVLYLGPHIALFTIGAVQCGRVDLKSAPYDTIQLKRGPSWLDKDCSEFGPPL

SEQ ID NO: 259183 - protein, 53 aa, Glycine max
  Clone ID: PAT_MRT3847_76067C.1.pep
QTRSFFCLGKKNRGTVQAFWCPMLNANNYMFYSFRSTYRYRGNPQIQQFDVTH

SEQ ID NO: 259184 - protein, 80 aa, Glycine max
  Clone ID: PAT_MRT3847_76068C.1.pep
MFQEGYKRKRLPLDSSEDCTDFNSNITNLLRRNSDMLKAHLGAQNINYQLARDQQKQQTDIIVAALGKLTDALTKIADKL

SEQ ID NO: 259185 - protein, 117 aa, Glycine max
  unsure (1)..(117): unsure at all Xaa locations
  Clone ID: PAT_MRT3847_76069C.1.pep
QNNVHRTLIFKAADTKRPDEEDKTGGPTETYDHYAASLSANDCRYRXFDCDPFTCENSQTSGIFLIAWHHFTXEMRAKMRYVTTEDGVTRDLHGVHHEIQGTDATDKYLVLLKDLTN

SEQ ID NO: 259186 - protein, 60 aa, Glycine max
  Clone ID: PAT_MRT3847_7606C.1.pep
KNKFFKHRNQTFKKEKLNFDNFTFPLSIGVCCFMKGMTHLFNLEKILNYKILPLWGHLVS

SEQ ID NO: 259187 - protein, 44 aa, Glycine max
  Clone ID: PAT_MRT3847_76070C.1.pep
KKDRGGPFLNGFLWNLRQNEILSWGVRRAGNGTWGKLARVFPFP

SEQ ID NO: 259188 - protein, 54 aa, Glycine max
  unsure (1)..(54): unsure at all Xaa locations
  Clone ID: PAT_MRT3847_76071C.1.pep
AGLTIVLTYLNYRGMXIVGWGXVCXGXXSLXXFVXMXXLAXPXXKXXRWTVTTR

SEQ ID NO: 259189 - protein, 111 aa, Glycine max
  Clone ID: PAT_MRT3847_76072C.1.pep
FTFPNFMEKSEQSWKFKTFLPKKINWHQYNTQTQSKKINSLPKKKNGSTQQLPYVTQKHGKLTKNLHLLNQNSISFHVSSYDRSGGGVKRIHDDDDDVAIIFTYIHTQFQW

SEQ ID NO: 259190 - protein, 206 aa, Glycine max
  unsure (1)..(206): unsure at all Xaa locations
  Clone ID: PAT_MRT3847_76073C.1.pep
ELHRSEFLKREERILSTLKCPQIVAYRGCDNTFENGVQWFNMFMEYAPHGTLAERGGGMEEAVVGSCTRQILQGLNYLHSNGIVHCDVKGQNVLVTEQGVKIADFGCARRVEESSSVIAGTPRFMAPEVARGEQQGSXADVWALGCTVLEMXTGTPPWQXAEPAAVVIGIGFSGESPEIPGYVSEQGGTGKVFEEEPGKGGRWRSF

SEQ ID NO: 259191 - protein, 369 aa, Glycine max
  unsure (1)..(369): unsure at all Xaa locations
  Clone ID: PAT_MRT3847_76074C.1.pep
MRLEAGTVSRYDRKXEIKVFDESKTGFQGLVENGVTKVPRMFYCEHSNLSDGLTTESNSNFTIPSIDLTGINDDPILRDAVVGKVRYACEKWGFFQVTNHGIPTQVLDEMIKGTGRFHEQDAKVRKEYYTRDMSRKVIYLSNFSLYQDPSADWRDTLAFFWAPNSPNDEELPAVCRDIVPEYSTKVMALASTLFELLSEALGXDRFHLKEMGCDEGLLHLCHYYPACPEPELTMGTNRHIDGNFMTILXLKTKWVGLQILHENQWIDVPAAHGALVVNIGDLLHLMTNEKFISVQHRVLANHQVPRTSIASFFRIGDQSPEGLSRVFGPIKELLSEHNPPVYRETSLKDYLAHQYAKSIGASSLSLFKL

SEQ ID NO: 259192 - protein, 150 aa, Glycine max
  Clone ID: PAT_MRT3847_76075C.1.pep
MASCVGTSPLYLPVGIGNFPHAHVKLTRPNIVGMKPLPYNIRKGELKIATLQNPSSHVRHAAALNFKCAAATASATQTVTRNSRSMTTDKVKSPKLDNNGPGLPPYDGDGHGGNGGGGGNFSGGLILLGILGVLDVLKDIEKQWQRKHNR

SEQ ID NO: 259193 - protein, 105 aa, Glycine max
  Clone ID: PAT_MRT3847_76076C.1.pep
TSMASCVGTSPLYLPVGIGNFPHAHVKLTRPNIVGMKPLPYNIRKGELKIATLQNPSSHVRHAAALPGIGLEDVKILRKENFKCAAATASATQTVTRNSRSMTTD

SEQ ID NO: 259194 - protein, 122 aa, Glycine max
  unsure (1)..(122): unsure at all Xaa locations
  Clone ID: PAT_MRT3847_76077C.1.pep
FRRFAYCHTLNGVVLLHTHGVKGRINLADTVGIAENTGIEWYCAMNSSLRGRASCDIYTIGSQDCELWSPACAAATTMSFNPNPCADAWSLEFMKRTGSHCAFICXTGWTASPMHDVQVAID

SEQ ID NO: 259195 - protein, 93 aa, Glycine max
  Clone ID: PAT_MRT3847_76078C.1.pep
SFNLWDAPPTLFSSLSSFSFSVGIRITLLYFSTLILIIITFTHFTLTRKNNPFSLSLCSVLILCFSFPQSKGKDGNDSVPPLPFTLPGFPQST

SEQ ID NO: 259196 - protein, 51 aa, Glycine max
  Clone ID: PAT_MRT3847_76079C.1.pep
HASVHSIDLIFCSIRLPRGLRISPLGSSLFRLLIFHLQKGKLILTKQFTHQ

SEQ ID NO: 259197 - protein, 136 aa, Glycine max
  Clone ID: PAT_MRT3847_7607C.1.pep
QQEDDYHKRHSSLIHGLNSFDHSGQRKKKLNAVSTRQAPSQEINSENKYPLPCDFDEHEVLSLASSTSPAQTSEYSFSEYFLFDEPDFTLFLPLTSVFPPLLRGFTFERAVFRVSCLDFPLFGVSCLNFPLFGSFL

SEQ ID NO: 259198 - protein, 45 aa, Glycine max
  Clone ID: PAT_MRT3847_76080C.1.pep
EKLVALLGFFIIPMGYVSRPESIGLLESAVHLCGLPCVDVAGLLT

SEQ ID NO: 259199 - protein, 52 aa, Glycine max
  Clone ID: PAT_MRT3847_76081C.1.pep
RSVKRRDRDSKIMAVILVEREREQNSTTKRRIPEEARTDYNGDLRCRRRMRK

SEQ ID NO: 259200 - protein, 97 aa, Glycine max
  unsure (1)..(97): unsure at all Xaa locations
  Clone ID: PAT_MRT3847_76082C.1.pep
EDSSVEASLNAALNGDYVXSYTVGTSVATSDGLPHVLGHKGGERGRWRYGAENTLNTTTIAETTDDKAINKLEKSLATWVATLCANECTIAEKLTRD

SEQ ID NO: 259201 - protein, 86 aa, Glycine max
  unsure (1)..(86): unsure at all Xaa locations
  Clone ID: PAT_MRT3847_76083C.1.pep
RTYHDPPTGPXPSQKSLHRGLFNIRVIADTITKILLVYVTGITIRDYKRKTDATLRSTWCERASIFGIAWSLGGXIVTLMYCTGNL

SEQ ID NO: 259202 - protein, 92 aa, Glycine max
  unsure (1)..(92): unsure at all Xaa locations
  Clone ID: PAT_MRT3847_76084C.1.pep
PRDHENGQSSLDSPKEAEAEIEKSKNAAQTKKQETQKDSARDFFFXDPNASMKKASRFFPATLCSVTADETEHTPATDFHGLGEAAQKQLPK

SEQ ID NO: 259203 - protein, 112 aa, Glycine max
  unsure (1)..(112): unsure at all Xaa locations
  Clone ID: PAT_MRT3847_76085C.1.pep
MHQLVYLILLLVIFGKKRRIVCQFPGHRGAVRGLTASTDGHILVSCGTDCTIRLWSVPXTTLMESDDSTKSTVEPASVYVWKNAFWGADHQWDGEHFATAGAQVDIWNHNRC

SEQ ID NO: 259204 - protein, 91 aa, Glycine max
  unsure (1)..(91): unsure at all Xaa locations
  Clone ID: PAT_MRT3847_76086C.1.pep
XXXXXXXXXXXFFFFFFFFFFFFLPKNFLFKENVENLPSGGTPPLYKFGGEHNRGGLTCPGFQRAQGPFFLPFNKPGLKKRVKKVFQIPWG

SEQ ID NO: 259205 - protein, 156 aa, Glycine max
  Clone ID: PAT_MRT3847_76087C.1.pep
AAARHQTKCRLRRGHNTAKKGREGGKKKGERTNQNQKGAKQKNGRRTTTLTRDTNSRQRAKRRKRRGAKTKHHGHKERPGNRRPKPKGDPEARRGREKKARRKQGQSRPPREKGKREQGHTANEPEAKKRKGPGSQKREPTHKNGGAHKAQEPGGK

SEQ ID NO: 259206 - protein, 94 aa, Glycine max
  unsure (1)..(94): unsure at all Xaa locations
  Clone ID: PAT_MRT3847_76088C.1.pep
GNFQAGRDSPRTVLNFYQNFIQMGLGIWVFSGNPNVVXPVTYTRXSIKALDLPTVSPGRAWYNNGEVEEWTQKYAGLKFVVVRGAGHEVPLHSP

SEQ ID NO: 259207 - protein, 146 aa, Glycine max
  Clone ID: PAT_MRT3847_76089C.1.pep
RLEGKLDPFRDAEILRTNLPSLRESSIRVLIACTIFLKQAAAAGLCLAQIGQMMTREFCDGEESPSELENICLKVKTTSVPRGSDDNVNNRKDETEECDEVGGIISLADLNQGEWEAFLEGFSELLHGFFEGKRCKSKSWNLNGSY

SEQ ID NO: 259208 - protein, 38 aa, Glycine max
  Clone ID: PAT_MRT3847_7608C.1.pep
VRARPALASCLSVITVIILAYMHTVWCISQRILFWLEP

SEQ ID NO: 259209 - protein, 92 aa, Glycine max
  unsure (1)..(92): unsure at all Xaa locations
  Clone ID: PAT_MRT3847_76090C.1.pep
LFGFMGGXPCMNSAETVPAFQVAIDLSARIYFLYENTKSFARALIILVXQLSEAESVSGALMVHNSPRMLLSPTWILGILRAFVEKMFLFEG

SEQ ID NO: 259210 - protein, 40 aa, Glycine max
  Clone ID: PAT_MRT3847_76091C.1.pep
TTIHLDCTSNRNQASVGIHRYASASTISSSLIMTTQMKSS

SEQ ID NO: 259211 - protein, 128 aa, Glycine max
  Clone ID: PAT_MRT3847_76092C.1.pep
MRNPSSTTTTAATTTTKTKVKNNSNNNIGSNNSPCCNKVGLKRGPWTPEEDEVLANYIKKEGEGRWRTLPKRAGLLRCGKSCRLRWMNYLRPSVKRGHIAPDEEDLILRLHRLLGNRYLYHLLFRFRI

SEQ ID NO: 259212 - protein, 95 aa, Glycine max
  unsure (1)..(95): unsure at all Xaa locations
  Clone ID: PAT_MRT3847_76093C.1.pep
LAHXYVSSEXGSRXTXXXXXXXXXXXXYXRXXXPXARXXXTGXDITXAXXLEXXLLXXXHHXXSEXXXXXPLPXIXXXXCGMTEDXXXGXIXGXS

SEQ ID NO: 259213 - protein, 121 aa, Glycine max
  Clone ID: PAT_MRT3847_76094C.1.pep
MALGRGSAVVLLLCFLLLHSQMARAATYTVGDSGGWTFNTVAWPKGKLFRAGDTLAFNYSPGTHNVVAVNKAGYDSCKTPRGAKVYKSGTDQIRLAKGQNYFICNYVGHCESGMKIAINAA

SEQ ID NO: 259214 - protein, 83 aa, Glycine max
  Clone ID: PAT_MRT3847_76095C.1.pep
DFNASWVISLSSKNSESMKSTVIYTFSMYVVHVDQERFLRRSTMDLSMYSIQEAQKIKVGFSFFHGNLVWCLLHNNKIGFIPL

SEQ ID NO: 259215 - protein, 265 aa, Glycine max
  Clone ID: PAT_MRT3847_76096C.1.pep
SLVRGAVARVSFDEFHKSSAEVIRSAVFGVGADGVVRKDFPIAANNLVVTGIDIQSVEPVDQRTRDSLQKSVQLAIEITTKSQEATARHEAERLEQEARGRLERQKIIDQSEAEKQRKTLLELQAESAAVESTGQATAEAKAKTNAAEIEANAAVTQAKLVAEATKIKTESELANKIAVQQSEVKHLSELNTLEITKAKQLAAIEAKKFKDTVNAIGADTIAAIAQAGPEMQARLLQGLGLQGFMITDGNSPINLFNAASGLIGN

SEQ ID NO: 259216 - protein, 99 aa, Glycine max
  Clone ID: PAT_MRT3847_76097C.1.pep
RKFLIGSEDAKDPFKGVDWKAVGGEMQQNPSAKPALKKRLPKKVREIPEFYFLPRWPLPKAILFCSACIGGGVAAGMLIETWIEKKVKEDGGVIWEFDK

SEQ ID NO: 259217 - protein, 118 aa, Glycine max
  unsure (1)..(118): unsure at all Xaa locations
  Clone ID: PAT_MRT3847_76098C.1.pep
PFNWWPGVTFGNLASQKRIFRGSRGLENCLGFFARAFFGVGVPPLGAKCMLFKSKFPPFFSHLCWAPAPPFKFDPKRGKVDCIFCLPQFKRKFIKVDVSKKKKKIKKKKKKKKKKRXP

SEQ ID NO: 259218 - protein, 64 aa, Glycine max
  Clone ID: PAT_MRT3847_76099C.1.pep
ALDYLLSLRHCLTRGCTLLIIQQTSGSCPSIRALMQFDRGSYSLRHLPDQNSLYLDAVITYLTH

SEQ ID NO: 259219 - protein, 181 aa, Glycine max
  Clone ID: PAT_MRT3847_7609C.1.pep
LEGHWNRRLFHGAAGLLGLGRGPLSFATQLQSLYGHSFSYCLADRNSDSSVSSKWTFGEDKELLSHPNLNFTSFVGGKENPADTFYYVLIKCIMDGGEVLKIPEETWHLSSHGGGGTIIDSGTTLTYFAEPAYEIIKEAFMRKIKRFSLGETFTPIKPCYNVSGVENMEIPESAILSADGA

SEQ ID NO: 259220 - protein, 37 aa, Glycine max
  Clone ID: PAT_MRT3847_760C.1.pep
NQTFVPYFFFIQGERIHCTFKDLAGPPYLLIWLNKET

SEQ ID NO: 259221 - protein, 358 aa, Glycine max
  Clone ID: PAT_MRT3847_76100C.1.pep
MSTKFGRLVPLVFSKRGFSTSTSIQKGGGGSEEGLKSLNLCSAINQALHIALDSDPRSYVFGEDVSFGGVFRCTTGLADQFGKKRVFNTPLCEQGIVGFGIGLAAMGNRAIAEIQFADYIFPAFDQIVNEAAKFRYRSGNQFNCGGLTVRAPYGAVGHGGHYHSQSPEAFFCHVPGIKVVIPRSPREAKGLLLSCIRDPNPVVFFEPKWLYRLAVEEVPEDDYMLPLSEAEVIRQGSDVTLVGWGAQLAIMEQACLDAEKEGISCELIDLKTLIPWDKETVESSVNKTGRLLVSHEAPITGGFGAEISASIVERCFSRLEAPVARICGLDTPFPLVFEPFYMPTKNKILDAIKSTVKY

SEQ ID NO: 259222 - protein, 106 aa, Glycine max
  unsure (1)..(106): unsure at all Xaa locations
  Clone ID: PAT_MRT3847_76101C.1.pep
AIMEQACLDAEKEGXISCELIDLKTLXPWDKEPVESSVXKTGRLLVSHEAPITGGFGAEISASIVERCFSRLEAPVARICGLDTPFPLVFEPFYMPTKNKVTYLFA

SEQ ID NO: 259223 - protein, 96 aa, Glycine max
  unsure (1)..(96): unsure at all Xaa locations
  Clone ID: PAT_MRT3847_76102C.1.pep
MEKEEDKYAKELEVAVRVVHVACALCGRVQERLLATTNDHVVAKDDDSPVTVADFSVQATISWLLSEILGVQNVSIVAEEDIETIXKDESASLLEA

SEQ ID NO: 259224 - protein, 127 aa, Glycine max
  Clone ID: PAT_MRT3847_76103C.1.pep
KSYLTQFSFRVQILPPINVSPSNFLIEFNVYIVLSSRTSTIQSKLRKFRVLGTHNNYPQDSEVEEKSLIIKLKFKSVLGGYYFSKFVSSSSSFINKHVNQVWKIGAFGFFQEGIFHLHQRSKGWWWF

SEQ ID NO: 259225 - protein, 66 aa, Glycine max
  unsure (1)..(66): unsure at all Xaa locations
  Clone ID: PAT_MRT3847_76104C.1.pep
FGFIPLDFFLPMVFSILTFKPSKRSPVFWLNVIIVVAFPALGAIPAVAXVRLIVLDAKNYLFFVNV

SEQ ID NO: 259226 - protein, 121 aa, Glycine max
  unsure (1)..(121): unsure at all Xaa locations
  Clone ID: PAT_MRT3847_76105C.1.pep
VAPISIAANNRAVDPPQTISNCTVNPAFCKTGLANXNGSVGDYGRISVRKFXAQSRGFLNSVHSLVQDRTCLSLPTNRGPEDRKFLAELNLENLTNALDTAGNSKRSFFPPLGQKQETSLV

SEQ ID NO: 259227 - protein, 50 aa, Glycine max
  Clone ID: PAT_MRT3847_76106C.1.pep
KTKGPEKKKFSFFSSGPTYKMGQSGLAQTRTKRGLLNKLTGAIVKKFSKP

SEQ ID NO: 259228 - protein, 84 aa, Glycine max
  unsure (1)..(84): unsure at all Xaa locations
  Clone ID: PAT_MRT3847_76107C.1.pep
MRFPLLVLLGTVFLASVCVSLKVREDENNPFSLRSXSKSFQTLFENQNGRIRLXPRFNKRSPNLRNLRNYRIVQFQSKPNTILL

SEQ ID NO: 259229 - protein, 71 aa, Glycine max
  Clone ID: PAT_MRT3847_76108C.1.pep
CGLLVPLLHSFTLGCQLSHFPVSFLLLFDHPHTDPTSFEKVSSQLQLVSHYHYILLNQEQCITKWFHIHLC

SEQ ID NO: 259230 - protein, 107 aa, Glycine max
  Clone ID: PAT_MRT3847_76109C.1.pep
RDLELRTKVKPQFYAFRWITLLLTQEFKFESILRIWDTLLSNPFGVQDMLLRICCAMLLCVKSKLLSGDFVTNIKLLQHYPDDINVEYLLQVAKDISPDTSNYCLSL

SEQ ID NO: 259231 - protein, 41 aa, Glycine max
  Clone ID: PAT_MRT3847_7610C.1.pep
HFYRASIVPPKGNSLGRRFTSSKTGRTQAKPNLIDLHFIPL

SEQ ID NO: 259232 - protein, 252 aa, Glycine max
  Clone ID: PAT_MRT3847_76110C.1.pep
KSKEPGERFSSLSHEGINGVCKEKDGTNKIEIICMTCSLSGEEVEWDGDAFKDMKNLKTLIIKSDCFSKGPKHLPNTLRVLEWWRCPSQDLPHNFNPKQLAICKLPQSSFTSLGLAPLFEKSVVNLTSLILDECDSLTEIPDVSCLSKLEKLSFKDCRNLFTIHHSVGLLEKLKILNAESCPELKSFPPLKLTSLERLELSYCFNLESIPEILGKMENMTQLSWTDYNKTHLLTKTETHVWTDADASKNAAF

SEQ ID NO: 259233 - protein, 92 aa, Glycine max
  Clone ID: PAT_MRT3847_76111C.1.pep
LSMRLAMSIELSKVLSLCVCVCFAADRGVGMHVWCGWGGVGFGVGQCNKKKELANSSARNWRWCSRVRCGARTRCNGWVYNPGAATRVKEPS

SEQ ID NO: 259234 - protein, 41 aa, Glycine max
  Clone ID: PAT_MRT3847_76112C.1.pep
GTLHFLLGRARETTTLQLLSLTLRFSLHFFSSSHLDPRRLV

SEQ ID NO: 259235 - protein, 141 aa, Glycine max
  Clone ID: PAT_MRT3847_76113C.1.pep
PFLLATIVIVLRMVALHVQSVAKSSVSLHYYVVLVALLRSLHYSRRYNVALCVCSPSPRYTACFTRSCAFALTKCSSRTGFPLALAGYVSMFALAYVFSFLAKAFSSFYLFSVLLYHGGWQLPPFCYCMLQLCLFLLSLTQ

SEQ ID NO: 259236 - protein, 37 aa, Glycine max
  unsure (1)..(37): unsure at all Xaa locations
  Clone ID: PAT_MRT3847_76114C.1.pep
GLXNRXLPXSQGFGVSMTXIVTTSVTXSAISXISRDT

SEQ ID NO: 259237 - protein, 281 aa, Glycine max
  Clone ID: PAT_MRT3847_76115C.1.pep
HKDPCFSLPWKQDCFPIFSESSPLYHTSNKPEPLTPEEEKDLQLAIQRFHELCHKCVQVNIPLLVDAEHTSVQPAIDYFTYSSAILHNKGDNPIVFGTMQTYLKDAKERLLLAAEAADNMGIPMGFKLVRGAYMSSETKLAESLGYSSPIHDTIEDTHKCFNDCSSFMLEKVANGPGGVVLATHNVESGKLAAAKAHELGIGKVNHKLEFAQLHGMSEALSFGLSNAGFQVSKYMPFGPVETVMPYLLRRAEENRGMLAASGFDRQLMRKELGRRLKAAFF

SEQ ID NO: 259238 - protein, 100 aa, Glycine max
  Clone ID: PAT_MRT3847_76116C.1.pep
SSSFGFNSLLQHLLHIAGFLRMGQELEFDLNDKSCVGLSPDTVLPPHQYCLNVKKRCKNGKPTGKDEFLQLKENFADINFGRFRSTSPKSLPCKSYWTGR

SEQ ID NO: 259239 - protein, 62 aa, Glycine max
  Clone ID: PAT_MRT3847_76117C.1.pep
MNMLIRHIAVGKSEEVTHPDTLKEALAEFISTFIFVFAGLGSCIAYNKLIDNGADYPAGLIS

SEQ ID NO: 259240 - protein, 94 aa, Glycine max
  unsure (1)..(94): unsure at all Xaa locations
  Clone ID: PAT_MRT3847_76118C.1.pep
VLRNLNHAQEGSTVIMCDNSSTIKLXXNPVMYGKSKHIRVGFHFLRDLVKDGEIELAHCGTQEQVADLMTKALKLEAFQKLRKKMGMLDLTEVD

SEQ ID NO: 259241 - protein, 36 aa, Glycine max
  unsure (1)..(36): unsure at all Xaa locations
  Clone ID: PAT_MRT3847_76119C.1.pep
VNLISNTIVPSYLFTVNXIKLSLDKDLYMHQDTRPS

SEQ ID NO: 259242 - protein, 152 aa, Glycine max
  Clone ID: PAT_MRT3847_7611C.1.pep
MGLSSLPAPSEGVLCVLLVNTALSISIFKGIVRTILQIVGIRVSSLSPSPDISRNPPEPLEFNLSPSEGFIEEFRSRTPTLRFGSMCGSKQPQHECCCVCLTKFEPESEINCLSCGHIFHKVCMEKWLDYWNITCPLCRTSLMPEDDASCFW

SEQ ID NO: 259243 - protein, 218 aa, Glycine max
  Clone ID: PAT_MRT3847_76120C.1.pep
MDTLSSSVSTLNVPPLPSSTFTNRDFYRFKASPTRSQQQQQHHVFSTSTPNFLPKTKTFSHKSSPSLPFSPSPLKPKPSSPTFHPNPATGYAAALVDVAHNSNSLHFVHSDVQRLLKLLQGAKFQSPAVEQGNFHRHVVALLKMLLKKNKVGIVKEVLQEFERIYDRLCGTQMVLVSSKTKMREDQLFGIAKSVHQLSGAVRVKVRNLVQESMPSFAM

SEQ ID NO: 259244 - protein, 80 aa, Glycine max
  unsure (1)..(80): unsure at all Xaa locations
  Clone ID: PAT_MRT3847_76121C.1.pep
QIFVKTLTGKTITLEVESSDTIDNVKGQIQDKEGIPPDQQRFIFARKQLEDGRTLVDYNIQKDQPFXLVPRLPGGMQIFV

SEQ ID NO: 259245 - protein, 74 aa, Glycine max
  unsure (1)..(74): unsure at all Xaa locations
  Clone ID: PAT_MRT3847_76122C.1.pep
IRSFPGXKSVLLRGEIHLPGIVNKLASLERLALRRVKFQIRYFSVSRTQVSYRTIIEKSGSQVLQWFIGISMSV

SEQ ID NO: 259246 - protein, 52 aa, Glycine max
  Clone ID: PAT_MRT3847_76123C.1.pep
KIRLLCCCMRINAINRCSFLTGPEPCEKPHADILGEIVGWGFNPISGPSSTT

SEQ ID NO: 259247 - protein, 104 aa, Glycine max
  unsure (1)..(104): unsure at all Xaa locations
  Clone ID: PAT_MRT3847_76124C.1.pep
GPGLVGNLDTRSLILKINPVIIVMALLVNGGELILGNKVFCLKKEVKKLLHLGFQHWHXILELSGINTAFNFKNEGGMAIFYXLAXWLGLGVICLFGINGIYGL

SEQ ID NO: 259248 - protein, 78 aa, Glycine max
  Clone ID: PAT_MRT3847_76125C.1.pep
VRGFFSPHGGIRVVGPPPGDPRQGTPFFLSHWNSLLGSQGLTSERGFLFWRGFFLWGWGLPRKFALFSPLFNLVKIFR

SEQ ID NO: 259249 - protein, 35 aa, Glycine max
  Clone ID: PAT_MRT3847_76126C.1.pep
GSSSSRLMARIPLLLALSLSAHVVSIYKWVDYIRP

SEQ ID NO: 259250 - protein, 232 aa, Glycine max
  Clone ID: PAT_MRT3847_76127C.1.pep
PTRPDAWARAASWPTIILLLIIMIWAWKMLNWLWLRPKRLERLLREQGLQGNSYTLFVGDLKEFGKMRNEALSKPMNLFSHDIAPRVLSFIQHTVNKHGKNSFIWFGPIPRVTLTDPEQIKDVLNKIYDFGKPDMNPHVRLLAPGLVSHEGEKWSKHRKIINPAFNLEKLKNMLPLFIKCCDDLISKWEGMLSSDGTSETDIWPFFQNLASDGISRTAFGSSYEEGRRIFQL

SEQ ID NO: 259251 - protein, 137 aa, Glycine max
  Clone ID: PAT_MRT3847_76128C.1.pep
MKRQQKNMSSSLILPLTILTVLSFLSLAIGHRAQPCSEEFLKLAQQKNLSDCKTLRTLGAEFAWSYHNVTNKSIELEIMFRATLPTPQGWMAWGVNPGKRPEMIGTKAIIAIKHGDGTWKIDTYNVTKETRNGCSLL

SEQ ID NO: 259252 - protein, 50 aa, Glycine max
  Clone ID: PAT_MRT3847_76129C.1.pep
TLHAMNVCTDLPCRSTALYIYYFTKAKSLTVSRANMTLFTFYLKNGCGLT

SEQ ID NO: 259253 - protein, 43 aa, Glycine max
  unsure (1)..(43): unsure at all Xaa locations
  Clone ID: PAT_MRT3847_7612C.1.pep
QRPLKKGXXINPRLKDCLILPKTQEFFLHEPVPPTPKRIIGEP

SEQ ID NO: 259254 - protein, 54 aa, Glycine max
  Clone ID: PAT_MRT3847_76130C.1.pep
HLINNFHPLAHIRMNSVTYLFRMHFNSAPNLLHVTHTIILLFRINFPIIRVHKG

SEQ ID NO: 259255 - protein, 235 aa, Glycine max
  Clone ID: PAT_MRT3847_76131C.1.pep
FSSDLRALIIINYSTSYARLQNVSVFRNLTNLRSLWLEKVSIPQLSGSVLQNLGKLFVVLCKINNSLDGKQFPNLSELTLDHCDDLIQLPSSICGMKSLQNLSLTNCHNLTQLPVELGKLRSLEILRLYACPDLKTLPNSISHMIRLKYMDISQCVNLTCFPEEIGSLVSLEKIDMRECSMIRNVPKSALSLQSLRLVICDEEVSGIWKEVEKAKPNNFHIQVSEQYFDLDWLKE

SEQ ID NO: 259256 - protein, 271 aa, Glycine max
  Clone ID: PAT_MRT3847_76132C.1.pep
MADYSAGTESQEVVVNVTKNTSETIQRSDSLVSVPFLQKLVAEAVGTYFLIFAGCASLVVNENYYNMITFPGIAIVWGLVLTVLVYTVGHISGGHFNPAVTIAFASTRRFPLIQVPAYVVAQLLGSILASGTLRLLFMGNHDQFSGTVPNGTNLQAFVFEFIMTFFLMFVICGVATDNRAVGELAGIAIGSTLLLNVIIGGPVTGASMNPARSLGPAFVHGEYEGIWIYLLAPVVGAIAGAWVYNIVRYTDKPLSEITKSASFLKGRAASK

SEQ ID NO: 259257 - protein, 88 aa, Glycine max
  Clone ID: PAT_MRT3847_76133C.1.pep
RAGHHSLHCSVSRFIFFAPCSAVREEYLHFFHALRLLIQTHVFCARDLARIPCESCKDGILCAIRVLGGLHLVLGISNSSQLRVLPSR

SEQ ID NO: 259258 - protein, 601 aa, Glycine max
  Clone ID: PAT_MRT3847_76134C.1.pep
MAETHEDTPKETVHKEEEEEDQSFEELGVDARLLRALIKKRIEKPTPIQRVAIPLILEGKDVVARAKTGSGKTLAYLLPLLQKLFTANSDRKKLAPNAFVLVPTRELSQQVYAEVKSLVELCRVQLKVVQLNSNMLANDLRAALAGPPDILISTPACVAKCLSCGVLQAASINASLETLVLDEADLLLSYGYENDIKALTPHVPRSCQCLLMSATSSADVDKLKKLILHNPFILTLPEVGNHKDEVIPKNVQQFWISCPASDKLLYILAVLKLGLVQKKVLIFTNTIDMSFRLKLFLEKFGIRSAVLNPELPQNSRLHILEEFNAGLFDYLIATDLSQSKEKDEVPKESIVGSRKSRKHAKIKLDSEFGVVRGIDFKNVYTVINFEMPQSVAGYVHRIGRTGRAYNSGASVSLVSTDEMDTLEEIRSFVGDDENKGTNSIAEFPLLTKNAVESLRYRAEDVAKSVTRIAVRESRAQDLRNEILNSEKLKTHFETNPKDLDLLKHDKILSKNAPPPHLRDVPEYLLDKPTKEAREMVKLARDAMGNNNRRKGSKRKLRKEGDPLKAIYATASSKRPHKARKTGGSDSLNSSDRHKHKKNKGI

SEQ ID NO: 259259 - protein, 59 aa, Glycine max
  Clone ID: PAT_MRT3847_76135C.1.pep
LFSRINPSQTCVCSWIFLWLMLFWNNLFWRNSQFIICSFWRELLKAKKKKKKKKKKRPL

SEQ ID NO: 259260 - protein, 77 aa, Glycine max
  Clone ID: PAT_MRT3847_76136C.1.pep
LESPKSLLGQSSLNWLVKLTSITSFPTRNTQYFAHFLAHFRPHTKTWPDHLALNTWGWQEFKPENCCDSQLFFQLGN

SEQ ID NO: 259261 - protein, 102 aa, Glycine max
  unsure (1)..(102): unsure at all Xaa locations
  Clone ID: PAT_MRT3847_76137C.1.pep
SNNAHFHIELNIIMDGXNTDPNRCQKMKDRIFHVCKDPTRGLKRLYQMRVQGSLWLPAISCYHWMTKXRFNDCEGCRVSLSRGLMRATHMMILGQVHAVIGY

SEQ ID NO: 259262 - protein, 62 aa, Glycine max
  Clone ID: PAT_MRT3847_76138C.1.pep
RPTRSSTLSSTRSSTLSILTCSSSKQMLPNNKQSHTKCIHLLPHSLPERQDLPVTDSFLVSI

SEQ ID NO: 259263 - protein, 137 aa, Glycine max
  Clone ID: PAT_MRT3847_76139C.1.pep
GPPALFRGRVNPPRGKESPQSPPPPLGFSPKDIVPSPPNFPFKTLHRGGGFLKKFFFGFWGSLPPNVFFLLKNWFWGQPPLPWVFFFKISFGPLLKKGFWSPRTTKFSFWLGLGFVSFWAFLTLGRGFSPMGPFVLF

SEQ ID NO: 259264 - protein, 50 aa, Glycine max
  Clone ID: PAT_MRT3847_7613C.1.pep
HILTILKNTSFYTKDLIPIYCNTLPPHLLPLQVPNSLTLAFFDAFPTQIC

SEQ ID NO: 259265 - protein, 73 aa, Glycine max
  Clone ID: PAT_MRT3847_76140C.1.pep
VGTVLLGCAFIYDIFWVFVSKKFFKESVMIVVARGDRSGEDGIPMLLKFPRIFDPWGGYSIIGFGDILLPGML

SEQ ID NO: 259266 - protein, 41 aa, Glycine max
  Clone ID: PAT_MRT3847_76141C.1.pep
GPSIISYLLPGTEPLLTPESSSHTPMYSYDTYHTTVPVSSI

SEQ ID NO: 259267 - protein, 54 aa, Glycine max
  unsure (1)..(54): unsure at all Xaa locations
  Clone ID: PAT_MRT3847_76142C.1.pep
VSLXSVXXKXMSPGPGIDAXTDXCRXPXNSLRSTTQXLKKEXCTXRNNYXPIVX

SEQ ID NO: 259268 - protein, 68 aa, Glycine max
  unsure (1)..(68): unsure at all Xaa locations
  Clone ID: PAT_MRT3847_76143C.1.pep
XXXXXXFFXFLKXKFNIFHKYILSTEMTAWGNNSGEKNAGLNGKTPHWEAQKAPPVMKETFIYTYPQY

SEQ ID NO: 259269 - protein, 74 aa, Glycine max
  Clone ID: PAT_MRT3847_76144C.1.pep
AGNNIAINYLLSFRKVTTQIQLTKWKRGRGDPISLNNFHWEVSYTCVSQKNRINNLPMKLLYGIALVPVQFPGD

SEQ ID NO: 259270 - protein, 38 aa, Glycine max
  Clone ID: PAT_MRT3847_76145C.1.pep
PVSGTSPASLAKGHSEPTLDLRSILPFTSSHLLAALHY

SEQ ID NO: 259271 - protein, 39 aa, Glycine max
  Clone ID: PAT_MRT3847_76146C.1.pep
VGCLSSGPKCCAIHILSLFSIYVTWTPSSCTGFPSKCYT

SEQ ID NO: 259272 - protein, 68 aa, Glycine max
  Clone ID: PAT_MRT3847_76147C.1.pep
MVDEPVVGREHRSLLCLKYWFVGSLSAAWECFTFVSLCLKMVFISCASPLRWSDTVLCIYIQEMSLLC

SEQ ID NO: 259273 - protein, 130 aa, Glycine max
  Clone ID: PAT_MRT3847_76148C.1.pep
LLLIRRRQLKVEEGVRENVERSRMNQQEATPSWHPSQEKQKFPLRDNLVPENRFPFSASDNYFSSNLSLTSTRADGMATLRNQHMYKGYTSTLLSHSPNLSLVSQFPASSMPLSQQILAQSGRSLSFNIG

SEQ ID NO: 259274 - protein, 58 aa, Glycine max
  Clone ID: PAT_MRT3847_76149C.1.pep
FRGVSGPFPPMLWRKAFLPWYTGEGMAQMEFPKVESTMNDFVLGFHQFQDAPAFGGGF

SEQ ID NO: 259275 - protein, 50 aa, Glycine max
  Clone ID: PAT_MRT3847_7614C.1.pep
PFISRSQIHGPPHVSFHVSAHAVCSVVPHPSSIVTTELSRNRTNERTRGS

SEQ ID NO: 259276 - protein, 319 aa, Glycine max
  Clone ID: PAT_MRT3847_76150C.1.pep
MSNTKSHAGIPILDLSQPLQPCSLSSLYNASKDWGLFHIINHGISKDLCSQIQTLSKHLFNLPSNTKLRLGPLSSLNSYTPLFIASPFFESLRVNGPNFYVSADNSAEILFDKKYSKFSVIIQEYCSKMEDLSKKILKLVLMSIGDGIEKKFYDSEFKKCHGYLRVNNYSAPEVIEDQVEGLGMHTDMSCITILYQDEIGGLQVRSNEGEWIDINPSEGTLVVNIGDMLQAWSNDKLRSSEHRVVLKHHENRFSLSFFWCFEDDKVILAPDEVVGEGNKRKYKPFVCLDYLKFRESNERGRFDKVGFTVRDFASIKAQL

SEQ ID NO: 259277 - protein, 65 aa, Glycine max
  Clone ID: PAT_MRT3847_76151C.1.pep
HAIFFLQNSIKNRYLLTTYIRCNKTHSNEPAISFSLFVSASAHLSLSYILNLCMFSQPFKHFSSF

SEQ ID NO: 259278 - protein, 96 aa, Glycine max
  unsure (1)..(96): unsure at all Xaa locations
  Clone ID: PAT_MRT3847_76152C.1.pep
KRDIYDQHGEDALNEGMGGGGGHDPFDIFXFFFGGGSPFGSGASSQCRKQRLVEDAAHPLQDFVEDLYLATSKNLYLSIIVVCSKCSVNGSNSGAS

SEQ ID NO: 259279 - protein, 135 aa, Glycine max
  Clone ID: PAT_MRT3847_76153C.1.pep
KIHAENNSLYNTPPCYGIYMCGLVFEDLLEQGGLGEVEKKNVKKAEVLYNTIDGSNGFYKCPVEKSVRSLMNVPFTLEKPELEGEFIKEAAKENMVQLKGHRSVGGMRASIYNAMPLAGVQKLVAFMKDFQARHA

SEQ ID NO: 259280 - protein, 361 aa, Glycine max
  Clone ID: PAT_MRT3847_76154C.1.pep
MAAPESPLCYVGVARQSAAFRLMKQMGWEEGEGLGKEKQGIKGHVRVKNKQDTIGIGLEKPNNWAFDTTQFDNILKRLKVQAPQSHDIEEKVETKASVPVDNEEDSVPKTTRPQGRYARRERGKLVSQYSLKDLEGILVKKGDVSGSTDNSDGELDMLKTSEIQKFEDEGSKYPAIPPDWWGYKYGFVSGGFLGAESKKKKSMISGKAERTAFFEEDQENLYNLVQEKSTTGKQGLGIKDRPKKVAGCYFQGKKKSFDDSDEDSADNDSLEQAANDDLIKVEKIVEGKVKLKKLCKQILQQVPGESLKLKQLKVLIDEHSSSILSDFSSRRESVAYLKQKLTGSRKFYIEGKRVRLASKRS

SEQ ID NO: 259281 - protein, 316 aa, Glycine max
  unsure (1)..(316): unsure at all Xaa locations
  Clone ID: PAT_MRT3847_76155C.1.pep
VGGTWRRLETPLCYVGVARPXSLAFRLKKQKGWERGEGLGKEKQGTKDTVRXVKSQHDTIGIGLEKPNNLGPFDTTQFDNIPTRPKVQAPQSHDTEEKVETKPSVPVGNEHSVSKTTRPQGRYTRRERGKLVSQYSLKDLEGILVKKGDISGSTENSNGELDMLNTSEIQNFEDEGSQYPAIPPDWWGYKYGFVSGGFLGAELKKKKSMISGKAERTAFFEEDQENLYNLVQEKSTTGKQGLGIKDRPKKVAGCYFQGKKTSFDDSDEDSADNDSLEQPAXDDLIKVEKIVEGKVKLKKLCXHILQQVPGESLKLK

SEQ ID NO: 259282 - protein, 78 aa, Glycine max
  Clone ID: PAT_MRT3847_76156C.1.pep
VFPTFFFGFFSGIFFFHSFSVFSSKTRRKRAGSSHILSRRPSFEAPPQDSSVRIFQTKGTPGASRRAPPSLQLVLPPP

SEQ ID NO: 259283 - protein, 111 aa, Glycine max
  Clone ID: PAT_MRT3847_76157C.1.pep
STDAPLPLSVFVVRGIYHAVRRMLLAISCKANKAIGLMVRLSAAEYEALNVFCHTYAHDMPRNAASMQSLFMTRSLCYCFTTSHSFDTMTPPRKTPCVSAKSTTTPSDTPK

SEQ ID NO: 259284 - protein, 132 aa, Glycine max
  unsure (1)..(132): unsure at all Xaa locations
  Clone ID: PAT_MRT3847_76158C.1.pep
PALSGPIAYLLSGNDILCGDYATIDGLITKQDMTNMSCVIRRLCGRDETQMRETTXLLMASCSTKAVCTKDVCSAECAITAVFPLTVIXLSLLMTMLIRLSYDKSLRQARPSCMCLQSFKDYGTLCVAGDHN

SEQ ID NO: 259285 - protein, 51 aa, Glycine max
  unsure (1)..(51): unsure at all Xaa locations
  Clone ID: PAT_MRT3847_76159C.1.pep
LQKPALVVKETSGGSHGTGVGKIPSGLTDAGXEISLAAMVEVRDETGIDHE

SEQ ID NO: 259286 - protein, 90 aa, Glycine max
  Clone ID: PAT_MRT3847_7615C.1.pep
KKHFKILQKAHVNFSKFKGCPHLGLKKQILNLLLSPIKIISNWPKKKFYFFFLNRKKIILDRRFFHTFHVKSMGPPRLVFCKTPFFIILK

SEQ ID NO: 259287 - protein, 158 aa, Glycine max
  Clone ID: PAT_MRT3847_76160C.1.pep
LNRNNPQLALSIFYAMRATFHQVGESGPLAERWKWSRPNANVYTLLIQGLAAVLRVSDALRVIRYICEIGVSPGEEVPFGKIVKCPSCRIAVGVAQPQQGIQIVSCAKCRYQYELVSGDIVNIESEEIRIFSCRTQHGHYRMGMGVKILETDEANILV

SEQ ID NO: 259288 - protein, 90 aa, Glycine max
  unsure (1)..(90): unsure at all Xaa locations
  Clone ID: PAT_MRT3847_76161C.1.pep
SLLPIKGKTLLGGLVNKAIEQXNDVTAGSGGGLTEEGEQAFSGPTEDSRVXXASRKAVPEEEERLIFQKAPLSKKLIDIMAXGGLKGLSN

SEQ ID NO: 259289 - protein, 89 aa, Glycine max
  Clone ID: PAT_MRT3847_76162C.1.pep
VRGNTFLRAYVFGNFFKNTIFSQCQHTDAHKYKNEQLIKWSVYSFVHKISDLNFKNVHLHVPIYIWLFVYPFSPIFWRVQVRDDTQCRY

SEQ ID NO: 259290 - protein, 317 aa, Glycine max
  Clone ID: PAT_MRT3847_76163C.1.pep
MSQPTVILATASYDHTIRFWEAKSGRCYRTIQYPDSQVNRLEITPDKRFLAAAGNPHIRLFDVNSNSPQPVMSYDSHTNNVMAVGFQCDGNWMYSGSEDGTVKIWDLRAPGCQREYESRAAVNTVVLHPNQTELISGDQNGNIRVWDLTANSCSCELMVPEVDTAVRSLTVMWDGSLVVAANNHGTCYVWRLLRGTQTMTNFEPLHKLQAHKGYILKCLLSPEFCEPHRYLATASSDHTVKIWNVDGFTLEKTLIGHQRWVWDCVFSVDGAYLITASSDTTARLWSMSTGEDIKVYQGHHKATICCALHDGAEPATS

SEQ ID NO: 259291 - protein, 86 aa, Glycine max
  Clone ID: PAT_MRT3847_76164C.1.pep
TQSSDQESSNKVIRQLHLYFTYNNLLTQPFITTNITQIDYTFISYPPICPFNLIQNYPKPFHPKPQQFYPHTLNSTSQTFKNSTTL

SEQ ID NO: 259292 - protein, 528 aa, Glycine max
  unsure (1)..(528): unsure at all Xaa locations
  Clone ID: PAT_MRT3847_76165C.1.pep
QAPNEEEVSLLLEMFGLCLTGGKEVDNAIVSSLQDLATAFSSYEDEVLVKREELLQFAQGAITGLKINSXMRAARIDAEAFSLKKKLTEITTSQGPVSNVDYKAAEETIAMLEAFKIALAQIKNLICSRLVALLQKKKNLSNGNSHEIHAQKVDKLKVLTESLANSATKAEKRILDNRLQKEEALKVRVTKDGEASEKEKELVSEISEIQXRRXEIEADMKMITSTLADTKARLWNVREERDQFEEANNQIVEHLKIKEDELSKSISSCRVEADVIKTWINFLEDTWVLQWSNAEINDKQVNDELERHEDYFVNLAIQLLTTYQKELEPCINHIKTFVVNLKNLSQRYRLEMTPSADTDESEVLSPRRNLEEEYLTYEAKIITTFSVVDNMKQQFYAQHGKISRKDEERVIELFDAIEKLRTQFESIERPILEIEIPAKAETPPLEKKSDATPSVSVPAQGAAAQGIELSKPETDEQPKSPSVKTDQILDHEAELAKLESEFGKVSKDYSAEEIGDWEFDELERELSK

SEQ ID NO: 259293 - protein, 412 aa, Glycine max
  unsure (1)..(412): unsure at all Xaa locations
  Clone ID: PAT_MRT3847_76166C.1.pep
EGSGCEKTTEGYGCKKTTKGYGCENTTEGYGCEKTTKGYGCEKTTEGYGCEKTTEGYGCEKTTEGEESKKQLLSMDIDEILERAEKVEEKETDGEQGNELLGAFKVANFCNDEDDGSFWSRWIKPDAVFQAEEALVPRSARNIKSYAEVDPSEKSNKRKKKERLPLDRVSKRRKAEYSAPAVPMIEGASVQVRNWSYGNLSKRDALRFSRSVMKYGNESQVDLIVAEVGGAVGAAPPGVQIELFNALIDGCTEAVELGNLDAKGPLLDFFGVPVKANDLLTRVQQLQLLAKRIGRYEDPIAQFRVLSYLKPSNWSKGCGWNQIDDARLLLGIHYHGFGNWEKIRLDERLGLMKKIAPVELQHHETFLPRAPNLKDRANALLEQELALLGVKNANSRVGRKPSKXERENMINL

SEQ ID NO: 259294 - protein, 63 aa, Glycine max
  Clone ID: PAT_MRT3847_76167C.1.pep
TPGHTLPLNLHISVSFPLYYNSHLSLLCTTFQSDIVCVHRVILLMLCICVQLPIPNGQHIFFF

SEQ ID NO: 259295 - protein, 73 aa, Glycine max
  Clone ID: PAT_MRT3847_76168C.1.pep
KAMQCFKGLVLQKALNLVFIGSCFPNVSQFVKMTFAAFILKKRLPFDGRNLFAILFEIFFIIAQLCYRCNDKI

SEQ ID NO: 259296 - protein, 466 aa, Glycine max
  Clone ID: PAT_MRT3847_76169C.1.pep
MMNSRVVRSVSECFIKPLGQAKESNLICHLTPWDIAMMSLHYIQKGLLFKKPATLVDPQDFMENLLEKLKHSLSLTLFHFYPLAGQLVTQKTQDPPSYTIFVDCNNTSGARFIYATLDITISDILSPVDVPPIVHSFFDHHKAVNHDGHTMPLLSIQVTELLDGVFIGCSMNHTIGDGTSYWNFFNTWSEIFFQTQAQGLEYDATVPISRHPIHNRWFPDGCGPLINLPFKHEDEFIDRFESPKLRVRIFHFSAESIAKLKARANSESKSKTSEISSFQSLSAHVWRSVTRARKLPNDEITSCKLAISNRSRLEPPLPHEYFGNAVDVVSTAGFTAGELLEKDLGWAAWKVHVAVANQNDKAVRQKLKEWLKLPVVYQLGVHFDPCTVTMSSSPRFNMYGNEFGMGKAVAVLSGYANKNDGNVTAYQGYEGEGSIDLEICLSPDAVSALESDEEFMEAASVANFLH

SEQ ID NO: 259297 - protein, 68 aa, Glycine max
  Clone ID: PAT_MRT3847_7616C.1.pep
IIVLYSTAPTSSLCSVLFCSSLSLSLLCFHAILSIFNRDLVTCFCYILDSFLPYLKILILCIISHQPP

SEQ ID NO: 259298 - protein, 37 aa, Glycine max
  Clone ID: PAT_MRT3847_76170C.1.pep
VLRIVELDYHKLSVVHELSVAHEQHLAYGNQVLHSAH

SEQ ID NO: 259299 - protein, 84 aa, Glycine max
  unsure (1)..(84): unsure at all Xaa locations
  Clone ID: PAT_MRT3847_76171C.1.pep
LPHLAKWPFKEKEEEERFPHLVNIGKKMVKKCRGIPFPVRTLGSLLFSKFEANEWEYVRNNEVWNFHXXDDILPALKLSYNLLP

SEQ ID NO: 259300 - protein, 60 aa, Glycine max
  Clone ID: PAT_MRT3847_76172C.1.pep
DTEAKGLRDMNITVLSSHYAASHQELLHWELEGDRIVLIPDLSIAVEDRHVNKLPDVLAP

SEQ ID NO: 259301 - protein, 80 aa, Glycine max
  Clone ID: PAT_MRT3847_76173C.1.pep
HAYVNASSICKCIVRRILQWLWSQVQAMAQAYERAMSRSYPRYRERMKTVYGARSTLAKCARIMLAVKAHNIQCVETTHD

SEQ ID NO: 259302 - protein, 47 aa, Glycine max
  Clone ID: PAT_MRT3847_76174C.1.pep
FRENVDAGAEYAVNELLLDPYNWTSSVLAQLNGMIMHLLTPHHQQPL

SEQ ID NO: 259303 - protein, 100 aa, Glycine max
  unsure (1)..(100): unsure at all Xaa locations
  Clone ID: PAT_MRT3847_76175C.1.pep
FAXAEEAXLTAXXTTXVPLXXSIDKXAAGSXCNAXSMXXDVGXXXXRGIRTXNCXIXXQLXXXSLVMHKXXSGNNXXPXXSLLPXXSSSRIQXXXXXXXD

SEQ ID NO: 259304 - protein, 73 aa, Glycine max
  Clone ID: PAT_MRT3847_76176C.1.pep
SSLMADIVLSRIDQNLMCMIKERDSRKLPSLMVGAYRFCAIEESGIQSSNRPFVKMLFQTIIQFLKKKKKDRP

SEQ ID NO: 259305 - protein, 171 aa, Glycine max
  Clone ID: PAT_MRT3847_76177C.1.pep
PSGGRNLPRGFPMGFPGGLGPPSPEIVFFVQICLFPPWVSVLKPGDGAPSFVGPPGPAPWCPEQIFWPSLPPGPLPFSPFPPRPWFPPGLATVLFFSRVLPSACCPRGSIVFFFKGFFFCWGSSFFLFFVFPVLGFLFFAIWVFFLDPFLSPPFFWVIKALGFPLVLFPGF

SEQ ID NO: 259306 - protein, 47 aa, Glycine max
  Clone ID: PAT_MRT3847_76178C.1.pep
NYNSIRSRSSHISLQHRMNGLELVRVKLDSDPLNISYQVGVSGTKKT

SEQ ID NO: 259307 - protein, 528 aa, Glycine max
  Clone ID: PAT_MRT3847_76179C.1.pep
MADSTPLLSQPNPSSSSSPDTQEAPPSNQHHPSLGSTVELCIGEFNWSQFLQSILVSLAWIFDAQQTFISVFTDALPEWHCTERGANACKTATTVCSLPKGSWAWDVPTQASIVSEWGLECANSAITGLPASMFFLGCLIGGFVLASLADSSLGRKNMLFFSCLVMAITSFLVTFSPNVWIYSALKFLCGFARATIGTSALVLASELVGKRWRGQISVIGFFCFTIGFLSLPAMAYINRSSSWRNLYLWTSISTMFYCILVKLFVTESPRWLLVRGKTEEAVETLKCITSITQSNLNLAINNMSHKEETWNVDIFSALKILLQKKWSSRRLSLIMAMGIGIGLVYYGMPLGLQNLSFNLYLSVTFNALSELPSALIVLFFVDKFNRRSATLLLTILSGVFSVMSIMEMKTSSWTNNIQIVFELVSFFSACSSFNVYLIYTTELFPTCVRNSALSMARLAVVLGGTFSPLLVSAARGNKFMCYGVFGLVIGFSGVFGIFLPETKGRALCDTMDEEENKEKNMTCDMFLA

SEQ ID NO: 259308 - protein, 69 aa, Glycine max
  Clone ID: PAT_MRT3847_7617C.1.pep
HYNQFAPSSSISFILIILLLRRLDTLVSGIPQPQASTPLPTTYTAHTTTTTTTILCSTRSHIDTDFHIT

SEQ ID NO: 259309 - protein, 171 aa, Glycine max
  Clone ID: PAT_MRT3847_76180C.1.pep
MAKRTSAMNLAFILILLCAPISMFICMGEWEPTWSTRAAEEAEAVAAIPCSGHGRAYLDGLILKGHEHVHVCECNSCNGGSDCFKFLSDCIANASSGDPYFLEPFWMRHAASSAILVSGWHRMSYSYSDGSYISEVLVKYIQKVHSIVGNAITKGRYFIFGSGSTQLFNAA

SEQ ID NO: 259310 - protein, 212 aa, Glycine max
  Clone ID: PAT_MRT3847_76181C.1.pep
MESHSSDAEAENVRTHSSVSRWSPTKEQIDMLENLYKQGIRTPSTEQIQQITSRLRAYGHIEGKNVFYWFQNHKARQRQKLMKQQTIAYSNRFLRASHPICQNVACAPYCLQRSGFSFYPQQSKVLASGGISSTGPLGMQRMFDGMQSSEHPDCNREVLTLFPLHPTGILKEKTTHQVPSLASTSVVAVDEDGHLGNQPFFNFFTTEPRSRE

SEQ ID NO: 259311 - protein, 73 aa, Glycine max
  Clone ID: PAT_MRT3847_76182C.1.pep
LRTYLILVNTHHKDNLTRHQAFLVVMRVNLRLPFQSPTKVVATKGGSTFNKVSITDLSVPGSTTFGGSLRSLG

SEQ ID NO: 259312 - protein, 61 aa, Glycine max
  Clone ID: PAT_MRT3847_76183C.1.pep
LVLPFGLFLMSMKITLWIRYPTDKPAPGFRECSADAMTQRSLMGLLPVGKRTPCRVTNDQP

SEQ ID NO: 259313 - protein, 480 aa, Glycine max
  Clone ID: PAT_MRT3847_76184C.1.pep
ASFSSDQCVEGVVAVAGEALRIFTIERLGETFNETVIPLRYTPRKFVLQGFSPKRKLLVMIESDQGALTAEEREAARKECFESAQAGENGTESADQMENGGEDEDKDDPLSDEHYGYPKAESDKWASCIRVLDPRTGNTTCLLELQENEAAFSICTINFHDKEYGTLLAVGTAKGLQFLPKRTITAGFIHIYRFVEDGRSLELLHKTQVEGVPLALCQFQGRLLAGIGPVLRLYDLGKKRLLRKCENKLFPNTIVSIHAYRDRIYVGDVQESFHYCKYRRDENQLYIFADDCVPRWLTASYHIDFDTMAGADKFGNIYFVRLPQDVSDEIEEDPTGGRIKWEQGKLNGAPNKVEEIVQFHIGDVVTCLQKASLIPGGGECIVFGTVMGSVGALHAFTSRDDVDFFSHLEMHMRQDHPPLCGRDHMAYRSAYFPVKDVIDGDLCEQYPTLPMDLQRKIADELDRTPGEILKKLEEVRNKII

SEQ ID NO: 259314 - protein, 42 aa, Glycine max
  Clone ID: PAT_MRT3847_76185C.1.pep
PTRKAHFHYDLSGYHFLNNLISHFLKFLQYLSRGSVQFIGNF

SEQ ID NO: 259315 - protein, 67 aa, Glycine max
  Clone ID: PAT_MRT3847_76186C.1.pep
LAGTHSNSTHRISCTNTWYCLRQIRHHHAWTVNVPMDEPVLGFHPQQDRVLIVMTNGTEASGNTWMM

SEQ ID NO: 259316 - protein, 43 aa, Glycine max
  Clone ID: PAT_MRT3847_76187C.1.pep
QFNFKPCLLQKKKKKKKKKKKKKKKKKKKKKKKKKKKKKVRKL

SEQ ID NO: 259317 - protein, 59 aa, Glycine max
  unsure (1)..(59): unsure at all Xaa locations
  Clone ID: PAT_MRT3847_76188C.1.pep
FHEILPGKTFIDXVKSHDTIDNVKASIMXKEVIPQEQQRVIFAGKQMKNGRILADYTSR

SEQ ID NO: 259318 - protein, 34 aa, Glycine max
  Clone ID: PAT_MRT3847_76189C.1.pep
RSNPTLFQSLGFSTYLFLSCADNETQSDTETTKR

SEQ ID NO: 259319 - protein, 65 aa, Glycine max
  Clone ID: PAT_MRT3847_7618C.1.pep
LQRKKGQGYPETVGLSTVQMVRFYLEVAARERITPPFFGLNPNYVEKVFKIQKGKEKQASRAYIL

SEQ ID NO: 259320 - protein, 93 aa, Glycine max
  unsure (1)..(93): unsure at all Xaa locations
  Clone ID: PAT_MRT3847_76190C.1.pep
GLGTCKCQTYDMFPLRXSTGYGXARTPEVKCASWRLAVEAHKIFDFATIPDVCVTAAYVYIHGEQYRSDSITVNQHAYVXARDLEVHHNDTFV

SEQ ID NO: 259321 - protein, 171 aa, Glycine max
  Clone ID: PAT_MRT3847_76191C.1.pep
GCRVTDTVSSTLTKKEIEIEIGIGDRDRRDQNRHLHDVDLDSSVDVLGDSAPPEWALLLIGCLIGLTTGLFVALFNKGVHIIHEWVWAGTPVEGAAWLRIQRLADTWHRILLIPVTGGVIVGMMCGLLEILDQIKQSTSSQTQRFDFRAGIFPTIKAIQAAVTLGTGCSMG

SEQ ID NO: 259322 - protein, 75 aa, Glycine max
  unsure (1)..(75): unsure at all Xaa locations
  Clone ID: PAT_MRT3847_76192C.1.pep
PQEGCHTFRGGFWNYFSMXSTYAKLGCTQGWWFAPLFLPPSSNIAHLAKVKVMKTHGCWEDLHIPSRYIILYTHI

SEQ ID NO: 259323 - protein, 102 aa, Glycine max
  Clone ID: PAT_MRT3847_76193C.1.pep
KRGISRKGVYKWDKMYGGGLGSKGIGNKGYAPPPQLSLFPHPVFFLSHPPASSPQNGIFFFNLFIKNLNFVSFLLLKLLGIFYIPTPPPQNFNKIIFYTLSK

SEQ ID NO: 259324 - protein, 165 aa, Glycine max
  unsure (1)..(165): unsure at all Xaa locations
  Clone ID: PAT_MRT3847_76194C.1.pep
MSESDQRRLLGASEDDVESGGSELALAVVNGSSGNNNNNNKGFRDLLRLSGHRHSLKRIEKEEDRDRDRDRGIDRDRRDQNRHLHDVDLDSSVDVLGDSAPPEWALLLIGCLIGLTTGLFVAXFHKGVHVIHEWVWAGTPVEGAAWLRIQRLADTWHRILLIPVT

SEQ ID NO: 259325 - protein, 89 aa, Glycine max
  Clone ID: PAT_MRT3847_76195C.1.pep
LRRRTVESQSDEPASLSASRSVNVTLHRKMPSTCPTPPSRGPAWRQKIPEPGMTPALVRLKDPYMAVGIPSMLYWKVLPAGNAYPSSIA

SEQ ID NO: 259326 - protein, 82 aa, Glycine max
  Clone ID: PAT_MRT3847_76196C.1.pep
RTLVEKFKIFTTGTQLVCFNNGLTFVLYFSLSYVFPITISSPTFFFFSNLRKVLALTKGYPKRVFFNTRDVLKSGSFLWPRD

SEQ ID NO: 259327 - protein, 453 aa, Glycine max
  Clone ID: PAT_MRT3847_76197C.1.pep
MATWVLSECGLRPLPPVFPRSTRPISCQKPSKSRFLSTNKGVPDLNLQARGLTCCSFRDRKWELGVSAPLKVATNEGEEEERTNGANNGVGEEVSEFDPSAPPPFKLADIRAAIPKHCWVKDPWKSMSYVVRDVIVVFGLAAAAAYLNNWVVWPLYWAAQGTMFWALFVLGHDCGHGSFSNNPKLNSVAGHLLHSSILVPYHGWRISHRTHHQNHGHVENDESWHPLPEKIFKSLDNVTRILRFTLPFPLLAYPIYLWSRSPGKTGSHFNPDSDLFVPSERKDVITSTICWTAMAALLVGLGFVMGPVQLLKLYGIPYAIFVMWLDLVTYLHHHGHEDKLPWYRGEEWSYLRGGLTTIDRDYGWINNIHHDIGTHVIHHLFPQIPHYHLIEATEAAKPVLGQYYREPKKSSPLPIYLIGELLRSMKKDHFVSDSGDIVYYQTDPTLSSSSTSQ

SEQ ID NO: 259328 - protein, 452 aa, Glycine max
  unsure (1)..(452): unsure at all Xaa locations
  Clone ID: PAT_MRT3847_76198C.1.pep
MATWVLSECGLRXLPPVFPRPTRXFSCQKPSKFRFLSINKGVADLNLQPRGFTCYNSRERKWESGVSAPLKVATTEGEEEEGINGANGVVEEVPEFDPSAPPPFKLADIRASIPKHCWVKDPWKSMSYVVRDVIVVFGLAVAAAYLNNWVVWPLYWAAQGTMFWALFVLGHDCGHGSFSNNPKLNSVAGHLLHSSILVPYHGWRISHRTHHQNHGHVENDESWHPLPEKIFKSLDNVTRILRFTLPFPLLAYPIYLWSRSPGKTGSHFNPDSDLFVPSERKDVITSTVCWTAMAALLVGLGFVMGPVQLLKLYGIPYVIFVMWLDLVTYLHHHGHEDKLPWYRGEEWSYLRGGLTTIDRDYGWINNIHHDIGTHVIHHLFPQIPHYHLIEATEAAKPVLGLYYREPKKSSPLPIYLIGELLRSMKKDHFVSNTGDIVYYQTDPTLSSSSTSQ

SEQ ID NO: 259329 - protein, 105 aa, Glycine max
  unsure (1)..(105): unsure at all Xaa locations
  Clone ID: PAT_MRT3847_76199C.1.pep
MPSSDVEYRRMVDGLGRVIEHQAVQRAFSQYGDICESKIXINSREIXRSKGFGFVTFASEQSMKAAIAVMNGQTLSRCNITVTTAQSRSEGVGVGVVGVVYGGGR

SEQ ID NO: 259330 - protein, 75 aa, Glycine max
  unsure (1)..(75): unsure at all Xaa locations
  Clone ID: PAT_MRT3847_7619C.1.pep
VXXXRTXXXNXAXAARAAIXXCRXLKPXTXAXVTWFXEFXNXXLXLCIXXIXGTXNHSXWGXRLREXFXXPHXIR

SEQ ID NO: 259331 - protein, 1069 aa, Glycine max
  Clone ID: PAT_MRT3847_761C.1.pep
MASEQMPRRENNSNRVIEREVHVETHRKESLPDKGRVVIESEKKEKERELASDRARSGNIVKEDKEVEEGRRGKESGGGGGVQHERKFETKVEEKKGFGEKAELEGITRVVVGRECSKEEKQGRTREKVEAEKARSMEKTRDEAKGREQAETKGQTKKGGGEEQGRRREEIGEENKQSSLEEISKCRAEAEEKVKERKERSKQAASNEAAKERNKQANKEATKAKDVTREKGQQGNLKTGNETQDIGQKGYGGAKDTIGRVDNITTPLAKKAQVAGSTTVQYAGEKSAQAKDATVGSMEKTTKDAKGREKAGTKGQTKKGGGEEQGKRREETGEEKQSSLEEISKHRAEAQQKAMSSIEGAKERYERAKQEASKASKERNIQANKRAEEERRKAESGRGVHVDKFEEKKDSVLKAELERRTREVEGREWNKEEKQRSCPRGKVEAEKARPMEETKLEAKGREKAETKEGGGEEKGMRREEIGEENKQSSLEEIFKYRAEAQQKVKERNERAKQAAEAAKERNKQANKGNEEGRRERESGGGVHHEAKFETKGEKKKDLVGRERNKEEKQRSSPRGKVEAEKARPMEETKVEAKGREKDVTKEGGVEEQGRGRKENEQSSLKDISKYRAEAQQNSFNATEAAKERYERANQATSEAAKERNKQANKEATKAKDVTREMDQQGNLKTENETQDNDQKGYGGAKYTIGSVDHITTPFIVEANLKSENQIQDNGQKGYGGAKDTIGSVDHITTPLAEKAKAAGSTTAQYVGEKAAQAKDATVQTGKSAAKVASDLRDKALATGWSAAHYSTEITVEGTKAATNVVKGVAEYAGQKASELAAMSVDTAKGLAAAAAGENAKEYTARKKVEAEMDLEAKREAQNQESKEWPSAKSTTESIQRGQGQQEQHEQGEKWEHGAQRTNKPHESNIVETFEENLGGIGEKREQKPLGSIIGESFQGVQEKGSEVMASIGEKLGSAAHTLVKKPLDKATEGGREVLGAVGETVVEIGENMVKKPAQKVQQHQGEGGGGVLNAIGETIAEIAETTKVIVAGEGEKEIIVKTHEFEYGDLKLD

SEQ ID NO: 259332 - protein, 26 aa, Glycine max
  Clone ID: PAT_MRT3847_76200C.1.pep
IKVLYWSGIIYQASLSHYGSRRRCYV

SEQ ID NO: 259333 - protein, 110 aa, Glycine max
  Clone ID: PAT_MRT3847_76201C.1.pep
PSMIGRELGPTNVGPSYRRAAIVSSPSGLHGGEAPRSAQINRHKRSRIRRWAPCLPRHRVARIRHWSCLGWRFGLSLGLEDALCMCSQPLLVLSYHTMVPKIKYRPSFTA

SEQ ID NO: 259334 - protein, 119 aa, Glycine max
  Clone ID: PAT_MRT3847_76202C.1.pep
ELKHRIVMAPLTRNRATVPTLAPNDMIAEYYEQRASDGGLLITEVSIVLLAELARAGCGRRRPTGDTSDTQATYPSGESGGYPNTPGLYTDEHVREWKKVTDRVHAKGGFIYTQLWALG

SEQ ID NO: 259335 - protein, 111 aa, Glycine max
  Clone ID: PAT_MRT3847_76203C.1.pep
RISSSSIKKKKKKKKKKKKKKKKKKKKKKKKKKKKKKKKNFGRAPKKFFFFPAVVQNSKTKLPKQIPEIRVFLLTPRRKDARPVKNKRRRDAVKFKVQGPKYLNPLLCLCS

SEQ ID NO: 259336 - protein, 42 aa, Glycine max
  Clone ID: PAT_MRT3847_76204C.1.pep
QQNSYAHPKTPVQYIKVTRNFVGILKEHFAGERKNKFLAAFI

SEQ ID NO: 259337 - protein, 44 aa, Glycine max
  Clone ID: PAT_MRT3847_76205C.1.pep
IVRELFLRSGKVLVHKDICHKGRKLLIKCVNMNSKCFIFPYFMY

SEQ ID NO: 259338 - protein, 57 aa, Glycine max
  Clone ID: PAT_MRT3847_76206C.1.pep
KPSWCIGRLLNIVKQILDKCSSNYRRAGIRQRFFPPSRPLKIFFSCECPPLHLQLSH

SEQ ID NO: 259339 - protein, 63 aa, Glycine max
  Clone ID: PAT_MRT3847_76207C.1.pep
VILADACAHTGRRFFPYCSGRITSVAHTPACAKEQALTEGNFALDLKHPCTLDIVTSTKPQYA

SEQ ID NO: 259340 - protein, 53 aa, Glycine max
  Clone ID: PAT_MRT3847_76208C.1.pep
SCKTHITLHAKTETPTPPRDDKSPSSNTIGQKSHLNASFSLEHNCPMHIYIQK

SEQ ID NO: 259341 - protein, 75 aa, Glycine max
  unsure (1)..(75): unsure at all Xaa locations
  Clone ID: PAT_MRT3847_76209C.1.pep
RWYNNKRSCLSVCREYKKSHQCMIVNRVMRMALCRLSDGRIKECMLSIREVXGYTTRMNFGAPPCGEKRKVVEIK

SEQ ID NO: 259342 - protein, 192 aa, Glycine max
  Clone ID: PAT_MRT3847_7620C.1.pep
MQTPKTRNTSSSSSEVPQKVSPRGGRQLRPATLDSTASSLNKTSKDNRSPKLTDRRSPRSPAPERKRPSRISELESQISQLKEDLKVVRNQLGVSESCKKQAQQDAEESKKQVASLSLKLEDSQQQLVKFSATEQARVVELQKTIEEHDKAWQSELRAAQQKLSDNTLALTSAIDEIQQLKVQLELAANCEN

SEQ ID NO: 259343 - protein, 101 aa, Glycine max
  Clone ID: PAT_MRT3847_76210C.1.pep
GDNEISYQARRAHTIRIYSNCCLKPGSDTLNSFAMLYQVCATPPFHYSTYAVFHAFPVPKIRSVRKPLLSTPAPASISVQPDCKTYQDTESEDVHPYLPTP

SEQ ID NO: 259344 - protein, 85 aa, Glycine max
  Clone ID: PAT_MRT3847_76211C.1.pep
KTTLYTLTKLKLTYQNDAHNKFARLFANERYVGRKESHTPHTIHLSLHGDAARECPLIVRLLPTGRKKLREWHIAPDHYGLLRLE

SEQ ID NO: 259345 - protein, 109 aa, Glycine max
  unsure (1)..(109): unsure at all Xaa locations
  Clone ID: PAT_MRT3847_76212C.1.pep
FGACLLFLPVWVFCWXLSWPLRVRFLAVCVGFCLSLXCGWLACGCRGWLSLSSRLLLLLLSLGVLAFALWFFSCCCGGGWCFLXRXVGGVPAIWLLCAPVLSRFVWYXI

SEQ ID NO: 259346 - protein, 77 aa, Glycine max
  Clone ID: PAT_MRT3847_76213C.1.pep
NIFKRYHRFFLNPKYRFCIIYSEEPFLCAQRIVVRIITDASHHICKVPPAHRTNRNYSIISDHNLIRWDLRVLPVTG

SEQ ID NO: 259347 - protein, 103 aa, Glycine max
  Clone ID: PAT_MRT3847_76214C.1.pep
RLQDPADSEFLREIQAELRKKEKRLNELLKRSSIIKKFQKHEEDGRDHLLNFFPQVDMKLVWRVLNMSKISRDQLAWCHNKLSNINFVIRSIHIEPSFLLFPC

SEQ ID NO: 259348 - protein, 227 aa, Glycine max
  Clone ID: PAT_MRT3847_76215C.1.pep
GIARGLVYLHEDSRLRIIHRDLKASNILLDAEMHPKISDFGMARLFEVDQTQGNTSRIVGTFGYMAPEYAMHGQFSVKSDVFSFGVLILEIVSGQKNSWVCKGENAGDLLTFTWQNWRGGTASNIVDPTITDGSRNEIMRCIHIALLCVQENVADRPTMASVVLMLNSYSVTLPLPSLPAFFIDSRSFPAIQSEEYNPMAAGASDESNARSVQESINEASITEPFPR

SEQ ID NO: 259349 - protein, 305 aa, Glycine max
  Clone ID: PAT_MRT3847_76216C.1.pep
MLNFLNFSLLLTLLFLLWKPAISKNGCTDKCGRVRIQFPFYLRNNSKLNHTTTAYSSGFDLLCTDADETVLELPSVPIKLFVKSIDYKLQQIQIYDPQNCLPRELIKLGNSSVAPFKFQSFGGNNVSFLRCNSMSSSCPILQLGYDEGDFIDPEIISCTKVSDVFSVQWQVNNYLGNAVVMEWSKPDCSTCEAQGHKCKYKNGTQGETECFICPTNRISTSSVVLIAAGGIVGMILLLVVVKALLHLYDHYMTKGEDRARMEKFLEDYRAMKPTRFTYADIKRITNGFRESLGEGAHGAVFKGML

SEQ ID NO: 259350 - protein, 60 aa, Glycine max
  Clone ID: PAT_MRT3847_76217C.1.pep
SIIEFLSLSQSFLKFQSYKIFRKFFIFFDRYRRYHVYSLWKPALDLIYNSFFFYILSARI

SEQ ID NO: 259351 - protein, 133 aa, Glycine max
  unsure (1)..(133): unsure at all Xaa locations
  Clone ID: PAT_MRT3847_76218C.1.pep
DEGLEVENFTGSGAIAGAYSRAYKETXTLTNVNGITVGIGAXLSWLGMRRIPRLDQTIIHTGCSQLNRLLGXREVYRYHMQVGGPNMMATHGVLHLTVYDELRSISSILEWLSYISSYVGGALPIVKSLDPPK

SEQ ID NO: 259352 - protein, 510 aa, Glycine max
  unsure (1)..(510): unsure at all Xaa locations
  Clone ID: PAT_MRT3847_76219C.1.pep
MDKGWVSSQSLLPPTPDNTMFPLLGFPVKLSRPTMELHHDNRKLVAEVDFFSHTPPPNIVKKELDQTPLHINTGLQLLTANTRSDQSTVDDGLSSDAEDKRAKTTELAQLQVELQRMNAENKKLKEMLSHVTGNYTALQMHLVTLMQQNQQRTESTENGVAQGKVEDKNVGVGGGKVPRQFLDIGPSGTAEVDDQVSDSSSDERTRSSTPQDNNTEAGTRDGARNNNGNKXRLGREESPDSESQGWGPNKLQKVNPSNPMDQSTAEATMRKARVSVRARXEAPRHIINNNXSIYSSINNISNILLWLKLDINFVVLLIXVQRCADDRTILVTTYEGTHNHPLPPAAMAMASTTTAAASMLLSGSMSSADGIMNPNLLARAILPCSTSMATLSASAPFPTVTLDHHTQPITQLQFQKAWCPHSQVPFLQAQPKNFGSGAAPIAQAQALYNQSKFSGLHVVSGSPRPPLQPSQHPSLADTVSAAASAITSDPNFTAVLAAAISSIIGGAHNS

SEQ ID NO: 259353 - protein, 47 aa, Glycine max
  Clone ID: PAT_MRT3847_7621C.1.pep
NYLFLFLHLLYVYINRYRRCSSTKELDFFFLLLFIYKILTVSVYVRV

SEQ ID NO: 259354 - protein, 201 aa, Glycine max
  unsure (1)..(201): unsure at all Xaa locations
  Clone ID: PAT_MRT3847_76220C.1.pep
LQKVNPSNPMDQSTAEAXMRKARVSVRARSEAPMISDGCQWRKYGQKMAKGNPCPRAYYRCTMAVGCPVRKQVQRCADDRTILVTTYEGTHNHPLPPAAMAMASTTAAAATMLLSGSMSSADGVMNPNLLARAILPCSTSMATLSASAPFPTVTLDLTHNPXPLQFQRPGAPFQVPFLQAQPQNFGSGATPFAQHFIINQN

SEQ ID NO: 259355 - protein, 512 aa, Glycine max
  unsure (1)..(512): unsure at all Xaa locations
  Clone ID: PAT_MRT3847_76221C.1.pep
MDKGWGLTLDTSSSQSLPLFPSNDNKMFPLLGFPVNLSRASKEDDENRKVVGEVDFFSDRNKPTPPPSHDHNVKPNIVKKEIDETPLHINTGLQLLTANTGSDQSTVDDGVSSDAENKRAKTTELAQLQXELQRMNSENKKLKEMLSHVTGNYTALQMHLVTLMQQNQQRTESTENEVARGKRMVPPRQFLDLVPSGTTEIDDQVSNSSLGERTRSTTPPSCNKNDDKDKKETTDRPHSGKLLNHTTDPSTSPEAAMRKARVSVRARSEAPMISDGCQWRKYGQKMAKGNPCPRAYYRCTMAVGCPVRKQVQRCADDRTILVTTYEGTHNHPLPPAAVWMVMASTTAAAATMLLSGSMSSADGVMNPNLLARAILPCSTSMATLSASAPFPTVTLDLTHNPKPXNFKGPGAPFQVPFLQAQPQNFGSGATPIAQALYNQSKFSGLQFQANIPHWLTRSAPAASAITSDPNFTAVLAAAISSIIGGAHNSNNNNNNNSNNNTSRTTISSFSGN

SEQ ID NO: 259356 - protein, 403 aa, Glycine max
  unsure (1)..(403): unsure at all Xaa locations
  Clone ID: PAT_MRT3847_76222C.1.pep
MFPPRCHYTTCLLLFLLVLSDFSISESQSPWAAKKKRMRDKVRNIFYHAYDNYMTHAFPHDELKPISKTFTNSLSELGNLKLEHLPQDYNGSALTLIESLSSLVIMGNYTEFERAVLWLSENLTFDVDARINLFECNIRVLGGLVSAHLLASDSSKKFFQGAYKNQLLALAEDLGKRFLPAFDTPTGLPYAWINLKYGVMENETTETSTSGCGEXSLILEMGALSKMTGDPIYESVALRALRKLWSMQSSLKLFGTTLDVATGQWIEYSSGIGAGVDSFYEYLLKAHILFGKEDFWKMFHSAYVAVQKYFRHGPWYHEADMRTGRATYWQLTSLQAFWPGLQVLIGDVIAANSSHREFFHVWKNYGVLPERYLLDYQMLHPTXKYYPLRPELAESTFYLYQAT

SEQ ID NO: 259357 - protein, 129 aa, Glycine max
  Clone ID: PAT_MRT3847_76223C.1.pep
IKETIGPPPKKTGGNPSNPEPFMAPRTRPIKFKGPKSEPKGGPGGTPTQASQRISFYALSSPTGVTIPPWVPKGKNGAKRGLIPKPLRDPMLGWAPRGTPPPPPPLSPFKKPQKRRRRGGGPRGRGRCT

SEQ ID NO: 259358 - protein, 75 aa, Glycine max
  Clone ID: PAT_MRT3847_76224C.1.pep
LSRDSLSGGFLEHVCTCSKRDTTATFWKVQARLFVSLSLWPLARGSVGRRVMILISWMPFLLSIDYITFSSRLQS

SEQ ID NO: 259359 - protein, 93 aa, Glycine max
  Clone ID: PAT_MRT3847_76225C.1.pep
GNPFFKLFSGFFRPRIRAFSTALRGAPTPTVFFFALAQSLANFAADSATYLKQRDAAGIDRPLMGPLGLRVDQLMGLAGWGVATSIFGVSKPG

SEQ ID NO: 259360 - protein, 48 aa, Glycine max
  Clone ID: PAT_MRT3847_76226C.1.pep
KPKIEFLSLYSISTAHLTFWNAYKLNKKWIILIFFHSCFLLHFISHSH

SEQ ID NO: 259361 - protein, 62 aa, Glycine max
  unsure (1)..(62): unsure at all Xaa locations
  Clone ID: PAT_MRT3847_76227C.1.pep
SLFLXAALXSWLWXPCGXLAFXXLFGVVSWGXLEKTSPLLRPXRPRSRRRAHKSKQKFRTGP

SEQ ID NO: 259362 - protein, 244 aa, Glycine max
  Clone ID: PAT_MRT3847_76228C.1.pep
MSPRSPHESVRPREAQTKGSAIANTRKREREQLHQQQIERMSIFEYNGSAVVAMVGKNCFAIASDRRLGVQLQTIATDFQRISKIHDKLFIALSGLATDAQTLYQRLVFRHKLYQLREERDMKPETFASLVSALLYEKRFGPYFCQPVIAGLGDEDKPFICTMDCLGAKELAKDFVVSGTASESLYGACEAMFKPDMEPEELFETISQALLSSVDRDCLSGWGGHVYVVTPTEVKERILKGRMD

SEQ ID NO: 259363 - protein, 108 aa, Glycine max
  Clone ID: PAT_MRT3847_76229C.1.pep
PRDEQEKGDNACSKQCLMKQKNISNENVAGKLLRPLINNLGPELNGFSMAPNFPLSVKRGSLNRGRTFQVFFRQGDDQNTPPVDEHVQTMGFTPPIPHRDEKDTHPVF

SEQ ID NO: 259364 - protein, 125 aa, Glycine max
  unsure (1)..(125): unsure at all Xaa locations
  Clone ID: PAT_MRT3847_7622C.1.pep
HESLKGQGGVVDKLRASFENKYAKMMNLTQRVVGDPKLLTDGKWPEGXIPPAPIINAWEICVVXIPLMAHEEILSSSASEFRTAMTSKNGEPYATELDVGAIEIIIDRSASPDCYIXGAMLLFDS

SEQ ID NO: 259365 - protein, 181 aa, Glycine max
  Clone ID: PAT_MRT3847_76230C.1.pep
INNKLKGCRSSSTTDFQRISKIHDKLFIALSGLATDAQTLYQRLVFRHKLYQLREERDMKPETFASLVSALLYEKRFGPYFCQPVIAGLGDEDKPFICTMDCLGAKELAKDFVGSGTASESLYGACEAMFKPDMEPEELFETISQALLSSVDRDCLSGWGGHVYVVTPNEVKERILKGRMG

SEQ ID NO: 259366 - protein, 204 aa, Glycine max
  Clone ID: PAT_MRT3847_76231C.1.pep
MSIFEYNGSAVVAMVGKNCFAIASDRRLGVQLQTIATDFQRISKIHDKLFIALSGLATDAQTLYQRLVFRHKLYQLREERDMKPETFASLVSALLYEKRFGPYFCQPVIAGLGDEDKPFICTMDAIGAKELAKDFVVAGTASESLYGACESMFKPDMEPEELFETISQALLSSVDRDCLSGWGGHVYVVTPTEVKERILKGRMD

SEQ ID NO: 259367 - protein, 48 aa, Glycine max
  Clone ID: PAT_MRT3847_76232C.1.pep
HIKSKRDPREVTKPAYRDELPKIQGPGKVGPKPVGLRDSEPTIWGKDG

SEQ ID NO: 259368 - protein, 61 aa, Glycine max
  unsure (1)..(61): unsure at all Xaa locations
  Clone ID: PAT_MRT3847_76233C.1.pep
YPLFSSISHYLKIDDVCCQSIIIIFEPLAPLPGVCCVLPWDCLKRVGPAPXIPSHFYHYXT

SEQ ID NO: 259369 - protein, 52 aa, Glycine max
  Clone ID: PAT_MRT3847_76234C.1.pep
LHPLLNNKMVNTLYFVELTGVSVGGEIVTVPAETFDVDQSGAGGVIVDSGTA

SEQ ID NO: 259370 - protein, 169 aa, Glycine max
  Clone ID: PAT_MRT3847_76235C.1.pep
LQREPRCRGGENCKLRTMLDQITKNYNQLQLFIALQKQKQCQKMETNLNGMMFGQHLLDPRGPFTKLDAQVAPFADDKSGQRGHPETDPVEDVLEQSTSQSWGSSKSPKFEESNSSELPLKKTRVSVRARSEAPLISDGCQWRKYGQKIAKGNPGPRAYYRCTMAVGCP

SEQ ID NO: 259371 - protein, 91 aa, Glycine max
  unsure (1)..(91): unsure at all Xaa locations
  Clone ID: PAT_MRT3847_76236C.1.pep
RGDPASAETSGIRRGGGGGETANIQPKRGSGRGTENQKRCPRAKAVSVSQKKKSSRDVHEARGAXXGGGCXXXSIKCDFTTGGRLSRRRLT

SEQ ID NO: 259372 - protein, 78 aa, Glycine max
  Clone ID: PAT_MRT3847_76237C.1.pep
SCVCCCFFHQQGIVVLLHGAPWFYFRYASQHSFSMCPLFLTGPLFSLASSVSSRKKKKKKKKKRPLRGLRLRGRAMTS

SEQ ID NO: 259373 - protein, 89 aa, Glycine max
  Clone ID: PAT_MRT3847_76238C.1.pep
MELGSHTTFTQYSHPKREETRLPCDLSDPSYLKCAARSAPYPESVTSQPICVIEPATARGGASCGPPAGVDLLQCAARAIICLPFAARA

SEQ ID NO: 259374 - protein, 61 aa, Glycine max
  unsure (1)..(61): unsure at all Xaa locations
  Clone ID: PAT_MRT3847_76239C.1.pep
STRDSIFSSQNLHFHTKFLIQTPRALLYRRPVKHSESXPLTIHLSIYTYRFQKFLTPSFHF

SEQ ID NO: 259375 - protein, 40 aa, Glycine max
  Clone ID: PAT_MRT3847_7623C.1.pep
CIVTKVTKYALVRQNISPYYSLFSQKDKKLEPAFLVCCVA

SEQ ID NO: 259376 - protein, 54 aa, Glycine max
  Clone ID: PAT_MRT3847_76240C.1.pep
VRWQPCYFKQAFFYGYKSFLGFFLLAPPLQRFCILKLLLGCVVVFWGLINNNSY

SEQ ID NO: 259377 - protein, 145 aa, Glycine max
  Clone ID: PAT_MRT3847_76241C.1.pep
QYPPHVTPRDEESSSLVTIMEHVLEQDLPWSFMYTGLSQFQDPNLALSKGDDDLAGMFDGAGFEEDIDFLFSTQPGDHETESDVNNMSAVLDSVECGDTNGAGGRSMVYHHVDNNNKQKKMLSFASSSSPSSTTTTVSCDYALDL

SEQ ID NO: 259378 - protein, 134 aa, Glycine max
  Clone ID: PAT_MRT3847_76242C.1.pep
MDLLEIIAQKRKQIEDIAIEHGSGAKMIRHSDLFKKEKDAYLERQKQLGKEQHLSVKGLNTEELLDAKFSLTGSDSMPRPEVVRRLRARGQPIRLFGESDAMALKRLRRLEIEKTEHNEGWEDDFHAALSQGGE

SEQ ID NO: 259379 - protein, 64 aa, Glycine max
  Clone ID: PAT_MRT3847_76243C.1.pep
ACRCRIKFRGGDDDAHIGGAALFFFFLMTGGQINVAQMQTLPTPYKKPEPGAYRALLFQIRNSH

SEQ ID NO: 259380 - protein, 58 aa, Glycine max
  Clone ID: PAT_MRT3847_76244C.1.pep
RLREDDRRGMMDKNRRRSKGSSWVYGPKGLHSILVAPYTKMLVVEYHSPERILFLSYG

SEQ ID NO: 259381 - protein, 114 aa, Glycine max
  unsure (1)..(114): unsure at all Xaa locations
  Clone ID: PAT_MRT3847_76245C.1.pep
ARSHRVSFLFIALGNLADDTIHLEAFNNKLVQFGEIQEKVVSTFXHEVFLTAGSTHVRSAXTTLWADGCPYLYAMVHDISLDTIPCDIVNGVKLVTINNMXAYGLNAEISGYRF

SEQ ID NO: 259382 - protein, 91 aa, Glycine max
  Clone ID: PAT_MRT3847_76246C.1.pep
PPPFWKGPMGGFGFSKFVVGPGGFSKKRGGFLGKGGPPLFGGGVFFPPVGKVGVVCVFTPLFFGGGARLGFLEGKRLPGGLPFYKPVPVPG

SEQ ID NO: 259383 - protein, 108 aa, Glycine max
  unsure (1)..(108): unsure at all Xaa locations
  Clone ID: PAT_MRT3847_76247C.1.pep
NYFILLAHCPTYPFNIHIFVKTLTENTITLYEETSDTIYNVXVNIQHKEXISPHQQLLIFTQKHLKDSRTLSYYNIHNESTLHLALLLRRGMHIFVNTLTFKTITLYV

SEQ ID NO: 259384 - protein, 58 aa, Glycine max
  Clone ID: PAT_MRT3847_76248C.1.pep
LAPLRSLTLNHPCCYPDLSEYPCTDNLYHAGGQGLILNLNKVSLLVGHAPFGRGQCLR

SEQ ID NO: 259385 - protein, 86 aa, Glycine max
  Clone ID: PAT_MRT3847_76249C.1.pep
LFYCSKASQSRGSLICRDEFTKVNLFLLVGPACSAGELFTLKQLLVNYYLEKKGIFSKIIHIEAEPSACGFGCNIYRLRSFTDVLA

SEQ ID NO: 259386 - protein, 92 aa, Glycine max
  Clone ID: PAT_MRT3847_7624C.1.pep
RRPLLLGSVPLLVFLRWFVSASFLKGSCFVAAPTPECSSHEGCLWPPGLYFSFLGVVPPLGVLFRTSLLFAGWPSGLFRNQILFLFFSWFGG

SEQ ID NO: 259387 - protein, 90 aa, Glycine max
  unsure (1)..(90): unsure at all Xaa locations
  Clone ID: PAT_MRT3847_76250C.1.pep
TFXIAKKHGKRKKGKEIFKEIKYRGFSKSKRKNTINLKVDYSFLKMKLECPMMEKKNLKKTKKGFLFMNSIMVESINTTIFKAMLEHNWS

SEQ ID NO: 259388 - protein, 75 aa, Glycine max
  Clone ID: PAT_MRT3847_76251C.1.pep
CVNNRYRMEWVSENEDKREKRQRSGSVLVTHTPPTLASLTGLHLWTPCTTLGFLQSVFRSTLTQCVPYGARGTPS

SEQ ID NO: 259389 - protein, 48 aa, Glycine max
  Clone ID: PAT_MRT3847_76252C.1.pep
SSVRIGIIVYIKEYDKVSFDEVGKIIVVIVKLFKRLYGKKGFLENEVF

SEQ ID NO: 259390 - protein, 95 aa, Glycine max
  Clone ID: PAT_MRT3847_76253C.1.pep
PPRVLGRPPRGPTPGFPPLGYFDGAAVLASWVCRQSFRVFASPPGAFLPVLGFVLVSYFDPLAASAFRLWAIWCFFLFWNNENGFSNRKKEKNST

SEQ ID NO: 259391 - protein, 79 aa, Glycine max
  Clone ID: PAT_MRT3847_76254C.1.pep
GRLWTQMPSSAAIRPSRYEEYRSSMVIGQLDPCYGMLYARNISMEPLDAPDAQSRVDTFQPVHRWGSYYTLVMLFLNRQ

SEQ ID NO: 259392 - protein, 55 aa, Glycine max
  Clone ID: PAT_MRT3847_76255C.1.pep
ARYAERLSPSVGGLFNATGRVPFPIQNGPVIARQIRSVIFLIRPPRQNGICFQVI

SEQ ID NO: 259393 - protein, 54 aa, Glycine max
  Clone ID: PAT_MRT3847_76256C.1.pep
IQKFFMFSNKSYTAETHGLTYLRYRREWQWYTPRVWLHLRYLPLIDIWGGGGSF

SEQ ID NO: 259394 - protein, 384 aa, Glycine max
  Clone ID: PAT_MRT3847_76257C.1.pep
TPNPFLIKHVSALSSIEVFKDVGPSVVMASPGGLQSGLSRQLFDKWCSDKKNSCVLPGYVVEGTLAKTIINEPKEVTLMNGLTAPLNMQVHYISFSAHADSAQTSAFLEELNPPNIILVHGEANEMGRLKQKLISQFADRNTKILTPKNCQSVEMYFNSQKMAKTIGKLAEKTPEVGETVSGLLVKKGFTYQIMAADDLHVFSQLSTANITQRITIPYSGAFNVIQHRLKQIYESVAQSVDEESGVPTLQVHECVTVKHESEKHVSLHWASDPMSDMVSDSIVALVLNINRDVPKIVNESDAIKIEEENEKKAEKVMQALLVSLFGDVKVGENGKLIINIDGNVAELNKESGEVESENEGLKERVRTAFRRIQSSVKPIPVSAP

SEQ ID NO: 259395 - protein, 69 aa, Glycine max
  Clone ID: PAT_MRT3847_76258C.1.pep
IALHQNSWHGTIPNELTNCTELRALYLRGNYFQGGIPSNIGNLSYLNILDLSSNSLKGAIPSSIGRLPF

SEQ ID NO: 259396 - protein, 159 aa, Glycine max
  Clone ID: PAT_MRT3847_76259C.1.pep
TRPLKRIYESVEQSVDEESGVPELQVHECVTVKHEAEKHISLHWTSDPISDMVSDSIVALILNINRDVPKIMAESDVIKIEEENKKKAEKVMHALLVSLFGDVKAGENGKLIINIDGNVAVLNKESGEVESENEGLKERVRAAFQRIQSSVKPIPLSAP

SEQ ID NO: 259397 - protein, 302 aa, Glycine max
  Clone ID: PAT_MRT3847_7625C.1.pep
MGRAPCCDKANVKRGPWSPEEDATLKNYVETHGTGGNWIALPKKAGLRRCGKSCRLRWLNYLRPDIKHGGFTEEEDNIICTLYAEMGSRWSAIASKLPGRTDNDVKNYWNTKLKKKIMAGKVTLKTLTDNDTLPSISTPSLTNNQNVKTSQNSPFPSSQNQNSPPLDANNTFSISEKSIISFDQTHHGLYSPQVMDVVSQIGANSRIPNYNNNNNPVVSLSQEGSSSISDSSSIAMNNKNVSQPEQHANDDYESMEMLMDFGFGFPYDFANGPNCHYERVGELAPSSYPEWVDFSYADIKPH

SEQ ID NO: 259398 - protein, 219 aa, Glycine max
  Clone ID: PAT_MRT3847_76260C.1.pep
MGSLLFLLLVIVLPLCYCVDAACSNGNCKVNDECSSNGDCGAGLYCFSCPLGYLGSRCVRSSITDQFKLTNNSLPFNKYAFLTTHNAFAIDGEPSHTGVPRATITNQADSVTEQLKNGVRALMLDTYDFRGDVWLCHSFQGQCYDFTAFEPAIDTLKEIEAFLSANPAEIVTLILEDYVKTPKGLTKVFAKAGLMKFWFPVTRMPKRGGDWPLVSDMIA

SEQ ID NO: 259399 - protein, 74 aa, Glycine max
  Clone ID: PAT_MRT3847_76261C.1.pep
TSRSVCTPIRTKFSLSGMEKAPRIDPLYNPNSSSLGLFSRKKSVIEAYPFQPRDQPIKQTKSKRVCGPPVFDFL

SEQ ID NO: 259400 - protein, 116 aa, Glycine max
  Clone ID: PAT_MRT3847_76262C.1.pep
PQARGSQDQCFYPGPSVPQYNIFEPGPTVPENNIFDPGPNFTRFEAFEPGPSVPENNVFESSPSVPQYNVLELKPSVPKTDFFDPGPNITRYEALASRANPKSDFDPKPRAPQYSA

SEQ ID NO: 259401 - protein, 119 aa, Glycine max
  Clone ID: PAT_MRT3847_76263C.1.pep
MASRSYANLFDLTSGDFLDFPCPPRALPRGMTVPGIISHLDGDGCNDGDSDGSSSGGRERKIIGANMVPAQAKRDIETAKWVFRWDEDSILLLLKDGFSADTQVIYGGSLKGEGDALRA

SEQ ID NO: 259402 - protein, 82 aa, Glycine max
  Clone ID: PAT_MRT3847_76264C.1.pep
KGCLPGFIDLVRSADIEAARLGLQFIELVLRGMPNGKGPKLVEQEDGIEAMERFQFHENEDLRTMANTLVDKYFGEDYGLDE

SEQ ID NO: 259403 - protein, 190 aa, Glycine max
  Clone ID: PAT_MRT3847_76265C.1.pep
MKDTPTDCVVPITPEAVIENGDLQSQSPLTLSVVRKQLKRACIDCDSDRISVDNNNDNGSPRTPKDGVFDPFAPGPDNMALAPNSNKYLDEYRTTVARRLDFHPSFDVVAQAVTDTLSDEEMVESVYENLLQVIVSKQAEGVLAQMSDDCETPPSVLHFSGIADTCPGAPIKPAAKPRNIDLGLCKKLEF

SEQ ID NO: 259404 - protein, 113 aa, Glycine max
  Clone ID: PAT_MRT3847_76266C.1.pep
IFINPNKYTRPSISMCWSTHTQFELELDGHGMVPIRIRERERIHNIRLKRKKLEDIPEETELPIDTNPAELEEASLHLETDLEILSRAMDMGLWALCLGFGYILSRAHFRPLS

SEQ ID NO: 259405 - protein, 71 aa, Glycine max
  unsure (1)..(71): unsure at all Xaa locations
  Clone ID: PAT_MRT3847_76267C.1.pep
FEEIHVVNEQYKFAPVQHSLRGAXWSLRDDTTAEEALAEQQRIFAEALERMIGRAIRTTELEVEASLSEIS

SEQ ID NO: 259406 - protein, 106 aa, Glycine max
  unsure (1)..(106): unsure at all Xaa locations
  Clone ID: PAT_MRT3847_76268C.1.pep
VFLTTGLSTEHFHAGEWTKSDPHSWQLIFPIQVSGHNNGFVMRSFEWANQTXWHLSYIIFNPKQFTVFNILVGTSQDFXIAGQTHMTDFSVPKATARSSENAESSA

SEQ ID NO: 259407 - protein, 196 aa, Glycine max
  Clone ID: PAT_MRT3847_76269C.1.pep
MSSNLTIEQRLEQLQKAKERAQPQPPKGAKIQRVAHHLRDRKHFTKHYEPKLMSLGPIHHGAEKLQLGEQCKQRWAATYIESTGKTPQTLHKRVVDDFENQKKLFDDDLLLASTQQYQKQGFTTMEEKIQWMLFVDACALLQILEHANLHAPEKMKIKVDQLVLVMGDVLLLENQLPFSLLKLLWKNDESELMKTM

SEQ ID NO: 259408 - protein, 105 aa, Glycine max
  unsure (1)..(105): unsure at all Xaa locations
  Clone ID: PAT_MRT3847_7626C.1.pep
SSSVTDFNPPRKIKPLRFANLCLLQTIQLFSSVSVSIFVQKSKNFPHNSSLNVPLLPESGHAKDEEKVTDSYPSTENTASFFHTCFNGLNAISGVGILSCXYTLA

SEQ ID NO: 259409 - protein, 82 aa, Glycine max
  Clone ID: PAT_MRT3847_76270C.1.pep
RRGGGGVTMFTGNLLGYAAFKALFNPSPPMKAVGGILGVVGPMFVETFLFFIRGSKAGATKPKKSRQKGGSSFSTSGVKKNP

SEQ ID NO: 259410 - protein, 45 aa, Glycine max
  Clone ID: PAT_MRT3847_76271C.1.pep
EFWPDIIRTISFLLEVPFIKTFYTLSFLSIFNQNSELVHFVYLNQ

SEQ ID NO: 259411 - protein, 62 aa, Glycine max
  Clone ID: PAT_MRT3847_76272C.1.pep
FLTTPPTHTFFSLSLNWGLSSTECSSIVISGVQIEILKVKCRPFTSYSFLGIYDGTRCKQSL

SEQ ID NO: 259412 - protein, 99 aa, Glycine max
  unsure (1)..(99): unsure at all Xaa locations
  Clone ID: PAT_MRT3847_76273C.1.pep
ESVQTXAKRRGGAVVLNKGCGGSXELRQGXGEPALPRTEIVRQLWAYIMKNNLXDPGNKRKIMWVDALXLVLETDCADLFMMXELLAKHIIRLGPTKGL

SEQ ID NO: 259413 - protein, 73 aa, Glycine max
  Clone ID: PAT_MRT3847_76274C.1.pep
SNFPCLSFSFLFLLFFFFRWGLTLSPRLECSGSISAHCNLHLLGSSDYPASASRVGGTTSARHHTWLIFCIFS

SEQ ID NO: 259414 - protein, 47 aa, Glycine max
  Clone ID: PAT_MRT3847_76275C.1.pep
HAFEHASVALFKHPPSLKARTKLGSPTLSIMTFSAIHRLHSINFHLS

SEQ ID NO: 259415 - protein, 59 aa, Glycine max
  Clone ID: PAT_MRT3847_76276C.1.pep
NRDHSLAYLKSCLRKQALRYFKNFSISSDVFVYDCLTDRRSLSVLDTDGGNHFLFHTIY

SEQ ID NO: 259416 - protein, 97 aa, Glycine max
  Clone ID: PAT_MRT3847_76277C.1.pep
MRSFFPAESCKEAHPNALNPQSWLHIERGKLPKLSSHPSSASIESLIKVPQPAILPFFKPVDYVEVLTRIHEELESCPPQERSNFVLLQYQVFRGLG

SEQ ID NO: 259417 - protein, 102 aa, Glycine max
  unsure (1)..(102): unsure at all Xaa locations
  Clone ID: PAT_MRT3847_76278C.1.pep
MPLLLLVNINFIYRLLIFEPGYIQESYLYYIRSQIPVKCPVSEIIKSRRVQGRECYEVSWEGMDGLETSIVPADLIAXSCRLLAAVEKILEFEERKAQRKAV

SEQ ID NO: 259418 - protein, 160 aa, Glycine max
  unsure (1)..(160): unsure at all Xaa locations
  Clone ID: PAT_MRT3847_76279C.1.pep
MQKQEELHAVCKDYMQIIKGKRTKRQRLPSPLRLTMSTTCSSLGRSSTDNSVGFDIPTTSNESRNEEEDMANCLILLAQGXHNNTPKPSRTNKGGLYLYXCKTCNRCFPSFQALGGHRASHKKYYSTSAEEKQGVATTFVNYEVDNNNNNHNHDDYCDPT

SEQ ID NO: 259419 - protein, 166 aa, Glycine max
  unsure (1)..(166): unsure at all Xaa locations
  Clone ID: PAT_MRT3847_7627C.1.pep
VSPLWLLRSRGGXGWGPFLALSXALPSPFPSSGPRLAXPVXXCCGAPGVXPCXPLWARXLRXXLVRFXXPWXXXXPGCXPGAVGVPLXCGFVGXXXAVGVXPPLXGEGXSPFXXPSVVAXAGXALCAFVSLLSPXSLLLCSXCXFFXLLLXPAAGRPGXPXRXRWR

SEQ ID NO: 259420 - protein, 98 aa, Glycine max
  unsure (1)..(98): unsure at all Xaa locations
  Clone ID: PAT_MRT3847_76280C.1.pep
TPDAIPSTSTWHKTXTDVPGHIYPNALYFKSMGKGHTCVNGQHIEGYWTXLVNPKSVCEQVCTNCGAYNPDKCSTNCGTXSLTLYHVPQSWLKATNIL

SEQ ID NO: 259421 - protein, 83 aa, Glycine max
  Clone ID: PAT_MRT3847_76281C.1.pep
PTLFGVCVCCCPLMGVGGFSPFSDFAPAESLSFMSSLAFLGSKEHKPIPQKAIPLRSSRSRSAPDLELLIALHLLQREKSFKK

SEQ ID NO: 259422 - protein, 76 aa, Glycine max
  unsure (1)..(76): unsure at all Xaa locations
  Clone ID: PAT_MRT3847_76282C.1.pep
QAFRQPPQPGGSHQSVACEKQLRFVHFAEPSHWRRSVGQSRLRICDRGGNARRGYASCTXDLRCAPPRSDVQRHRP

SEQ ID NO: 259423 - protein, 108 aa, Glycine max
  Clone ID: PAT_MRT3847_76283C.1.pep
GPPLQLAFELYNQDYAQLLLLPCHAHVLLARPLSGHLTHAYATIVITIGPLIIGANKTATWGKHLDNNTTIQRNKIYLGVFVLSFMSHSHYLLFFAFSSTLQFFIVPN

SEQ ID NO: 259424 - protein, 103 aa, Glycine max
  unsure (1)..(103): unsure at all Xaa locations
  Clone ID: PAT_MRT3847_76284C.1.pep
ARDRLIDLKPGEKGXDCPTGQRLDSGTAHGLEYLHEHCHAKNIHRDLQAAHILLDDESEADLRDFGLAKLDDARMTHVTTQDRGTLGHIAPEYLRTGKYSEPT

SEQ ID NO: 259425 - protein, 50 aa, Glycine max
  Clone ID: PAT_MRT3847_76285C.1.pep
VFNCYLSLRRYSYILSILLSAVLIIYIINFSPIACNRVQCHLFVFGLFDW

SEQ ID NO: 259426 - protein, 71 aa, Glycine max
  unsure (1)..(71): unsure at all Xaa locations
  Clone ID: PAT_MRT3847_76286C.1.pep
TDITISLVLDMEIMMYNNTETATSRTDXDLWTMYPHWLSQHRTEYNAPREKENRFQICKDNLVRTGNHNYY

SEQ ID NO: 259427 - protein, 118 aa, Glycine max
  unsure (1)..(118): unsure at all Xaa locations
  Clone ID: PAT_MRT3847_76287C.1.pep
QGYDTIVGXRGIQLSGGQKQRVAIARAIVKNPKILLLDEATSALDVESERVVQDALDQVMVDRTTIVVAHRLSTIKDADSIAVVQNGVIAEQGKHDTLLNKGGIYASLVGLHTNLVSS

SEQ ID NO: 259428 - protein, 48 aa, Glycine max
  Clone ID: PAT_MRT3847_76288C.1.pep
AHAFEKYLLMKGGFLMLKKGFHMFLISFIERALLTEIFLHYLEDLHLG

SEQ ID NO: 259429 - protein, 78 aa, Glycine max
  Clone ID: PAT_MRT3847_76289C.1.pep
SKGPYAVWLRLMSSKLSVWELCFPVGLLSCDTIEEFHGELRISKPSFIYHGLLLQDPDFINGFMLHLPVIAKQHAKNE

SEQ ID NO: 259430 - protein, 50 aa, Glycine max
  Clone ID: PAT_MRT3847_7628C.1.pep
KACIFTSRRALLSLSSCFHLGLTESESPPQALASQKLSDSFFLSRGFGKN

SEQ ID NO: 259431 - protein, 222 aa, Glycine max
  unsure (1)..(222): unsure at all Xaa locations
  Clone ID: PAT_MRT3847_76290C.1.pep
MLQVAIVQLAALQVFVIFLSGGADYIPPSRLDGFVYQMGXRFGXTVLIEAFYDPVCPXYSRDSWPPLKQALHHYSSRXYHDNAFVATRALHIVNTLNASATFPLLEWFFKHQEKFYGAQTRNLSRASIVDEIVKSATEAAGSSYYNAIKHGFNDTKTDYQTRVSFKYAASRGVYGTPSFYVNGFLLPDTGATADYKTWRKVIDPLVGVKKSIQNEESLRFFL

SEQ ID NO: 259432 - protein, 234 aa, Glycine max
  Clone ID: PAT_MRT3847_76291C.1.pep
MKMLRTTILQFAALQVLFILLGVGADYIPPSRFDGFVYGKGNLNLLDTVLIEAFYDPVCPDSRDSWPPLKQALHHYASRVSLLLHLLPLPYHDNAFVTSRALHIVNNLNASATFPLLEWFFRYQENFYGAQTRNLSRASIIEEVVKSATQVVGSSYYKTIKNGFNDTKTDIQTRVSFKYAASRGVYGTPSFYVNGFLLPDTGATADYKTWRKVIDPLVGVKKSIQNEESLRFFL

SEQ ID NO: 259433 - protein, 207 aa, Glycine max
  Clone ID: PAT_MRT3847_76292C.1.pep
MSNQKKRNFQIEAFKHRVLMDPKYADKTWEILKHAIHEIYNHNASGLSVEELYRNAYNMVLHKFGEKLYSGLVATMTGHLKDIAQSVEAAQGGSFLEELNRKWNDHNKALQMIRDILMYMDRTYSPSTQKTPVHELGLNLWKENVIYSSQIRTRLLNTLLELVHSERTGEVIDRSIMRNITKMLMDLGPSVYGQEFETHFLQVSAEF

SEQ ID NO: 259434 - protein, 53 aa, Glycine max
  Clone ID: PAT_MRT3847_76293C.1.pep
CGMMSEEQIIRHKALFIFHLCFIVGLYLQGTCLQRAIQSGAIFEHHKMHMEKL

SEQ ID NO: 259435 - protein, 125 aa, Glycine max
  Clone ID: PAT_MRT3847_76294C.1.pep
PPLFFSLSPFFFSPPPGTGLFFNFVMEFFPLSLAPVFKPFPALGPVSPFLFLSPASYLFSRGLAFFPPPLGVFPWGVVPPNFLGSPLSPPVFFFLFGGAQFLVPGVPRFFFFGPPYCICKNNLFI

SEQ ID NO: 259436 - protein, 61 aa, Glycine max
  Clone ID: PAT_MRT3847_76295C.1.pep
FFPLMIQEISMKRKKKVNVIRQCLPQYYSIDLLSGILITFYMYLHIKINNLTGGWFPLFPL

SEQ ID NO: 259437 - protein, 75 aa, Glycine max
  unsure (1)..(75): unsure at all Xaa locations
  Clone ID: PAT_MRT3847_76296C.1.pep
HIVRVFFSILTNTYHYVXDHFTDQVISWCECFNXFFLFKLAYYAKDLFSYYFKHNNFFSFIRQLNTYGFLKIVPY

SEQ ID NO: 259438 - protein, 181 aa, Glycine max
  Clone ID: PAT_MRT3847_76297C.1.pep
MANQFSVISPSYCAPYALNLQINTEKGVTYDINGNPVFYVKDALFTLHDRRVLYDNQGNSIVTLYKKNMTLHGRCQVFKGKSNDSSELLFSVKRSSMIQYSVMKLDVFLANNRNENVCDFRVNFCRDKSSCIVYASESPTIVATINGGLNVLVYPYVDYAFIVALLMIVNEMKDYYDELMD

SEQ ID NO: 259439 - protein, 220 aa, Glycine max
  unsure (1)..(220): unsure at all Xaa locations
  Clone ID: PAT_MRT3847_76298C.1.pep
ARNEAEISPSTLYAIACVMENVPFINGSPQNTFVPGLIDLAIARNTLIGGDDFKSGQTKMKSVLVDFLVGAGIKPTSIVSYNHLGNNDGMNLSAPQTFRSKEISKSNVVDDMVNNNAILYKPDEHPHHIIIIKYIPYLRNSDTAINKYTSXIFIAKKITIIYHNTYENSLLPTPIILNLLLLTQLITRIXFKSQYEXKCHSFHPGTTILHYLTKSALVPP

SEQ ID NO: 259440 - protein, 53 aa, Glycine max
  Clone ID: PAT_MRT3847_76299C.1.pep
EDINTKRNPVVGDYVEVRITRSTRASLFGEALAITKLTSFYNNLDKEAVAFSM

SEQ ID NO: 259441 - protein, 83 aa, Glycine max
  unsure (1)..(83): unsure at all Xaa locations
  Clone ID: PAT_MRT3847_7629C.1.pep
XFXXXXKWXXKLXYFXXHNTFLRXIIRINRPAYXSYSIYQXFLREXTXIWXQASAAXQSSKLXHFLXXRHRXYXPXXTSPSCT

SEQ ID NO: 259442 - protein, 388 aa, Glycine max
  unsure (1)..(388): unsure at all Xaa locations
  Clone ID: PAT_MRT3847_762C.1.pep
FGSSDASSAKKFEATVTRLHSSTQGLKEFINDVNTLASVQHPNLCKLLGFHARDGSEPRMLVYERLCHGSLDRQLFGRSDSPSIDWNSRMKIAICAAQGLTFLHEEGPFQAMYNEFSAANIQIEKDFNAKLSGYGCAGRIPEEEISSSSCAVGNLSVETLEKGILTPKSNVWSFGIVLLELLTGRKNLDSHHPKEERNLVKWSRPFLADDFRLSLIMDPQLKGHFPPKAARTMADIAQRCLQKEPSERPTMRTIVENLKTVQDMKYSCWFPLQEPAKEMSRSPSLNGIICHVPPRLSFSPSVVARPSVSSPRWSTRSGGVPTLHLPLRACSSTFXMEELGGPESRKSSSSRCPRASVEGYGLSIMFCSYVFVCCYYHFWGDSTQVYSR

SEQ ID NO: 259443 - protein, 217 aa, Glycine max
  Clone ID: PAT_MRT3847_76300C.1.pep
FLLMTISVISPDVSYASSSARINEIYEVGELFDLSIQLIYLVLLLGLLGTGTFFVIRQVLVRRELDLSAKELQEQVRSGDAGATELFELGAVMLRRKFYPAATKFLLQAIEKWDGDNPDLAQVYNALGVSYVRDGKVDKGIAQFETAVKLQPGYVTAWNNLGDAFESKKDYKSALKAFEEVLLFDPNNKVARPRRDSLKGLVDATKGVTVIKSTEKK

SEQ ID NO: 259444 - protein, 72 aa, Glycine max
  Clone ID: PAT_MRT3847_76301C.1.pep
PHSLTKLSNSNTTSFEPFILSTTSLLSGSKKTSYNPQRYTYLFLCYRAFKPAFKQKQEILASHKTLLWILHQ

SEQ ID NO: 259445 - protein, 101 aa, Glycine max
  Clone ID: PAT_MRT3847_76302C.1.pep
TINPRILLSGPAGSEIYQEMLAKALAKYFGAKLLIFDSHSLLGGLSSKEAELLKDGFNAEKFCAYAKSPSSSDMARCMDPSASEPDTPNSSNAPTPYGFES

SEQ ID NO: 259446 - protein, 64 aa, Glycine max
  Clone ID: PAT_MRT3847_76303C.1.pep
CFRKNGARSECLVMLQQALMTLHMGRVFYFLLFPLVQKNIYINKRAFKPIRHTKNHDYPQIWIF

SEQ ID NO: 259447 - protein, 53 aa, Glycine max
  unsure (1)..(53): unsure at all Xaa locations
  Clone ID: PAT_MRT3847_76304C.1.pep
MREGVSSHIGQGGVXGGNACGELYWLEHRVGGGGGMPXDKTGGGGDXAFNTFF

SEQ ID NO: 259448 - protein, 40 aa, Glycine max
  Clone ID: PAT_MRT3847_76305C.1.pep
LCFKSIVTKKGECLTGLASPTYINGTLPGDNGFDPQLVPE

SEQ ID NO: 259449 - protein, 114 aa, Glycine max
  unsure (1)..(114): unsure at all Xaa locations
  Clone ID: PAT_MRT3847_76306C.1.pep
GQANDKXPHRKNXGKGARTPEEKXAXXRXAEEAHNNXGFFFFLEECVEATKELFHGEQYRSDSKTVNQXAYFYAKNLXLHPKETFVFNINGSELFNIPYYKKHGYGEEKFNSYL

SEQ ID NO: 259450 - protein, 168 aa, Glycine max
  Clone ID: PAT_MRT3847_76307C.1.pep
MSMDELKKRAKAIGTFEELRKIIDIRGVNRYNPNNAPVLERAVDLMIKETKYDKDILMTLLKLYQLNPFLYNEKYVCLVLLKTMTNFPRNDFALAKYLVDAAKVNAPELRRVCQIGSLLESCNFALFWRLVDGRYKPRDSLDEPFKKPDEIRQLVEFVTSFKEATRNY

SEQ ID NO: 259451 - protein, 50 aa, Glycine max
  Clone ID: PAT_MRT3847_76308C.1.pep
FVIPTFTWGINYLVQLQKKSSIVVYEAAELIPDIVAGTIYLVQWVSMNAC

SEQ ID NO: 259452 - protein, 50 aa, Glycine max
  unsure (1)..(50): unsure at all Xaa locations
  Clone ID: PAT_MRT3847_76309C.1.pep
INHTNTSLVYASQNTSEWEYXHIDKAQSCFHAKRYSCAPRVTSYHAILWH

SEQ ID NO: 259453 - protein, 194 aa, Glycine max
  Clone ID: PAT_MRT3847_7630C.1.pep
MASSGEILPHQTQVVAVLIPFAAQGHLNQLLHLSRLILSHNIAVHYVCTATNIRQATLRDKNSISNIHFHGFEVPPFASPPPNPNNEETDFPSHLIPSFEASSHLREPVRNLLQSLSSQAKRVIVIHDAAMASVAQDATNMPNVENYTFHITCAFTTFVYLWDVMGRPPVEGLHEPTELPSEGCFTPQFMDFII

SEQ ID NO: 259454 - protein, 126 aa, Glycine max
  Clone ID: PAT_MRT3847_76310C.1.pep
MLLKVLDFEGSDLRYVPENLGNLCHLKYLSFRYTWITSLPKSIGKLQNLETLDIRDTSVSKMPEEISKLKKLRHLLAYYTGLIQWKDIGGMTSLQEIPPVIIDDDGVVIGEVGKLKQLKGTVGGKI

SEQ ID NO: 259455 - protein, 178 aa, Glycine max
  unsure (1)..(178): unsure at all Xaa locations
  Clone ID: PAT_MRT3847_76311C.1.pep
CQLPGDALGQVFRATLDLLVAYKDQVAEAAKEEEAEDDDDDDMDDFQTDDEDEDDNGSDKEMGIDAEDGDEADSSKFTKLAEQTKTFRPNDEDDDDSDDDFSDDEELHSPIDEVDPFVFFVDTMKVMQSSDPLGFQNLXQTLEFSYQALANGVAQHAELRRGETEKEKLERSSATIDS

SEQ ID NO: 259456 - protein, 63 aa, Glycine max
  unsure (1)..(63): unsure at all Xaa locations
  Clone ID: PAT_MRT3847_76312C.1.pep
QKIVKRVLSSQLSYYSRRECCVFYEQSFCKLSTFRAFTITPAKSMCXNQLYETNTAYKLETTR

SEQ ID NO: 259457 - protein, 91 aa, Glycine max
  Clone ID: PAT_MRT3847_76313C.1.pep
KKKKGMPPDQTSITHPELTSEPVPDGTPDFPMETTFTDGGHHGHTCDLCEIALRSQWHTTYDPGTLLESLRRLMSEHSHIEDFAFTASFIG

SEQ ID NO: 259458 - protein, 69 aa, Glycine max
  unsure (1)..(69): unsure at all Xaa locations
  Clone ID: PAT_MRT3847_76314C.1.pep
TRPELQKTKANNRAXEEAFVNDIEESSPGTEWERVARLCDXNPKSSKQAKDVSRMRSVLISLKHAPVVH

SEQ ID NO: 259459 - protein, 83 aa, Glycine max
  Clone ID: PAT_MRT3847_76315C.1.pep
GVLGNGSQGGPPVGLVAAESLRRRRNEGLRGAGGVAGAAEARNEEPHQAKKKKVWVWNKFVVIINVREWVATISNLRVIQKWL

SEQ ID NO: 259460 - protein, 100 aa, Glycine max
  unsure (1)..(100): unsure at all Xaa locations
  Clone ID: PAT_MRT3847_76316C.1.pep
ECTIGKVGTEGKSRAGVDRHRTQMTQGMIQRVPTTVIPEITGIARTWAMRTTRLGGPTAHMYTGRSQNXELRNPVXAKAMTMSLNADQRADAWRLTFLKR

SEQ ID NO: 259461 - protein, 61 aa, Glycine max
  Clone ID: PAT_MRT3847_76317C.1.pep
CCSSPLFVSVVINLDRECGWRTSDLAPCLDPCAVCLERKCMVAVEGIYTPLKLTNKRMYFV

SEQ ID NO: 259462 - protein, 110 aa, Glycine max
  Clone ID: PAT_MRT3847_76318C.1.pep
LLPKTGRTHSWGRQKQKNNCFITIYSFPLKNYRVEKHLPEKKKRGILFPYIQPKKKPSLNFFSQTQNQNSVKKIPPQKKKLYSLLPLGQKKQPFSFIGRTQRKTSPISFG

SEQ ID NO: 259463 - protein, 290 aa, Glycine max
  Clone ID: PAT_MRT3847_76319C.1.pep
ENDFEEGNHLYRFLEHEPFIPRCFNFHGTTNDSEPKPADSIFVRLTKIMSAILESYASDDRQHVDYEAISRSEEFRRYVNLTQDLQRVNLLELSENEKLAFFLNLYNAMVIHAVISVGCPEGAIDRRSFFSDFQYLVGGHPYSLNMIKNGILRCNRRSPYSLVKPFSTGDKRLEVALIKLNPLLHFGLCNGTKSSPNVRFFTPHRVVDELRGAAREFFENHGIEVDLEKRTVYLTRIFKWFSGDFGQEKEILLWIINYLDPNKAGLVTHLMGDSGPVHISYQNYDWSINS

SEQ ID NO: 259464 - protein, 58 aa, Glycine max
  Clone ID: PAT_MRT3847_7631C.1.pep
WKQIWFWSVPRLLNHLLFLVLRSGQCFLSVAQERVLVLRKLKWLIFFATDNLHLGRCP

SEQ ID NO: 259465 - protein, 52 aa, Glycine max
  Clone ID: PAT_MRT3847_76320C.1.pep
ELRISHKKKLFKNIKSAPLYSDPNLHTRSFYMIILFLCHLKFNSLSFVLQLS

SEQ ID NO: 259466 - protein, 123 aa, Glycine max
  unsure (1)..(123): unsure at all Xaa locations
  Clone ID: PAT_MRT3847_76321C.1.pep
PVPDKLQVALIKLNPLLHFGLCNGTKSSPNVRFFTPHRVVDXIEQFEESWSIDSXLELSFELSSHDSARIFKWFSGDFGQEKEILLWIINYLDPNKAGLVTHLMGDSGPVHISYQNYDWSINS

SEQ ID NO: 259467 - protein, 46 aa, Glycine max
  Clone ID: PAT_MRT3847_76322C.1.pep
TVLNMSRFYFQFIIFAHNLKHYLLQVHTDCVSHGCFSSYVHFFFLS

SEQ ID NO: 259468 - protein, 74 aa, Glycine max
  Clone ID: PAT_MRT3847_76323C.1.pep
IVVAMLLVDTYHTKPENSVHTIFVTSFKGERLIRVVTFPSTIVQIEPYMNTRFHPLSTTTNREFVQRKDLQWLK

SEQ ID NO: 259469 - protein, 165 aa, Glycine max
  unsure (1)..(165): unsure at all Xaa locations
  Clone ID: PAT_MRT3847_76324C.1.pep
MDKKLPLLFIFSAALVMEAVLLVSVVAEPVEDKQALLDFLDNMSHSPHVNWDENTSVCQSWRGVICNSDESRVIELRLPGAGLSGPISPNTLSRLSALEVVSLRSNGISGPFPDGFSELKNLTSLYLQSNKFSGSLPLDFSVXNNLSVVNLSTILSWEHPLSISI

SEQ ID NO: 259470 - protein, 26 aa, Glycine max
  Clone ID: PAT_MRT3847_76325C.1.pep
LRCNFLCDLFIQCSSHASLSTLLKVF

SEQ ID NO: 259471 - protein, 71 aa, Glycine max
  Clone ID: PAT_MRT3847_76326C.1.pep
EPQCPNNAYVLNIVVDLRASCSTRISDSTSLTKFSNHRKLPPSRAISWRDQNIHKLRTIPNSGPPPAVPLY

SEQ ID NO: 259472 - protein, 59 aa, Glycine max
  unsure (1)..(59): unsure at all Xaa locations
  Clone ID: PAT_MRT3847_76327C.1.pep
DALPRGFISPQQLGDSIPITATTYYYVSVFVPFSTSCECNQSXYIVIYCTHLRPILRFR

SEQ ID NO: 259473 - protein, 309 aa, Glycine max
  Clone ID: PAT_MRT3847_76328C.1.pep
MSCFPCFSKTKRTNSKREQQGIIPQENFVTRTPPDVKKQKADDPNQFDTSKIQAQNFTFRELAIATKNFRQECLLGEGGFGRVYKGTIPATGQVVAVKQLDRNGVQGSKEFLVEVLMLSLLNHDNLVKLAGYCADGDQRLLVYEFLPGGCLEGRLLERKPDEPVLDWYSRMKIASNAAKGLWYLHDKANPSVIYRDLKSANILLDNDNNAKLSDYGLAKLAGKDKTNIVPTRVMGNYGYSAPEYVRTGNLTLKSDVYSFGVVLLELITGRRAIDTTRPHDEQNLVSWAQPIFRDPKRYPDMADPSLENN

SEQ ID NO: 259474 - protein, 72 aa, Glycine max
  Clone ID: PAT_MRT3847_76329C.1.pep
LHKVLNAVRTTTENYSLYKKKPEIQDSVCPTHITSGVDTKYSAPCFFHFGSLTEKKTNFVLFKRRFKNLRLR

SEQ ID NO: 259475 - protein, 104 aa, Glycine max
  Clone ID: PAT_MRT3847_7632C.1.pep
IGHGSPYPPPQPGYPSAPPHEGYPPPPPPPGYGGYPPPHPPQRPPYDSYQGYFDNGRPPPPPPPHYHYQHVDHHHLHDEPGCFSFLRGCIAALCCCCVLEECCF

SEQ ID NO: 259476 - protein, 238 aa, Glycine max
  unsure (1)..(238): unsure at all Xaa locations
  Clone ID: PAT_MRT3847_76331C.1.pep
AAAIPALLVTILIFMDQQITAVIVNRKEHKLKKGAGYHLDLFWVAILMVVCSFMALPWYVAATVISIAHIDSLKMETETSAPGEQPKFLGVREQRVTGTLVFILTGLSVFMAPILKFIPMPVLYGVFLYMGVASLNGVQFMDRLKLLLMPLKHQPDFIYLRHVPLRRVHLFTSLQVLCLALLWILKSTVAAIIFPXVMILALVAVRKGMDYLFSQHDLSFLDDVIPEKDKKKKEDEKK

SEQ ID NO: 259477 - protein, 259 aa, Glycine max
  unsure (1)..(259): unsure at all Xaa locations
  Clone ID: PAT_MRT3847_76333C.1.pep
MAQIALIAPAATVIPIITGRGKQQKLSYAARRNKVSLASLVPSWRLERVPRLALSNNNNSGDDRKTSVVVKVSEGGAISLPHGWSAQKEEEEDQISEGLKKMKGSNNRFFTVGLVXAAWYSSNIGVLLLNKYLLSNYGFKYPIFLTMCHMTACSLFSYVAIAWMKXVPLQTLRSRVQFFXISALSLVFCVSVVFGNISLRYLPVSFNQAIGATTPFFTAVFAYLMTFKREAWLTYLTLVPVVTGVIIGSXGGEPSFHLF

SEQ ID NO: 259478 - protein, 159 aa, Glycine max
  Clone ID: PAT_MRT3847_76334C.1.pep
MYTKSAQSSFRDRTHEFQSIAERLKKTGSAPNGQSSSSSRSEEQRSAIANQSEFNRRASKIGFGIHQTSQKLAKLAKLAKRTSVFDDPTMEIQELTGVIKQDITALNSAVVDLQLLSNSRNESGNASTDTTSHSTTVVDDLKTRLMSATKEFKDVLTMR

SEQ ID NO: 259479 - protein, 166 aa, Glycine max
  Clone ID: PAT_MRT3847_76335C.1.pep
LQLGVMVLHLLVFPRAELAVFLFAPLSASFGVLSVRSLARTSGAVCVLRSAVGVEVGGLERGRVMFIGAGAMAFPPRPGFSAFVFCLGGFLRASLGSRVLALVGLCPGMFDVRFVSCGLCYRPSPRVLGLFPSFPTLPLCCVRCFGRKIKNTRGRTGGALGVPARR

SEQ ID NO: 259480 - protein, 78 aa, Glycine max
  Clone ID: PAT_MRT3847_76336C.1.pep
MHTKSAQSSFRDRTHEFQSIAERLKKTGPAPNGQSSSSSRSEEQRSAIANQSEFNRRASKIGFGIHQTSQKLAKLAKV

SEQ ID NO: 259481 - protein, 68 aa, Glycine max
  Clone ID: PAT_MRT3847_76337C.1.pep
QSFIKIWSERKRSRGVRLAQLDQATTRAPKCPGRLALSYENLGMGTIGAPWGVKHGRSYGEISQGTDQ

SEQ ID NO: 259482 - protein, 45 aa, Glycine max
  unsure (1)..(45): unsure at all Xaa locations
  Clone ID: PAT_MRT3847_76338C.1.pep
YDCFSIYCGIFXLYPEIEFAALLLILIANTTTGYITKMPHLICSA

SEQ ID NO: 259483 - protein, 103 aa, Glycine max
  Clone ID: PAT_MRT3847_76339C.1.pep
APPRIDDPSRSERTFVWSGTRKLPSRILVALLILVITLRDVSSPLKCPILMVINIRLVWRQNELRCSFSESGSQVDTYFKSGFPLKKQKKKKKKTKKKGDRRP

SEQ ID NO: 259484 - protein, 150 aa, Glycine max
  Clone ID: PAT_MRT3847_7633C.1.pep
SGFPLDPRVRPASAHASAHGQAGLQRDSYSRSRSPVRRERSPVSEDRSQSREPSKIRKHSASPDQSSPRKRGDTSPGNDRLATHQDGSDYSDGPRGKSRSPASPARDRDEGSYDSPKANGHSHSPSRSPRDDDRSPIDEDDDNHRRSGSP

SEQ ID NO: 259485 - protein, 53 aa, Glycine max
  Clone ID: PAT_MRT3847_76340C.1.pep
KGRVQLKGNPPWQGAHCNTSCGAFSHQGGPTSGPKPGENRISILEGSCIEPPP

SEQ ID NO: 259486 - protein, 504 aa, Glycine max
  Clone ID: PAT_MRT3847_76341C.1.pep
MGMLLVVVSPFLSYSVLFLVLFLTLKFLFQSRKLRNLPPGPPPLPIIGNLNLLEQPIHRFFQRMSKQYGNIVSLWFGSRLAVVISSPTAYQECFTKHDVALANRLPSLSGKYIFYNNTTVGSCSHGEHWRNLRRITALDVLSTQRVHSFSGIRSDETKRLIHRLARDSGKDFARVEMTSKFADLTYNNIMRMISGKRFYGEESELNNVEEAKEFRDTVNEMLQLMGLANKGDHLPFLRWFDFQNVEKRLKNISKRYDTILNKILDENRNNKDRENSMIGHLLKLQETQPDYYTDQIIKGLALAMLFGGTDSSTGTLEWALSNLVNDPEVLQKARDELDAQVGPDRLLNESDLPKLPYLRKIVLETLRLYPPAPILIPHVASEDINIEGFNVPRDTIVIINGWAMQRDPKIWKDATSFKPERFDEEGEEKKLVAFGMGRRACPGEPMAMQSVSYTLGLMIQCFDWKRVSEKKLDMTENNWITLSRLIPLEAMCKARPLASKVGSY

SEQ ID NO: 259487 - protein, 65 aa, Glycine max
  Clone ID: PAT_MRT3847_76342C.1.pep
SRDAGVLSYIPPPKIWGLHGYGDLFSQDLAVGHFGPTAPMGMFLPFSEEAKPYVFSFIFMLTHSR

SEQ ID NO: 259488 - protein, 30 aa, Glycine max
  Clone ID: PAT_MRT3847_76343C.1.pep
FNYYILYILTFRNVSQWIYKLIQQKMKLLN

SEQ ID NO: 259489 - protein, 291 aa, Glycine max
  unsure (1)..(291): unsure at all Xaa locations
  Clone ID: PAT_MRT3847_76344C.1.pep
MAMASNHLRNLNRISIHHFQALLNDTTRFFSDAASSLPQPQPPSSSLKHNELAKFAAIADTWWDSEGPFKPLHVMNPTRLAFIRSALCRHFKKDPYNAKPLEGLKIIDVGCGGGILSEPLARLGATVMGVAAVLKNIKIAXLHAGLHPATSSMKLCCTTAEKLVEEGTPFDAATALEVIEHVADXPEFCTAPAALTVPEGATVISTINRSMRAYATAIVAAEYILRWLPRGTHQWSSFLTPEELVLILQRAGINVEEMAGFVYNPVTGRWSLSDDISVNFIAFGTKSNNTE

SEQ ID NO: 259490 - protein, 53 aa, Glycine max
  Clone ID: PAT_MRT3847_76345C.1.pep
CCLWVRCHSISSNLTNDRALLCSTIMVVCVSIFGEYVILPFVSHSYWMSERVF

SEQ ID NO: 259491 - protein, 215 aa, Glycine max
  unsure (1)..(215): unsure at all Xaa locations
  Clone ID: PAT_MRT3847_76346C.1.pep
MASNREREEALTFTIPSSSSHSSPITVSDQLDSYLADPRSASGSFQNDGLLSAGEAAAAADPDFGFSRPDFRQSPLAGTVEFYQRHVFLCYKNPRVWPPRIEAAEFDRLPRLLHAAVVARKSHMKKETRLTICEGHDGTETSNGDVLIFPDMVRYRFXWNCRRLTHFDVETFVEEVLVKDGEWLPGTPEALRGSYVFVCSHGSRDRRCGVCGPVL

SEQ ID NO: 259492 - protein, 109 aa, Glycine max
  unsure (1)..(109): unsure at all Xaa locations
  Clone ID: PAT_MRT3847_76347C.1.pep
LKKALNGLNQAPTAWYNMFDEYLQGLGFVNTXPSEAILYVKEECGNLLVVSVHLDDMFVTVTNEILVGEFKAEMXNXFEMTNLGFVSYILGMEVIRQFQKKRSKCRKMG

SEQ ID NO: 259493 - protein, 98 aa, Glycine max
  unsure (1)..(98): unsure at all Xaa locations
  Clone ID: PAT_MRT3847_76348C.1.pep
VNKKIASNPKLYTFEGGGKHHPTQGWLLIISCKGYYVTPFIKDHPRRDEVFLSSTRKNSTHCFENFGHNDFSXNMMEKYYIGEIDSLTVPIKRTYISP

SEQ ID NO: 259494 - protein, 210 aa, Glycine max
  unsure (1)..(210): unsure at all Xaa locations
  Clone ID: PAT_MRT3847_76349C.1.pep
HASVPLKGCCVVDEEDENHNFEYRRYLVHEYMPNGSLEDHLFPTKLDNQNTKKSLTWPQRKSIILDVANALVYLHFGVQPAVFHRDIKATNILLDADMRGRVGDFGLAKRSSESMSHLNTKVAGTHGYVAPEYAFYGQLTEKSDVYSFGVVILEIMCGRKALEMSPSGTPVXXITDWVWSLMKSGNIGEALDASMLGDENCARNIMERFL

SEQ ID NO: 259495 - protein, 229 aa, Glycine max
  Clone ID: PAT_MRT3847_7634C.1.pep
MHFPILFLFLLPSLFKLSHSTTILVDGSSEWKSPTVSIGDSIIFKHKQHYNLYIFKNEKAFKLCNITQATLLSNPYTWHPSRPGFFYFTFHNGSLKACQDSQKLAIEVASSAMAPEHSPVATPAPSSGGEVPSSPSFPWPFRPGQEASSPGPAPQAQAQAGSPVTIPLVPDKGGGMPFINSNPAVPLPTGEVDSATIRPLPITSGHQEQVMIGSFGLHIALHTMALLLL

SEQ ID NO: 259496 - protein, 68 aa, Glycine max
  Clone ID: PAT_MRT3847_76350C.1.pep
TVVVLPNRLVPLRSLLVASGRLDRISNPADGCFCSIAVILSVSDELVLSKFGRMYLVSYISYSHVPVL

SEQ ID NO: 259497 - protein, 57 aa, Glycine max
  Clone ID: PAT_MRT3847_76351C.1.pep
QAPEEVPSTQKRHQILDKNLIFIALRSIEFVLAHHDFPWVNNRLSTQKKEKGVKRWV

SEQ ID NO: 259498 - protein, 74 aa, Glycine max
  Clone ID: PAT_MRT3847_76352C.1.pep
NLPSHQPSHGTTHLWREIQSTRVRHLNILCALNRTLNRSRLSQIKNFISQAADDGLRGFDGTSETSLWQCVSGV

SEQ ID NO: 259499 - protein, 34 aa, Glycine max
  Clone ID: PAT_MRT3847_76353C.1.pep
GSNCMIFDAMLNIHLEGINDPYAHPPCLTEGGVR

SEQ ID NO: 259500 - protein, 38 aa, Glycine max
  Clone ID: PAT_MRT3847_76354C.1.pep
VGPILPLLAKYLSVVQALSFQFSRKGTIRLCLQKKKKA

SEQ ID NO: 259501 - protein, 56 aa, Glycine max
  Clone ID: PAT_MRT3847_76355C.1.pep
KTLGIYFFAPVKKIKVFFLPSNHFIKLKKVQSRDFFPFVKNAQNWSKKLQLLVFLA

SEQ ID NO: 259502 - protein, 129 aa, Glycine max
  unsure (1)..(129): unsure at all Xaa locations
  Clone ID: PAT_MRT3847_76356C.1.pep
FEHFWNSGGARVGEEGALGWSAWLEKEEETRQKVMNDELSRENEGGGWTGWSEPWSKDNEGIVNVENETINDVVMEDIQDEEEYKEVEPEVDTENLLKMLGIDMNDXDGSEINDTSTWIKWSKEESFYR

SEQ ID NO: 259503 - protein, 42 aa, Glycine max
  unsure (1)..(42): unsure at all Xaa locations
  Clone ID: PAT_MRT3847_76357C.1.pep
XXXXXXXXGRDKWDFTHSQALNVHKIEDFALNGISMLIQTHP

SEQ ID NO: 259504 - protein, 236 aa, Glycine max
  unsure (1)..(236): unsure at all Xaa locations
  Clone ID: PAT_MRT3847_76358C.1.pep
MXXXLSSKALGEEPQXEPALNSILRIILRTSSMQEFIAADFVFKSFCEKNADGQSMLASTVIPHFFFMXXAPXEEDXKRAFGSMLLHGLTLGENDGDLEVCGRAASVLSHVLKDNLHCKDRVLRIRIEAPVPSLGAPEPLMHRMVKYLALASSMKSKDGKSRSSENSYIQEYILKLLVTWLADCPAAVHWFLDARPHLTYLLELVSNLSETVCVRDLAAVVLGECGIYNKSSDSAK

SEQ ID NO: 259505 - protein, 102 aa, Glycine max
  Clone ID: PAT_MRT3847_76359C.1.pep
VNISSRLSDIQLRKLMPCCHLNNTISTVNFGSINQASLPNQLLYCMHQIQSIRLKSDYQFPKLQPIFRVCFLYCVFCMNKKLIAEEKKKCQVWGIQGLSWLL

SEQ ID NO: 259506 - protein, 42 aa, Glycine max
  Clone ID: PAT_MRT3847_7635C.1.pep
AYGMRLNTDGKVTWYCSQCSMMHHVCMLWGMIVQCLQNHLVL

SEQ ID NO: 259507 - protein, 65 aa, Glycine max
  Clone ID: PAT_MRT3847_76360C.1.pep
KLKDSEMALVGYVDGVVEADGLVGGENIPVTQVSRRNRCERCMSHWRNKTEHNVKRWVLKRNAMY

SEQ ID NO: 259508 - protein, 159 aa, Glycine max
  unsure (1)..(159): unsure at all Xaa locations
  Clone ID: PAT_MRT3847_76361C.1.pep
MGSEGSSVVVPRNFRLLQELERGEKGIGDGTXSYGMDDADDIYMQSWTGTIIGPPGTVHEGRIHQLKLFCGKDYPDNPPSVRFQTRINMTCVNQETGAVEPHLFPMLANWKREHTMEDVLIQLKREMMSPQNRKLTQPPEGNEEARVDQKGLVVRCCIV

SEQ ID NO: 259509 - protein, 168 aa, Glycine max
  Clone ID: PAT_MRT3847_76362C.1.pep
MSLSPQVGYLVPLNRNFKEEASVPKFAVSDGINVIGRNNIPVPDKRLSRKHLTLTASPNGSASLLVEGTNPIVVNSGNKRRKLNPKEEATICNGDIIELIPGHHLFKYQVLGGDGKSSTCRNNEAQSSFKNKASGRSSQDKVETSSQKQGRNADARKSSGEDNSVEAI

SEQ ID NO: 259510 - protein, 159 aa, Glycine max
  Clone ID: PAT_MRT3847_76363C.1.pep
MGSEGSSVVVPRNFRLLEELERGEKGIGDGTVSYGMDDADDIYMQSWTGTIIGPPSTVHEGRIYQLKLFCSRDYPDNPPSVRFQTRINMTCVNQETGVVEPHLFPMLANWKRERTMEDILIQLKREMMSPQNRKLTQPPEGNEESRVDQKGLVVRCCIV

SEQ ID NO: 259511 - protein, 548 aa, Glycine max
  Clone ID: PAT_MRT3847_76364C.1.pep
MAFKLKSLPLLCSLHSPSRQNPNSTLSNHHFSRRFFAPSIPPTLCLSGAASASTFHRHRFFVTARSQDEDQITEALEQEEEKDNEEISRQGEKKELAKQGIWDQIKEIVMFTGPATGLWICGPLMSLIDTAVIGQRSSIELAALGPATVVCDYMCYVFMFLSIATSNMVATALAKQDKEEVQHHISVLLFVGLSCGIAMLLFTRLFGAAIITAFTGPKNVHVVPAASNYVKIRGLASPALLVGWVAQSASLGMKDSLGPLKALAAATVINVAGCVLLCTYLGYGIVGAAWATMVSQVVASYMMIQNLNMKGYNALAFSIPSGKELLTIFGLAAPVFITLMSKVAFYALLIYFATSMGTHTMAAHQVMVQTYLMCTVWGEPLSQTSQSFMPELIYGVNRSLSKARMLLRSLVIIGAILGLLLGIIGTSVPWLFPNIFTPDRMVIQEMHKVLIPYFIALAVTPPTVSLEGTLLAGRDLKFISLSMSGCFCVGSLVLWALSSRYGLLGCWFSLALFQWARFSMALQRLLSPKGILYSEDTEQYKLLKLRTA

SEQ ID NO: 259512 - protein, 102 aa, Glycine max
  Clone ID: PAT_MRT3847_76365C.1.pep
HKVLIPYFIALAITPPTHSLEGTLLAGRDLKFISLSMTGCFCVGTLVLWALSSRFGLLGCWFSLALFQWARFSIALRRLLSPKGILYSEDTDQYKLRKLRTA

SEQ ID NO: 259513 - protein, 114 aa, Glycine max
  Clone ID: PAT_MRT3847_76366C.1.pep
KSHNTALTIPSSTIIHGRLNQHVKEMIRHQLISIYLSIYGSDDVAKCRRSLLHWWHFLRTRSFLHVSDNIQAIPSEVVNPRRVFRERDFPTLKRVSARPLVRQHSTKLELSRDD

SEQ ID NO: 259514 - protein, 42 aa, Glycine max
  Clone ID: PAT_MRT3847_76367C.1.pep
VTMECLSGNWQVQIDKHRTMTSIVILAWDTIYLLESKCARVR

SEQ ID NO: 259515 - protein, 193 aa, Glycine max
  unsure (1)..(193): unsure at all Xaa locations
  Clone ID: PAT_MRT3847_76368C.1.pep
VVASYMMIQNLNMKGYNALAFSIPSGKELLTIFGLAAPVFITLMSKVAFYALLIYFATSMGTHTMAAHQVMVQTYLMCTVWGEPLSQTSQSFMPELIYGVNRSLSKFSXQARMLLRSLVIIGAILGLLLGIIGTSVPWLFPNIFTPDRMVIQEMHKVLIPYFIALAVTPPTVSLEGTLLVCSFHLLYNGEASI

SEQ ID NO: 259516 - protein, 68 aa, Glycine max
  Clone ID: PAT_MRT3847_76369C.1.pep
QTFGYYQYILTTSFSARDLPCKYRSRICRRKNNFGSRSILKGKGRTLYWSEWTEFVSRYMKYRRVETF

SEQ ID NO: 259517 - protein, 199 aa, Glycine max
  unsure (1)..(199): unsure at all Xaa locations
  Clone ID: PAT_MRT3847_7636C.1.pep
MFSRARRNQRCPRYDDKYGNTRLYVGXRLSSRTRSRDLERVFSRYGRVRGVDMKNDFAFVEFSDPXRDADDARYNLDGRDVEGSRIIVEFAKGGPRGSRDREYMGRGPPPGSGRCFNCGIDGHWARDCKAGDWKNKCYRCGERGHIEKNCKNRPKKLSQRGTSLSRSPVRSRSPTXREEARDRSYSRDHSDSRARSPVR

SEQ ID NO: 259518 - protein, 92 aa, Glycine max
  Clone ID: PAT_MRT3847_76370C.1.pep
MIWMFIYCCQESKAKEMVMLAEKMRLKLLSGSNSQTNATNDEEMGSKEEMQDWLLSVGIISPVTKESVGALYHQQLSRQVVLSLLLNHALLS

SEQ ID NO: 259519 - protein, 45 aa, Glycine max
  Clone ID: PAT_MRT3847_76371C.1.pep
RTLYHTHSPFNFNKLIHPPVPYFFPYQLFHKSTYYHFYNIPTILQ

SEQ ID NO: 259520 - protein, 125 aa, Glycine max
  Clone ID: PAT_MRT3847_76372C.1.pep
ARWVDQNLNPRRTEVIFRSMSPRHNRENGWKCYNQKQPLPFSSHLHVPEPLAVLQGVLKRMRFPVYLQDITTMTALRRDGHPSVYRRVISQDEKQKPGKGHSSDCSHWCLPGVPDIWNEMLSALL

SEQ ID NO: 259521 - protein, 61 aa, Glycine max
  Clone ID: PAT_MRT3847_76373C.1.pep
KTTEVFGGGITTEGFGCFKTTYGGSYQLINTYIYYIHIFNLSMTLSKLIVLTFLPRFSFFI

SEQ ID NO: 259522 - protein, 86 aa, Glycine max
  Clone ID: PAT_MRT3847_76374C.1.pep
LYSLNKFHFLLIKVIFKYFSPFSTIHSTLITFKHSSNSQHTHTIPLLNNSTNTTYLKNYKTLKLFKSNKPPQITTPSSNQKTPSFL

SEQ ID NO: 259523 - protein, 76 aa, Glycine max
  unsure (1)..(76): unsure at all Xaa locations
  Clone ID: PAT_MRT3847_76375C.1.pep
MARHSLLLALLLFAAVATAAMAVXRSDADDILIRQVAPAVGEAKQEDPLLNAEHHFATFQANFAMTYATKQEHDHR

SEQ ID NO: 259524 - protein, 161 aa, Glycine max
  Clone ID: PAT_MRT3847_76376C.1.pep
MADGSSTPATPSAKVSAIFIYPIKSCRAISVSRAPLTPTGFRWDRQWMVVNSQGRMYTQRVEPRLALVEVELPSEAFLENWEPTQDSYMVVNAPGMQPLKICLSQQGKEVANAVSVWEWTGSALDEGAEASQWFSDYLGKPCQLVRFNSASEVRPVDPDYV

SEQ ID NO: 259525 - protein, 65 aa, Glycine max
  Clone ID: PAT_MRT3847_76377C.1.pep
FYIFFKKKPFQNNSASIEADNNMVLQSQFRGSICPMPYQSSTISLTMFPDKPKYIYLATRTGTYM

SEQ ID NO: 259526 - protein, 107 aa, Glycine max
  Clone ID: PAT_MRT3847_76378C.1.pep
EGPPFMYLYHQSFCSGTWDLMGLVPNHFSLRATFVKSWKPPRGFFRGEFCRRVFKMVPLEFLFCYGLNCFLFFSKFGWGPPPRFLYWVKKTLCPVLKKKKSLFPLGF

SEQ ID NO: 259527 - protein, 43 aa, Glycine max
  Clone ID: PAT_MRT3847_76379C.1.pep
IVDKKLHHGCLVAKLPTMGDLASHCHERLYNCKRLMGREEDWR

SEQ ID NO: 259528 - protein, 54 aa, Glycine max
  Clone ID: PAT_MRT3847_7637C.1.pep
CNCNISVVVISVTTVGPDCGLHHPQLACYHNLVELHVITSKLSFSYKLKPTHAH

SEQ ID NO: 259529 - protein, 51 aa, Glycine max
  Clone ID: PAT_MRT3847_76380C.1.pep
KKLANTKVLSSQLRVYFFINFFYLHVEEFHFFFCYGNLFPPPSSLGMQYGL

SEQ ID NO: 259530 - protein, 107 aa, Glycine max
  Clone ID: PAT_MRT3847_76381C.1.pep
FPSSGGSVFLLSPGLAPGGGRCPGLSGAHWGAVFFVSFGGAPPSPGSGLGASFPLAGFGARLVSGPFVGQLVEEVAVFLQIQKLFQDNQKTNKKKQKKKIKKQRKKT

SEQ ID NO: 259531 - protein, 199 aa, Glycine max
  unsure (1)..(199): unsure at all Xaa locations
  Clone ID: PAT_MRT3847_76382C.1.pep
RIESVVVKGVVCKKNVAHRRMTSKVDKPRLLILGGALEYQRVTNLLSSVDTLLQQEMDHLKMAVAKIASHQPNILLVEKSVSRYAQEYLLAKDISLVLNVKRPLLERVARCTGTQIVPSIDQLSSQKLGYCETFRVEKFLEDLNSARQGGKKTMKTSMFFEGCPKPXXFTIXLIGADKDDLKXVKHVVQYGVFAAYHFG

SEQ ID NO: 259532 - protein, 57 aa, Glycine max
  Clone ID: PAT_MRT3847_76383C.1.pep
ALFELAGLLLLLSGNRYPSYPLKLSPSLTCCASNLVTEHFKPCTVSPLSRLNPSSRL

SEQ ID NO: 259533 - protein, 134 aa, Glycine max
  unsure (1)..(134): unsure at all Xaa locations
  Clone ID: PAT_MRT3847_76384C.1.pep
RSLLVTLSITATVKADMKIHIIAFCHHARRVSSSIYSKHIGSRSSTPPHVRLTGSDDPKSEQRSAAGLRYIGXMTRXLAEALGSPFEFLAWASRPSIVTPSMLNWRAEEALVGNFXAFQVPLMPDDSAWTVNKP

SEQ ID NO: 259534 - protein, 138 aa, Glycine max
  unsure (1)..(138): unsure at all Xaa locations
  Clone ID: PAT_MRT3847_76385C.1.pep
NVHTIKMMLGCFELISRRKVSFHKIFVGASGVVDVTLEGFATMLNCTITKLLFVYLGISISANPRKEKMWKPIMDKFAIRLNSXKHITLSFVGRLYLINLIIYSLPLFXLSFFRIPGGVEKTIERLQKKFLWPKSHGV

SEQ ID NO: 259535 - protein, 128 aa, Glycine max
  unsure (1)..(128): unsure at all Xaa locations
  Clone ID: PAT_MRT3847_76386C.1.pep
GRPVQGRCLNCHGTNNVDLCLGDGRGLDLFGIITLARIVLHPPPTKVKYGLVVSAHQYFTCISQRDQREDGICXKTFDYLEGFVIIDRTGVLNNWRLSFSPPDRAQASHCKSDGRTLCCLEMGNFLHE

SEQ ID NO: 259536 - protein, 65 aa, Glycine max
  Clone ID: PAT_MRT3847_76387C.1.pep
WAGSPPPSNTQEAVNGPHSPMSHHASLMKKGAVRPPPARRKSFERVMGLLSSRDPSQLSVHKSWA

SEQ ID NO: 259537 - protein, 115 aa, Glycine max
  Clone ID: PAT_MRT3847_76388C.1.pep
MAEPLYLEEDYKPKDYTPEAKSLSFLASIVALFIYICVFYTFNLSTYSILNNNIFWFFMSNTLNLIIAADYGASSSNKHKQDLYEEYVRHSQARNCDSSSYVPKYDHEQFYKKCI

SEQ ID NO: 259538 - protein, 112 aa, Glycine max
  Clone ID: PAT_MRT3847_76389C.1.pep
MNKITSKMETMEVADTGVASGTTNKDESSTKDETTNNKVSVDEMTSRDYYFDSYAHYAIHEEMLKDEVRTITYRNSMYHNKHIFKGKVVLDIGCGTGILSMFAAKAGASHVI

SEQ ID NO: 259539 - protein, 110 aa, Glycine max
  Clone ID: PAT_MRT3847_7638C.1.pep
SVKNRYFLSSQIFTLVLESFPVHKPCKGSDLQVVVATYYQIHPVFHVSQLKKAKGCSTSGTVEAALHSFLQERETNDHFPIDPRTIMTTQETRNIGSLLLKVSSCGSRSY

SEQ ID NO: 259540 - protein, 73 aa, Glycine max
  Clone ID: PAT_MRT3847_76390C.1.pep
SYFNIQLVNSIFNRNHMTENALHLFSDSHLTNKASSFPETYKLTHLSSIGNARMLGSPYERILIWQCCCPAFP

SEQ ID NO: 259541 - protein, 137 aa, Glycine max
  Clone ID: PAT_MRT3847_76391C.1.pep
SVLIILGRPFMKTARTKIDVYAGTLSMEFGDIVVHFNMLDAMKHPSEDHSIFRAEIIDQIVDDYMFDFDSILHGRKHPFLSDLHTCHSLCIESESEFEFDPIYNFYAESEFEFESGSDFLGVAPLDVDFLESECTNH

SEQ ID NO: 259542 - protein, 138 aa, Glycine max
  Clone ID: PAT_MRT3847_76392C.1.pep
MGEGENTEIEIEIETETESEATSTTWSLGKHTQIIGLSEKLINGNNLSAKIEAAREIRKMVRKSSSSSKTRAKLAAAGVIEPLVLMLSSSNLDARQSSLLALLNLAVRNERNKGKIVTDGAVPALGGLLRMQNSGVRE

SEQ ID NO: 259543 - protein, 39 aa, Glycine max
  Clone ID: PAT_MRT3847_76393C.1.pep
HSYSFYYCVFPQSFKLIYCGITKGLCTIFHNKNPKFPNI

SEQ ID NO: 259544 - protein, 427 aa, Glycine max
  Clone ID: PAT_MRT3847_76394C.1.pep
HASGVFSVDDISDHFWQPPIPVSAAQTSSQMSRSASEWAFQRFLQEASASAPSPPSSSSAADVVFVEIEDQPKPAPPPPTNGAVLPNAPGPVPLDSDEYQAFLKSKLNLACAAVAMTRGSLAKSQDPSPFSEGGSQPTNPSLVESQTTSKGSIPSENDPSKLQDKDTNVPVGIPSIPAMQKKPAVAIRPSTSGSSREQLEGLVGCDPPSEKGDIEGETSMNDNTDPADVKRVRRMLSNRESARRSRRRKQAHLTDLETQVSQLRGENSTLLKRLTDVSQKYSDSAVDNRVLKADVETLRAKVKMAEETVKRITGLNPMPHAMSDISSLGLPSFDGRSPSDTSADASVPVQDDPHHHFYQPTLNNPIPSHDPIVNNGLGGISSIENVQQQNAAAVVGGNKIGQTASLQRVASLEHLQKRIRGGPPSEQ

SEQ ID NO: 259545 - protein, 258 aa, Glycine max
  Clone ID: PAT_MRT3847_76395C.1.pep
MHEIRDPAIRLFGQKIPFPEDVVVDKEEKEIESGEEREQEMEKYEDQGHKDAGVENVTEEELEVDPPPNAEETKNSGSSPEAIVNPKTPSIEEETEKSKGDKTEKEQGDAANSQEKTLKKPDKVLPCPRCKSMDTKFCYYNNYNVNQPRYFCKACQRYWTAGGTMRNVPVGAGRRKNKNSTSHYRHITISEALQAARIDSHLPPLKGNGRVLSFGLDAHAPICDSMASVNNLGEKKPLNCTRNGFHHGFEDQRLPPVP

SEQ ID NO: 259546 - protein, 76 aa, Glycine max
  unsure (1)..(76): unsure at all Xaa locations
  Clone ID: PAT_MRT3847_76396C.1.pep
MLSTFPVVYIPVINNKVFXMSSMTWEWGIVFGMNLVYLASTELYKWCKRILYRRKYHPARRTPADKTICIEPTVAA

SEQ ID NO: 259547 - protein, 471 aa, Glycine max
  Clone ID: PAT_MRT3847_76397C.1.pep
MHEIRDPAIRLFGQKIPFPEDVDKEEESAEDREQEMEEHEDEGDKDTRVENVTKEELEADPPLDAEETKISGTSPEAIVNPKTPSIEEETAKSKGGKSEKEQGDAANSQEKTLKKPDKVLPCPRCKSMDTKFCYYNNYNVNQPRYFCKDGCEKTTEGGTMRNVPVGAGRRKNKNSTSHYRHITISEALQAARIDAQNGTHLPTLKGNGRVLSFGLDAHAPICDSMASLMNLGEKKALNGTRNGFHHGFEDQRLPVPCKSGENGDDSSTTSSITISSPKGENNKSTFQQQPLPQNHGFLPQVPCIPGVPWPYTWNSPVPPPALCPSGFPLPFYPATFWNCGMPGNWNVPWFSSSSPASNLKSPSSSPNSPTLGKHSRDSDMIKQDSLHKEEASTPRNGSVLVPKTLRIDDPSEAAKSSIWATLGIKNESVSGGAMFKAFQSKKGEKNHVEASPMLMANPAALSRSLNFHENS

SEQ ID NO: 259548 - protein, 174 aa, Glycine max
  unsure (1)..(174): unsure at all Xaa locations
  Clone ID: PAT_MRT3847_76398C.1.pep
GGGRVHLHWSNIPVGDEYVPLASVKGSIITGLVYYKECPVGTYKNVSGSDRALCHDCPSDKLPHRAIYISVRGGVAETPCPYKCISDRYHMPNCHTAFEELVYTFGGPWLFGLLXDLLAVSPSRSQSCTNHLCGCLEFMNEIMGSNSTRLSHCHVYRLYFHGPNTFSEPWHLLH

SEQ ID NO: 259549 - protein, 84 aa, Glycine max
  unsure (1)..(84): unsure at all Xaa locations
  Clone ID: PAT_MRT3847_76399C.1.pep
HNGNGICNXILVYLFTLLTAVNSSSFCRHRHRQSELLCYCSRCLVLSVCIVSSVFDLRGNLRSDRVSAAACMDGIVXXSVVTTQ

SEQ ID NO: 259550 - protein, 68 aa, Glycine max
  Clone ID: PAT_MRT3847_7639C.1.pep
FKKKFKKKKKKKKKKKKKKKKKKKKKKKKKKKKKKKKKKKKKKRGGRFKRTKFYYPGIAQKNFFFGAP

SEQ ID NO: 259551 - protein, 88 aa, Glycine max
  Clone ID: PAT_MRT3847_763C.1.pep
YIQTHNIPYSLYPTYKPTFITILYFPYIIPNTTLKIILSYNIYHIFKITLISTLKLIHTNFIFKNILNYQLIQILYFFKKHFTNLNYY

SEQ ID NO: 259552 - protein, 81 aa, Glycine max
  unsure (1)..(81): unsure at all Xaa locations
  Clone ID: PAT_MRT3847_76400C.1.pep
GXXEDLQXVMDXXKRXTXISXREXARRXRMXKQKXLDDIVSQVAQXRKENXQIXTXXNITXXQYLXVXXXXXVXGPGGVYR

SEQ ID NO: 259553 - protein, 346 aa, Glycine max
  Clone ID: PAT_MRT3847_76401C.1.pep
MFFLSLPFSSCFRASQPNHDPTTLSTNLTTYIYHTEYGTVSLTWSRSMLGRSLHVNLHNHSSFHLHVKPWRKKGSKKLSHNTVFLWNLSSARFESGRPEPRSRFYLAIEVEHSLSLLVGDLSPKSKAKKPSKTQQQLLVLKRDHVHVAPHRSRVYQTKARLGGKVREIEIDCDGYNGNGGGYENENESSSRLLFGVDGEKVLEVARLKWKFRGSERVEIDGVHVQISWDVHDWLFEKDKDIVNHRSSNNNNSNNNGIEGHAVFMFKFEEDEVRGSGGGKEEEQQWSMGSGGEWRNGKSWSSSSLSVSSTSGGSFGGSSSVMEWSSVEENELVVPLGFSLVVYAWRR

SEQ ID NO: 259554 - protein, 180 aa, Glycine max
  Clone ID: PAT_MRT3847_76402C.1.pep
MRVWRVHPPEQKLCPNGVLRWVLVWMSVCFLVFTVGPPSRSMVKKSASSQFSSCPPCDCFCSSAEYLLDPLGLVNGSIYGADCGKHDPVLNEEMNKGILKMLSEELNLQKIVANETLEHTKQLIMDARKTFSHYQKEAEKCNIGVETCEEARERAEAELIEEHKLTALWENRAREYGWVE

SEQ ID NO: 259555 - protein, 66 aa, Glycine max
  Clone ID: PAT_MRT3847_76403C.1.pep
KVFTSVSWFMVQDLTTGFSADDRSKIQNKQQTHLSALLLSVSRAFQLWHLLPIYLDSIAPSKKVII

SEQ ID NO: 259556 - protein, 96 aa, Glycine max
  Clone ID: PAT_MRT3847_76404C.1.pep
YRIAHRVSGFVSFDKTSAWVSWLKFLRKGLGFRQGFILIAPKQAVSDATIHPYAQTEGINAMVVPPQPPVIVKLCCGGKSALNVTLHSDKTGPIFV

SEQ ID NO: 259557 - protein, 44 aa, Glycine max
  Clone ID: PAT_MRT3847_76405C.1.pep
GNQGKSFSTFSMVFGGGCGFALTCKQPHKPCFSLSPPRFTETPP

SEQ ID NO: 259558 - protein, 86 aa, Glycine max
  unsure (1)..(86): unsure at all Xaa locations
  Clone ID: PAT_MRT3847_76406C.1.pep
DIIIYSLDFAPPLVXYRGVFGVSSLRGSAYFSRGLWPAHXVLFFPLLPRSPWRWLFLXFSCFCVLLAFVAGNSARPPVLACSLAFE

SEQ ID NO: 259559 - protein, 53 aa, Glycine max
  Clone ID: PAT_MRT3847_76407C.1.pep
TQDLQGHLDCISGLAVGGRYLLSSSFDKTVHVWSLQVTLKTRQHDNILLGAFK

SEQ ID NO: 259560 - protein, 248 aa, Glycine max
  Clone ID: PAT_MRT3847_76408C.1.pep
MGRGRVELKRIENKINRQVTFAKRRNGLLKKAYELSVLCDAEVALIIFSTRGKLYEFCSTNSMLKTLERYQKCSYGAVEVSKPGKELESSYREYLKLKARFESLQRTQRNLLGEDLGPLNTKDLEQLERQLDSSLKQVRSTKTQFMLDQLADLQNKEHMLVEANRSLTMKLEEINSRNQYRQTWEAGEQSMSYGTQNAHSQGFFQPLECNPTLQIGSDYRYNPEASEQQLAATTQAQQVNGFIPGWML

SEQ ID NO: 259561 - protein, 56 aa, Glycine max
  Clone ID: PAT_MRT3847_76409C.1.pep
EELTKEMLFTINAESGYLIRYLGTLLCKLLLDKFRTCNLDRLRSGIYIEPVSVARF

SEQ ID NO: 259562 - protein, 95 aa, Glycine max
  unsure (1)..(95): unsure at all Xaa locations
  Clone ID: PAT_MRT3847_7640C.1.pep
TRGLPKQIDDXQCPNPFFIKKTFIQTETKKVQFTKSPYAQPYGAYTWLTDIKHTSKEGYSSEEIRIKKEAYEGEXKFGAKSLGTDIGFAIPKLGK

SEQ ID NO: 259563 - protein, 70 aa, Glycine max
  Clone ID: PAT_MRT3847_76410C.1.pep
KDIVQIEEFQGMQRNMDAHDSNDNIDLLLNVNLAGYHRTGKRLEKKKVSEDKFVRGKTLKYDIGSAAVDS

SEQ ID NO: 259564 - protein, 53 aa, Glycine max
  Clone ID: PAT_MRT3847_76411C.1.pep
EMIQPVSNVTRPSNLLKYITFVSDHSLEGTLRNHIKSTCWSVNSLTSYTTCHI

SEQ ID NO: 259565 - protein, 72 aa, Glycine max
  unsure (1)..(72): unsure at all Xaa locations
  Clone ID: PAT_MRT3847_76412C.1.pep
LXSGRFFFFFFFFFFGQRILFILNTNGFLLSNLCYLIDFRFHCLYGGYILYEDVPLCSSPLQHCSSKSRGTV

SEQ ID NO: 259566 - protein, 44 aa, Glycine max
  Clone ID: PAT_MRT3847_76413C.1.pep
MVLLGLLMVGFLSLGSFVSASGYGWMDAHATFYGGGDASGTMGE

SEQ ID NO: 259567 - protein, 44 aa, Glycine max
  Clone ID: PAT_MRT3847_76414C.1.pep
LARMGRRMACHQYWQISLPMQCIQLLQVISWDWLPLLLTVCQFR

SEQ ID NO: 259568 - protein, 81 aa, Glycine max
  Clone ID: PAT_MRT3847_76415C.1.pep
TIGFFSGGVRESIFRSPDDPHGKVALSVRGLGFSEFQRFGVHFRLKFGSVASLVSVLHFLALMPFLLYVSCSYIHSLVRVH

SEQ ID NO: 259569 - protein, 87 aa, Glycine max
  Clone ID: PAT_MRT3847_76416C.1.pep
MTTVRHQEGGFFFFFFFFFFFFFFFFFFLFFFFLIEAPWPNSSTSHPRPIVVSAVIPSPRASHTKFSNVCSQYPATPAQTGRSGCLP

SEQ ID NO: 259570 - protein, 105 aa, Glycine max
  Clone ID: PAT_MRT3847_76417C.1.pep
YYSTKASNICSSICLRLVRSRKSLHNHHHVSPSSSWSSPSSSYSSSSSWSLAHYNNHNHNSSPSLCMRDKGRGQGRRSSKHNKCSNGLRGCYPYGNMRNAHVSHG

SEQ ID NO: 259571 - protein, 61 aa, Glycine max
  Clone ID: PAT_MRT3847_76418C.1.pep
AWFFGHGKQVKNKNVMASDDLRGYGKGYVAYQGQTLDRADALMLHIFYTGGRKLQIWPKIS

SEQ ID NO: 259572 - protein, 59 aa, Glycine max
  unsure (1)..(59): unsure at all Xaa locations
  Clone ID: PAT_MRT3847_76419C.1.pep
NHRDSTTFSPERRLYQVEXAFNAVNVAGITSIGVRRTDSNCVVTQKNVSDTLLDHTTVK

SEQ ID NO: 259573 - protein, 122 aa, Glycine max
  unsure (1)..(122): unsure at all Xaa locations
  Clone ID: PAT_MRT3847_7641C.1.pep
AWSPDGLTFATGNQDKTCRIWDARNLTESVPVLRGNVGAIRSIRFTSDGHFLSMEEAADFVHIFDIKSDYNKRQELDFFGEVSGMSFSPDTDTLYVGISDRTYGSLLXFGRLYNYSYLDSLL

SEQ ID NO: 259574 - protein, 56 aa, Glycine max
  Clone ID: PAT_MRT3847_76420C.1.pep
PPIRKSVTPRGCGPIILGPATGSAQGSARYNKTHYKKNCKPSSNSSKIPESTKKTE

SEQ ID NO: 259575 - protein, 49 aa, Glycine max
  Clone ID: PAT_MRT3847_76421C.1.pep
STLSCQQVVFFIFRPTIGHIWRASIYNSFSSVHSTVFSFEFKSSVLSGP

SEQ ID NO: 259576 - protein, 168 aa, Glycine max
  unsure (1)..(168): unsure at all Xaa locations
  Clone ID: PAT_MRT3847_76422C.1.pep
RIKTCHEYMDHEGRTQQSLVISTPKYHKRYILPEXGRSPSPSLQPQRSGAFSFTSTMPKKDLERRSVSPYRFPLLRTGSRSSSRPTTPKISRPTTPNPSRPTTPNPSNARQRYPSEPRKSSSMRLSAERDHGKDIEQYPSKSKRLLKALLSRRKSKKDDMLYTYLDEY

SEQ ID NO: 259577 - protein, 326 aa, Glycine max
  Clone ID: PAT_MRT3847_76423C.1.pep
MGKVTTSATQPVSQEASNYDEVFMQQSLLFDDSLKDLKNLRAQLYSAAEYFELSYSNDDQKQIVVETLKDYAIKALVNTVDHLGSVTYKVNDLLDEKVVEVSVAELRVSCIEQRIKTCHEYMDHEGRTQQSLVISTPKYHKRYILPVGETMHGANRTKSKYVGYNLDDEDEWPHFRNAVRATIRETPPSTERRGRSPSPSLQPQRSGAFSFTSTMPKKDLERRSVSPYRFPLLRTGSRSSSRPTTPKISRPTTPNPSRPTTPNPSNARQRYPSEPRKSSSMRLSAERDHGKELEQYPSKSKRLLKALLSRRKSKKDDMLYTYLDEY

SEQ ID NO: 259578 - protein, 196 aa, Glycine max
  Clone ID: PAT_MRT3847_76424C.1.pep
PTRPVPEESMGSVVELLGKRRGQMVDMEANGTEGTTLLKYKIPTRGLIGLRNAILTASRGRAILNTIFDSYGPWAGDLSSRDQGSLVAFEDGSTTSYALLNAQERGMLFVQPGQDVYKGQIVGIHQRPGDLAINVCKKKAATNVRSNKETTVVLDEPLSYSLDDCIEFIQEDEIVEVTPASIRMCKNPKSRKKVHN

SEQ ID NO: 259579 - protein, 58 aa, Glycine max
  Clone ID: PAT_MRT3847_76425C.1.pep
KLRLQGKAHGQKNGNGQQSFIRGRQGPKPQKIRPCQRGALKQRTIFLNFTSSEIYGQV

SEQ ID NO: 259580 - protein, 35 aa, Glycine max
  Clone ID: PAT_MRT3847_76426C.1.pep
RDPNFLANTQTSANLSSKSCSWVSKTSGKEIVVKT

SEQ ID NO: 259581 - protein, 118 aa, Glycine max
  Clone ID: PAT_MRT3847_76427C.1.pep
QSAKEERIALRPPMLQVVRLASFQHAPSVPPFISLPKQSRVDSDDSWMATEERKAGEVAVGGGGVSVAVTRFPMEQKRPVGPLVVVGVRDGVLWLIDRYMVAHAVSLSHPGIRCRCLA

SEQ ID NO: 259582 - protein, 614 aa, Glycine max
  unsure (1)..(614): unsure at all Xaa locations
  Clone ID: PAT_MRT3847_76428C.1.pep
AKEKFFVDAGVAQIDIETNKMKEEQKMREAPARAVAEHGELALITVEGIQSAKEERIALRPPMLQVVRLASFQHAPSVPPFISLPKQSRVDSDDSWMATEKKKXGEVAVGGGGVSXLLSRFPMEQKRPVGPLVVVGVRDGVLWLIDRYMVAHAVSLSHPGIRCRCLAAYGDAVSAVKWASRLGREHHDDLAQFMLGMGYATEALHLPGISKRLEFDLAIKSNDLRRALHCLLTMSNSRDIGHDGTQGLGLNDILSLSDKKPNKVSDKKQDIVEGVQGIVKFAKEFLDLIDAADATAQSEIAREALKRLAAAGSVKGALEGHELRGLALRLANHGELTRLSGLVNNLVMLGLGREAAFAGAVLGDNALMEKAWQDTGMLAEAVLHAHAHGRPTLKNLVQIWNQALQREVEPTPSQKTDAAAAFLASLEEPKLTSLADAGKKPPIEILPPGMPPLNGPISIQKKPASAAQNSQQPPGKPLALEAPPTTTAAQESATTQQPESTPASGNDPPPSESTSDTRPAPATAPPQPESGESTVDNGIPTSTPASDGDPNVNGENVQAASTGNPAPAPTPTPPDFPVSPAAEVSETTAPSPPTVPTPPAVPTPPAVPTSDPLI

SEQ ID NO: 259583 - protein, 55 aa, Glycine max
  unsure (1)..(55): unsure at all Xaa locations
  Clone ID: PAT_MRT3847_76429C.1.pep
NFNGIAFQCLQKLPAANNTFTYNGDAHTFDYLVDDGYTYXVVADESIGERRPHGF

SEQ ID NO: 259584 - protein, 123 aa, Glycine max
  unsure (1)..(123): unsure at all Xaa locations
  Clone ID: PAT_MRT3847_7642C.1.pep
ATRAGPGFPTTLLWARGRPRERFPAHVRGPKGNPQKEKKKTTPKAAGADPQTKKEPEGPNHGPXPPTARARGGPCGEPPEXGGPPRPLQPSGRPKKPPGRGGPPHLAHAQRGARPPPWPGAPH

SEQ ID NO: 259585 - protein, 64 aa, Glycine max
  Clone ID: PAT_MRT3847_76430C.1.pep
GLVQLLAQTEQQAARFFTDRGAPLVMILDWDTALLDFHNTHIYSRIPVFKTPLGSLIEKNKWGW

SEQ ID NO: 259586 - protein, 52 aa, Glycine max
  Clone ID: PAT_MRT3847_76431C.1.pep
VFGCLPQPWLLLISRLTHFITSMLQIAFNESTAEGLSIQHKITSQHTDLYNY

SEQ ID NO: 259587 - protein, 39 aa, Glycine max
  Clone ID: PAT_MRT3847_76432C.1.pep
FLILDLFFFVLVNYFFFISQRGKGTICKHIFSFTLTIFQ

SEQ ID NO: 259588 - protein, 152 aa, Glycine max
  unsure (1)..(152): unsure at all Xaa locations
  Clone ID: PAT_MRT3847_76433C.1.pep
MASRAVLLLAMCVLPAMVVAIRPAKNPFCVKGRVYCDPCRAGFETSATTYIAGLATRLXYTKKGYTDSTGAYTMYVDEDHADQICSAKLVSSPHPQCKEVTPGRDEAVVILTRYNGIASDDRFANAMGFMSQEVASGCAEVLRQYEEFDNEN

SEQ ID NO: 259589 - protein, 68 aa, Glycine max
  Clone ID: PAT_MRT3847_76434C.1.pep
AVLLLAMCVLPAMVVAIRPAKNPFCVKGRVYCDPCRAGFETSATTYIAGAEIMLQCMSRQYEEFDNEN

SEQ ID NO: 259590 - protein, 162 aa, Glycine max
  Clone ID: PAT_MRT3847_76435C.1.pep
MASRAVLLLAMCVLPAMVVAIRPAKNPFCVKGRVYCDPCRAGFETSATTYIAGAEIMLQCKSRVSNEVVYTKKGYTDSTGAYTMYVDEDHADQICSAKLVSSPHPQCKEVTPGRDEAVVILTRYNGIASDDRFANAMGFMSQEVASGCAEILRQYQEFDNEN

SEQ ID NO: 259591 - protein, 162 aa, Glycine max
  Clone ID: PAT_MRT3847_76436C.1.pep
MASRAVLLLAMCVLPAMVVAIRPAKNPFCVNGRVYCDTCRAGFETSATTYIAGAEIMLQCKSRVSNEVVYTKKGYTDSTGAYTMYVDDDHADQICSAKLVSSPHPQCKEVTPGRDEAVVILTRYNGIASDDRFANAMGFMSQEVASGCAEILRQYQEFDNEN

SEQ ID NO: 259592 - protein, 162 aa, Glycine max
  Clone ID: PAT_MRT3847_76437C.1.pep
MASRAVLLLAMCVLPAMVVAIRPAKNPFCVKGRVYCDPCRAGFETSATTYIAGAEIMLQCKSRVSNEVVYTKKGYTDSTGAYTMYVDEDHADQICSAKLVSSPHPQCKEVTPGRDEAVVILTRYNGIASDDRFANAMGFMSQEVASGCAEVLRQYEEFDNEN

SEQ ID NO: 259593 - protein, 55 aa, Glycine max
  Clone ID: PAT_MRT3847_76438C.1.pep
ILLRRNYIFSTHHFPENSNHLPYQMPPKYLRNWLLSPLILSAPWTGTILPPPLHF

SEQ ID NO: 259594 - protein, 82 aa, Glycine max
  Clone ID: PAT_MRT3847_76439C.1.pep
TPKRANDNMFRLRIALHLSISSKKRSLGFQGIGVLLPQMPPSHILSEFASDAYPILAYASDRVLAFAHTMQHYNQYIQAKTE

SEQ ID NO: 259595 - protein, 62 aa, Glycine max
  Clone ID: PAT_MRT3847_7643C.1.pep
KNISFPFSFTFQNNKFPNKPIFSQPPLKINPPNFTFSLLAWGGKFPKRQPFLAGKNQVVFFP

SEQ ID NO: 259596 - protein, 412 aa, Glycine max
  Clone ID: PAT_MRT3847_76440C.1.pep
RGSLPLQFSGLKCSPLSSSSLFSKPSLWTQQSQKRVSITIANSIAIANAQNKERARLKKLFEEAYERCRNAPMEGVSFTIEDFTAALDKYDFDSEVGGKIKGTVFYTDNNGAVVDITAKSSAYLPLQEACIHRVKHVEEAGLVPGFKEEFLIIGENSIDDSLVLSLRSLQFDLAWERCRQLQAEDVTVKGKIVGVNKGGVVAELEGLRGFVPLSQISSNSNVEELLDKELPLKFVEVDEEQSRLVLSNRKAVAGNQAQLGIGSVVTGSVQSLKPYGAFIDIGGINGLLHVSQISHDRVTDISTVLQPGDILKVMILSHDRERGRVSLSTKKLEPTPGDMIRNPKLVFEKAEEMAQTFRQRIAQAEAMARADMLRFQPESGLTISGDGILGPFTSDLPEEGLDLSEVPPAEES

SEQ ID NO: 259597 - protein, 72 aa, Glycine max
  Clone ID: PAT_MRT3847_76441C.1.pep
AARVHYSAIERLAGTRNEHGPLYHEIYISVPELLPIRSGSEGRTMRQPAAALLRRKRTRRNCLSLIVSNLCC

SEQ ID NO: 259598 - protein, 52 aa, Glycine max
  unsure (1)..(52): unsure at all Xaa locations
  Clone ID: PAT_MRT3847_76442C.1.pep
RLNRLPSDRVGDMXMDTVNMGKPDLKKIVXPSDIARLLKPWRRKDGVYMYFN

SEQ ID NO: 259599 - protein, 33 aa, Glycine max
  Clone ID: PAT_MRT3847_76443C.1.pep
RFQNYTIYVMTLQIQGVFLFFSNRKKILKPWAY

SEQ ID NO: 259600 - protein, 241 aa, Glycine max
  unsure (1)..(241): unsure at all Xaa locations
  Clone ID: PAT_MRT3847_76444C.1.pep
KTPTKPRRGISFPPQKAPKGGGAPPPAFPVGPPHPRNGFPQSGPAPRGPRVGPPFIPTPAKNPNPNPGPXGPQGPIHFPRTGLNPYXGPPPWGDRPPPPGSGPLGGWEICPRPKSGPPPGEPFPKSRPLKPPGGFGSWWIAPPREDAPRRVMGPPGKFPLGFPPQPGAGFPTPPVLFAPKETPPPGGGPPTGPLPPGKDVPGPAEKLWPPPPPQPSLKKRGPQRISPPGFPPAPPWGGGGG

SEQ ID NO: 259601 - protein, 155 aa, Glycine max
  unsure (1)..(155): unsure at all Xaa locations
  Clone ID: PAT_MRT3847_76445C.1.pep
MAGSIGSGWITRTGVEWHLRXPPNPRNPLVCFDVTLGNIPAGLINMELFAYFAPKTAENFMRFCTGEFRKSRLPVGYNVRQFHVLIVDSMIHAGDFAKGDGTGCVSMYGLKFGDENFTAKHIXVSVPSCRWANSGQNTDGCQFFITCAKCDWLDT

SEQ ID NO: 259602 - protein, 73 aa, Glycine max
  Clone ID: PAT_MRT3847_76446C.1.pep
KQLSDSRQQKNVLHSNRKSRLSGQSSNDVKLVNKKHLSIKKQTPISSQSQDTSVERLIREVTSEKFWHHPGIK

SEQ ID NO: 259603 - protein, 61 aa, Glycine max
  Clone ID: PAT_MRT3847_76447C.1.pep
SNIKRSGKKHYIGALNIVRTAHEPNHLTNTSRMVQEKNRRPSFVCEESKVSGNCLKNKITH

SEQ ID NO: 259604 - protein, 206 aa, Glycine max
  Clone ID: PAT_MRT3847_76448C.1.pep
RKAKKAVAAMLTRSKESEKTEDMNMTEEERVEKEQKELMPLLTGGKLKNYQLKGVKWLISLWQNGLNGILADQMGLGKTIQTIGFLSHLKAKGLDGPYMIIAPLSTLSNWVNEISRFAPSLPAVIYHGDKKQRDDIRRKHMPTRTIGPQFPIVITSYEIALNDAKRYFRSYNWKYLVVDEGHRLKNSQCKLVKALKFINVENKLLF

SEQ ID NO: 259605 - protein, 58 aa, Glycine max
  Clone ID: PAT_MRT3847_76449C.1.pep
SNTHNFFIIIISHHNIYNIFYSRLSITMCIMTHWMLDAHPYFSNKTLLRKHKHSSSSS

SEQ ID NO: 259606 - protein, 59 aa, Glycine max
  Clone ID: PAT_MRT3847_7644C.1.pep
HFTTARYPDLYNTCISLSLTLSLDHGYLVILQFIDHIPSLHPNTPNYHSLSFNPILILN

SEQ ID NO: 259607 - protein, 93 aa, Glycine max
  Clone ID: PAT_MRT3847_76450C.1.pep
HKNFSINQNVVIMSFILAQNMVTLFYLLRCRLTLQFKKQGWMTMFYLPWKRVPYLVNLQTTFSPYFSTPALVIIFFLKGGTPFFLHPPLTLFF

SEQ ID NO: 259608 - protein, 67 aa, Glycine max
  unsure (1)..(67): unsure at all Xaa locations
  Clone ID: PAT_MRT3847_76451C.1.pep
VIEPYTXTPTHRYRLLALRXXITFNIVDPRSGGGSPXLMDHFFTPXXHWIPYFGTLCXPSQXTFFFV

SEQ ID NO: 259609 - protein, 83 aa, Glycine max
  Clone ID: PAT_MRT3847_76452C.1.pep
IIDGMRRAFEGTVNISFDGVFPVGGIFRRDGVPSDVAVEDGVVIVVRKIAIADHGRSNNEGPSDRGSAVLSRAKVVVMSETRS

SEQ ID NO: 259610 - protein, 90 aa, Glycine max
  Clone ID: PAT_MRT3847_76453C.1.pep
VMRGCVGITFAHRGWSRGLLFTRASSQTGGFCYVFLTNPGYLSFTSYDVPWALPQGNSEIFSTALALEFSIPIPTPNPNLTSTITYAFVT

SEQ ID NO: 259611 - protein, 59 aa, Glycine max
  Clone ID: PAT_MRT3847_76454C.1.pep
DRGILNLRYRFKSYWTQIVCIYLHIYANICNLYLVVLFYLLYSFLCYFLFSLEFILFIY

SEQ ID NO: 259612 - protein, 238 aa, Glycine max
  Clone ID: PAT_MRT3847_76455C.1.pep
MDFTEKDLFGEDSDNDNGSHSSGSSSSSSVASSSSSSSGSSSASSSKASDAAADSSSASGSASSGAEDDDENGDVVDSAKARAHHHHDYEDKDLFGSDNEDYCKTLARSPYPIPVLPATRNVNNQGRGGFGRGRWQNDRGAGLLPRPGPYPQRQNFGYGNRFQNGRHDERFVSELKLSKSEETLSRKCIAFQEPCDVGREESAWRLLTRYYAGCMEQSKKVSILDPTCFVWLFHSLTL

SEQ ID NO: 259613 - protein, 508 aa, Glycine max
  unsure (1)..(508): unsure at all Xaa locations
  Clone ID: PAT_MRT3847_76456C.1.pep
MDFTEKDLFGEDSDNDNGSHSSGSSSSSSAASSSSSSSASSSASSSKASDAAADSSSASGSASSGAENDDENGDVVDSTKVRAHHHHDYEDKDLFGSDNEDYCKTLARSPYPIPVLPAIRNVHNQGXTGGLLLMSDKMGXYATVKEGEDYILQFQNFGYGLEFLQGQSDPHLVTDLKQLIRKFTELNRYYYLNNSIYEGESTLDFSPEVCSVHEFLVXFHPQITADIGADYNDSNDTYFSKKAXGSKDLADLLACIRDKNIPLQNILLQTFRNNLNAILETGYRRHEPWEMGVHKRNGVVYLDVHKLPEKPQSDLDRRRCYVGYCFESLATEDPNRADGEGIHHVDANVEFCAVIKTKLGAHRILMGAEMDCCDSTNEGKRFYVELKTSCELNYHTEERFEREKLLKFWIQSFLAGVPYIVIGFRDDAGRLVRTERLRTKDITQRVKMKNYWQGGVCLAFADEVLCWLYGTVKEGEDYILQFAPPFNRLELLQAQSCPDVITSHLELL

SEQ ID NO: 259614 - protein, 131 aa, Glycine max
  unsure (1)..(131): unsure at all Xaa locations
  Clone ID: PAT_MRT3847_76457C.1.pep
LERIEKRFLSKQGTISMSLTPPPYDLQYFKLQPIKESIGLRERDAPLMTDMITYADADDRIVGTGSGGLFCAYELSRNPAGSEAIDRQSVSPGCDTGIGGQIFSAMVVRTPAHLFLDXLGAVYNEQEDYVV

SEQ ID NO: 259615 - protein, 63 aa, Glycine max
  Clone ID: PAT_MRT3847_76458C.1.pep
DFSCQPDENLTQWERNKIKKKQIESFRVEDENETVSFISFNICFEKRNFKKEEKINFLSIAHM

SEQ ID NO: 259616 - protein, 57 aa, Glycine max
  Clone ID: PAT_MRT3847_76459C.1.pep
PLMSSRFQSPYWYAHDSNTYFVTKPCCSYFRKFYILSLLYFYSVSVLHLAINTRCVY

SEQ ID NO: 259617 - protein, 85 aa, Glycine max
  Clone ID: PAT_MRT3847_7645C.1.pep
LKFGPIFLGGFFPALKAFIRGWFRFLAPPFKGLLFGVPFGEKGVGRPPPVFGVEVFLLSGQGGIPSPGGSIRGWPRLIYSRMGPL

SEQ ID NO: 259618 - protein, 242 aa, Glycine max
  unsure (1)..(242): unsure at all Xaa locations
  Clone ID: PAT_MRT3847_76460C.1.pep
MAVPSFSARSFSLPAQNHYCHLSSLPLPSFTLSSRRPRHSSSNLFTPLRSPTTPIFASAPGGGTGGGHAGGGGGGGDGESEDRDRNREEALLVLAEAGRPLEKLPADLAAAVEAGRVPGSIVKRLFELEKSAVFRWLLNFGGFRERLLADDLFLAKVAMECGVGIFTKTAAELEKRKENFTKELDFVCADVVMAIVADFMLVWLPAXTVSLRPPLAVSAGTIAKFFYGCPENAFQVGLAGTS

SEQ ID NO: 259619 - protein, 60 aa, Glycine max
  unsure (1)..(60): unsure at all Xaa locations
  Clone ID: PAT_MRT3847_76461C.1.pep
XXXAGEPTKGGIFLKLFPESIKGGTNANKIKKKKALHAPSYDWEAYLWMDIYSLMPHIFF

SEQ ID NO: 259620 - protein, 376 aa, Glycine max
  unsure (1)..(376): unsure at all Xaa locations
  Clone ID: PAT_MRT3847_76462C.1.pep
MAVPSFSARSFSLPAQNHYCHLSSLPLPSFTLSSRRPRYSSSNLFTPLRSPTTPIFASAHGGGTGGGHAGGGGAGGGGGGDHESEDRDRNREEALLVLAEAGXLPADLAAAVEAGRGPGPVPGSIVKRLFELEKSAVFRWLLNFGGFRERLLADDLFLAKVAMECGVGIFTKTAAELEKRKENFTKELDFVCADVVMAIVADFMLVWLPAPTVSLRPPLAVSAGTIAKFFYGCPENAFQVALAGTSYSLIQRIGAIVRNGAKLFAVGTGASLIGTGVTNALINARKVVDKSFAAEAEDVPIISTSIAYGVYMAVSSNLRYQVLAGVIEQRILEPLLHQHKLMLSAICFAVRTGNTFLGSLLWVDYARWVGVQKIRD

SEQ ID NO: 259621 - protein, 60 aa, Glycine max
  Clone ID: PAT_MRT3847_76463C.1.pep
SAWATQFFFVIFFKSYIWSCCFSIWPILSMLMVLHFSPYDNEPKYSEGLMDFSYLNRNPK

SEQ ID NO: 259622 - protein, 117 aa, Glycine max
  unsure (1)..(117): unsure at all Xaa locations
  Clone ID: PAT_MRT3847_76464C.1.pep
MASVTGFLVSPAGAVRHHWFGVRAVLSSESGTVAAVNGSSSQNGSLALKEEKKVPLLRGEEEEEGLAALWDDGYGRRSVEDYFAAAKEMCKSDGGPPRXFAXLECGPPFKDSPTLLF

SEQ ID NO: 259623 - protein, 389 aa, Glycine max
  Clone ID: PAT_MRT3847_76465C.1.pep
MKFAIITILFSLFLLDFGFAQQGDLDISRFGGKPNTNIGQAFLSAWTQACASPTAVKIVIPAGTYQMGAVDVKGPCKAPIEVQVDGTIQAPANPTDLKAAHQWFVVQYVNSFTLSGKGVFDGQGATAWKQNDCTTNKDCKMLCMNFGFNFLNNSIVRDITSKDSKNFHVNVLGCNNFTFDGFKVSAPKDSPNTDGIHIGRSTDVKILNTNIATGDDCVSLGDGCKNITVQNVNCGPGHGISVGSLGKYDAEEPVAGLLVKNCTLNGTDNGVRIKTWPNTPGAITITDMHFEDLTMNNVTNPIIIDQEYCPWNQCSKQNPSKIKISKVSFKNIKGTSGTKEGVVLVCSSGVPCEGVEMADIDLTFNGAAATAKCANVKPTITGKAPTCAA

SEQ ID NO: 259624 - protein, 58 aa, Glycine max
  Clone ID: PAT_MRT3847_76466C.1.pep
SFLSKTRSYRPISMTCPIRLLTLRFAMLTISSYSSASFDRFRCLRTAGLGFPHTSHLG

SEQ ID NO: 259625 - protein, 116 aa, Glycine max
  unsure (1)..(116): unsure at all Xaa locations
  Clone ID: PAT_MRT3847_76467C.1.pep
KFLKGGKKKLKSFMDEWKQKFPHGRXSPFFFVKEEVLTKKLGVXTGVGAFKVGFFPPPPTEGFSIFFKKRPKWEWKILHPYIKNLKGPGLFSKGLLLKYPRRTQPSPDTKPVFRAK

SEQ ID NO: 259626 - protein, 56 aa, Glycine max
  Clone ID: PAT_MRT3847_76468C.1.pep
TKSHGIYGEKTFKTLYKLQPKIPGLRGVKKKPGGLASLNRKGAPRRGPTSPPGKNF

SEQ ID NO: 259627 - protein, 96 aa, Glycine max
  Clone ID: PAT_MRT3847_76469C.1.pep
LYFFLREKRLGGKSFFKGRGKLFPFNLERPPSQKKKTHFFLGRLLGKFYFRVVEQPIKHPFFIEFFLKTNPWGNPGLNKTFWAFFFFWGKGGVLRV

SEQ ID NO: 259628 - protein, 71 aa, Glycine max
  Clone ID: PAT_MRT3847_7646C.1.pep
CPMTNGTEEGSHQEYQPALDLIALLRSLDIPTEKDDDSHCRVIIAALFQRAVLQLLSSAQLEEVSARDRDV

SEQ ID NO: 259629 - protein, 94 aa, Glycine max
  unsure (1)..(94): unsure at all Xaa locations
  Clone ID: PAT_MRT3847_76470C.1.pep
AKPVSIEVWNPXGKYRVVSTKPMPXXXFXSILXVQMXXXPXIMXRDENXSVQXKTSLXXIGDKCDGXIGQLTEDWGXQXFSTLSKAXGXAFVNM

SEQ ID NO: 259630 - protein, 46 aa, Glycine max
  Clone ID: PAT_MRT3847_76471C.1.pep
QGYITCKRLATKMKSILKRISKMCRIFNQTFRIIHESCQLPPPNCR

SEQ ID NO: 259631 - protein, 356 aa, Glycine max
  Clone ID: PAT_MRT3847_76472C.1.pep
MEVTAAPVPYVQEIAKEALTIVPERYVRPVHERPILSNSTPLPEIPVIDLSKLLSQDHKEHELDRLHYACKEWGFFQLINHGVDSSLVEKVKRGAQGLFDLPMEEKKKFGQREGEAEGYGQLFVVSEEQKLEWADLFFMFTLPPNKRKPHLFPNLPLPFRGDLDAYCEELRKLAIQILDQMANSLAIDPMEIRELFGEAEQSMRMNYYPPCPQPELVMGLNPHSDGGGLTILLQANEVEGLQIRKDGLWIPVKPLPNAFIINLGDMLEVMSNGIYQSIEHRATVNSEKERLSIATFYSTAIDAIICPAPSLVTPKTPAMFKPISAGDYFKGYLAQELRGKSFLDTIRIHAENENSS

SEQ ID NO: 259632 - protein, 44 aa, Glycine max
  Clone ID: PAT_MRT3847_76473C.1.pep
QHTYMGIKLPVSKEKVYTNMQLRIYWQLNNHMDKKCDIRTHLHH

SEQ ID NO: 259633 - protein, 82 aa, Glycine max
  Clone ID: PAT_MRT3847_76474C.1.pep
ESEFPRFRGCAFIYPQRKIFKMGVFQKPGGEFLDVLACLVGNCFFLNPFPLIFPNPCFPKRMWDFWGFPPILIDMKYSRFWA

SEQ ID NO: 259634 - protein, 38 aa, Glycine max
  Clone ID: PAT_MRT3847_76475C.1.pep
LEQDDYDKMSNYKSSAPASASNLLDLNFILVFLDKREY

SEQ ID NO: 259635 - protein, 52 aa, Glycine max
  Clone ID: PAT_MRT3847_76476C.1.pep
ILTVRTLHDLIPEIEALFSDHFTVSLMNEAITIWMMFGEAIKGIFMELENFI

SEQ ID NO: 259636 - protein, 53 aa, Glycine max
  Clone ID: PAT_MRT3847_76477C.1.pep
RETCVAVPDSAWKQNAAPDMQPYMDTTAGFDIDAKGRALVWNYESADRDFGSC

SEQ ID NO: 259637 - protein, 35 aa, Glycine max
  Clone ID: PAT_MRT3847_76478C.1.pep
CLMVQLFSIHGTLAHAVTLTAHLSSPVKSFWMTVS

SEQ ID NO: 259638 - protein, 61 aa, Glycine max
  Clone ID: PAT_MRT3847_76479C.1.pep
GLKTAFFSGSIIQHSLGYIGTQPLFFLLLPFSPLIKKGRFLFFFGHPQACDHHKHVEQFLA

SEQ ID NO: 259639 - protein, 120 aa, Glycine max
  Clone ID: PAT_MRT3847_7647C.1.pep
MSELVYRISTAKEWEELQSNGSSFGGDLDKSSAFIHLSKLDQVRSTLENFFLNSKEELYLLQIDAKKLGDGLVYEIVDGKNSFPHFYGPSRSFVPLPLDAVIKAEKLTLTDGRFSCSLLD

SEQ ID NO: 259640 - protein, 93 aa, Glycine max
  Clone ID: PAT_MRT3847_76480C.1.pep
LDDMNIAGWNAMMAGYAQHGDYQSAFELFESLEGFGLVPDEYTFLAILTALCNAGMFLEIYRWFTRMRVDYGLEPSLEHYTCLVGAMARAGEL

SEQ ID NO: 259641 - protein, 79 aa, Glycine max
  unsure (1)..(79): unsure at all Xaa locations
  Clone ID: PAT_MRT3847_76481C.1.pep
SKAALXVANDMLLSWSQSPQKIXLGSIQXPXASSNLPCLYSFLKSFPIMQIILVWWYSLYVLNMAGSNYLSGGKSPFPI

SEQ ID NO: 259642 - protein, 63 aa, Glycine max
  unsure (1)..(63): unsure at all Xaa locations
  Clone ID: PAT_MRT3847_76482C.1.pep
MPNPKVFFDMTIGGQPAGRIVMELYADVTSSTAENFRALCTXGEKGAGRNGKPFHSKASSFPA

SEQ ID NO: 259643 - protein, 151 aa, Glycine max
  Clone ID: PAT_MRT3847_76483C.1.pep
MDHFAAHEEQLASQRMRQKLEEVNVAAQTNLAPVQDYVNYTLQKAYFKCAYECFDRSKRQEEISSCVENCSIPLSNVQHTFDHEMAQFQERLNRSLMVCQDKYEAARLQKKNDAMNDLVSCADQSILESIKTLPHLANKLKASFGISDNGS

SEQ ID NO: 259644 - protein, 60 aa, Glycine max
  Clone ID: PAT_MRT3847_76484C.1.pep
KIFNVPSVMIIVNKSCRENILLSPGSVYFVKIILFSFCKLPKTSNAKWSISLKLIVTQHV

SEQ ID NO: 259645 - protein, 93 aa, Glycine max
  Clone ID: PAT_MRT3847_76485C.1.pep
YSLSALICGLCLRHLWSSDSSASLLSHSLLLRRFLSAFAVHSLAKFQNPRTASLTANQNQIESNPIDALGIWCSAAVFSPSCFCCFMEKCLIS

SEQ ID NO: 259646 - protein, 250 aa, Glycine max
  Clone ID: PAT_MRT3847_76486C.1.pep
MRRRPGIGGLQTHAAARDQFRLLGENVAKIRTDLMKEQLATFRSQLEDFARKHKNDIRKNPSFRSQFHEMCAKVGVDPLASNKGFWSELLGLGDFYYELGVQIVDICLATRAHNGGLIDLHELCSLLRQRRKSDREVVSEDDCLRAIKKLKVLGSGFEVISVGKKKLVRSVPTELNKDHNEILELAQAQGFVTVDEVERRLSWSSGRAIDALDTLLDEGLAMIDDGHRDGRRRYWFPCVSPISSSIGVDS

SEQ ID NO: 259647 - protein, 77 aa, Glycine max
  Clone ID: PAT_MRT3847_76487C.1.pep
PTRPLVSLSLSLSLRNPPCDGALDPWLLCPTFACVSLLLSFKATVYPLFPLWVLGNPLVGPTFTTLQTHFHPKACNL

SEQ ID NO: 259648 - protein, 104 aa, Glycine max
  Clone ID: PAT_MRT3847_76488C.1.pep
MSSRGASALLSRASRIRSKLQTALEATVLEVDDVSYQHAGHAAVKGSSDKETHFNVKIVSPKFEGQSLVKRHRLVYDLLAEELQSGLHALSIVAKTLHETNPNK

SEQ ID NO: 259649 - protein, 104 aa, Glycine max
  Clone ID: PAT_MRT3847_76489C.1.pep
MSSRGATAVLSRASRIRSKLQTALEATVLEVDDVSYQHAGHAAVKGSSDKETHFNLNIVSPKFEGQSLVKRHRLIYDLLADELQSGLHALSIVAKTPHETNPSK

SEQ ID NO: 259650 - protein, 251 aa, Glycine max
  unsure (1)..(251): unsure at all Xaa locations
  Clone ID: PAT_MRT3847_7648C.1.pep
MLVRAEIQALEKDGDKMAIAKASMQSVHLQISEGAAQLTAYRGSSHQAFALIIDGKSLVYALEDNMKNLFLELAIRCASVICCRSSPKQKALVARLVKSGAGKTTLAIGDGANDVGMLQEADIGVGISGVEGMQXYLERLLLVHGHWCYRWISSMICYFFYKNITFGFTLFLYVVYASFSGQPAYNDXCLSLYNLFFSSLLMIAPEVFDKNVSARYCLKFPLLHQERVQNVLFSWHRILSWMLNGFISAII

SEQ ID NO: 259651 - protein, 54 aa, Glycine max
  Clone ID: PAT_MRT3847_76490C.1.pep
FPGGGAIENSSLVTTVGGEQSLVFGLEHGDGVLEGASQGRPPVDQSQMGIPQLK

SEQ ID NO: 259652 - protein, 68 aa, Glycine max
  Clone ID: PAT_MRT3847_76491C.1.pep
RVGSVKVRGFSAVKAPSSVTATHSAHPLIFIQFCCEDVSLDLKLKSINYKDDCKSSENSKLHFIVWIF

SEQ ID NO: 259653 - protein, 92 aa, Glycine max
  Clone ID: PAT_MRT3847_76492C.1.pep
KWKTIIIIIIRNLVCLDSSWGSIITLAQMSNIGVVVVVPLLLGLIFLLSALLPLLVITHYRIFCYLFVKFLAFGSSVSFHKVSTNLVIINPT

SEQ ID NO: 259654 - protein, 54 aa, Glycine max
  Clone ID: PAT_MRT3847_76493C.1.pep
SSRAAAYFLYFFSLSARFQHNTTPPTHAKFSTTPIHPLTNQNLFRNPNQQHPHS

SEQ ID NO: 259655 - protein, 63 aa, Glycine max
  Clone ID: PAT_MRT3847_76494C.1.pep
RVSAFIASHQSLPFFSLQSVSMAGVAYIKASFSDTPFLCSKPRTYILPSLARPRIGSSFLSFS

SEQ ID NO: 259656 - protein, 127 aa, Glycine max
  unsure (1)..(127): unsure at all Xaa locations
  Clone ID: PAT_MRT3847_76495C.1.pep
MMKASYDTKSDLILMDLAGEKEGQIQSEDRLPKSVISGDLREPNTGTAHPCRSLQARKPISSADXPPTCXSRDPLYAPQLGKLFEITPXRNPQLPDXDVFLRAGDINEATLYPPHDCSNAIGELLIH

SEQ ID NO: 259657 - protein, 63 aa, Glycine max
  Clone ID: PAT_MRT3847_76496C.1.pep
HHLHVAFRPRKRSQKRRPRNCGQEDWQKARRGGDSGVSRGSKRRKQSPVSMRLTVHYINLARA

SEQ ID NO: 259658 - protein, 138 aa, Glycine max
  unsure (1)..(138): unsure at all Xaa locations
  Clone ID: PAT_MRT3847_76497C.1.pep
ASXKETXRXHPPRPXXKRKGTEEXERXGYXTPEGAXSPXKGRQAGRDPKDRDRPXEAXPERXXETGXEGEAGPPXXRGQXXEXXPXGXARRRGPGXXRATPGRATXGAXXKERXDXQAPGPQGQDLXGXDPQXSKEEK

SEQ ID NO: 259659 - protein, 58 aa, Glycine max
  Clone ID: PAT_MRT3847_76498C.1.pep
FMIKIKTKSNVNQHKYLRSINAHQTIQQPLGIPKAIYKISQNDCVGGNVSKKQHTLDS

SEQ ID NO: 259660 - protein, 71 aa, Glycine max
  unsure (1)..(71): unsure at all Xaa locations
  Clone ID: PAT_MRT3847_76499C.1.pep
SXLRDPGVGQPPICPHSXXXAPLRQIQSYXASFQXIIYIEQFLSGQXXHXTKHXKSRNXRNQXFKMKIXQC

SEQ ID NO: 259661 - protein, 80 aa, Glycine max
  Clone ID: PAT_MRT3847_7649C.1.pep
WQKNIDFSKMREIIAALYFMPCIPLRCYELQFRMRKNWDVFFKQTIIKIQLPHVQSVCSLSKLFYGYVLKKKILKKQNHN

SEQ ID NO: 259662 - protein, 96 aa, Glycine max
  unsure (1)..(96): unsure at all Xaa locations
  Clone ID: PAT_MRT3847_764C.1.pep
SPTLLEEIHKLTDSPSSWVILHHTVYXLTKFIDEHPAGEEVLTEQAGGHATDTFQDVGLSTDAPELSXTYIIRELHPYDRPQIVTPSETLITTGRV

SEQ ID NO: 259663 - protein, 60 aa, Glycine max
  unsure (1)..(60): unsure at all Xaa locations
  Clone ID: PAT_MRT3847_76500C.1.pep
SLMHXDVXSEFXSSXPXRXRXXXEXXXVRSWXAXXLGXPXAVLGHSXXPSIDPXXXIXHX

SEQ ID NO: 259664 - protein, 73 aa, Glycine max
  Clone ID: PAT_MRT3847_76501C.1.pep
HLHSRETDGELGFCPTKDCENATHMIETSVSISTRNTNESSIRRFLDALRYVSVSNQSLLLFSQQNWKYNLRR

SEQ ID NO: 259665 - protein, 48 aa, Glycine max
  Clone ID: PAT_MRT3847_76502C.1.pep
RSVPVLYYISSPNENVLQCNSIKLRQGFFFPVVCVVTASPLNLVYATL

SEQ ID NO: 259666 - protein, 246 aa, Glycine max
  Clone ID: PAT_MRT3847_76503C.1.pep
SRVFPSFNPIDVPKQPSITNVPCAEHNQLDVIRLSQQSQLSSSERKLMSRAQRQRQLAFAAQKQLLNDLETSKPHEHESMKEAAQDTFAILDNLGANDTQFFEHVLYFIKLTSSVVQMTKSIECLEEDNKRLEDENAKLAHIRDLYAKTEDQFQASDQRRQLLSKEISDFEAMLVEKRNQLKSCELETSNMRIELGGLRRTMLEADTALKARMKQAEIAGKLRKEREAKQIAAKTALEKARLKSEY

SEQ ID NO: 259667 - protein, 114 aa, Glycine max
  Clone ID: PAT_MRT3847_76504C.1.pep
MDGDIFGELGNSTQVDSRLLQVFQKSLLQAQDILNQNRLLINEINQNHESKMPDNLSRNVGLIRELNSNIRRVVDLYADLSNSFTKSREASSEGDSSGTLKSDGKVNQKRIRSS

SEQ ID NO: 259668 - protein, 114 aa, Glycine max; identical to SEQ ID NO: 259667
  Clone ID: PAT_MRT3847_76505C.1.pep

SEQ ID NO: 259669 - protein, 173 aa, Glycine max
  Clone ID: PAT_MRT3847_76506C.1.pep
PGIRLEGISGILKDILSFSGVSSKACVCPALSRPPEQIFEIVNLTNELLPPLPHGTISLPIISNMFLKGPIVKKSPAGSSGKQEDTNGNVPEISAREKLLNDQPELLKQFAMDLLPVLIQIYGSSVNGPVRHKCLSVIGKLMYFSTAEMIQSLLSVTNISSFLAGVLAWKDPH

SEQ ID NO: 259670 - protein, 53 aa, Glycine max
  Clone ID: PAT_MRT3847_76507C.1.pep
IYYIYIYIYIFVFLQLYIKNKNLELQHKKCILSNKIKKHFKIINKKYSDPTHF

SEQ ID NO: 259671 - protein, 46 aa, Glycine max
  Clone ID: PAT_MRT3847_76508C.1.pep
FHTFPFYLSIFSFRKPIRPPRNHKHSFFLKKIFIHSKFHTKYEPKT

SEQ ID NO: 259672 - protein, 162 aa, Glycine max
  Clone ID: PAT_MRT3847_76509C.1.pep
MSSLDLLLFSLSRAFCSPIAVFFQIQGCLICLTLALGWACAAYVRNREIKQMKDCMKNGNSFSFLCHDINELEHSYQVDLPRVTVIMPLKGFGEHNLHNWRSQITSLYGGPIEFLFVVESTEDPAYHAVSRLIAEFEDHVEASVVVAGSSTTCSQEIHNQLV

SEQ ID NO: 259673 - protein, 54 aa, Glycine max
  Clone ID: PAT_MRT3847_7650C.1.pep
VYNQLPLRCRSQHNSLQDDVGFSPCTCSLHTHSTINLLGAVQLICWSLSAGIGH

SEQ ID NO: 259674 - protein, 42 aa, Glycine max
  Clone ID: PAT_MRT3847_76510C.1.pep
SLLWEKKTSTFNGGNQKGERLKISYCDLGPYKSWLLKHFNCT

SEQ ID NO: 259675 - protein, 76 aa, Glycine max
  unsure (1)..(76): unsure at all Xaa locations
  Clone ID: PAT_MRT3847_76511C.1.pep
RTYYVMPKILLNDGEIELDLTETYICPLAGGQSPSHVSYALPQKISSPFLILDITEXIIMSHNFIHVPSCDSSSSR

SEQ ID NO: 259676 - protein, 110 aa, Glycine max
  Clone ID: PAT_MRT3847_76512C.1.pep
LWRTIRSLSLSLLHAVMLSLSCANGVAAATMAGALTTTGISRDGNIDLFTTNAAGKADQDADLDSESIMKRIKELVPRPTQTLARTNDLSLYGLAMAMDCQVVCDVGCYM

SEQ ID NO: 259677 - protein, 207 aa, Glycine max
  Clone ID: PAT_MRT3847_76513C.1.pep
MSYLGLGVSPGTVPVYHGTKLKVLDRRVRITELVLRCVSLGLGVVAIVLVVTDSQVKEFFSFQKKAKFTDMKALVFLVVANGLTVGYSLIQGLRCVVSMIRGNVLFSKPLAWLIFSGDQVMAYVTVAAVAAAGQSGVIARVGQPELQWMKICNMYGKFCNQVGEGIASAFVASLSMVVLSCISAFSLFRLYGGNKTKNVVGRLETST

SEQ ID NO: 259678 - protein, 52 aa, Glycine max
  unsure (1)..(52): unsure at all Xaa locations
  Clone ID: PAT_MRT3847_76514C.1.pep
LGSILLLFTAPSXDTRGLSFYHTTIVETVASKTMAAWAIFQTIYTIICYGLT

SEQ ID NO: 259679 - protein, 236 aa, Glycine max
  unsure (1)..(236): unsure at all Xaa locations
  Clone ID: PAT_MRT3847_76515C.1.pep
MADEGNKSNNFYSILGLKKECTELELKNAYRKLAKKWHPDRCSATGNSELVEEAKKKFQEIREAYSVLSDANKRLMYDVGVYDSDDDENGMGDFLDEMLTMMSQTKSNENAEXESFEELQQLFEDMFQADIGLDGGPSLASSDSSTSSAYMTYSESSSSNKRNSSEMNFGKAENSSVFDASYQNFXLGQVNQLQDIKKKKGGILGGGRSRHRNGRKQNMSYGHDVSSNDYPGISTK

SEQ ID NO: 259680 - protein, 258 aa, Glycine max
  unsure (1)..(258): unsure at all Xaa locations
  Clone ID: PAT_MRT3847_76516C.1.pep
MMLDGRKPEDVNDVLGMRVILNPKAGENALEAGERACYRTHQIIQSMWKEIPYRTKDYIARPKANGYKSLHMAVDVSENGKTRPLMEIQIRTTEMDRLAVGGTAAHSLYKAGLTDPEEAKRLKTIMLAAAELAALRLKXFPTSTNHKGIEIHQRDRVFRLLDKNGDGKISIEELTEVMEELGAPGEDAREMMQLLDSNSDGSLSSDEFHMFQEQVELVRNLEVRDDQYKKLLDEKLHMADESGLIQVYSKEFGNRLAS

SEQ ID NO: 259681 - protein, 70 aa, Glycine max
  Clone ID: PAT_MRT3847_76517C.1.pep
NKRLISEQWESFLVSGYQTLIGFRFQCWVFNYRYCLVWKRNVDIGGSRLKIWESNSNVKSKKKKRAAARD

SEQ ID NO: 259682 - protein, 145 aa, Glycine max
  Clone ID: PAT_MRT3847_76518C.1.pep
VCCPPPRVGFRGGSPGTSLFSPPPVFFFMALFAGGFTSHARVCSPRVSGPPPVGKKIPCLFLGPPNICPPLEQVTGPFSGAILLGPPRNVVFFGGPPVLSGIAPSPFWGAFEGLFVSLGWATPLGVTSQISLLCRTILNVPHQRD

SEQ ID NO: 259683 - protein, 38 aa, Glycine max
  Clone ID: PAT_MRT3847_76519C.1.pep
TDCLIQPHCIAFIINLHVVLYSHFLFLLLSTVGFLMSF

SEQ ID NO: 259684 - protein, 50 aa, Glycine max
  unsure (1)..(50): unsure at all Xaa locations
  Clone ID: PAT_MRT3847_7651C.1.pep
AVLIYASTSDGDSLXALKIIFHIREYGCIQYAGYPVASNDEIHKYTLSSS

SEQ ID NO: 259685 - protein, 71 aa, Glycine max
  Clone ID: PAT_MRT3847_76520C.1.pep
LTKPFLGLQNCHWQMERFPTPWVPIFPLPFFLLGKMYKEGFWKSMVANVNGLQPLLVKQQNLKSTSAHLKI

SEQ ID NO: 259686 - protein, 65 aa, Glycine max
  Clone ID: PAT_MRT3847_76521C.1.pep
VWVFFFFFFFFFFFFANQIAFFYGNSKRHHLSSCCPKGANRFPTSINTRAVLVLWLKHRQSHQNV

SEQ ID NO: 259687 - protein, 63 aa, Glycine max
  Clone ID: PAT_MRT3847_76522C.1.pep
IRIPPSTLIAVEKKVKQSKPVANKTKRLLWMIYKKYSMGCSVGFEYVGKKKFFILKEGFCDKR

SEQ ID NO: 259688 - protein, 60 aa, Glycine max
  Clone ID: PAT_MRT3847_76523C.1.pep
DHHAKTKRSVNQTNKQYEIIIYIQERHQKHATLAVNSNLIRVLFPLRVLGSKHAEAVPPN

SEQ ID NO: 259689 - protein, 259 aa, Glycine max
  Clone ID: PAT_MRT3847_76524C.1.pep
MQYMFYYLVSVLLCSCQTYEGGIAGEPGSEAHGGYTFCGLATMILIGEVNRLDLPRLVEWAVFRQGKECGFQGRTNKLVDGCYSFWQGGAVALLQRLSSIINKQMEEASQTFTISDVSEAKESLDGTSSHATCHGKHEGTSQSCSADYKSIGYNFINEWRAQEPLFHSIALQQYILLCAQEQAGGLRDKPGKRRDHYHTCYCLSGLSLCQYSWSKHPDSPPLPNLVLGPYSNLLEPIHPLFNVVLERYREAHVFFFTES

SEQ ID NO: 259690 - protein, 53 aa, Glycine max
  Clone ID: PAT_MRT3847_76525C.1.pep
GEAYRDSLQKPSICLTRCLYCPLEKCKLHRLITSHCTDQLNILFLVAMAFEQN

SEQ ID NO: 259691 - protein, 35 aa, Glycine max
  Clone ID: PAT_MRT3847_76526C.1.pep
RYAVFDFDFGTVDYCRKSKIFFIAWAPTASRVKPR

SEQ ID NO: 259692 - protein, 108 aa, Glycine max
  unsure (1)..(108): unsure at all Xaa locations
  Clone ID: PAT_MRT3847_76527C.1.pep
RPSNFYIQTFYMDSGFIERTMGIGRWHNKREIPIIPTIYXLSXSIKYLNAGXSTHLPISPKSWHENTYIKSXYMPXDHFTITPTFIGTVLSMNVEAFLRNVMILFSLI

SEQ ID NO: 259693 - protein, 50 aa, Glycine max
  Clone ID: PAT_MRT3847_76528C.1.pep
YFGGNQTIVLNQKKFTIFHFFLLGREKNHIQQATILWLLQVFQHLPSNLT

SEQ ID NO: 259694 - protein, 83 aa, Glycine max
  unsure (1)..(83): unsure at all Xaa locations
  Clone ID: PAT_MRT3847_76529C.1.pep
XPQEVVXGARTDGLXXWLXNPIXLVKIXDPXWXTXRILPDXPGXQHKIRTTXXLWXVXNSCSPGDPXVIEQXPPXWXSFESMR

SEQ ID NO: 259695 - protein, 58 aa, Glycine max
  Clone ID: PAT_MRT3847_7652C.1.pep
MAKDVEVAERCSFPGKDYQDPPTATLIDAEELTKWSFYRALNAEFNATLLFLYINVLT

SEQ ID NO: 259696 - protein, 107 aa, Glycine max
  unsure (1)..(107): unsure at all Xaa locations
  Clone ID: PAT_MRT3847_76530C.1.pep
EIENAEVVYSLERKISAHSDSHGAKRIRKLTQRKAVDYTSTVVRYMQIRMSQRDSRDRTVLQPTPAAAIDMLPAVGYPDNPSTSFAAKFXHTSLNKNRCPINRVLWT

SEQ ID NO: 259697 - protein, 46 aa, Glycine max
  Clone ID: PAT_MRT3847_76531C.1.pep
FLIRRMLNPKIKRWDSLGEFQFHLFNPKPQNVHICIGIFVFLLGLS

SEQ ID NO: 259698 - protein, 144 aa, Glycine max
  Clone ID: PAT_MRT3847_76532C.1.pep
NNMHGNLTSKSIQIPLARRINEKTNRNIIVMNYKIQPLVYKFPFLKDPNILPKMNRSAIAYLSSNIIMSNLLPTMNYTLPEVCSSFLWVNLRKNILPSFIFASHNPHLKIIWFCTHVLGRLHKERFVHMTQQSQTKTTTFLRGA

SEQ ID NO: 259699 - protein, 78 aa, Glycine max
  Clone ID: PAT_MRT3847_76533C.1.pep
QKKQQTHQSYKKIATFKEKFEYPFAYRNCIVQFVSYYNYSFSISNMIIVCRFYPFYKFVRPVFFTLFLTCEWFISPFV

SEQ ID NO: 259700 - protein, 63 aa, Glycine max
  unsure (1)..(63): unsure at all Xaa locations
  Clone ID: PAT_MRT3847_76534C.1.pep
MAEQLTDDEIAEFKADISLIENDCDGCYITIAPGTVMGSPRQNPAXAEMHDIINDVDADGNGS

SEQ ID NO: 259701 - protein, 118 aa, Glycine max
  unsure (1)..(118): unsure at all Xaa locations
  Clone ID: PAT_MRT3847_76535C.1.pep
MDNTPRLLQSVSSLILILSISSLASASLKVGFYSSTCPSAEAIVRSAVEKAISANPGIAAGLIRMHFHDCFVRGCDGSVLLASRPGNPISERDNLVNNPSXRGFEVIEEAKNQIEDAC

SEQ ID NO: 259702 - protein, 40 aa, Glycine max
  unsure (1)..(40): unsure at all Xaa locations
  Clone ID: PAT_MRT3847_76536C.1.pep
VAXISGEGXXSXSXXAXVVXLPXGDNSSLCPPKXVSLSMF

SEQ ID NO: 259703 - protein, 203 aa, Glycine max
  Clone ID: PAT_MRT3847_76537C.1.pep
MNMNIRNGYREDKSFCCFHPKQVLIGVCPLCLNERLLILAAKQGHHHQNRSSSSSKSSHRLQVSSRHRKPPSSIHKIFAFGSLFTRPESHHNNYDYDDVSPSPEESFISIKFEENGVASWEKSTVSKKVSSWNHQNKDNNKSVIEHGKSRDTFRWRKRIGHMLQLIRWKKSGGVCHVGTKVEGVKVRKGWMRTLTKRKTTTME

SEQ ID NO: 259704 - protein, 120 aa, Glycine max
  Clone ID: PAT_MRT3847_76538C.1.pep
ERANEILPSIPKEYHNSVARCLESRGMMEGALEVATDPDYRFDLAIQLGRLEGAKGIASEVQSESKWKQLGELAMSTGKLEMAEECLKHAADLSVLLLLYSSLGDAEGISKLATLAKEQA

SEQ ID NO: 259705 - protein, 79 aa, Glycine max
  Clone ID: PAT_MRT3847_76539C.1.pep
EMEIIVWQYVAIMRKSICGNCILSCTKILKCTRKSVIYRNILSFKPIADADQLTTITNTTNKDMSLFVVFVIVKFQTKP

SEQ ID NO: 259706 - protein, 102 aa, Glycine max
  unsure (1)..(102): unsure at all Xaa locations
  Clone ID: PAT_MRT3847_7653C.1.pep
XXXXGAXXXXTXXKPTXTPTMXXKXXXXKXXDQPXXAXXXTXXXXXSXTXTTXHTPXHISNXTPXTXQXXRXXXGXWGXXXXXXXXXXTASXXXEXRXXXXX

SEQ ID NO: 259707 - protein, 77 aa, Glycine max
  Clone ID: PAT_MRT3847_76540C.1.pep
VSQKCSSRHRHVSSIPGEAGSFVLWEGPLRISYPCCSREEVGSQPLLPVLMGQALLQQSSVLLTGRSKGLWLKLSQP

SEQ ID NO: 259708 - protein, 39 aa, Glycine max
  Clone ID: PAT_MRT3847_76541C.1.pep
TSINFYPFKFVLLTSALLIRAIFYERTKYSITINNFNYN

SEQ ID NO: 259709 - protein, 128 aa, Glycine max
  Clone ID: PAT_MRT3847_76542C.1.pep
MAKNGGFLVGILVLALDIAAGIHGIQAEIAQNKVNDLKVWALECTDPSYESFKLRVAASIFLVFAHAIAHLLGRCICMQSKEECQGATANTVLAVTFLILSWILLGIAFSLLILRSSANSRSRESCGI

SEQ ID NO: 259710 - protein, 61 aa, Glycine max
  Clone ID: PAT_MRT3847_76543C.1.pep
NTKALSFGCVPRLNRVVMTFNSFTALRLNRCPLHDRISRPFFACYACDDIYRVQCSSHLGA

SEQ ID NO: 259711 - protein, 88 aa, Glycine max
  Clone ID: PAT_MRT3847_76544C.1.pep
PSLMICNHSEGAMLGEGCSLGDHSHGVGPGILRDKCHITLLDCSYIRQMMKRNMTKVLRTPLDPEEEVLAILCTYNPVPDHKDYLHAP

SEQ ID NO: 259712 - protein, 90 aa, Glycine max
  Clone ID: PAT_MRT3847_76545C.1.pep
ILTGKIRNVFGLVYPSKLPPFFKQAVQDLNAETLSLHPNHGGWRCPLTFFSPYSFDSGAQLPKHPASCGLKVPFEVMHRFLEKIHSFRSN

SEQ ID NO: 259713 - protein, 92 aa, Glycine max
  unsure (1)..(92): unsure at all Xaa locations
  Clone ID: PAT_MRT3847_76546C.1.pep
ECGTRDYDTARLLLNLKSFCLRMDAFGFFPFVSAKKNELDCLLAGMPLALAECVYPTKFLLEASLHFVVLDNIRXKAVHDLSWTCILILESI

SEQ ID NO: 259714 - protein, 55 aa, Glycine max
  unsure (1)..(55): unsure at all Xaa locations
  Clone ID: PAT_MRT3847_76547C.1.pep
YQEKHKTRDLFGAGDLFVXWLEALLNSYLRPLFSLLIGSFYRFHFFPFLSRRGPT

SEQ ID NO: 259715 - protein, 110 aa, Glycine max
  unsure (1)..(110): unsure at all Xaa locations
  Clone ID: PAT_MRT3847_76548C.1.pep
IXXXXXDRNSARXXLXXXRXSWGLXEMTMALXXGSEXHYRAAHXDXQLXXAQXXRLYXXXXSPFTQRPTXXXLKCKXESXGDILXXXTRTVTXLXXXXVXLMKXXAIPVV

SEQ ID NO: 259716 - protein, 59 aa, Glycine max
  Clone ID: PAT_MRT3847_76549C.1.pep
NTSSCRVKTKQSQQKKGIKIPLRESLIKSVLVPAPMPWFLLASYKGYNVTTSSCFRSLR

SEQ ID NO: 259717 - protein, 52 aa, Glycine max
  Clone ID: PAT_MRT3847_7654C.1.pep
GRANKPMSAHKPYIRVKKPMSLESLCRHSGDKQFPSGCEYGEVRAEQSEGLD

SEQ ID NO: 259718 - protein, 258 aa, Glycine max
  Clone ID: PAT_MRT3847_76550C.1.pep
TSARESAVGWLTKQNISIKAPQLGRFSIAIWNSLSNESHKSAIKIFAPNLTDFSYEGDLEQHIILLNSASIRSASVVVVIDEDNKERMENLGFKVHNLLAQIREVERLKLLFYKVLMHVSDIFSHLPAFGRLASLQLNEVTGEALLNILHNSPFLNTLVLKNGVSELNKDVLTSASVPQCFQSSLRVFQFKEFNVHEHELLLLKFVMANAKVLEKMTIYTAFWLRYSDTDMEKVKEQILSFPKCSDFVMIQLSNVNSC

SEQ ID NO: 259719 - protein, 55 aa, Glycine max
  Clone ID: PAT_MRT3847_76551C.1.pep
TPGLLSCCLLWYMRGFGDIIHAKLLTFRGAYGVTFQIREWTPLPMIISVRPQLPD

SEQ ID NO: 259720 - protein, 614 aa, Glycine max
  Clone ID: PAT_MRT3847_76552C.1.pep
YMHFTEIQVLAKNQTRQFNITLNGNLLYGNMSPRYHSVRTIYTTSGISGKLINFSFVMTETSTLPPIINAIEIYRVKEFPQQDTYQGDVDAITTIKSVYGVTRDWQGDPCSPKDYLWEGLNCTYPVNDSPRIITLNLSSSGLSGKIDPSILNLTMLEKLDLSNNSLNGEVPDFLSQLQYLKILNLENNNLSGSIPSTLVEKSKEGSLSLSVGQNPYLCESGQCNFEKKQKNIVTPIVASICGALILLVAVAILWTLKRRKSKEKSTALMEVNDESEISRLQSTKKDDSLLQVKKQIYSYSDVLKITNNFNTIIGKGGFGTVYLGYIDDSPVAVKVLSPSSVNGFQQFQAEVKLLIRVHHKNLTSLIGYCNEGTNKALIYEYMANGNLQEHLSGKHSKSTFLSWEDRLRIAVDAALGLEYLQNGCKPPIIHRDVKSTNILLDEKLQAKLSDFGLSKIIPIDGGTHVSTVVAGTPGYLDPEYYISNRLTQKSDIYGFGVVLLEIITCQPVIAWNEERTHIIQWVRSLIGIGDIRGIVDSRLEGDFDINSAWKALEIAMACVSKNPNERPIMSEIAIELKETLAIEIARAKHCDANPRHLVEAVSVNVDTEFMPLAR

SEQ ID NO: 259721 - protein, 65 aa, Glycine max
  unsure (1)..(65): unsure at all Xaa locations
  Clone ID: PAT_MRT3847_76553C.1.pep
NEFNPCYAQLNRRIGIGNHKWEXRLIHHLSKMGMNGSLVKGDVLILRQKGAYKHNTERCVVFKKA

SEQ ID NO: 259722 - protein, 95 aa, Glycine max
  unsure (1)..(95): unsure at all Xaa locations
  Clone ID: PAT_MRT3847_76554C.1.pep
MSCCTGNCGCXSSCKCGISCGGCKMYPDLSYTDSTTTDTLVMGXVAPVKAQFQGAEMEXPAENYGCKCGPNCSCYPCTVQVTCRESTLHADIALN

SEQ ID NO: 259723 - protein, 57 aa, Glycine max
  Clone ID: PAT_MRT3847_76555C.1.pep
HFHAFIFFCDCFAGKQLMVKVAEMVPRHHGRTKKQDPASTSTAGPSTKSGKGGKKRR

SEQ ID NO: 259724 - protein, 58 aa, Glycine max
  Clone ID: PAT_MRT3847_76556C.1.pep
CAKIVHPCDKLWPFEILESIRCTFSSVSIYYAPKEDIRVTRYDHLDCIRTFVAQLRET

SEQ ID NO: 259725 - protein, 135 aa, Glycine max
  unsure (1)..(135): unsure at all Xaa locations
  Clone ID: PAT_MRT3847_76557C.1.pep
RHKLALQREKQIKXKAEKARAEKFGDNSNLNMTKAERERTTSLLPKLTQLKEKAYVSGSPNDHPDNVKNVDNQTISKMKLAHIEKRPPXVPQPPPXPSDGAPVSANSNPSNGVSCAPPQPPPPPPPEPPGGSLPT

SEQ ID NO: 259726 - protein, 306 aa, Glycine max
  Clone ID: PAT_MRT3847_76558C.1.pep
AKHHTKTAESDVSIQHGLAYATGTNTEGFNLRRRRIVKSRDTVEHSSSSSHASSSFSSGFAHEIWSILLTLWYMKWKLLISFSPYLMVVVAFLLFVYWNGSVVLGAKEAHAVTPHFAQMLYFSLVSVLAQAPMHFTITQAVDLFQMFRKSRPLLYFQMFLALVVGLLSVHFFSVAHPYLLADNRHYPFYLWRKVIMAHWSIKYLLVPVYICSWLSIIHMLGKFRSKIWVLAYFLATAAVLVPTPLIEFRYYTIPFYFLVLHCNNRDDQSWILTGTLYIGVNIFTMMMFLFRPFHWDHEPGIQRFIW

SEQ ID NO: 259727 - protein, 50 aa, Glycine max
  unsure (1)..(50): unsure at all Xaa locations
  Clone ID: PAT_MRT3847_76559C.1.pep
FXFFYFFNKIPGEMGGPYIGILTNHLHQFMLSYLKASANDLNHHTLHGVY

SEQ ID NO: 259728 - protein, 33 aa, Glycine max
  unsure (1)..(33): unsure at all Xaa locations
  Clone ID: PAT_MRT3847_7655C.1.pep
TTPWVYYTCSMFMLLSVSLDDTATXLNQPLRVQ

SEQ ID NO: 259729 - protein, 34 aa, Glycine max
  Clone ID: PAT_MRT3847_76560C.1.pep
SSRSQPYSHVFWSNVFPSQVRDGANSASWDSPHN

SEQ ID NO: 259730 - protein, 86 aa, Glycine max
  Clone ID: PAT_MRT3847_76561C.1.pep
LLCLEFCHKLGQTLIPSLQKIVQMHFMYQSQRRSSWCLLQWSLLLGDCLIQSACQRQLQLLYLQMRCYPQCYTQCHFQSLDQRMRE

SEQ ID NO: 259731 - protein, 212 aa, Glycine max
  unsure (1)..(212): unsure at all Xaa locations
  Clone ID: PAT_MRT3847_76562C.1.pep
MSMMAIISKLYCSSSQTVLGVRKRPHVVNGGGFVVTDCXGQRVVFRVDGCGIHDTKGQLILRDGEGDALLLMRRKGGMVEALGIYKKWNGYSVNYEGLQSLVFSLKEPNNCCLVKNNAIRISIEPRNASNKGWDYEVRGYFPDRSCSIVDVRGNVIAQGGVNQEVEKLMESKDXXHVVVKPGIDQAFVXXVIAILDYIYGESTYCRVQNCAY

SEQ ID NO: 259732 - protein, 320 aa, Glycine max
  Clone ID: PAT_MRT3847_76563C.1.pep
MSTAAAAGGDMEAGFAKLQGEDFEYYMQTYSIVLGRNSKKSTVDVDLSSLGGGMNISRHHARIFYDFARRRFALEVLGKNGCLVEGVLHLPGNPPVKLDSQDLLQIGDKEFYFLLPVRSILVGPVGPRHYPNHAAPGPVVPHYNNYHLGPGPVKKAPRREYYEEEFDDEDDVGGRKMRRDGYDGYGYAGGKSSLSAPMDKKSEGRSRVDRDADNLQLQQLEEKDVVSSVATVLSDLCGPGEWMPMEKLHTELLEQYSSVWHHNRVRRYLTSEDWPGPESKGKPWYGLLMLLRKYPEHFVINTRSKGRVTHEFVSLVSLLS

SEQ ID NO: 259733 - protein, 72 aa, Glycine max
  Clone ID: PAT_MRT3847_76564C.1.pep
LPETGGVNIHDMLMSTISNFYSKESPRLPSKSVIAKVYENHDMYLPCCGETNFSTSTTSMLGCKNSRLERLE

SEQ ID NO: 259734 - protein, 95 aa, Glycine max
  Clone ID: PAT_MRT3847_76565C.1.pep
LTFSPVFPRCPFFPLVLPRLLFRSILGNLVGRSGFSGFSRASHFLGGLGEKVWGFWAFPTFSCFKGFEPFGPFCGAFRISPFSPFSFWGPLPPLP

SEQ ID NO: 259735 - protein, 123 aa, Glycine max
  unsure (1)..(123): unsure at all Xaa locations
  Clone ID: PAT_MRT3847_76566C.1.pep
DSSTEKVHRFVPNPLLVSWYIQWCSHCYLLVPHKGLYDDMIIGALDSCAFTSCLPFLCRLQVELCSLGSTVEISGSRRPCSLLPHWIPICPWLHQPRCWRSRVGFYKLYDVRGRIPIXSYGRG

SEQ ID NO: 259736 - protein, 129 aa, Glycine max
  unsure (1)..(129): unsure at all Xaa locations
  Clone ID: PAT_MRT3847_76567C.1.pep
MKMNVPHFLGWGIMEAWQCHAYHMFPLLMNTVYGARTPERKCASCWLAVEAHNIFVFXTIPEKCXVESTKEYIHGEQYRSDSXSYNLQADFYARDLVIHPKDTFVFRIYETVLFYIPFFKKHGYCGEKL

SEQ ID NO: 259737 - protein, 181 aa, Glycine max
  Clone ID: PAT_MRT3847_76568C.1.pep
QLFADSLAAAGTRNALKMLLTRIEQGEFTELKAAQMLKTFSRGNGLAAPSDRIADALLALCKSGRVQDSELLRPMSWLSFGAIAGELMQLKRLLRISPVGTPLGEKIEQCPDHKMELYTKALLEQFTSIADDNLVEKTIALKAIGNAALDEVPKLLVDLINPNGTEEPKAEDQKRAMGEIL

SEQ ID NO: 259738 - protein, 134 aa, Glycine max
  unsure (1)..(134): unsure at all Xaa locations
  Clone ID: PAT_MRT3847_76569C.1.pep
MTEDEKMEVIRNKGIPADVLAKRAHEFEKHVAHESLKDQIPAADMMTTTNVHKQAKKISLRQRADGELKLPTDGKLNKGKHIPLSKATAIKNHVLTIPIMPQEEILPNNAXETKTAMGPXTCNPQAAAMHVASI

SEQ ID NO: 259739 - protein, 90 aa, Glycine max
  unsure (1)..(90): unsure at all Xaa locations
  Clone ID: PAT_MRT3847_7656C.1.pep
SRHPQAQALVEPWRLEEAHLVVHDDDHPLLALALEPXRRILHRCLRTANPYDGDDDARSGPARTCMNXTQQSGRTGHFVPLRPWCPSSRS

SEQ ID NO: 259740 - protein, 62 aa, Glycine max
  Clone ID: PAT_MRT3847_76570C.1.pep
ALEIKTVSHDWAVQLFSIISWSLPFPSSDTSNPGSATFLFKSRQASPATSLLTQCHFFKQRN

SEQ ID NO: 259741 - protein, 38 aa, Glycine max
  Clone ID: PAT_MRT3847_76571C.1.pep
FCFSPVRTMIVLLIITYFFIIENYKYVLIYKSIVGSIS

SEQ ID NO: 259742 - protein, 89 aa, Glycine max
  Clone ID: PAT_MRT3847_76572C.1.pep
MGKEKVHISIAVIGHADSGKSTTTGHLIYKLAGIDTRVIERFEKEAAEMNNRSFKDAWVLHILTAERQRGIAVDIALPDFGASTYYQTE

SEQ ID NO: 259743 - protein, 124 aa, Glycine max
  unsure (1)..(124): unsure at all Xaa locations
  Clone ID: PAT_MRT3847_76573C.1.pep
QKTKKKGVPLKTGEDMKVANEAILYVNGVRRVLPDGFAHFTLLEYLRDIGLTGTKLGCGEGGCGXACTVMVSQFDRRLKKCSHYAINACLAPLYSVEGMHVITVEGLGSCKRGLHPVQESLARA

SEQ ID NO: 259744 - protein, 63 aa, Glycine max
  Clone ID: PAT_MRT3847_76574C.1.pep
QGRFKRSCQRCGNSNYTVPALWCMFVILWLLEVEDESSNICSISKVLPSCSARYAKDAIARAL

SEQ ID NO: 259745 - protein, 57 aa, Glycine max
  Clone ID: PAT_MRT3847_76575C.1.pep
FFFFFFFFFFFFFFFFFFFFFFFFFFLGKNPWGKPLEKSQKVEKKGAGQTLTPFLKT

SEQ ID NO: 259746 - protein, 52 aa, Glycine max
  Clone ID: PAT_MRT3847_76576C.1.pep
ILHSWKGLKVVIAKDLSERNHMCTSMIVCNLIVIVSYCIWYELVLIMYTRCP

SEQ ID NO: 259747 - protein, 55 aa, Glycine max
  Clone ID: PAT_MRT3847_76577C.1.pep
GFTFLVNTPIVIYLGHDDNASPEMSSKIVTACKAYCSAPSCTLKGFFCCLHKLRY

SEQ ID NO: 259748 - protein, 62 aa, Glycine max
  Clone ID: PAT_MRT3847_76578C.1.pep
ASVLLQDDNRGRMSLMLDIPESTVTIWKVLAFFVATTFAAWNGHASDGCPPPSEQPVMVRVI

SEQ ID NO: 259749 - protein, 103 aa, Glycine max
  unsure (1)..(103): unsure at all Xaa locations
  Clone ID: PAT_MRT3847_76579C.1.pep
SDTILKIDTGLFKLVTASNRMETINITLYVTFHEPNNTQYRLGRSSHRCILLLEKKKKETQTKPKKXGIQKKKVITNKRCRLQKIMRQQTLATTGSSFDTSNR

SEQ ID NO: 259750 - protein, 104 aa, Glycine max
  Clone ID: PAT_MRT3847_7657C.1.pep
SSDLPRWVQSVFREEWTAEVVDSELMRFHNIEEEMVQLLQIAMACVSLVPDQRPNMQDVVRMIEDINRGETDDGFRQSSDDPSKGSEGHTPPPESRTPPSSLTP

SEQ ID NO: 259751 - protein, 95 aa, Glycine max
  Clone ID: PAT_MRT3847_76580C.1.pep
QQQINATPRQYMLFSSIHFIIPFLKKKGLKPISNSLFRGFGRKATFKHSWPVLALLLRVRDIQRFNSFLIKKTGRDLTPYSGTLFKPPTLTLGGP

SEQ ID NO: 259752 - protein, 82 aa, Glycine max
  unsure (1)..(82): unsure at all Xaa locations
  Clone ID: PAT_MRT3847_76581C.1.pep
MFVSFLFTSKSGVLFYHDGLVXQIYDAVLDACLEQDPNSKVACETCTKTNLVMVFGEITTKANVDYEKIVRDTCKNIGFVLN

SEQ ID NO: 259753 - protein, 157 aa, Glycine max
  unsure (1)..(157): unsure at all Xaa locations
  Clone ID: PAT_MRT3847_76582C.1.pep
WLEWNGGFALFTLXYYGRDLNYGPGPAVGHRVQWPGYRVFTSPMXLNRFPVAQFICGSSXWLPSPGVAFAAGVIYMDSSSKYIRRFVLLQSSARLSHWGEKGNGFSFYSPLFFFVFQKKKGPFFFSMVLVLNLSCKQVFCRSTLYFFLPASKPKNVI

SEQ ID NO: 259754 - protein, 243 aa, Glycine max
  Clone ID: PAT_MRT3847_76583C.1.pep
RPTRPVEHTHYMPKRWRGKESTEMVRIEFETLFQYSGMMLLEEMASIFLTPYLLLLVVPKRVDDILQFIADFTVDVEGVGHVCSYSVFNFQEHGNSNYGSPFNAPRSQRSSQGKLEKSFLSFQSSYPSWEPNAQGRQFLHNLRTFRDQNLAGHINQHGFSPPRLWRGSPNMGSNGDRNRFTSREMPYSTFATGNHLGSLWLIESRNQNNHPYLLDWYYTSQPHDTAQRHVQADDPFEVTEHQF

SEQ ID NO: 259755 - protein, 87 aa, Glycine max
  Clone ID: PAT_MRT3847_76584C.1.pep
KKKTYLNTKNLFFLKNANTRNNVRGENMTNQIDTPMESKPTTEKTIKKSGNLPDQRKLLTIANKKSGTNWPKPVLRKKYPAGGLYRG

SEQ ID NO: 259756 - protein, 101 aa, Glycine max
  Clone ID: PAT_MRT3847_76585C.1.pep
LAFPYRNCDLVGNIIIVFYISMRRKTTACYYLHCLAALIAIILQNFQFHKPIDAILLVCLHIYFSSCLLQVQRLGPHFELWNLVACHRLLACQDATCYSGY

SEQ ID NO: 259757 - protein, 107 aa, Glycine max
  unsure (1)..(107): unsure at all Xaa locations
  Clone ID: PAT_MRT3847_76586C.1.pep
MEQVGKTHAFLSFHSISFSILDSFPSTLHYEKVDKICDGTYSVIYKGRYRSTNXTIFLNKFXLQHDDDGVPSTAILEISLLKDIHLMNIVRLYDLLLDVKSLYLVFE

SEQ ID NO: 259758 - protein, 33 aa, Glycine max
  Clone ID: PAT_MRT3847_76587C.1.pep
DPRLKVASARSFILFDMGFNVNARLECESKHPN

SEQ ID NO: 259759 - protein, 92 aa, Glycine max
  Clone ID: PAT_MRT3847_76588C.1.pep
SVVLTTGYHMHVPSWLKENDFFTSDGTPRNPFPNGWRGKGGLYAVGFTRKGLSGASLDAINVAHDIAKNWKEENKQKRKTVAARHRRCISHF

SEQ ID NO: 259760 - protein, 456 aa, Glycine max
  unsure (1)..(456): unsure at all Xaa locations
  Clone ID: PAT_MRT3847_76589C.1.pep
PRVRLKVIGKLSEGKASHVPYRDSKLTRLLQSSLSGHGHVSLICTVTPASGSREETHNTLKFASRAKRVEIYASRNKIIDEKSLIKKYQREISVLKVELDQLKKGMLVGVNHEEILTLKQKLEEGQVKMQSRLEEEEEAKAALMSRIQRLTKLILVSSKNAIPGYLTDVPNHQRSHSVGEDDIENESQKDSSAVSSDQFHDGRHKRSSSRWNEEFSPASSTVTESTQAGELISRTKLTVGGMTMSDQKDLLVEQVKMLAGDIAFSTSTLKRLMEQSVNDPEGSKIQIENLEREIQEKRKQMRVLEQRLIETEESPVANSSLVEMQQTVTKLMTQCNEKAFELELKSADNRVLQEQLIDKCSENRELQEKVKQLEQQLAAINSGTLSVSSEQCASGENIDDLKKKIQSQEIENEKLKLGQVHLSEENSGLRVQNQKLSEEASYAKELASAAAVELXN

SEQ ID NO: 259761 - protein, 420 aa, Glycine max
  Clone ID: PAT_MRT3847_7658C.1.pep
AWVFWPQEPKPITGKAKIVTTKILLSKEEEEEEEDGLQSLLAEWVELVQPSRVEWMDLLDKLKEHNPGLYFKVAEMVLTEDSFQTHVSDYSRLIDIYAKENRFDDVERMLKKLNENGLQVDASIASTLVLMYCKRGDLAHAKEAFEVLTSLGFQPDAHVYNSMITALVNNGQPKLGEKLMRDMDDRLITITKDIYMALLRSYSQLGDVASAERISTTMQFAGIQQSTDKETCTLLVEAYALASNPDQARSHFDCMIKSGHQPDDRCTASMILAYEKKNDLDNALNLLLELEKDGFEPGVATYSVLVDWLGKLQLVDEAEQLLGKIALLGEAPPFKLQVSLCDMYARAGNEKKALQSLGVLEARKDELGQAEFERIISGLIDGGFQKDAQRICQIMEAQGFDASRVKFKLSKPVSRAPSLR

SEQ ID NO: 259762 - protein, 172 aa, Glycine max
  unsure (1)..(172): unsure at all Xaa locations
  Clone ID: PAT_MRT3847_76590C.1.pep
MRIKKKIYKXHARFPPNMGAAILFLLATNIPMALYMSKVHQRGPEDAMNHLAREALLRQVKRILFLTPCHATPYYSMLHHNLPMLDLDCTPSEEKGVPDESDRFLMDPIPFVSEYAKNKSLPSHVVLFDSEEQKLKNLLISLDYKEEKRFFNAHFKVDRDLQGSIVVYVRIR

SEQ ID NO: 259763 - protein, 105 aa, Glycine max
  Clone ID: PAT_MRT3847_76591C.1.pep
VLFFFLHATIHLRKTVAVYIFTPLPKTSCIFDAKHCTRVPAGLYKGPRSSGKDTHRLPGLLPFVGVWKETYIRSNKSRLKNLHPRYYQLPLIKGTKNIFNPKLTT

SEQ ID NO: 259764 - protein, 69 aa, Glycine max
  Clone ID: PAT_MRT3847_76592C.1.pep
TNHLSQPYFFSLAPPLSPPNFLLFSSVSFFFLHFSSKIFSPTHTASFLFTPYFSTTLYCQMCFSPRVPS

SEQ ID NO: 259765 - protein, 59 aa, Glycine max
  Clone ID: PAT_MRT3847_76593C.1.pep
PLSTFPTGVWLVFSSLFPAVPSNVTVGSRFQPQNAFHLCFHKITFINFFSLRFLVLWSS

SEQ ID NO: 259766 - protein, 49 aa, Glycine max
  Clone ID: PAT_MRT3847_76594C.1.pep
KLLHLITYPTNMVINNGYPWDGLFKKNSPAYGTAQYLNMNDSYRTNMHL

SEQ ID NO: 259767 - protein, 90 aa, Glycine max
  unsure (1)..(90): unsure at all Xaa locations
  Clone ID: PAT_MRT3847_76595C.1.pep
NHILINYHTPNIISKYXFSSLLYQXFSLQTIPIFNPINIHILKFIPLYTKLLPKTYYHQHSSLKKHLILSHLNPITSHHSNIQNILLILN

SEQ ID NO: 259768 - protein, 58 aa, Glycine max
  Clone ID: PAT_MRT3847_76596C.1.pep
GNLLETSNTLPMKGFFVIKFESNKGKRTSVQLQVNCQLQNYKKSSSLMVVLSLVFHSI

SEQ ID NO: 259769 - protein, 397 aa, Glycine max
  unsure (1)..(397): unsure at all Xaa locations
  Clone ID: PAT_MRT3847_76597C.1.pep
NDFFFIPLSTIGSLQSSKVQGKIVVCDRGGNARVEKGSAVKLTGGLGMIMANTEANGEELLADAHLLAATMVGQTAGDKIKEYIKLSQYPTATIEFRGTVIGGSPSAPQIASFSSRGPNHLTSQILKPDVIAPGVNILAGWTGRVGPTDLDIDPRRVEFNIISGTSMSCPHASGIAALLRKAYPEWSPAAIKSALMTTAYNVDNSGGNIKDLGSGKESNPFIHGAGHVDPNRALNPGLVYDLDSSDYLAFLCSVGYDAXSVISVFTREPAXESVCEGKVGRTXRLASPGDLNYPSFAVKLGGEGDLVKYRRVVTNXGIQVDVVYTVKVNAPPGVGVGVSPSTLVFSDENKTQAFEVTFSRVKLDGSESFGSIEWTDGSHVVRSPIAVTLSGAYSSSI

SEQ ID NO: 259770 - protein, 103 aa, Glycine max
  unsure (1)..(103): unsure at all Xaa locations
  Clone ID: PAT_MRT3847_76598C.1.pep
RVKEVSQSDSTVILFSSGTIGNLKGMFLMHSNFIALIGGFYHLRNVVDGDPHLVSLFTXPLLHVFGFFMLVRAITIRETLVFLQRFDFEGMLKAIEKYRITYM

SEQ ID NO: 259771 - protein, 91 aa, Glycine max
  Clone ID: PAT_MRT3847_76599C.1.pep
MASLALETEDVISDIYLSLGLKESDKGVGVPRVLSLLSSLLERSVQRNETLLEAKHVKDVVTVFHGLRAPTLSVRKYIDRIFKYSGCSPSC

SEQ ID NO: 259772 - protein, 131 aa, Glycine max
  unsure (1)..(131): unsure at all Xaa locations
  Clone ID: PAT_MRT3847_7659C.1.pep
NPHRRYLGIWFTNIPSQNIVRVADCGNPINDSFAILSLNSSGHLDLTHNNTVACSTCSLRETQNAVAXLLDSGQSVITDENEVIQEAYLRHSFDYPSSTRLSGMKIGWHLIRDLSIHPTACKSDDDPTAGD

SEQ ID NO: 259773 - protein, 63 aa, Glycine max
  Clone ID: PAT_MRT3847_765C.1.pep
ISPVVNPITNPVAGHTIMQHGFMPSFPKVLNNGEVAWLKGEPFGSECFHPQFSSKFTSEHHED

SEQ ID NO: 259774 - protein, 104 aa, Glycine max
  Clone ID: PAT_MRT3847_76600C.1.pep
PYAKEEPWKRAIHNPLLTTNKDTQDKSTKLIGIHSYLLSFLAKRILSRNLVVVLEEEQYIVPLVFRQTQNPLLAWIHRCVSCVGILNFQTNQYLSLNWLQVGPI

SEQ ID NO: 259775 - protein, 150 aa, Glycine max
  Clone ID: PAT_MRT3847_76601C.1.pep
KQAPGSVRQGGTRKNKAESKAKVKHFQHLPFRIQKADMIPGSDMEIGREMTMEAPRKSDYFESENDIRLMESAVNGVVNIKKIHQNISRNSQNIGSRGIMQAAEPLLSSKVENKILLHGTGRNLKEGTNTTLPEFRRSRSTPRGKFFVFS

SEQ ID NO: 259776 - protein, 45 aa, Glycine max
  Clone ID: PAT_MRT3847_76602C.1.pep
GRGYFFFISKQLNFKEQNTQKSKNSGARGTWKELHFHANEIGGLN

SEQ ID NO: 259777 - protein, 96 aa, Glycine max
  unsure (1)..(96): unsure at all Xaa locations
  Clone ID: PAT_MRT3847_76603C.1.pep
SLGPVCPVGAWLLPLVPGVVPLVRVAGAAXXXXPVLSSRLGLPPPPFXVVFFFFXFFFSAPTPLLEGPLRFLCLXSLLGXLXVXQGLXRSPGRLGL

SEQ ID NO: 259778 - protein, 56 aa, Glycine max
  Clone ID: PAT_MRT3847_76604C.1.pep
SRLYMSRIQPRASACGMGPLGNLAGLGFCPCPGYCPAACISSSPCMQSDLALSILL

SEQ ID NO: 259779 - protein, 39 aa, Glycine max
  Clone ID: PAT_MRT3847_76605C.1.pep
STNVKGILKGLRYISQIFEEKEEEIQIVLPTDVKHVAHI

SEQ ID NO: 259780 - protein, 129 aa, Glycine max
  Clone ID: PAT_MRT3847_76606C.1.pep
DEITYNTLMQGYCREGKVEEARQLLDEMKRRGIKPDHISYNTLISGYSKRGDMKDAFRVRDEMMTTGFDPTILTYNALIQGLCKNQEGEHAEELLKEMVSKGITPDDSTYLSIIEPMETVDDLEGNDDK

SEQ ID NO: 259781 - protein, 70 aa, Glycine max
  Clone ID: PAT_MRT3847_76607C.1.pep
LNIPLDIKTKLFPIPYIKILRLLNNTVTNFTNFSNLSIKTYRLLKLSLQHLYFIILKHIKAPPSLNIIII

SEQ ID NO: 259782 - protein, 68 aa, Glycine max
  unsure (1)..(68): unsure at all Xaa locations
  Clone ID: PAT_MRT3847_76608C.1.pep
RGLTRGCIVRGPCFPFPRKLYXELRRVEHGDHSRKSAAQAVMAXIKAPEEGRTVVEHDYLPYFYSRSF

SEQ ID NO: 259783 - protein, 196 aa, Glycine max
  unsure (1)..(196): unsure at all Xaa locations
  Clone ID: PAT_MRT3847_76609C.1.pep
MDIELPAATANESQQQKFALPVDSENKATVFRLFSLANPHMRAFHLSWVSFFACFVSSFAAPPLLPIIRDNLNLTATDIGNAGVASVSGAVLARIAMGTACDLVGPRLASASLILLTAPFVYFTSIINSSTSYLLVRFFTGFSLATFVSTQFWMSSMFSAPVVGSANGFSGGMGNLXGXATQLIMPLVFSLIRDIG

SEQ ID NO: 259784 - protein, 101 aa, Glycine max
  unsure (1)..(101): unsure at all Xaa locations
  Clone ID: PAT_MRT3847_7660C.1.pep
EYVVPPLLGLLFNPSHWWGLTAPFLIFKSSRLFFFSVFKFKEKASPLFXTLFAQRTLPPLLKRPPFRKKPFFPFQREQTPPSLFFPKGFDFPPPLINIPPQ

SEQ ID NO: 259785 - protein, 89 aa, Glycine max
  Clone ID: PAT_MRT3847_76610C.1.pep
QMIFLYAPYLTPLGSKSYFGFLYTYQTVYTYLHTKPTLLLSEKFSKTNPETYKGDNTMLLLPNRIPSSLGSKDPTIIHPVIKVCDLFIM

SEQ ID NO: 259786 - protein, 82 aa, Glycine max
  Clone ID: PAT_MRT3847_76611C.1.pep
RRMKCVRERTRKKCMVNQELKGQKKKKREKITPMDSKFIKSNDVLLHGAKGVMLAVSKEPKSYVNFFATSIFLPYSLLFSLS

SEQ ID NO: 259787 - protein, 205 aa, Glycine max
  Clone ID: PAT_MRT3847_76612C.1.pep
MAELESPNVMPKLISFLSSLLKRVAESNDLNQQQLLHQKVSVFHGLTRPTISIQSYLERIFKYANCSPSCFIVAYVYLDRFTQRQPSLPINFFNVHRLLITSVMVAAKFMDDLYYNNAYYAKVGGITTIEMNFLEVDFLFGLGFHLNVTPGTFQAYCAHLQSEMLLMQPLNFADSSLSLGKSLKAHLCYNEDESSSHQKQQQLAV

SEQ ID NO: 259788 - protein, 59 aa, Glycine max
  Clone ID: PAT_MRT3847_76613C.1.pep
FSKDQDHFSNSTCNWLCVSCTCKEILLHRAHCLKTTLVYFLIYCENPVAFQLEAFKVSH

SEQ ID NO: 259789 - protein, 69 aa, Glycine max
  Clone ID: PAT_MRT3847_76614C.1.pep
ALISVFFFLSILFPYFYTICDIRYINLHISGSERYLIVRFINLHISRSERYLLVRLGFYQSCLLMLSYN

SEQ ID NO: 259790 - protein, 121 aa, Glycine max
  Clone ID: PAT_MRT3847_76615C.1.pep
RVRLNDFFQSENLWLLYSVLLLRFGTVMTKWPRVCLEMLFVDNVVGLRFLLFEGCLNMAAAFFFFVLRVFHQPAYRGKYVDLQFPCTSIGFKFSSVHVIKKPLVFEFYNFSEVKNSKWMIL

SEQ ID NO: 259791 - protein, 81 aa, Glycine max
  Clone ID: PAT_MRT3847_76616C.1.pep
KQLLVLEERPVPSFFLCPIFQEIMHDPQVAADGFTYEGKAISEWLENGHETSPMTNLKLTHLNLTPNHALRLAIQGWLCKS

SEQ ID NO: 259792 - protein, 72 aa, Glycine max
  unsure (1)..(72): unsure at all Xaa locations
  Clone ID: PAT_MRT3847_76617C.1.pep
XAXXLXXXCXIXHXXSXEXHXLVDDPRXXXXXXYSIXNLXXGXXKXXLPPXHXRXXXXESXIPSLRYACCXT

SEQ ID NO: 259793 - protein, 620 aa, Glycine max
  unsure (1)..(620): unsure at all Xaa locations
  Clone ID: PAT_MRT3847_76618C.1.pep
RNSFQGKRIPELLGSLXNLRYLDLSHSDFEGKIPTQFGSLSHLKYLNLAGNYYLEGSIPRQLGNLSQLQHLDLRANQFEGNIPSQIGNLSQLQHLDLSYNSFEGNSRLQELNLRGDPITRYASGPFNIFCLEGLDLSKNQLNGKILDSTKLPPLLESLSITSNILEGGIPKSFGNACALRSLDMSYNSLSEEFPMIIHHLSGCARYSLEQLYLGMNQINDTLPDLSIFSSLRELYLYGNKLNGEIPKDIKFPPQLEVLYMRSNSLKGVLTDYHFANMSNLYSLDLSDNSLLALTFSPNWVPPFQLSHIGLRSCKLGPVFPKWVETQNQFRDIDISNSGIEDMVPKWFWAKLTFRESISMNISHNNLHGIIPNFPLKNLYHSLILGSNQFDGPIPPFLRGFLFLDLSKNKFSDSLSFLCANDTVETLYQLDLSNNRFSGKIPDCWNHFKSLSYLDLSHNNFSGRIPTSMGSLLHLQALLLRNNNLTDEIPFSLRSCTNLVMLDIAENKLSGLIPAWIGSELQELQFLSLERNNFHGSLPLQICNLSNIQLLDLSINNMSGKIPKCIKKFTSMTRKTSSGDYQLHSYQVNTTYTRGNQTYDLNALLMWKGSERIFKPKVLLL

SEQ ID NO: 259794 - protein, 67 aa, Glycine max
  Clone ID: PAT_MRT3847_76619C.1.pep
TGHKINLYQKGKRETKKLVAVSTYLSPCMCVHHHSVYSHSYSYLTYWLLTHNASIEKISLQFNPTVT

SEQ ID NO: 259795 - protein, 42 aa, Glycine max
  Clone ID: PAT_MRT3847_7661C.1.pep
PPCYDAYYVRPVYYSCAGSRPCYVSRSDEYFCKEHASARTMM

SEQ ID NO: 259796 - protein, 90 aa, Glycine max
  Clone ID: PAT_MRT3847_76620C.1.pep
NHSQKKIKGCLGGKLGMRRLKMKKVKGGFQICSLVCQCRCFCWVELPPLHIITPFGLDVSFASTFRLVLCAVCFHQYLFNKLERVDERVD

SEQ ID NO: 259797 - protein, 84 aa, Glycine max
  Clone ID: PAT_MRT3847_76621C.1.pep
AAVALFFFFFFFFFFFFFFFFFFFFFFFFKNISFLTFYPGGDTSKLIKFWGFFQKGLLQKRLIANWQVPIRAKMDNFMPTGFYI

SEQ ID NO: 259798 - protein, 214 aa, Glycine max
  unsure (1)..(214): unsure at all Xaa locations
  Clone ID: PAT_MRT3847_76622C.1.pep
MRTQRLNHLLLSLFLFAAAFSSLHPTATAGDEGAPSAGDGDRDADFIRTSCNTTLYPEVCFTSLSRYANAVQQNPGHLARVAIAVSLSKVHRAASYVSNLTRDADYGGSTRAALALHDCFSNLGDAVDEIRGSLKQMRQIGSRRRHASSFLFQMSNVQNERSTALPENQTXTDGFTYVTDCPMKTGVCDRVSNVKKFTSNALALVNSYANKGMP

SEQ ID NO: 259799 - protein, 126 aa, Glycine max
  Clone ID: PAT_MRT3847_76623C.1.pep
KVHRAASYVSNLTRDADYHGSTRAALALHDCFSNLGDAVDEIRGSLKQMRQIGAAGAGASSFLFQMSNVQTWMSAALTDEETCTDGFQDVADCPVKTDVCDRVTNVKKFTSNALALVNSYANKGMP

SEQ ID NO: 259800 - protein, 128 aa, Glycine max
  Clone ID: PAT_MRT3847_76624C.1.pep
AQPQDRFSPSARGPRNVWKSEGNAERRNPECRGSASPPWCSKVKVLWSKRSSVVSASFCEEEEEETEQALFIKGERNYYYIVVVVNILLFLILCVPFYMGNEMMVIFMSRKREMMRFVIVIIRMGRGG

SEQ ID NO: 259801 - protein, 356 aa, Glycine max
  unsure (1)..(356): unsure at all Xaa locations
  Clone ID: PAT_MRT3847_76625C.1.pep
MMAESGEEEIVGKPVQELLLNPENLPKNYIYEEGGAGFRDALVPSQDDDIPVIDLHRLSSSSISQQELAKLHHALHSWGCFQAINHGMKSSFLDXVREVSKQFFQLPKEEKQKCARERDPHNIEGYGNDVIXTLKQKLGWTDRISLKMFPEDERKFNFWPQTPNDFRSIVLQYTESLGLLSEVIIKAMAKSLNLEEDCFLNECGERSNMIVRVNYYPPCPMPDHVLGVKPHADGSTITFLLQDKEVEGLQVLKDDQWFKVPIIPDALLINVGDQIEIMSNGIFRSPVHRVVINKAKERLTVAMFCVPDSEKEIKPVDKLVNESRPVLYRPVKNYVEIYFQYYQQGKRPIEASKITF

SEQ ID NO: 259802 - protein, 77 aa, Glycine max
  unsure (1)..(77): unsure at all Xaa locations
  Clone ID: PAT_MRT3847_76626C.1.pep
GSGGRTGYVMYHCSLYPSAHGQXPGPNSAKVSSSXHLIHHSRIQDQDYGISSSLWDEDIGAHPPRMDAIEYVNCCQG

SEQ ID NO: 259803 - protein, 142 aa, Glycine max
  Clone ID: PAT_MRT3847_76627C.1.pep
LEFGQTLVAKFFISLEPHALGRLCAACFSLSPNLKELIITSCNTAVDDIPNQIKNSTLYHELGTHHMTNQATDICREVLCYAGYDIRRTLHTLEKSHLNMVNDYSYDLKDWMRGTLTHHQTSSDWFHNTNSYARKTIANGLN

SEQ ID NO: 259804 - protein, 111 aa, Glycine max
  Clone ID: PAT_MRT3847_76628C.1.pep
LRCVGGKPGENGLALVVFGLGRGVAGYNLGVHLFFSGSWALFFVLGGLSRFWFSGVILFLVSLIIVLGACFRFGGLLLFPLRAVCPFWVGRGCAVLCFPPLAFWVPWVEKG

SEQ ID NO: 259805 - protein, 68 aa, Glycine max
  Clone ID: PAT_MRT3847_76629C.1.pep
FCVIFLHGRNSPQSSPTSTPKLSKSLSFEMQQDELIEKPMSPMQYARSGLGTAEMNGKLIAAGGYNRE

SEQ ID NO: 259806 - protein, 126 aa, Glycine max
  Clone ID: PAT_MRT3847_7662C.1.pep
MAMTVHVLAGLAFMFSASILLQILACAIYNNWWPMLSALMYVLVPMPCLFFGGGSTQFLMSRDGGGWIDAAKFLTGASAVGSIAIPIILKHAHMIETGAMLIELVSFFIFICTVLCFHQAGLDDDW

SEQ ID NO: 259807 - protein, 50 aa, Glycine max
  Clone ID: PAT_MRT3847_76630C.1.pep
KHQRGYRGHYKVGGWTLSVIQRVVNRHVKGHVTTKSTGKSFFVRGVKLLK

SEQ ID NO: 259808 - protein, 72 aa, Glycine max
  Clone ID: PAT_MRT3847_76631C.1.pep
SLWVRAFLIVASFLSVPSFLKGPPAVATVLAPIRTSAASIITAAPLDQKGTTSAGAPFYELLTTSKQYISQR

SEQ ID NO: 259809 - protein, 91 aa, Glycine max
  unsure (1)..(91): unsure at all Xaa locations
  Clone ID: PAT_MRT3847_76632C.1.pep
IKLWERKMSCFPCCTSQERINKKSLKKSIKEYHEEKILASFANISVKTDSGKRNLITNELAKLGKGNITSKIFPYRELCVATXNFTLPYDW

SEQ ID NO: 259810 - protein, 47 aa, Glycine max
  Clone ID: PAT_MRT3847_76633C.1.pep
RYTQKCPPVHFVPVKTEFLVVMKFGRIMRIMANFSWLFLRRIIFSPS

SEQ ID NO: 259811 - protein, 167 aa, Glycine max
  unsure (1)..(167): unsure at all Xaa locations
  Clone ID: PAT_MRT3847_76634C.1.pep
GSRRLQNWLDYYQLKFERHPDRRPTVKTGILGLWGGKVDAIEHYKHSIKELDKMMTLERQKIIKDPKSILPVAFLSFKSRWGASVCAQTQQSKNPTLWLTDWAPEPRDVYWRNLAIPFVSLNIRKLIISLXVFALVFFYMIPIAIVQSLANLEGLERVAPFLRPVIE

SEQ ID NO: 259812 - protein, 79 aa, Glycine max
  Clone ID: PAT_MRT3847_76635C.1.pep
SPISHHYQIGSMSKCSIGLGLVYIKSCAESSMIYNIFNLVIGTMFSFPISSIRDHSACVLCLQYGKNVVMCSSRGFTGM

SEQ ID NO: 259813 - protein, 54 aa, Glycine max
  Clone ID: PAT_MRT3847_76636C.1.pep
HYRASRSDQHNSDRLLAAKEQSQENCTEEAFRPLRTAPPPPHSHDHVLLHTGGC

SEQ ID NO: 259814 - protein, 69 aa, Glycine max
  Clone ID: PAT_MRT3847_76637C.1.pep
YNRALSREKLSCKPTQTTIFHGNNLLTYKLAATVKTDANASCGERVKEEGASRHTKIMMSQGADNRERT

SEQ ID NO: 259815 - protein, 70 aa, Glycine max
  unsure (1)..(70): unsure at all Xaa locations
  Clone ID: PAT_MRT3847_76638C.1.pep
SSQEEVTLLGATGSPFVCRVHIALKLRGVQYKYVQENLRNRSELLLNPPQYRKVPXVYSNESHTKFFVDC

SEQ ID NO: 259816 - protein, 63 aa, Glycine max
  Clone ID: PAT_MRT3847_76639C.1.pep
GTKQGGKAKPEKKPKCDKKEYDEVDMANIQKKKEEEKALKEWKAKAQHKGSFGGSGLKKSGKK

SEQ ID NO: 259817 - protein, 40 aa, Glycine max
  Clone ID: PAT_MRT3847_7663C.1.pep
FYYYSIWWLCGIREIKSLIHVYKAQVHIIQNFHIMNSTIL

SEQ ID NO: 259818 - protein, 69 aa, Glycine max
  unsure (1)..(69): unsure at all Xaa locations
  Clone ID: PAT_MRT3847_76640C.1.pep
WLPMTWYPQGYLANVPMTNMYMLPXPNNMVPXRTFRFYKGPVLFPFXHGLNYSRSFHSLALALKQVSMS

SEQ ID NO: 259819 - protein, 60 aa, Glycine max
  Clone ID: PAT_MRT3847_76641C.1.pep
ARGPNEGFKMGRKGGAKRASRHLSGLSAPPKKSPDCELFLRISQDFQNVGKTLKTPLSDP

SEQ ID NO: 259820 - protein, 48 aa, Glycine max
  Clone ID: PAT_MRT3847_76642C.1.pep
IRSYHKEWILLGKENHSLCNEVHAQIVTNLTKLFLMMTKLLKVPCWIL

SEQ ID NO: 259821 - protein, 240 aa, Glycine max
  unsure (1)..(240): unsure at all Xaa locations
  Clone ID: PAT_MRT3847_76643C.1.pep
MSSTVGQTIKCKAAIAWEAGKPLVIEEVEVAPPQAGEVRLKILYTSLCHTDVYFWDAKGQTPLFPRIFGHEASGIVESVGEGVTHLKPGDHALPVFTGECGDCAHCKSEESNMCELLRINTDRGVMIHDGQSRFSKNGQPIHHFLVTSTFSEYTVVHAGCVAKINPAAPLDKVCVLSCGICTGFGATVNVAKPKPGSSVAIFGLGAVGLAAAEGARVSGASRIXGVDLVSARFEELRSXG

SEQ ID NO: 259822 - protein, 59 aa, Glycine max
  Clone ID: PAT_MRT3847_76644C.1.pep
IFFFLIFHFKYLRCSVLLSYFKQFKYFIKYAFLHLIRYSVFDRICHLQHRLLALFLFGS

SEQ ID NO: 259823 - protein, 274 aa, Glycine max
  Clone ID: PAT_MRT3847_76645C.1.pep
MEIFPIPAESYTLGFIGAGKMAESIARGAVRSGVLPPSRIRTAVHFNLARRGAFESFGVTVLPSNDDVVRESDVVVLSVKPQLVKDVVSKLTPLLTKNKLLVSVAAGTKLKDLQEWAGNDRFIRVMPNTPAAVGQAASVMSLGGSATEEDGNIIAQLFGSIGKIWKAEEKYFDAITGLSGSGPAYVYLAIEALADGGVAAGLPRDLSLSLASQTVLGAASMVSQTGKHPGQLKDDVTSPGGTTITGIHELENGGFRGTLMNAVVAAAKRSRELS

SEQ ID NO: 259824 - protein, 137 aa, Glycine max
  Clone ID: PAT_MRT3847_76646C.1.pep
MGNCLRKAQADDDSDHNVEFASGNVQVITTKESWDQKLEQARRDSKIVIANFSATWCGPCKMIAPYYCELSEKYPSIMFLLVDVDELADFSTLWDIKATPTFFFLKDGKEVDKLVGANKPELEKKIVVINDAVPHKQ

SEQ ID NO: 259825 - protein, 37 aa, Glycine max
  Clone ID: PAT_MRT3847_76647C.1.pep
TSRPQNPAPNLDAQLPDNFAFADGHLTYCITGTNSIH

SEQ ID NO: 259826 - protein, 61 aa, Glycine max
  Clone ID: PAT_MRT3847_76648C.1.pep
RVCVLSILLSNKIRTALGKGKKIVYLTRVDLLSLVRPIWSATPWCLRMYILSSNATNPMLT

SEQ ID NO: 259827 - protein, 53 aa, Glycine max
  unsure (1)..(53): unsure at all Xaa locations
  Clone ID: PAT_MRT3847_76649C.1.pep
ASAALTRLXFLLTISNSVIGGTNRTATLYLLDSNLNNTTTLSDDRRHALLNLR

SEQ ID NO: 259828 - protein, 127 aa, Glycine max
  Clone ID: PAT_MRT3847_7664C.1.pep
MAMTVHVLAGLAFMFSASILLQILACAIYNNWWPMLSALMYVLVPMPCLFFGGGSTQFLMTRDGGGWIDAAKFLTGASAVGSLAIPIILKHAHMIETGAMLIELESFFIFICTDLCCHQASLDDDWY

SEQ ID NO: 259829 - protein, 288 aa, Glycine max
  Clone ID: PAT_MRT3847_76650C.1.pep
MRKLCFNPKTESFALARSSPSSPLSLTSSPTLPRLSFSEEAEALILKWNPDTSAYAKVTSLFYEDKNEAKHYIDCVNQLQKSMHSLLSQNPSSEKLILAHNLMQMAMKRLKKEFYQILSMNRAHLDPESVSARSSRTSANSSASDYDDDFAAEDDDIRAAGDSISEVEQVSSGAMADLKLIADCMISSGYAKECVSVYILIRKSIIDERIYRLGVEKLSSSRANKMDWEVLDLKIKSWLEATRISVRTLFNGERILCDHVFSYSDSVRESCFAEISRDGASLLFGFPE

SEQ ID NO: 259830 - protein, 82 aa, Glycine max
  unsure (1)..(82): unsure at all Xaa locations
  Clone ID: PAT_MRT3847_76651C.1.pep
RLQYRSLIAGGTHXSVRFIEDHIWVYYVPLRIYGGGIYTAGGLIYMYFVRINIVCIIHSLQKEVNTKFIIITNPFLPNTKTV

SEQ ID NO: 259831 - protein, 62 aa, Glycine max
  Clone ID: PAT_MRT3847_76652C.1.pep
LEVAHDIEIFGLMTIVGIWGVETLSHERPAVCRGTYILMGSMDAVDMHAKPVLASTGRSLPE

SEQ ID NO: 259832 - protein, 64 aa, Glycine max
  Clone ID: PAT_MRT3847_76653C.1.pep
PFGAGFPSFLSKFWYSLGAAEIRSIVAMNITRTSKTLEPIFQNSPRTYRTRGRTRGRTRGRTRG

SEQ ID NO: 259833 - protein, 55 aa, Glycine max
  Clone ID: PAT_MRT3847_76654C.1.pep
IFSERRGQWKAATQSQEFFRTLQRYYSNAYMDAEKQNAINMYVPSVVFRSLLEPN

SEQ ID NO: 259834 - protein, 138 aa, Glycine max
  Clone ID: PAT_MRT3847_76655C.1.pep
LAFAMENQQLVETNGAGFQAVENLRVDDLELDQDKQSKEAKAEKIGHEDDKLDDISDQINDGEDARSNTKDESGNLQSGTQPENLETKSETEVSTDKREYSGDKMGAGGDLEPKNQETNIDNNSGQIDLAKEVADRES

SEQ ID NO: 259835 - protein, 90 aa, Glycine max
  Clone ID: PAT_MRT3847_76656C.1.pep
PKYNRHRNPTSEEPKRQALTPRPGAAFGAARGSPHPRDGGRHRWSYHSSDQRPKRVAGTAPRGPSGGPGANSPTFKKEPCLLGNWTGDKG

SEQ ID NO: 259836 - protein, 360 aa, Glycine max
  unsure (1)..(360): unsure at all Xaa locations
  Clone ID: PAT_MRT3847_76657C.1.pep
MEARAGANQRIARISAHLQPPNFQEGSDVLLKSAECRAKGGAPGFKVAILGAAGGIGQPLSLLMKMNPLVSVLHLYDVVNTPGVTADVSHMDTGAVVRGFLGQQQLESALTGMDLVIIPAGVPRKPGMTRDDLFKIKCXGLVRTLCEGIAKSCPNAIVNLISNPVNSTVAIAXQVVKKAGTYDPKRLLGXVTTLDVVRANTFVARXVVGVEVVEAIAVDWFCNTVNGICSCHFCWFMPPSSFTAEETEYLTNRIQNGGTEVVEAKAGTGSATLSMAYAAAKFAGACLRGLKGEAGVVECAFVDSQVTELPFFATKVRLGRAGAEEVYQLGPLNEYERIGLEKAKRELAGSIQKGVEFIRK

SEQ ID NO: 259837 - protein, 357 aa, Glycine max
  unsure (1)..(357): unsure at all Xaa locations
  Clone ID: PAT_MRT3847_76658C.1.pep
MEARAGANQRIARISAHLQPSNFQEGSDVLLKRGECRAKGGAPGFKVAILGAAGGIGQSLSLLMKMNPLVSVLHLYDVVNTPGVTADVSHMDTGAVVRGFLGQQQLESALTGMDLVIIPAGVPRKPGMTRDDLFKINAGIVRTLSEGIAKCCPNAIVNLISNPVNSTVAIAAEVFKKAGTYDPKRLLGVTTLDVVRANTFVAEILGVDPREVDVPVVGGHAGVTILPLLSQVKPPSSFTAEETEYLTNRIQNGGTEVVEAKAGAGSATLSMAYAAAKFAGACLRGLKGEAGVVXECAFVDSQVTELPFFXTKVRLGRAGAKKVYQLGPLNEYERIGLEKAKKKLAGSIQKGVEFFRK

SEQ ID NO: 259838 - protein, 136 aa, Glycine max
  Clone ID: PAT_MRT3847_76659C.1.pep
QSCSSRFSLRASSLMGKSILGTGGAGYIGSHTVLQLLLGGYNAVIVDNLDNSSEIAIRTVRDLAGDLGKNLTFHKLDLRDKPALEKVFASTKFDAVIHFAGLKAVGESVQTPLLYYDNNLIGTIVLFEDMASHGCK

SEQ ID NO: 259839 - protein, 92 aa, Glycine max
  Clone ID: PAT_MRT3847_7665C.1.pep
QPKLILVLQNIFKDELPGNPGYPISLLTRYHQTPWALAQIPISYYKVPRGRVCPFLGNRMKKNFLPGLSLGFMTCHKRPVPKRSRGPGGHPG

SEQ ID NO: 259840 - protein, 88 aa, Glycine max
  Clone ID: PAT_MRT3847_76660C.1.pep
PWSFSSLISDLQKPLRLELVWLSSSSFRQQIMPWLGQSRAVFSATRLVSTHRVEPSRDAFCAESVLGPRRQEYNCPESMSDIAVMPGV

SEQ ID NO: 259841 - protein, 41 aa, Glycine max
  Clone ID: PAT_MRT3847_76661C.1.pep
HVPLNGTPYGTIIPSTAKNSSKHLEYKGPSIPLEPSAYGNK

SEQ ID NO: 259842 - protein, 86 aa, Glycine max
  Clone ID: PAT_MRT3847_76662C.1.pep
KTRHHLHGSNHHQKHHMPGGGDSPYDDPFLNSCCCCCHCFLAISYIFSAFQRCILFFPCYPLFKCFGWNESAPRYQHHHIQHTEME

SEQ ID NO: 259843 - protein, 69 aa, Glycine max
  Clone ID: PAT_MRT3847_76663C.1.pep
MATNANCEMPLTHHPHWFSPKSGIYHSKHAPVDLPNDPFLDLVSFIFSHRHNGVSALVDSSSGCSISYP

SEQ ID NO: 259844 - protein, 81 aa, Glycine max
  unsure (1)..(81): unsure at all Xaa locations
  Clone ID: PAT_MRT3847_76664C.1.pep
KSSRLSRIYPLQSFPIKGGILAKEVRHYFPMLTAPXQFVVLPQGKAKRFFFEDFMEHGGNFTTPADRFLHEKTFKLCKAPK

SEQ ID NO: 259845 - protein, 99 aa, Glycine max
  unsure (1)..(99): unsure at all Xaa locations
  Clone ID: PAT_MRT3847_76665C.1.pep
VHQDDAHILCRDPHLLDEAMIGXTFLTYLLKILGFTYELKLPTRPEIYLXYIATWDKAERALKETLYDFGQPWALTERDGAFYGPKIDMRVSDALSKKV

SEQ ID NO: 259846 - protein, 66 aa, Glycine max
  Clone ID: PAT_MRT3847_76666C.1.pep
MYQMMGQVNKERLAEYLGELQRKEDTNDRYVAALRGETLTRKPYVRIQPIPEQTDTKANKEQKKMN

SEQ ID NO: 259847 - protein, 41 aa, Glycine max
  Clone ID: PAT_MRT3847_76667C.1.pep
PNSNSAQRVRYPYAWNISLIKFALPFCRLGNPARGVNLFSL

SEQ ID NO: 259848 - protein, 64 aa, Glycine max
  Clone ID: PAT_MRT3847_76668C.1.pep
GNSNSKPTIKRKGPILKIVQRAQPNSNSNQAKFKFRGFKKNTNIFNPHKKSREQSLLNRSEILK

SEQ ID NO: 259849 - protein, 123 aa, Glycine max
  Clone ID: PAT_MRT3847_76669C.1.pep
LHIFSVPIRSGCHRKYFVPYHFVVVRGILRIFGPNVSARSLRRFSQHFPPFVKRLFDQIVRCSVCFGQVHFADHFVHVFGQPFSRRPFGLLEGHGKKKGGDANAEGKGKQPQFGHLLRLAGRV

SEQ ID NO: 259850 - protein, 175 aa, Glycine max
  Clone ID: PAT_MRT3847_7666C.1.pep
PRVRGRVGPDGSKLEVMTCRPRSDLFMNLPALHKLDNMLLEILDGCKDMEFWYVDQGIVAQDADGSASFCKRIQRQEDKWWLPVPRVPPSGLSENSRKQLNHTRECASQILKASMAINNGALAEMEVPESYLETLAKNGRTCLGDFIYHYITSEKFSPECLLDCLDLCSEHVALE

SEQ ID NO: 259851 - protein, 100 aa, Glycine max
  unsure (1)..(100): unsure at all Xaa locations
  Clone ID: PAT_MRT3847_76670C.1.pep
XARXXXXXXXGXXXEHPSEHPXQXXTXXXXPXXXXXXXXXTXXXPXAAXXXXRXXXXXXXXSXXXPXXXXXXXXXXXXXXAXXXXXXXXXXXXXXXXXXG

SEQ ID NO: 259852 - protein, 60 aa, Glycine max
  Clone ID: PAT_MRT3847_76671C.1.pep
RTFVSSLLSDTKFFVGGDVSSEARNEAPTGSERLAVGLQQSAIISPETQHSLSHHSQLQT

SEQ ID NO: 259853 - protein, 78 aa, Glycine max
  Clone ID: PAT_MRT3847_76672C.1.pep
KCHFFTSSTQQHHLRVWILTPRAERDTYPFVQMTTTSTKRRIFLPHSVLLLSTIAMPKNTLFINHRRIRCLLSIHRCA

SEQ ID NO: 259854 - protein, 250 aa, Glycine max
  Clone ID: PAT_MRT3847_76673C.1.pep
PRAEFACRDSKSFMVIGDLLPIKDFPIIFYGIQGCDEREGNNPSWFNRIEASKVIEVVRRLIAGGNIKEENIGIITPYRQQVLKIKQTLENLDMPEIKVGSVEQFQGQEKEVIIISTVRSTIKHNEFDRVHCLGFLSNYRRFNVAITRAISLLVIIGNPHIICKDDHWSQMLWHCVDNSSYQGCSLPERVELYEDEDTGENTCFTEDNASPSNNVEWGQDSSNNGEWGQDSSFTKPVTDEAEWSDGWRSN

SEQ ID NO: 259855 - protein, 385 aa, Glycine max
  Clone ID: PAT_MRT3847_76674C.1.pep
ARRRQKGENRPFNDQRYFLDDEKLKDLGWSEGTTWEEGLRKTMDWYVKNPDWWGDVSGALLPHPRMLTMPGVEKYYDGSDNVTGTASNGDVNHSNQNRMVVVPATRNNVSPQKASLKFLIYGGAGWIGGLIGNICEKQGIPFEYGMARLDDRSQILFDFRTIKPTHVFNASGVIGALNVKWFEAHKPETIRAVVVGVLTLADVCRDHGLLMMNYAFGGNLEDKAYSTDAFYFRTQAKVEELLKEYENVCTLRIQLPVSSDLSNPHNLITMITRSDKVANIPNSITVLDELVPISIEMAKRNCRGIWNFTNPGTVTCNEILEMYKDYVDPTFKWVNFTLEQQAHVPSPSTNEMDSSKLKKEFPELLPVKDSLIKYVFEPEKKSLGF

SEQ ID NO: 259856 - protein, 28 aa, Glycine max
  Clone ID: PAT_MRT3847_76675C.1.pep
FSTLRNKNIINLYILPKTVLIIYTHSSH

SEQ ID NO: 259857 - protein, 74 aa, Glycine max
  unsure (1)..(74): unsure at all Xaa locations
  Clone ID: PAT_MRT3847_76676C.1.pep
SNSLSIFLPKLGSLFFYRVPNXAINCTKIXTQSMSCGARACHFETYMHFIFIFYGCNMEDERQGIIASYLSIIY

SEQ ID NO: 259858 - protein, 74 aa, Glycine max
  Clone ID: PAT_MRT3847_76677C.1.pep
IVEAKTPLFNLVISKGFKTQLHFFFFKIEEKPVPLFLNGGGEKLFGQKQKIGNGPGGLRRVFLSHLGNEITFAK

SEQ ID NO: 259859 - protein, 38 aa, Glycine max
  Clone ID: PAT_MRT3847_76678C.1.pep
KVKKIRTATRYDHSLPLLSCHIISLLICQLNSLHFPLL

SEQ ID NO: 259860 - protein, 37 aa, Glycine max
  Clone ID: PAT_MRT3847_76679C.1.pep
EKLPPIITAKLRVPYDKSVTCFLNLQETQLHYTRSIP

SEQ ID NO: 259861 - protein, 67 aa, Glycine max
  Clone ID: PAT_MRT3847_7667C.1.pep
PFFFVSRAFVHSSSLATRVLAQLMGRETPSPKKNFPLGHQAFTHLTVDSSQPNVHIQNTIKFLFFQP

SEQ ID NO: 259862 - protein, 133 aa, Glycine max
  unsure (1)..(133): unsure at all Xaa locations
  Clone ID: PAT_MRT3847_76680C.1.pep
SRPRTRGLQDLDLSHKASPGEITSAVGGLSSXQGSNMANNCLGGPIPPADGEXKTCSRLDMSYNQLKGSIPWEIGGAVSXQELGLEKNLLNGKISTVIENCCLLTTLSVTQHKLSGPIPAAVAKLTNLRTVDV

SEQ ID NO: 259863 - protein, 54 aa, Glycine max
  unsure (1)..(54): unsure at all Xaa locations
  Clone ID: PAT_MRT3847_76681C.1.pep
KKKTKREKKKKKRNKKRRIKGEQRIKYWNQNEEKKTRLKMKGRXHIYWSSSHAE

SEQ ID NO: 259864 - protein, 105 aa, Glycine max
  Clone ID: PAT_MRT3847_76682C.1.pep
IICVENLYFLRALESTVTLPSQRKAIFSDLLSRDVALFLERYGSKLSCSELNEFYSMKDGYEVNWHAKRLKSIISPTSEELKMRPVTVKNRRRACLDKLLCQGHY

SEQ ID NO: 259865 - protein, 443 aa, Glycine max
  Clone ID: PAT_MRT3847_76683C.1.pep
MREAQNDIVATEFATTTNDEEVPSGVVLFGKYELRRLLGVGAFAKVYHATTVDDTHQSVALNAVSKNNVLNGGFAPAAAPATSSSPPPPRPTITDPFEAPASGSILSLVMSYPTGCYTRSVGPLPTWHPVVSPRLAFRQLISAVKHCHSRGVFHRDLKLDNLLLDEDGNLKVSDFGLSAVTGQIRPDGLLHTVCGTPTYVAPEILAKRGYDGAKVDLWSCGVVLFALIAGYLPFNDYNPSVLYRKIYRGQFRFPRWISHDLRFLLSRLLDTNPKTRITVDEIYKDTWFNADGEYRFNRVLVKESECEKQLGRTGFKSLNAFDLISFSTGLDMSGLFEDPTGSNSVERVVSTVVPEKIMERVEAMTEEGRVVVRREKNGGGAKLEGQDGNLIGIVVVYQLTDELVVVEMKRSEKGGGFGGQFWKDKLRPLLLELASELEEPVSR

SEQ ID NO: 259866 - protein, 84 aa, Glycine max
  Clone ID: PAT_MRT3847_76684C.1.pep
FNRYPNVGFVGCQKDPMTRGGSLFVFPRFIFPIKLVNGGGSAVVKYLGGAPSGATAMGFLRVPQRDQLEFVKKPVHQDPLAFPF

SEQ ID NO: 259867 - protein, 87 aa, Glycine max
  Clone ID: PAT_MRT3847_76685C.1.pep
GLSSTLDSVLISSNHGSYTILRAFCKCKTPCIRLTCISNRVLIPLYCIMGCLLRLLPLLFLFIQLTFSPPPPQRRRTSYSDDGKPSW

SEQ ID NO: 259868 - protein, 85 aa, Glycine max
  Clone ID: PAT_MRT3847_76686C.1.pep
ELNQWLCYTESCTLSLYHPCISISGGNMLGCCLLSPFGFVAYNFSSSLGSLLPLISLSHALPFCFFLSICFTVSITLRYGYYGDS

SEQ ID NO: 259869 - protein, 216 aa, Glycine max
  Clone ID: PAT_MRT3847_76687C.1.pep
ICKLQNLQVFSVIGCMELKALPKGIGMLINLRELKITTKQSSLSQDEFANLSNLQTLSFEYCVNLKFLLEKAQLTQLSSLQILVVRSCGSLMSLPLYILPKLDALFVADCGMINLFLGDESPIKRWRMKFLHVENFPWLQVLPEWIEGAADTLQTLMIYNLPKLKFLPECLPRMTHLKRHVAECPSLLFYPSHIHCLTTLRRFERRWLPCMGLGVH

SEQ ID NO: 259870 - protein, 168 aa, Glycine max
  Clone ID: PAT_MRT3847_76688C.1.pep
MLSLPPSDPFSTFSAGFTPWDHDEDSHALFSPKPVSSSSGSDDKSEPNQHVSASSTAMEERKRRRMISNRESARRSRMRKQRHLENLRNQLNKCRVENRELSNRLQFVLHHLNRLRTENEWLHSERTLLRQKVANLTQILIFQQFQTFSPAWTCTNNNTSLMTINQVN

SEQ ID NO: 259871 - protein, 32 aa, Glycine max
  Clone ID: PAT_MRT3847_76689C.1.pep
AAWSKSSLKPQMIQLHTFHRNACILDQTYSEQ

SEQ ID NO: 259872 - protein, 181 aa, Glycine max
  unsure (1)..(181): unsure at all Xaa locations
  Clone ID: PAT_MRT3847_7668C.1.pep
GNSARDDVNDLTKGEERVKISWVNNTTNDFPPPCHYIPRNLVFREAYVNISLSRIGNEDCCSTCMGNCVLSSKSCSCTNKTGGEFAYTAKGLLKEEFLDECIALNRDPQNYFYCKACPLERSKNDDCLEPCKGHLKRKFIKECWSKCGCGKHCGNRVVQRGITCKLQVFLTSDRXRWGLRT

SEQ ID NO: 259873 - protein, 115 aa, Glycine max
  unsure (1)..(115): unsure at all Xaa locations
  Clone ID: PAT_MRT3847_76690C.1.pep
WLILADLDAPRHVLKPRQRTVRXVYAVLTVPSRAMVAVSGINIAFNREAVGPALIPALMLAREGKLRWETIEDIRCGMCVKVICDHISLDVRIGLPDVWTIDSSDTLQIYEKECE

SEQ ID NO: 259874 - protein, 146 aa, Glycine max
  Clone ID: PAT_MRT3847_76691C.1.pep
MAVQVYIVYYSMYGHVERLAEEIKKGADSVEGVEAKLWQVAEILPEEVLGKMGAPPKSDVPIITPNELSEADGFVFGFPTRFGMMAAQFKAFIDATGGLWKTQQLAGKPAGIFYSTSSQGGGQETTALTAITQLVHHGMLFVPIGY

SEQ ID NO: 259875 - protein, 61 aa, Glycine max
  Clone ID: PAT_MRT3847_76692C.1.pep
ELIRPDGLLDSENFIAANSLVTPPHIQPEWYYLFSYAILRSIPRKLGGVLSLMGSIFICSI

SEQ ID NO: 259876 - protein, 93 aa, Glycine max
  Clone ID: PAT_MRT3847_76693C.1.pep
KDYNTVSHTLHSILTHTLQGSHNKKKEKNKKKHFPDFKDLIFYTTHQFLRSLFFLINFFSFFSGTTTPIFSNLLACLQTPPLRSLFFCKAKII

SEQ ID NO: 259877 - protein, 246 aa, Glycine max
  Clone ID: PAT_MRT3847_76694C.1.pep
MHFQSFSLLIHIGAQKEPSHGPPDTQKQQHMMAQLRNVAILVVVVVAAVLLQSTEAKDYEVGGATGWTSFPPGGASFYSKWAANFTFKLNDSLVFNFESGSHSVVELTKANYENCEVDNNIKAFNRGPARVTLNRTGEFYFSCTFSGHCSSGQKLSIKVTDSSSPAPQKAPAEGPSASAPPPQNAPAEGPNSASPPASGSGSNEGAPSSQTEPAPIAPPPHGSATLLASTFSLFLITIAINFLSHF

SEQ ID NO: 259878 - protein, 78 aa, Glycine max
  Clone ID: PAT_MRT3847_76695C.1.pep
LCFACVDAEEFRLAQICGLNVIIQVDDLEEVSEFYQNRGCFNELISLMESGLGLERAHMGIFTELGVLYARYRPEKLM

SEQ ID NO: 259879 - protein, 210 aa, Glycine max
  Clone ID: PAT_MRT3847_76696C.1.pep
MYNLFLDVQVLKDGMQHLGNIICSKLGARMDSEPKRWRILADVLYDLGTGLEVLSPLCPQFFLEMAGIGNLAKGMSIVASRATRLPIYSSFAKEGNLSDLFARGEAISTLFNVVGIGIGIQLASTVCASMQGKLVVGPLLSIIHIYSVSEEMRATPVNTLNPQRTAMIVADFLKAGSVSSPADLRYREDLLFPRRLIEDAGNVRVGRDLH

SEQ ID NO: 259880 - protein, 54 aa, Glycine max
  unsure (1)..(54): unsure at all Xaa locations
  Clone ID: PAT_MRT3847_76697C.1.pep
XFFFFFFGFSFLRTCYSNSLIKDKLIISWVNMGFVPSTGGGNKLANNLQLLDDN

SEQ ID NO: 259881 - protein, 79 aa, Glycine max
  Clone ID: PAT_MRT3847_76698C.1.pep
KKGGPPLKFPPRGGRGPPLFIKPKGKQFLPLHRFMFLRVGEPPKRFFFKQPFGADLLCFYQALFPLGKREAKFLGGATP

SEQ ID NO: 259882 - protein, 78 aa, Glycine max
  unsure (1)..(78): unsure at all Xaa locations
  Clone ID: PAT_MRT3847_76699C.1.pep
MHPRIRPIAGKIKCAARLFCSSSKITPAGRRXQIPTTLAGLRARLTEKSPSLSDFVALKSDSAYSVEVKEKKKPLPKP

SEQ ID NO: 259883 - protein, 58 aa, Glycine max
  Clone ID: PAT_MRT3847_7669C.1.pep
RHNKNTTKIIKHLDCEHFKRRGHLNTSDDQMLTLSLIEGSENTGTRFGRFMNKRLNED

SEQ ID NO: 259884 - protein, 89 aa, Glycine max
  Clone ID: PAT_MRT3847_766C.1.pep
LTRSLETSHLYMFRELSLWSKVKSNITLQSLPTKVYPKWSLLVGFAVFVFTFFKTKVCCYSSPNAVVSCHLVINLVVYEKCNALDYKFH

SEQ ID NO: 259885 - protein, 94 aa, Glycine max
  Clone ID: PAT_MRT3847_76700C.1.pep
LKQFVMLRAAPSWSPAMFASLEAHVSCYRYQTLIGQSFNFSQKSIAWNKSVHFLRNLARFVFKAHWRPRQPFFFPLKKKKKKKKKKAPAPRRLP

SEQ ID NO: 259886 - protein, 102 aa, Glycine max
  Clone ID: PAT_MRT3847_76701C.1.pep
MYVDHAFSISDEDIMMDAAYTVSNKAPMKEIALAVSLLVFGTLAIIIGSLMAYNHVGGDTTHGLFFAILGTLLFIPGFYYTRFAYCAYKGYKDFSFSNIPPV

SEQ ID NO: 259887 - protein, 135 aa, Glycine max
  unsure (1)..(135): unsure at all Xaa locations
  Clone ID: PAT_MRT3847_76702C.1.pep
MYVDHAFSISDEDIMMDAAYTVSNKAPMKEIALAVSLLVFGTLAIIIGSLMAYNHQPSLLXIISRVALCHIGGTPAHSLFFAILGTLLFIPGFYYTRFAYCAYKGYKDFSFSNIPPRSSIFNYCIFSFKIQLVCI

SEQ ID NO: 259888 - protein, 117 aa, Glycine max
  Clone ID: PAT_MRT3847_76703C.1.pep
MLSSSTLPSDSNTPNRTSTYAIQTKFSVLFFLNISILNSIPQITLPFFLFLTSTPFSPNYYYFNFLFKQTLFLPIRFASASRSHRRFVSLLSDLLNQCFTERWVAPRRMKIRAFSPP

SEQ ID NO: 259889 - protein, 232 aa, Glycine max
  Clone ID: PAT_MRT3847_76704C.1.pep
GFNCAEAVNVAPIDWLMHGQSAVELYRLQCRKTSLSHDKLLFGSALESVRALAELALGKETPKNLKWGSVCGKDGDLTKAVRARIKMEEERLDCLPTHLKLLKMNSNFDLYKERECFSCFYDLHLSAVGCECSPDRYSCLKHANLFCSCEMEKRFVLLRYTISELNKLLEALEGDSHAIEVWANKNFGMVSANANEVCIDKPDLEKDMYRTKNCGRNGKLNWAVSRPRIGQI

SEQ ID NO: 259890 - protein, 104 aa, Glycine max
  unsure (1)..(104): unsure at all Xaa locations
  Clone ID: PAT_MRT3847_76705C.1.pep
ENTILLLMLCLQFQIDDSEEVSXKMIPLVFSQDKSIYEAVESAFHTIYIRKSPIETANNLLSLATDSNIGDLASLEXIVGALDSKGEIYCSMISHYGIPYCFNV

SEQ ID NO: 259891 - protein, 69 aa, Glycine max
  unsure (1)..(69): unsure at all Xaa locations
  Clone ID: PAT_MRT3847_76706C.1.pep
XLDPPSGSPTLVDVSXRYRXXSXQATNSVQCCRRXXLLMSCTCVXXXPXAYIHWSIXLCYSRGVIXYIR

SEQ ID NO: 259892 - protein, 98 aa, Glycine max
  unsure (1)..(98): unsure at all Xaa locations
  Clone ID: PAT_MRT3847_76707C.1.pep
IVGXXXGWGXREXRRVRHGVYRGGDLDRAIKFYTEWVXVRLLRGRDIPXGRGGDAFLGFGPEXSHFVWELTYNMGDLCELGWVGILRLDSGIYKLGST

SEQ ID NO: 259893 - protein, 121 aa, Glycine max
  Clone ID: PAT_MRT3847_76708C.1.pep
ALLRIAVKNGQPLFTFAVDNNSNILVATVKNLAVSKEDKCNRIYTFFTFREGKKKNGSWMNQASKTKGPDYIRHAVAQMKVSDSHHYDSTSQNCVNSSTTKEFVLFSVKLKQGDAQVTDYE

SEQ ID NO: 259894 - protein, 78 aa, Glycine max
  Clone ID: PAT_MRT3847_76709C.1.pep
QLVSSEGRFLKITGGPLKPSPFTFEKSILRGLPSLLMNFSSFIFFSSLKIINTDKPYLINVIITFTILTYSFFNKKKI

SEQ ID NO: 259895 - protein, 107 aa, Glycine max
  unsure (1)..(107): unsure at all Xaa locations
  Clone ID: PAT_MRT3847_7670C.1.pep
MAMRTKHPIAGVLFFTLXRRKNLAFGECQETHEEKDNRGKTTGKHQGPHAQXNTKGDMGISWQTXDTDHRMKQDREKQNREETREKKEEESREKEEXQQEQLEEQDE

SEQ ID NO: 259896 - protein, 282 aa, Glycine max
  Clone ID: PAT_MRT3847_76710C.1.pep
SSRTKFWCRNRPGDPARDRFNTGMPGYADQNPVVGRMGGNFTIAEGPTTPGPFAPGLTRNEGTIPGVGVAMPLSIPSLDMPQGEQKQPHPVSMGAPPLPPGPHPSLLNANQQQPYQQNPQQIPQHQHQALPQQMGPLPMPPNMQQLQHPSHSPFPNMPRPPPQMPIGMPGSIPGISSVPTSHPMPMPGPMGMQGAMNQMGTPMPQGPYVGMNQMHSGSLPTSGGPPLGGFPGNLPNMQGPSNANYPQGASFNRPQGGQMPLMQGYSPYQSGNQSGMPPNAQP

SEQ ID NO: 259897 - protein, 173 aa, Glycine max
  Clone ID: PAT_MRT3847_76711C.1.pep
FTSSQAQYQTAKFEEKPNCPNTLLNKLKREESPDAAKKNSPEPAFKRQRIETPSPLPTFKVRKEKLGDRITALQQLVSPFGKTDTASVLHEAIEYIKFLHDQVSVLSTPYMKNNGAPIQHQQDCDNLKDSEGAKQDLRSRGLCLVPISSTFPVANETSVDFWTSTFGGALIGR

SEQ ID NO: 259898 - protein, 124 aa, Glycine max
  Clone ID: PAT_MRT3847_76712C.1.pep
IETPSPLPTFKVRKEKLGDRITALQQLVSPFGKTDTASVLHEAIEYIKFLHDQVSVLRTPYMKNNGAPIQHQQDCDNLKDSEGPKQDLRSRGLCLVPVSSTFPVANETIVDFWTPTFGGALIGK

SEQ ID NO: 259899 - protein, 58 aa, Glycine max
  Clone ID: PAT_MRT3847_76713C.1.pep
LRRNKRKIFKIFDGSHATVNQLSDCEKWTKFYTAHTDFPSYPFTRVRLVRVDSPMLPR

SEQ ID NO: 259900 - protein, 75 aa, Glycine max
  Clone ID: PAT_MRT3847_76714C.1.pep
LINIIRVPCKKKILHPSTHPPQLLGEKKGRKFCYFLRLLILFYFYIFSALKKKDGNDGIPVYSVTLLGFPQTARG

SEQ ID NO: 259901 - protein, 70 aa, Glycine max
  Clone ID: PAT_MRT3847_76715C.1.pep
PFNLEKKWGYFLCKSGSWKISLKVLYVLARGMHVLLSLNQIRMCCQFAMFYFISSNNVLIRSFFFLGSKE

SEQ ID NO: 259902 - protein, 39 aa, Glycine max
  Clone ID: PAT_MRT3847_76716C.1.pep
KLFFIKFLTLTKCLSFYYFIIVSFNVYNFSYLIYLFSAS

SEQ ID NO: 259903 - protein, 105 aa, Glycine max
  Clone ID: PAT_MRT3847_76717C.1.pep
RYIVRSPHATYDRALYLLSYIDGYYVKRRFVTLDSKYITYVHSTIFKMHYVKIIVVLDKRVAILDGITCTKGDTLSSHKPIYKSMTRCLSLLPMLFIWGDYHKFF

SEQ ID NO: 259904 - protein, 323 aa, Glycine max
  Clone ID: PAT_MRT3847_76718C.1.pep
MESESSFLREQLLDGGHETFRSAHYKREGGSNRSQYNDDTVNYDDNHHLADDLSAHENESSSKFSDDMMFDRYLAEATDLLKQAKEFIKGRQGEEQAEIMLYRSANLLSKAVELKPMSLLAVGQLGNTYLLHGELKLKISRELRTLLSGSIQPSSVKHTRILKGLRNKVNCKEEVVPFLIDVCEECEELLVEAGRKYRLALSVDSNDVRALYNWGLALSFRGQLIADIGPGAAFEAERVFLAAIDKFDAMLLKGNVYAPDALFRWGVALQQRSRLRPGSSKEKVKLLQQAKRLYEDALDMNSNNVQVKDALSSCLAELNYRQF

SEQ ID NO: 259905 - protein, 91 aa, Glycine max
  unsure (1)..(91): unsure at all Xaa locations
  Clone ID: PAT_MRT3847_76719C.1.pep
LXQLPXHXHXSXESLKXPGTSRXXREXVXENXDIGRVRNXVRGCTXTPSKRTEEKRELRLXAXKRIGLSEXTXLRNXIEFFLVCXLTXTLL

SEQ ID NO: 259906 - protein, 89 aa, Glycine max
  unsure (1)..(89): unsure at all Xaa locations
  Clone ID: PAT_MRT3847_7671C.1.pep
FDISMQSKGVCVASLPWGEGTHASNYPRXIILIKLNNETIQTMMYPAYTTLNPTQVICKYIGLIHAHRLKYLYMHTHHSQDTVAVHEPT

SEQ ID NO: 259907 - protein, 70 aa, Glycine max
  Clone ID: PAT_MRT3847_76720C.1.pep
QRYRCLPNMWAWRGPSQRGHSHAQTTLYFAQSSPSQQKRSPPIFVDSDMNKEKVSIVGMEISPNNGEGFI

SEQ ID NO: 259908 - protein, 54 aa, Glycine max
  Clone ID: PAT_MRT3847_76721C.1.pep
PRVRPRVRPRVRSESLISSIWKGERLDKFLFMPSKSHSLSSLIGWYFSLSPSFE

SEQ ID NO: 259909 - protein, 99 aa, Glycine max
  Clone ID: PAT_MRT3847_76722C.1.pep
ECTFSRTERCPTIKTISHKWESSISLVLTVLAFFNSKRRTYTIRGREASEPSVPLCSTKPLRPFLTADSIAADSFAYYSTQKENCGFSMVEQKRDRASN

SEQ ID NO: 259910 - protein, 102 aa, Glycine max
  Clone ID: PAT_MRT3847_76723C.1.pep
DILLNGAFFVASGEELEVKYEKAYSVQPKSADRISFLTMSAGVLGNARDNNLGMWSRGPADDTTESGMEYTDDMSTTATMLLSSFLLLFFLSYTILRLTVIL

SEQ ID NO: 259911 - protein, 74 aa, Glycine max
  unsure (1)..(74): unsure at all Xaa locations
  Clone ID: PAT_MRT3847_76724C.1.pep
LFLSTSQQQQHPFPFNKTXNLXHSFFCSFTSIHELGHPLIVXYWISFEYTTPPRFGFXPKXSXCGWQVAIXVIS

SEQ ID NO: 259912 - protein, 64 aa, Glycine max
  Clone ID: PAT_MRT3847_76725C.1.pep
SRLVSLKSHTNAYCPVEGGHYFNISLCQLIKYMLHSPHCLPFPPNPIYGIGYRKRSLSLCSCKK

SEQ ID NO: 259913 - protein, 68 aa, Glycine max
  Clone ID: PAT_MRT3847_76726C.1.pep
NQLSDIHEQPWFSLKRVCMSAQSQIINMVPLAMCRSRNNSQWVIHRLSPACKSVALTSMQHPYEIRRP

SEQ ID NO: 259914 - protein, 38 aa, Glycine max
  Clone ID: PAT_MRT3847_76727C.1.pep
LVGDQPTPRASRKLASRNLGHTSFLCKIVIQSLAHPRY

SEQ ID NO: 259915 - protein, 180 aa, Glycine max
  unsure (1)..(180): unsure at all Xaa locations
  Clone ID: PAT_MRT3847_76728C.1.pep
GPWAPGYVAGSAFKLLEIQNQHXIMSSGSSVLDLGCAPGGWQSLGPLRNGGSKEGXRCDSRVQTISAXLKGLSPKENGFCMILSDMCLGSRIRTMLLLRSVEXGGHLAIKVLESEDAKGSSLLAYLSASYMIDVLFNSIAFGCVSXCVVVWWKTSWLRPKATRPSSRENYLICSRFKARC

SEQ ID NO: 259916 - protein, 137 aa, Glycine max
  unsure (1)..(137): unsure at all Xaa locations
  Clone ID: PAT_MRT3847_76729C.1.pep
MQILVKTLTGKTITLEVESYDTINNVKATNHDRVRILQNQQRLILAGKQLEDGRTLDDYNIQRRVLLXHLSCRGGMQSFGKTLTGMTITLEVESYDSIDNVKGNNHDKEGIHLVQHRMILRRQQREDRRYLADYHIK

SEQ ID NO: 259917 - protein, 57 aa, Glycine max
  Clone ID: PAT_MRT3847_7672C.1.pep
YDQDFFFNRIWAIEAIGGTFITSTRCLFLLLICMHKFFFSHNNIPLYSFKPNLERYN

SEQ ID NO: 259918 - protein, 60 aa, Glycine max
  Clone ID: PAT_MRT3847_76730C.1.pep
FHSIFFNLSDNNLKYKKIPEKVSNTFVFVFTLPNLFLIFFKKFLFYSSPFTPRFPLAYKF

SEQ ID NO: 259919 - protein, 54 aa, Glycine max
  Clone ID: PAT_MRT3847_76731C.1.pep
PEGILLICMMSEFVIILASTGILACSCKTATEIAKLVITSPSQLVFKRVWYTHF

SEQ ID NO: 259920 - protein, 73 aa, Glycine max
  Clone ID: PAT_MRT3847_76732C.1.pep
MDAIQLWVSKHKLATVGGLWASGIGASLVAYSRTRSPMKPSLRLIHARLHAQALTLAVLSGAAAYRYYENRAD

SEQ ID NO: 259921 - protein, 96 aa, Glycine max
  Clone ID: PAT_MRT3847_76733C.1.pep
MGSEDAKDPFKGVDWKAVGGEMQQNPSAKPALKKRLPKKVREIPEFYFLPRWPLPKAILFCSACIGGGVAAGMLLETWIEKKVKGISFSFVIKLSI

SEQ ID NO: 259922 - protein, 65 aa, Glycine max
  Clone ID: PAT_MRT3847_76734C.1.pep
CGNPQLFSLILRFQSLPKKKKKKKKKKKKKKKKKKKKKKKKKKKKKKKKKKKKKKKKKIKKVPPF

SEQ ID NO: 259923 - protein, 73 aa, Glycine max
  Clone ID: PAT_MRT3847_76735C.1.pep
NCTVLFVRSHFLVREGVRLNGQGRSNPTLSIDRIDKTSGRWKKADILVFNTGHWWTHGKTARGLGCNYFNFVF

SEQ ID NO: 259924 - protein, 55 aa, Glycine max
  Clone ID: PAT_MRT3847_76736C.1.pep
FFPFKITLYLFDLHKDIRQHTIIFQVFNGTEHTKHSTQLETCRICKRRTLISQKA

SEQ ID NO: 259925 - protein, 431 aa, Glycine max
  Clone ID: PAT_MRT3847_76737C.1.pep
MFFQQSSFYPRVDSTNPDANSPFSIPAPSSSSSSIYPSVETTENLIWEEPNTTTEEAMENVLVTVPGAILHLIEKDSSVHLASGDLTISTLGEGDKVVAVLACVGDQVQWPLAKDVSAVKLDESHYFFTVQVPQEHGEEKGFEVLNYGLTVAAKGQERVLRELDEVLDKYSFLSKEKLKGVGGWEVLDGSVSTETSPEELQGSEERKEVVEERSGAYWTTLAPNVEDYSGSFARWIAAGSGQVVRGILWAGDVTVDRLKWGNDFLKKRLEPGSHSQVSPQALESIKRVKKLTKMSEKVATGVLSGVVKVSGFFTSSVVNSKAGKKFFSLLPGEIVLATMDGFNKVLDAAEVAGRNVMSTSSVVTTGLVSHKYGEEAAHVTNEGLDAAGHAIGTAWAVFKLGKALNPKSAIKPTTLAKAAAEATSARLKAKK

SEQ ID NO: 259926 - protein, 35 aa, Glycine max
  Clone ID: PAT_MRT3847_76738C.1.pep
STFLQTDISIPLLSLSCSDSGMDISVHILANRTRG

SEQ ID NO: 259927 - protein, 56 aa, Glycine max
  unsure (1)..(56): unsure at all Xaa locations
  Clone ID: PAT_MRT3847_76739C.1.pep
TRPQIFSFFLAFLQNHLNPRVSCSFLSCANYPQLSNGXAEYDFYQVDLDMNYLLFY

SEQ ID NO: 259928 - protein, 45 aa, Glycine max
  Clone ID: PAT_MRT3847_7673C.1.pep
AFGVWEFVKIVIFHSTKVFVAKNGSCWLKGPVPKVKNYKRRFWAP

SEQ ID NO: 259929 - protein, 74 aa, Glycine max
  Clone ID: PAT_MRT3847_76740C.1.pep
KDCTKVAYCWCGTKSGNQVKKFRESKVAAAASTGKLELLRNLVADLPIGYSKNNFEYLPKKFDVVYDAVGQRGH

SEQ ID NO: 259930 - protein, 94 aa, Glycine max
  Clone ID: PAT_MRT3847_76741C.1.pep
KGSSRGLLNIPPQGGGPLPPRGEIPPLGEAPPPGPAFHFPIPNLGDRTPLAGHIGPAPGGHFRDPLPPPKEIFWPLPPGGAGGVPFPPPGGEEE

SEQ ID NO: 259931 - protein, 93 aa, Glycine max
  Clone ID: PAT_MRT3847_76742C.1.pep
SSYEKSHIPVMAEKDLYSVGVGGHESPTHDARDIKDIVNSKGNAVGEAADIYGDVQTAEELGYVHRGLKSRHIQFIALGKMPFSCVTQLPSVY

SEQ ID NO: 259932 - protein, 94 aa, Glycine max
  Clone ID: PAT_MRT3847_76743C.1.pep
AAPTAYTMMSNAAPPPQDPPVAMVIHNIPGTLIHGGMFIRYHIFSNIFEFTTTDKPPIMPIGKSSYGIICSALNSETNEHIAIKNIANAFDTRL

SEQ ID NO: 259933 - protein, 112 aa, Glycine max
  Clone ID: PAT_MRT3847_76744C.1.pep
SIIEPCFPSLIDWLNCASFWFLNLEFYLPSIVMYFFLITWWQCFLLFTDLASYISIYRPLLAFDVVCCWSLLFSRLLRGSFLVHLIFCWIKFLENRSKVALSLVGMHASCFQ

SEQ ID NO: 259934 - protein, 140 aa, Glycine max
  unsure (1)..(140): unsure at all Xaa locations
  Clone ID: PAT_MRT3847_76745C.1.pep
ETKQKKGKAKKKNHNAPKTKARTQKAETDNEDSKEENKNPTGTKGTPADQRQNAAHPEKKTKGKKATPRGTGHRSARKSKETQDSGKKEKTEQTTKSMYETRXTKRPEPLKKKEGTKHATNKRTTTRKLGTKSKKRRKRG

SEQ ID NO: 259935 - protein, 221 aa, Glycine max
  unsure (1)..(221): unsure at all Xaa locations
  Clone ID: PAT_MRT3847_76746C.1.pep
FGHREIIGIPXNLKTFSAIDSPALNSSSISMLLNQELHEARDTDFSLPRVKIPEWFECQSRGPPICFWFRNEFPAITVCIVQPHLNMSKSLSVIINNKPEYVHIHGRIDFRRSNIKLYTFVFRLQMKDNLDEELLKNEWNRAEIVCKDLWDECGIHVWKEQSSMEDIRFSDPCRKRKICSSEVAXGKKQRLVASEVVEPQYVEQHQHMGFFSHVWMKEESS

SEQ ID NO: 259936 - protein, 70 aa, Glycine max
  Clone ID: PAT_MRT3847_76747C.1.pep
RLILGQTIPKPTILCDKACQESSQENEQRTELATRWPHIRRSLRLKPRGELTALWATQPATHPPMQWSCR

SEQ ID NO: 259937 - protein, 122 aa, Glycine max
  Clone ID: PAT_MRT3847_76748C.1.pep
AAVHLFVRVYQSDTTEYQGTVTELSATPSSVYRATEYIDTPDKKSKVNKHRQGLIEDIGRPIMLGEGTSGANTNSKVDHYKALHEIGGKERHITEPEVNTAYVRRGTTDGCVCERKRDDDQE

SEQ ID NO: 259938 - protein, 68 aa, Glycine max
  unsure (1)..(68): unsure at all Xaa locations
  Clone ID: PAT_MRT3847_76749C.1.pep
YCCGKTTEGGASPHNAASYNGDLVKRVLSGSGTPLKPNESLYMXLFVLFNENQXSCPTWVGNYGLFYS

SEQ ID NO: 259939 - protein, 278 aa, Glycine max
  Clone ID: PAT_MRT3847_7674C.1.pep
GYKIKYLKLGDMEKKTVNFADTYGLNIIGSVESWFQTRKLSKPEPVIWQENGRFSAQLNVLGKVISTSGHWNKKDAKNQLYSDAYDYICSIDVNLKRNIGSSVSRDRIQLVKPDPEPESLSRSLNNLTVTGVNRPVDRLEQLEKRFDTVASRTQDVITATNANIDASAKMLERMSLLERKVGNLTERIEKLESQNGSMMTFFNDLTREVGTIRARSRIDTPVVQVLQSTKVAVMDFCTSSLHMPIDLVPTVFRFIEPNDVEAYKRQRGLHAPVQNLNW

SEQ ID NO: 259940 - protein, 91 aa, Glycine max
  Clone ID: PAT_MRT3847_76750C.1.pep
IFYVWRESGRSVTFKPFQFLAYGPFRLKLSSIGKKEKKTCPFKFFKFQLTLPAFCIFVSFFLFTLLRWCFHHYAILVLVLLHSTFFIGYHQ

SEQ ID NO: 259941 - protein, 79 aa, Glycine max
  unsure (1)..(79): unsure at all Xaa locations
  Clone ID: PAT_MRT3847_76751C.1.pep
QWYGGVGFCQACTHMGMERNGFLHLQXKVDDDLIEPQIEHDGCMVDKLGRAGLINQAEDIGRKKPMEPDGDIWAILIGA

SEQ ID NO: 259942 - protein, 71 aa, Glycine max
  unsure (1)..(71): unsure at all Xaa locations
  Clone ID: PAT_MRT3847_76752C.1.pep
KLDDEVVLLDLWQSPFGMRVRIELAEKGIKYEYKEEDLRNKSPLLLKMNPVHKKIPVLINNGKPXCESIIA

SEQ ID NO: 259943 - protein, 113 aa, Glycine max
  unsure (1)..(113): unsure at all Xaa locations
  Clone ID: PAT_MRT3847_76753C.1.pep
MSDEEHHFESKADAGASKTYPQQAGTIRKNGYIVIKGRPCRLXEGSTSKTGKHGTLRVTWWNDFFTCQKLGEIGPXYHCEGPQVNWADYQLIDIAEDGVLRLLYENGDTQEDL

SEQ ID NO: 259944 - protein, 89 aa, Glycine max
  Clone ID: PAT_MRT3847_76754C.1.pep
RLSSAENSSHGISTTTQYLPLHHFISPTCSLIWSRERVVSHDRLRVHRRVRWELSDDANSGRETSVTEEGLQRCCSRLATAARERLVRG

SEQ ID NO: 259945 - protein, 81 aa, Glycine max
  Clone ID: PAT_MRT3847_76755C.1.pep
TERESTCRELLFRNADALAVNASTREELCERLNLPAEWISEALAVRAIVKQERHEEIAHWVAARHYEEAHTCLISHVAMRC

SEQ ID NO: 259946 - protein, 92 aa, Glycine max
  unsure (1)..(92): unsure at all Xaa locations
  Clone ID: PAT_MRT3847_76756C.1.pep
TRHRRRLTSSKHIAAHHAIPPPPYRPQPNAPTLANLHXRPYPSYDXVLPCAPYAPHVPLSLDREFDYAMVEPHPCPLPAYLLAPLNYLLWLR

SEQ ID NO: 259947 - protein, 53 aa, Glycine max
  Clone ID: PAT_MRT3847_76757C.1.pep
NMKLRANCGTTVKLRLGDGLVMDSNQETAFFAYAKLRVHTLTLSQTFARREVF

SEQ ID NO: 259948 - protein, 57 aa, Glycine max
  unsure (1)..(57): unsure at all Xaa locations
  Clone ID: PAT_MRT3847_76758C.1.pep
KPSVTPSSIVTLVSTPIFWLVLYSICGFFGMPIDHVCFLXMLCQFQSRLYSYISCCL

SEQ ID NO: 259949 - protein, 121 aa, Glycine max
  Clone ID: PAT_MRT3847_76759C.1.pep
DSKVLLSFVKDFDRVVIDVHYSNLFWNGFDSMTVQENIDFIRNERVSNLGGVSSTNALSFVGEWTGEWAVKGATKEDYQRYAQAQLGVYSRATFGWAYWSYKCRFNEWSMKWMIQNGRIKL

SEQ ID NO: 259950 - protein, 72 aa, Glycine max
  Clone ID: PAT_MRT3847_7675C.1.pep
MLVTVLGYFVYLCYFMCIYICLNIIVRFKYDIVIHVMIVFFFSLFKSNLGPQFLTTLQTSPSLKNIANNTLC

SEQ ID NO: 259951 - protein, 85 aa, Glycine max
  unsure (1)..(85): unsure at all Xaa locations
  Clone ID: PAT_MRT3847_76760C.1.pep
PEVRDFGDHLFSDLRRPSKAGWRTAAIIHAREKNXEIENEDTYRSEQANLHSIQELLGKLHATASSSSRTRAFNSLLEELREERQ

SEQ ID NO: 259952 - protein, 82 aa, Glycine max
  Clone ID: PAT_MRT3847_76761C.1.pep
NPKQDVAALFNEPLVNNKNKFTLSVYMLHMYNCKQFAQLESHTYFNYWILLQHYMICFPTNQHYVICTTLLFSVLYLHCDMM

SEQ ID NO: 259953 - protein, 100 aa, Glycine max
  Clone ID: PAT_MRT3847_76762C.1.pep
MFNNHCDVFIMMRTHEQDVICVKKKKKKKKKKKKKKKKKKKKKKKKKKKKKKKKKKKKKKKKKKKKKKKKIKGGALLREPSFITPVWQFKIFFMGTQNLI

SEQ ID NO: 259954 - protein, 82 aa, Glycine max
  unsure (1)..(82): unsure at all Xaa locations
  Clone ID: PAT_MRT3847_76763C.1.pep
AIISTLFLSSTAAILPMLNEPHLSLKLHPLYNLNNLVNTFXPQIFTNLPXIKSSHENHDFDQHXRQLPATLISNVYYYLTEL

SEQ ID NO: 259955 - protein, 711 aa, Glycine max
  Clone ID: PAT_MRT3847_76764C.1.pep
LEEHALNQTISHTELWKTLSPLEEFVRKYLQLTKGGADNYHGSWWKRHGVVLDGEIAAVAFKHGHFDQAAKSYEKVCALYAGEGWQDLLAEVLPNLAECQKSLNDQAGYLLSCVRLLSLDEGLFLTKERQAFQSEVVRLAHSEMKDPVPLDVSSLITFSGNPGPPLELCDRDPGILSVTVWSGFPDDITLDSMSLTLNATYNTDEGVKALKSSTAIVLHPGRNTITLDLPPQKPGSYVLGVLTGQIGQLRFRSHSFSKVGPEDSDDFMSYEKPAKPILKVFKPRALVDLDAAVSSALLINEDQWVGILVRPKNYSLKAAVLHIDTGQGLESKELHVIEMETDADVQNDGAQIRTLNSDKKFERLTLHDGKIKFPNWASDTPSILWVLVCAISDTPIRGSSSATTRRESIVDGMRTIALKLVFGAFHNQIFERTLAVHFTYPFYVRTRVTDKCNDGTLLLQVILHSEVKATLAIYDAWLDLQDGFVHTGQTEGRPNSSFFPLIISPTSKAGILFSICLDKSNAEEARKQPESIVNIKYGISGDRTIGAHPPVMNESTGVDGARQELIFRSAITLQRPVLDPCLAVGFLPLPSDGLRVGQLVKMQWRVERLKDLNEEGVSKQNYEVLYEVNANSGNWMIAGRKRGYASLSTKQGARIVISVLCMPLVAGYVHPPVLGLPDVEEANISCKPAGPHLVCVLPPPLSSSFCIPVNS

SEQ ID NO: 259956 - protein, 110 aa, Glycine max
  Clone ID: PAT_MRT3847_76765C.1.pep
MQWRVERLKDLDEEGVSKQNDEMLYEVNANSGNWMIAGRKRGYASLSTKQGARIVISVLCMPLVAGYVHPPVLGLPDVDEANISCKPAGPHLVCVLPPPLSSSFCIPVNS

SEQ ID NO: 259957 - protein, 106 aa, Glycine max
  Clone ID: PAT_MRT3847_76766C.1.pep
RGGPSPKTKLNFLSLKIPPSKKIFFWGKTPPLFTGVWAHFRPLKPGFLGGAPRKKKIPFFPGGGYLFLLKKGALKTPRPYRALKGGRFTLKYFPGGFFKGGSGESL

SEQ ID NO: 259958 - protein, 117 aa, Glycine max
  unsure (1)..(117): unsure at all Xaa locations
  Clone ID: PAT_MRT3847_76767C.1.pep
RPRARRRXRPRERARARTRARRGGEDHRRGGPETHRXSQGPXHAAEERRRRQPXDEGQTPREPXQXPTXRRXRXRPHXRKRQRKXXGTAXXRXEEPRGAPKKKKKKKKKKRPRQRTQ

SEQ ID NO: 259959 - protein, 66 aa, Glycine max
  unsure (1)..(66): unsure at all Xaa locations
  Clone ID: PAT_MRT3847_76768C.1.pep
TVGALXSKTXXXSTDPDEXRNATXXXXXXDQXLXXYXXLXAXHXXXXSXXXXXREPNXELXRXXXV

SEQ ID NO: 259960 - protein, 271 aa, Glycine max
  Clone ID: PAT_MRT3847_76769C.1.pep
MDENSATNGTHEVVLDVNRDVSRTTQASRSCVNVSFLQKLVAEVVGTYFLIFAGSASVVVNKNNNNVVTLPGISIVWGLVVMVLVYSVGHISGAHFNPAVTIAFASTKRFPLMQVPVYVVAQVVGSTLASGTLRLLFMGKHDQFSGTLPNGSNLQAFVFEFLITFLLMFVVSGVATDNRAVGELAGIAIGSTILLNVIIGGPVTGASMNPVRSLGPAIVHGEYRGIWIYLLAPVVGAIAGALVYNTIRYTDKPLREITKSASFLKGRGGST

SEQ ID NO: 259961 - protein, 117 aa, Glycine max
  Clone ID: PAT_MRT3847_7676C.1.pep
FHPYNLLFPLSKQNYPSLVFVNSLLRTHTLMVCPFWAWHSHAGCSLYLFYYCPLCHASLCDAQPHLTATPHVMRTMLVTKVNTFGWQPSAPPHAGDHPSHPVPWLLAARHALMATTI

SEQ ID NO: 259962 - protein, 57 aa, Glycine max
  Clone ID: PAT_MRT3847_76770C.1.pep
RAKTVANLLVEYEGKEYIPNINIIHPQTYGLYSDSVPQSNIIIIIIIIITIIVLVEA

SEQ ID NO: 259963 - protein, 731 aa, Glycine max
  unsure (1)..(731): unsure at all Xaa locations
  Clone ID: PAT_MRT3847_76771C.1.pep
KNAKSIALPSHIDVGILKRVLEEVEKVMNDFKTMLFKSMEDPQIDLTNLENTVRLLLDSEPESDPVWHYLNIQNQRIRGLLEKCTLDHAARMENLHNELRERALSDVRWRQIQEDMDESXSDINNSPIGNTYPAVHSHPSNLPVREVDGLRGRYIRRLTAVIIHYIQAFWKVALSVFSGKFAKSSQVTTDSNIHCSANKIEEKAGDGKYSSHSLDEVAAMICSTISLYGVKVTNIFHDLEESNVLRSYMSEAIEDISKACTALELKEAAPPIAVAAIRTLQSEIIRIYVLRLCSWMRASVEEVSKDVTWVIVSILERNKSPYAISFLPLTFRSVVASAMDQINSMLWSLRNEATKSEDMFMQLQEIQESVRLAFLNCFLDLLLDYDRSGXELGQHRTDEEGSQLPNGYTHELENAPSGLHGGVIDPHQQLLIVLSNIGYCKDELSYELYDKYRHIWQHSRGKDEGNSDVEYLVNSFSALEAKVLEQYTFAKANLIRSAAMNYLLHSGIQWGAGNICAQKVNSMVXLTHILFVAVPAEVFAGAKPLLDKTLGILVEGLIDTFISIFHENEATDLSALDTNGFCQLMLELEYFETILNPYFTSDARDSLKSLQGLLLEKATESVTDAVDNPGHNRRPTRGSEDALADDKQQGTTVSPDELISLAQQYSSEFLQSELERTRINTACFAESFPLDSVPEPAKSAYSPFRNSMDSPSRNHRGTYNTGASSFSRHRH

SEQ ID NO: 259964 - protein, 77 aa, Glycine max
  Clone ID: PAT_MRT3847_76772C.1.pep
TVRSFVLHFQRSKRAATRLCEHPLPLNKFRTNYLTAYTGSPILIWIRNWHNHQDSWDTGQIGITLQSIQHIMAPAYS

SEQ ID NO: 259965 - protein, 61 aa, Glycine max
  Clone ID: PAT_MRT3847_76773C.1.pep
IFHGVRSYNSKRRMERTSCHRRASFRRNGARIGARRETRRREPPSCNPQHLFSEKRKLRSN

SEQ ID NO: 259966 - protein, 80 aa, Glycine max
  Clone ID: PAT_MRT3847_76774C.1.pep
ARVSCIKGHVHVCFSWCRTLSEDTRPTSIMSSCYERGAYQVGSKQERGRKLVIQHVRLLGLSIRKIKLQAFSFLITIQTV

SEQ ID NO: 259967 - protein, 67 aa, Glycine max
  Clone ID: PAT_MRT3847_76775C.1.pep
SCGCYAQRHALDGHWSYCAPQIAMRGSTTITERNDMIAVIAPEARCGYSSTQDPGYTNKLEGQWHTA

SEQ ID NO: 259968 - protein, 181 aa, Glycine max
  unsure (1)..(181): unsure at all Xaa locations
  Clone ID: PAT_MRT3847_76776C.1.pep
MAITGNLNFNLNLVLPVARHMACPPRVPSFLFTRGRGAWSPSLLVTRAIDANEFLGDFGARDPFPAELESSFGDKVLGYGNTEHKILIPTITALGLSQQECAPVSSAQPPISLDDAQTLIRKVVGWRLVNEENGLKIQCLWKLRDFKCGGELINRISKVVEAEGXHFPNIYLEQPNQVRAE

SEQ ID NO: 259969 - protein, 105 aa, Glycine max
  Clone ID: PAT_MRT3847_76777C.1.pep
DLIMSEFRGFRKLSHAAEACGYEDHGDSPHGKPPHRRSKSASERNLANARGGASHPLEKDHNECLVSTPSVGACRLQSPSYDNLTCVNKNTSSSHRASLEKDVEQ

SEQ ID NO: 259970 - protein, 105 aa, Glycine max
  Clone ID: PAT_MRT3847_76778C.1.pep
KFFFLGEKFQGAPSGNQNTPFGIAFLVLAKRPGLDFKSRFPWPPFTNLGHGQLGFLFRGAKLGFLLKGPESLPFARLAKKANFFSGQIGENFFLEPWEGANKPLP

SEQ ID NO: 259971 - protein, 58 aa, Glycine max
  Clone ID: PAT_MRT3847_76779C.1.pep
MFIKLWKMIYPYIDRNHKKKIVVVQNNKLKSTLLEQIEESRIPDIYGGQMPVVPIHNS

SEQ ID NO: 259972 - protein, 84 aa, Glycine max
  unsure (1)..(84): unsure at all Xaa locations
  Clone ID: PAT_MRT3847_7677C.1.pep
LNQLCVLHEKTPVSDRVTKCCTESLVNRRPCFSALEVDETYVPKEFNAETFTFHADICTLSEKERRIKKQTALVELVXHKPKAT

SEQ ID NO: 259973 - protein, 50 aa, Glycine max
  Clone ID: PAT_MRT3847_76780C.1.pep
SFMIIFHYSRGSCLDSVVAANKTATRRGSNERAGLIVSSMIYRTPSSRIP

SEQ ID NO: 259974 - protein, 145 aa, Glycine max
  unsure (1)..(145): unsure at all Xaa locations
  Clone ID: PAT_MRT3847_76781C.1.pep
MSLGHFTPLCCTSSTSDYEARTLQLLAVSGVRHDTDTHVRVEFDVFDRCLRVRVVSGVRVSVGASYQSNSDGRRAYLAYVXEGMLESQDWKSIMKYQRKNGYLFNSPATTAAVFQRLKNAECLGYLRSVLEKFENACMFPALCFS

SEQ ID NO: 259975 - protein, 31 aa, Glycine max
  Clone ID: PAT_MRT3847_76782C.1.pep
IRIIRSCFCNRCCLYILSADTMSSQVKNGSI

SEQ ID NO: 259976 - protein, 141 aa, Glycine max
  Clone ID: PAT_MRT3847_76783C.1.pep
KKTKIDSSTLLSENILELTIEHVLNCLEKLFGAGGIMKNHDGDSCNLQPTNRTNQNQNSRQRPRLSPTDACRPSNRGSTYSEALQVYCVVKMLSAVLKFLADATAMCFAPHNHGLFLNYTSKCAQHIISSLDWLHHNQIQF

SEQ ID NO: 259977 - protein, 83 aa, Glycine max
  unsure (1)..(83): unsure at all Xaa locations
  Clone ID: PAT_MRT3847_76784C.1.pep
CPRTNDNMDLLVSIDLLGLQGAGKAVPXNKIVCDDTLVLANTQEFFDGNLPEAPRLPIGVNGIYPASQLPSEAVAENDTCGSG

SEQ ID NO: 259978 - protein, 93 aa, Glycine max
  Clone ID: PAT_MRT3847_76785C.1.pep
PRRPKKKKKKKKKKKKKKKKKKKKKKKKKKKKKKKKKKKKKKKKKKKKKKKLKKKKKKKKGAPFLGTQFLFPGPGNILFFFWGPLNLLSWAGF

SEQ ID NO: 259979 - protein, 197 aa, Glycine max
  unsure (1)..(197): unsure at all Xaa locations
  Clone ID: PAT_MRT3847_76786C.1.pep
MPLFEITNAQLSFRYSLTLRSPIPMPYHAKGGPSWISFHTLKIRNLNVIKAVAATLDAKPHLDVPHPPGFLLEFSEPPDDREKLRRMRISKANKGNIPWNKGRKHTPETLQKIKERTRLAMQNPKVKMKLVNLGHAQTSETRKKIGAGVRRRWEKRXERRWCKESCCFEWXQNLIAETFLGKXFVXSRKELQXEILY

SEQ ID NO: 259980 - protein, 62 aa, Glycine max
  Clone ID: PAT_MRT3847_76787C.1.pep
SSFKEFLSGKKKAFLQLPFDRAILFAPVFPPLVKKNALEKNAFFADYGGAPQKLFELGFFEA

SEQ ID NO: 259981 - protein, 145 aa, Glycine max
  Clone ID: PAT_MRT3847_76788C.1.pep
MGALNYIISNFCTVPSKKIKTMQTVEIKVKMDCDGCERKVRNAVATIKGVKSVEINRKQSRVTVNGCVDPNKVLNRVKRTGKKKAEFWPYVPQHVVTYPHASGVYDKRAPGGYVRNVQTFAASADTEEKFMSLFSEDNVNACSIM

SEQ ID NO: 259982 - protein, 60 aa, Glycine max
  Clone ID: PAT_MRT3847_76789C.1.pep
QHAYFFWRVYPSSSILGRGPLSFQSNINWFPHPALKIKMQQLFQLFWDHHGLFSFESLFG

SEQ ID NO: 259983 - protein, 122 aa, Glycine max
  unsure (1)..(122): unsure at all Xaa locations
  Clone ID: PAT_MRT3847_7678C.1.pep
HLTRATPTRSLTRGPISPLRKNWLRGPRRTRCLPLRKTRGKKRKCSRRLEQKRIVTRGGINRWTRKEHGNALKGAPNETLSRPXLKEERSGAAGHKXEAPGAAYTLKRTMHNDLGLANVAVY

SEQ ID NO: 259984 - protein, 79 aa, Glycine max
  unsure (1)..(79): unsure at all Xaa locations
  Clone ID: PAT_MRT3847_76790C.1.pep
MVREVSVSCVDSLLTGMVACXCYRFYPIRPELAARKIDATGYQVSLKLSDEYPIDRPRXFTVHHEAIXLICDDFWSELF

SEQ ID NO: 259985 - protein, 56 aa, Glycine max
  Clone ID: PAT_MRT3847_76791C.1.pep
RACKHIYCMQLKLHKRLQLNDTRIRKKKRKTHKKCTTHYTRQKQQNITETLNNITC

SEQ ID NO: 259986 - protein, 377 aa, Glycine max
  unsure (1)..(377): unsure at all Xaa locations
  Clone ID: PAT_MRT3847_76792C.1.pep
YLEMSEVRNKVDFIQLLGPDMSIKILTHLDDPCDLIRVSSVSSSWHRFVIEHGLCKQLCLKMFPEXSGVAHIIELDNIIEPLSNTLGSYVSWESHKRNHRVYAFLASGLTPMRKNCISKAISASSTDNYPEESILHTLEPGDRTEYRASYWSSKGESDPSVPETLVYELASKLCLVTEIYVHPFQAYFQHGFPIYSAKAVRFRMGHSKHPMELESPVDNMAANHVLGNNQFIWTYTSPEFPMLQEYRLQKFKLPEPVLCIGGVLLVELLGRVQKQEMDELFYICISHVQAMGRSISPEFDVKIHHPSGKCTLKYCPQIDCYVSSSTSSQRSDSSNPSRLRTITSNIMQRGVRRWEQFLLSALLGTATDPVVVDNDDQ

SEQ ID NO: 259987 - protein, 168 aa, Glycine max
  unsure (1)..(168): unsure at all Xaa locations
  Clone ID: PAT_MRT3847_76793C.1.pep
MSEVRNKVDFIQLLGPDMSIKILTHLDDPCDLIRVSSVSSSWHRFVIEHGLCKQLCLKMFPEISGVAHIIELDNIIEPLSNTLGSYVSWESHKRNHRVYAFLASGLTPMRKNCISKSISASSTDNYPEESILHTLEPGDRTQYRASYWSSKGESHPSVPETXVYKLAS

SEQ ID NO: 259988 - protein, 104 aa, Glycine max
  unsure (1)..(104): unsure at all Xaa locations
  Clone ID: PAT_MRT3847_76794C.1.pep
LCRFRIDACNRVQVPIYEHGLDDVVKQSRAKNLCSRTDAETHVYEAHIRFGCVTTGTSTHGLGARRAAXMTDWESASRMNADVYKSDKIEMDKSTVPDKTDADI

SEQ ID NO: 259989 - protein, 55 aa, Glycine max
  unsure (1)..(55): unsure at all Xaa locations
  Clone ID: PAT_MRT3847_76795C.1.pep
XTLTRVXDXTXRAHXTVXVAXVIRRWTHAXXRIHGRSLHLAXXXDXEGPXILRXX

SEQ ID NO: 259990 - protein, 62 aa, Glycine max
  unsure (1)..(62): unsure at all Xaa locations
  Clone ID: PAT_MRT3847_76796C.1.pep
MLKICLKLKKVVHMHTHSQNYPHLYGFRQTQGPRPLNMIDFLRLERHDYCHLNIMXEFHVES

SEQ ID NO: 259991 - protein, 68 aa, Glycine max
  Clone ID: PAT_MRT3847_76797C.1.pep
NNLLCSFQTTFFFPATHVLFAVLLLHIKHSMKKCRVMELISKYVKPIGSPEAKGGCNFRKKNYWRAIK

SEQ ID NO: 259992 - protein, 216 aa, Glycine max
  unsure (1)..(216): unsure at all Xaa locations
  Clone ID: PAT_MRT3847_76798C.1.pep
MKRFFKVVEKDSDGSVKKPRENDSEAEESNEKKEPLKFMTWNANSFLLRVKNNWPDFTNLITTFDPDLIAIQEVRMPAAGAKGASKIQGEIKDDTSAAREEKKILTRALSAPPFGNYHVWWSLADSKYAGTALLVKKCFKPKSVVFNLDKLASKHEPDGRVILVEFETLRLLNTYVPNNGWKEEANSFQRRRKWDXRILEFVTQSSDKPLIWCGXI

SEQ ID NO: 259993 - protein, 52 aa, Glycine max
  Clone ID: PAT_MRT3847_76799C.1.pep
LLPILSHHPHIITPYTLTNDLSYYLYTTVPSQTLFLFNHILPIHTQIHNHLT

SEQ ID NO: 259994 - protein, 107 aa, Glycine max
  Clone ID: PAT_MRT3847_7679C.1.pep
FFFLSCTRAISAEQMKMMLLLQTAQWVNMKTEYKVFVWHSDQKPCSSRAILIWRKFKTYWFTDGLTFAETFVQGRWEQVLFILQGKLTFMFMKIHPIFQWETSRTSF

SEQ ID NO: 259995 - protein, 58 aa, Glycine max
  Clone ID: PAT_MRT3847_767C.1.pep
KGIFELIFDYFATLFVAHSFIAWTLFGYFVTSFLFFKNKGFTTLIYLIILPYKINGQV

SEQ ID NO: 259996 - protein, 74 aa, Glycine max
  Clone ID: PAT_MRT3847_76800C.1.pep
NKISEFYFIIPYNYLHNNNTFHFSLKTMLSLKHLLYKFMKCGSSTYFIILALFFLLFSPFGCIYAPFAKISNLR

SEQ ID NO: 259997 - protein, 515 aa, Glycine max
  Clone ID: PAT_MRT3847_76801C.1.pep
MATVVKLHVFPESLNQHKTRLLRRGFGSCPSPGVLGFGHKNYDQFSVKVCRAFRTEDGGDVKEKKFRNLKKNEEKTKRESGFWSSLKSILLRNFMVGSKSDDEYRQAVVKVEGLLSSIAIQIGRYIVTMMSTGVILSIGFQMSGGDSQMDALIWYSWLGGVIIGTMIGANMVLEEHCRAGPRNVVITGSTRGLGKALAREFLLSGDRVIVTSRSPESVQDTIKELEENLKEGIANAVGSSLTKLSQAKVIGISCDVCEPHDVQRLANFAVKELGHIDIWINNAGTNKGFRPLLQFSDEDIKQIVSTNLVGSILCTREAVRIMRNQAIAGHIFNMDGAGSGGSSTPLTAVYGSTKCGLRQLQGSLLKECKRSKVGVHTASPGMVLTDLLLSGSTVQNRQMFNIICELPETVARTLVPRMRVVKGTGKAINYLTPPRILLALITAWLRQGRWFDDQGRALYAAEADRLRNWAEDRARFSFTDAMEMYTENTWLSVFSLSVVCAFIILSSTGSNLPGT

SEQ ID NO: 259998 - protein, 68 aa, Glycine max
  Clone ID: PAT_MRT3847_76802C.1.pep
TIMQAQQGLHFRPVAHMYVGSKRTTFSHGYHLVPSIRLVIIRLSGVKNGPLRVLDPESCDRSKRTLAL

SEQ ID NO: 259999 - protein, 45 aa, Glycine max
  Clone ID: PAT_MRT3847_76803C.1.pep
LIKHYTFISIDTKYPFSYFLPHSNPTKPYNHLNNNHNLHSKHYQL

SEQ ID NO: 260000 - protein, 110 aa, Glycine max
  Clone ID: PAT_MRT3847_76804C.1.pep
LPETVARTLVPRMRVVKGTGKAINYLTPPRILLALVTAWLRRGRWFDDQGRALYAAEADRLRNWAEDRARFSFTDAMEMYTENTWLSVFSLSVVCAFIILSSTGSNLPGT

SEQ ID NO: 260001 - protein, 68 aa, Glycine max
  Clone ID: PAT_MRT3847_76805C.1.pep
RCTLSYSIHRSLTSIMIMSKKVHCSSESCFSISCYCRTCLPFPLAEATTRSPAWKAALNRSNWFLSNR

SEQ ID NO: 260002 - protein, 54 aa, Glycine max
  Clone ID: PAT_MRT3847_76806C.1.pep
QVGSVQRWCMIIQDTHKHVGWEHKLCVDPYGISRRDHILQSFFISFYPPSVSFS

SEQ ID NO: 260003 - protein, 58 aa, Glycine max
  Clone ID: PAT_MRT3847_76807C.1.pep
INGIMKLGIVRYGYSVNLIMMTYYDLIKSTSLKAQNRGQNKKDRTCVIITFLGSSGTL

SEQ ID NO: 260004 - protein, 105 aa, Glycine max
  Clone ID: PAT_MRT3847_76808C.1.pep
EYLKRRCPTPNPDPKAVLYSRNDLKTPMIIGNNYYKNILQHKGLLIVDEELATDPITAPYVQKMANDNDYFNQQFSRAILLLSETNPLTGDEGEIRKDCRYLNAN

SEQ ID NO: 260005 - protein, 303 aa, Glycine max
  unsure (1)..(303): unsure at all Xaa locations
  Clone ID: PAT_MRT3847_76809C.1.pep
MIRRHAAFDPEVASKVCGTVIEPFLLSLAKTSNLVTLRHCNQIHAKLIASQCISQTHLTNNLLSLYAKFGHFRHAHLLFDQMPQRNVFTWTTLISSHFRTGSLPKAFEMFNHICALNERPNEYTFSVLLRACATPSLWNVGLQIHGLLVRSGLERNKFSGSSIVYMYFNSGSNLGDACCAFHPTRPRDLVAWNVMISGFARVGDFSMVHRLFSEMWGVEGLKPDDCTFVSLLKCCSSLKELKQIHGLASKFGAEVDVVVGNALVDLXNKHGDVSSCRKVFDSKKEKYNFVWSLIISGYSMNKG

SEQ ID NO: 260006 - protein, 71 aa, Glycine max
  Clone ID: PAT_MRT3847_7680C.1.pep
RQRSELNVKAIYNIHVSTKPKKHVPQSRSTAMRGGRGARSRRVKENTMLRGTVRPLGHVITYFFLKLSRWV

SEQ ID NO: 260007 - protein, 85 aa, Glycine max
  unsure (1)..(85): unsure at all Xaa locations
  Clone ID: PAT_MRT3847_76810C.1.pep
VITPHGNPHLLNLHVSLRDVDMNEGALFLPHFNSKAIAILVINEREANIELVGIKEQQQIQQQEEQPLXMRKYTAELSEQDICVI

SEQ ID NO: 260008 - protein, 200 aa, Glycine max
  Clone ID: PAT_MRT3847_76811C.1.pep
MTKTKKKITEKILRLAFACSHGADCRAIQPGGSCFNPNTIQNHASYAFDSYYQTHAKNPAACNFGGTATIAVTNPTPKLVPLLLLLTIITTTKNVLGQGGTASWCVARSDASSDALQTALDYACGAGGDCLPLQPDGLCFLPNTIQAHASYAFNSYYQRRTRAPGSCDFAATATIATSDPSIITNFSLHFHFLSFFIGSV

SEQ ID NO: 260009 - protein, 69 aa, Glycine max
  Clone ID: PAT_MRT3847_76812C.1.pep
LVRMDQLGELYLMDGSASDHERCHLICIRMLKHAVKMPQVCVWTYPIWARALFHQLKAPSHLIYSPVCL

SEQ ID NO: 260010 - protein, 39 aa, Glycine max
  Clone ID: PAT_MRT3847_76813C.1.pep
KSTNIMKLQILSIKISIKSHNEQMTSLIVTSSIYNKYED

SEQ ID NO: 260011 - protein, 88 aa, Glycine max
  unsure (1)..(88): unsure at all Xaa locations
  Clone ID: PAT_MRT3847_76814C.1.pep
AYNIFGFVTIPRKXSIGCRNIYIHRNHSRSNFKSDNQQAYFYAIHLEVHPKDTFVFRIYGTVLFNIPYYKKHGYWVEIFNXTFYDEWV

SEQ ID NO: 260012 - protein, 156 aa, Glycine max
  Clone ID: PAT_MRT3847_76815C.1.pep
DRKLLLTEDLREKAHIVVAKDGSGKYKKISDALKHVPNNSNKRTVIYVKRGVYYENVRVEKTKWNVMIIGDGMTSTIVSGSRNFVDGTPTFSTATFAVFGRNFIARDMGFRNTAGPQKHQAVALMTSADQAGYYRCHIDAYQDTLYAHSNPQFYRE

SEQ ID NO: 260013 - protein, 55 aa, Glycine max
  unsure (1)..(55): unsure at all Xaa locations
  Clone ID: PAT_MRT3847_76816C.1.pep
NSIILVQQKQKHFNTLNIFLVLIIXLFFGFSSYKKIALLIFIKFYFIVLVFNDIF

SEQ ID NO: 260014 - protein, 102 aa, Glycine max
  unsure (1)..(102): unsure at all Xaa locations
  Clone ID: PAT_MRT3847_76817C.1.pep
RGTYRCRIDDXRVIVATRAGSIAHLIKQSCARNCYSRVMSVNGYQHNTIFAMRDIKXWEELTYDDRIFSIDERRPCYCGFPKCLSILNDTDAEERAATLYAP

SEQ ID NO: 260015 - protein, 55 aa, Glycine max
  unsure (1)..(55): unsure at all Xaa locations
  Clone ID: PAT_MRT3847_76818C.1.pep
IHXDFSQSVATLWSQYRRKDQKGKGGGCFKCGSTDHIAKDCTGEAMKQPQQIHLK

SEQ ID NO: 260016 - protein, 91 aa, Glycine max
  Clone ID: PAT_MRT3847_76819C.1.pep
FPGPFINTTIKISPHFEGRRSNYVYISIISPTHRKTARAMLLINRMPPEAPSSSLLQMVIMPKPVNPFIPLICFPRCCREIWACGCVSLFL

SEQ ID NO: 260017 - protein, 111 aa, Glycine max
  Clone ID: PAT_MRT3847_7681C.1.pep
NCRYCLSVNVIAFVYAAFQACDLAYQVVTGRRIINHHLRYHFDFFMDQVLAYLLVSAASSAATRVDDWQSNWGKDDFTEMASASIALTFLAFVAFAISSLISGYNLCTLFS

SEQ ID NO: 260018 - protein, 213 aa, Glycine max
  Clone ID: PAT_MRT3847_76820C.1.pep
TGPSRSTHAPRSEATLSPFAPSQLSPSLLSSSLCSLPGNQLTGPMDRLLARLDQVKYLDLSLNKFTGPIPGHIFSFPLTNLQLERNQFSGPVQPVDQVSIPTVDLSYNRLYGQISPMLATVQNLYLNNNRFTGRVPASFVERLLDASIQILYLQHNYLTGIEISPTAVIPERSSLCLQYNCMVPPVETPCPLRAGKEKTRPTTQCNQLKDLKD

SEQ ID NO: 260019 - protein, 78 aa, Glycine max
  Clone ID: PAT_MRT3847_76821C.1.pep
VQFKSKDIWRAKKTKRPEPFPHKTPGKTCPTLIGYPYKKSLAIGLWKDTPFKTTCQFIKKVKCSLANPLAIMGHRNMT

SEQ ID NO: 260020 - protein, 54 aa, Glycine max
  Clone ID: PAT_MRT3847_76822C.1.pep
FFFWAFPQSAPWYDLLAPLLNILFVPLLCGLWITYHLSALGKSPCPQSDSHCKE

SEQ ID NO: 260021 - protein, 239 aa, Glycine max
  Clone ID: PAT_MRT3847_76823C.1.pep
MAASSPSPPLKAVQDRVQAAAERSGRNVQEIRVVAASKTKPVSALREVYDAGLRCFGENYVQELLQKAPQLPDDIQWHLIGNLQSNKVKPLIAAVPNLACVETVDDKKIANFLDRAVANVGRKPLKVFVQVNTSGETSKFGVEPALCVDLVKHITNCPNLEFSGLMTIGMLDYSSTPENFETLSNCRSEVCKALGISETQCELSMGMTGDFEQAIEMGSTNVRIGTAIFGAREYPPKEE

SEQ ID NO: 260022 - protein, 161 aa, Glycine max
  unsure (1)..(161): unsure at all Xaa locations
  Clone ID: PAT_MRT3847_76824C.1.pep
WRRAHREVYDASLRCFGENYVQEILHKAPQLPDDIEWHLIXIGNLQSNKVKPLIAAVPNLACVQTVDDEKIANLLDRAVENVGRKSLKVFVQVNTSGETSKFGVEPAQWVDLVKHITNCPNLEFCGLMTIGMLDYSSTPENFKVATIHFGHNLLLFSGLPI

SEQ ID NO: 260023 - protein, 26 aa, Glycine max
  Clone ID: PAT_MRT3847_76825C.1.pep
GSHAPTVVNLAHHLSVHAHRPGVGGA

SEQ ID NO: 260024 - protein, 36 aa, Glycine max
  unsure (1)..(36): unsure at all Xaa locations
  Clone ID: PAT_MRT3847_76826C.1.pep
XERRLRXAGRHASQNHRSERGISPSNTVVHGGETRL

SEQ ID NO: 260025 - protein, 49 aa, Glycine max
  Clone ID: PAT_MRT3847_76827C.1.pep
QQHPKASRVFFFSLSIFISVFRSSSSYLSSSAFFCLSFLIQLRLVAKCL

SEQ ID NO: 260026 - protein, 63 aa, Glycine max
  Clone ID: PAT_MRT3847_76828C.1.pep
RALFVCARERGFLDIIKLCLCTILTHLVLGFIDYNYERIFRDIQNLLPFGCLSIGILVNCCSF

SEQ ID NO: 260027 - protein, 105 aa, Glycine max
  Clone ID: PAT_MRT3847_76829C.1.pep
KKRTSFLSQVSLNIICGGPCCLGILNQKGLGFFKTHQESGGPYGKLFFYKKGRTKLELRGPNSGLLSKKLEKLVPKGVKPVSLPGEDKTHRFLSFYEFFQPFGKK

SEQ ID NO: 260028 - protein, 93 aa, Glycine max
  Clone ID: PAT_MRT3847_7682C.1.pep
EFVHGWGLDFAFRKCVEPAHEKMGVVDTQWIVHQGIPSLGNQGETQTTGKPAWRAVKERCGMEWRMFQGRLTNAEKGYYKSKGIDFSNLLVHN

SEQ ID NO: 260029 - protein, 207 aa, Glycine max
  Clone ID: PAT_MRT3847_76830C.1.pep
MLLAVEGGGFFSASASGYTKGLSLLLLGQRNEDKPMRVAPWNQYQLVDQESDPELQLASTKNRLSRGCASFVCFGRTSAGLDTPSPLKVGPAQQHDVSPGPLVSNKGKDPSAHVDDESDNRKATLKSSIKKPQNRKSVPVEVANEHEASSGQGICTPGGQPERRKVQWTDNCGSELVEIREFEPSEVDGSDDEFDSGNDRTCSCAIM

SEQ ID NO: 260030 - protein, 97 aa, Glycine max
  Clone ID: PAT_MRT3847_76831C.1.pep
WVRVVGPLSINPIHHFYQFCEGFGSNVNYSSKCGWWIALTIFIWQHRNQLFFQGKPFDPCKVMDHAIYLAWSWLKAYDKDFSLNFHPWFFNISTFVY

SEQ ID NO: 260031 - protein, 40 aa, Glycine max
  Clone ID: PAT_MRT3847_76832C.1.pep
ASKFSVLGVLLQGGFSYGGELMSEAGLSYSYLKKKASFFF

SEQ ID NO: 260032 - protein, 106 aa, Glycine max
  unsure (1)..(106): unsure at all Xaa locations
  Clone ID: PAT_MRT3847_76833C.1.pep
MLLAVEGGGFFSASASGYTKGLSLLLXGSEEWNQYQLVDQESDPELQLASTKNRLSRGCASFVCFGRTSAGLDTPSPLRVGPAQQHDVSPGTLSSNKGKDPSAHGD

SEQ ID NO: 260033 - protein, 51 aa, Glycine max
  unsure (1)..(51): unsure at all Xaa locations
  Clone ID: PAT_MRT3847_76834C.1.pep
DKRNSXSNPECKKTGSSFRHHGRTLTLPDKDPNNIQQPKKQLHEHVPSYFQ

SEQ ID NO: 260034 - protein, 122 aa, Glycine max
  unsure (1)..(122): unsure at all Xaa locations
  Clone ID: PAT_MRT3847_76835C.1.pep
ASKRILKELKDLLKDPPTSCIAGPVAEDMFHXQSTIMGPADSPYAGGVFLVTIHLPPDDPFKPLXVAFMTMVCHPIFNSISSHCLYLLNEHRISALTISHVLITICSLLTWPHSEDPLVLDI

SEQ ID NO: 260035 - protein, 244 aa, Glycine max
  Clone ID: PAT_MRT3847_76836C.1.pep
MLHAVSAPSFCLSYPGNLHYPPSSVQKTCFSVRCSVSQTKNGAKVEYTPWLIIGLGNPGNKYHGTRHNVGFEIIDSLSRAEGIQMNTIQSKALIGIGSIGEVPILLAKPQTYMNFSGESVGPLAAYYQVPLRHILLVFDETSLPNGVLRLQPKGGHGHHNGLKNVMGHLDGCSAFPRLAVGIGNPPGTMDLRAYLLQKFSVEERKQIDASLEQAVAAVRTVVLNGFDQHVNRFNLGQKYKYHKV

SEQ ID NO: 260036 - protein, 87 aa, Glycine max
  Clone ID: PAT_MRT3847_76837C.1.pep
LESCGFSATIGMDVLKDKCLISTLEGKIEMHDLIQEMGQEILRQECCHNPGKCSRLWKVEEIHQVLKDNKGTDAVQCMFLDTRKVNE

SEQ ID NO: 260037 - protein, 187 aa, Glycine max
  unsure (1)..(187): unsure at all Xaa locations
  Clone ID: PAT_MRT3847_76838C.1.pep
MLHAVSAPSFCLSYPGNLHYPPSSVQKTCFSVRCSVSQTKNGAKVEYTPWLIIGLGNPGNKYHGTRHNVGFEIIDSLSRAEGIQMNTIQSKALIGIGPIPVDPRVXEVPILLAKPQTYMNFSGESVGPLAAYYQVPLRHILLVFDETSLPNGVLRLQPKGGHGHHNGLKNVMGHLDGCSAFPRLAVG

SEQ ID NO: 260038 - protein, 155 aa, Glycine max
  Clone ID: PAT_MRT3847_76839C.1.pep
MTTSSGSVKNAMPPGLQEPNINAEPSSSADDCSNSNTKPIVLVTNSGGIESPGLVHLVEALVLQGLCDVHVCVPQSDKSASAHSVTRGVTVEAFSAQINGATAFEVSGTPVDCVSLALSGALFSWSKPMLVISGINRGSSCGHHMFYSGVVAGAR

SEQ ID NO: 260039 - protein, 89 aa, Glycine max
  unsure (1)..(89): unsure at all Xaa locations
  Clone ID: PAT_MRT3847_7683C.1.pep
KIPLPVGHKLFPPVKEVFFFYFFLGPLEYFPQKTLVKRSALXSKIKKLPPLPXPPPQKKRVYSIIMRIKNFEFQNQFFFFFFLGISKFV

SEQ ID NO: 260040 - protein, 147 aa, Glycine max
  unsure (1)..(147): unsure at all Xaa locations
  Clone ID: PAT_MRT3847_76840C.1.pep
MNDLIRGKMVNMALLLSFLVTATVLASSSHAASSGPHIADVNILLPPKMTFPVDYRLQGSDGCFQWSWDHHDILSVEPEYNSSSKCSTSARIRSIAPYSGRKETAVYAADLQTGIVIRCKVFIDNISXIQIFHNSIKLDLEGLATLR

SEQ ID NO: 260041 - protein, 131 aa, Glycine max
  Clone ID: PAT_MRT3847_76841C.1.pep
KTGGEGPKAFPYLVTFKGEPAKIKLITPGKIARGKSKNNWSLQKGQLNKNHLNPFTGKKALLQPNFRFNNMNRWKNSPPLFFIYLTPGQVIIFNRVNLGSGEKKIKTLFSPNDAGGGLQKLVEEGGALLGG

SEQ ID NO: 260042 - protein, 137 aa, Glycine max
  unsure (1)..(137): unsure at all Xaa locations
  Clone ID: PAT_MRT3847_76842C.1.pep
RRRRGFGRGHGFGRGGGRGFGRGCGFSRDSSNDENSFPTSGDPYNQVSFKGDAGKSFERRGYGGPRGPYRGGGGHRGGFQHGEIGEAEERQPQRAFDRCNGIGXXEFKREGSGRGNXWGTPTDELAQVTDKGANETE

SEQ ID NO: 260043 - protein, 110 aa, Glycine max
  unsure (1)..(110): unsure at all Xaa locations
  Clone ID: PAT_MRT3847_76843C.1.pep
KKFSFKTSPYPGQNSLQRVIIFGDMGXDQLIKDLDYYDIVFHIEDMPYANGYTSQGDQFTAQVQEISSTVPYIIASGNHERDWPNTGSLFDTPDSGGECGVFAETKNNIN

SEQ ID NO: 260044 - protein, 99 aa, Glycine max
  Clone ID: PAT_MRT3847_76844C.1.pep
VTCNPPLPKLGIRLEAIAIEKGKDHSRTLPTQYAQYSRCVYEASVNAQKARHTLPEGLENDMASKPLLLRNMATLRCKLVDKPCPRTLAGIMRRLLDMA

SEQ ID NO: 260045 - protein, 156 aa, Glycine max
  unsure (1)..(156): unsure at all Xaa locations
  Clone ID: PAT_MRT3847_76845C.1.pep
MDAPFTGLTSVDCFPTTKTHSVITSIDSNGEREQRMQICSPNGNKKSETLNYLPYHYYSHLILXIKYLLKNXXIPWSQYTGYYEFSLRYGNRSPAYYKERYCTVXKLPMIACTNASHVNTXLQDSKTAYCYCFVHIISFHNDPLVHSISFIAYKPP

SEQ ID NO: 260046 - protein, 76 aa, Glycine max
  Clone ID: PAT_MRT3847_76846C.1.pep
ETAHSRDLVRAINPISLMVGCSCSKGVLSLIVQMVILNILVSDNDNLLSSLMYKYIMVATRLKSCVYYPTSYHSTL

SEQ ID NO: 260047 - protein, 47 aa, Glycine max
  Clone ID: PAT_MRT3847_76847C.1.pep
KKKINKNRLCSQNYNNIYYSLFYHSQSKHLTNDTYFRKLKQEQTLLH

SEQ ID NO: 260048 - protein, 103 aa, Glycine max
  unsure (1)..(103): unsure at all Xaa locations
  Clone ID: PAT_MRT3847_76848C.1.pep
RPFDRPRVRAKNAILMNMPNADLSMWRYYAGDLAFEVTKMTHSYIKCTASFFIAFGNLADDTIKFEAFPHKLVQFGEIHEKVVLIFSQEEFXLQAWSTYERPA

SEQ ID NO: 260049 - protein, 90 aa, Glycine max
  Clone ID: PAT_MRT3847_76849C.1.pep
ILAGSSLHHNSGVNRKSTLGNVPQRASLPKSKKTAWVFPHKGVVCDYYTERSFLSLLCVSLGGYYLWHGNQACMSAKICYLFLSLPTPFK

SEQ ID NO: 260050 - protein, 62 aa, Glycine max
  Clone ID: PAT_MRT3847_7684C.1.pep
FDIFSCGFAFVCQQHPHGARSSCIQLFVARKVVYLGWGMFHVIRCETLANCPFICRDPSTRH

SEQ ID NO: 260051 - protein, 48 aa, Glycine max
  Clone ID: PAT_MRT3847_76850C.1.pep
FACDTAMYIICITSFSHFFYESHNSSFTAFSRKRMIKKRCSSLKSMIL

SEQ ID NO: 260052 - protein, 41 aa, Glycine max
  Clone ID: PAT_MRT3847_76851C.1.pep
LIVLWVEFIIKPVVLFWFRYGVCSIFFLTSPPPPTSPPPPP

SEQ ID NO: 260053 - protein, 55 aa, Glycine max
  Clone ID: PAT_MRT3847_76852C.1.pep
GKPQRLAYYPLKYPLNVFSQLLVPVETVYSLILEPSAWKLIFMYSLYLWYLIIYI

SEQ ID NO: 260054 - protein, 229 aa, Glycine max
  unsure (1)..(229): unsure at all Xaa locations
  Clone ID: PAT_MRT3847_76853C.1.pep
QGRTHTSTTVLHSIFREKTSRASDDIGKEKRILQRRYWALVLGCPRRPKGLVTASLGKVVVDNGRSDRITIVDNSTLMSSQRAITXYRVISSFISYASSYYQSNCAVRVHQLRVHCAEVLGTPIVGDYKYGWQAHRKWGHFDLPNVEDSREELLNEEKLPFGLNLNKGSISENHPRLHLHCKQMVLPNISQALQNVQSASSCDLSLVEELELVADLPPYMQRSWDVTNY

SEQ ID NO: 260055 - protein, 97 aa, Glycine max
  Clone ID: PAT_MRT3847_76854C.1.pep
NSTHIKLLEIQIPESKPIPTSISYLPSRPDPTHLKNQASYFASLGMSFHVAQSLTMLDAKHLSYTNAICFSYSSGHLRNQQPQECIVMNKYKGSHFI

SEQ ID NO: 260056 - protein, 84 aa, Glycine max
  Clone ID: PAT_MRT3847_76855C.1.pep
SIAIFRGPMFIMGPLLVLAGAQVEICNPCNFFNGGSFNGGPVAPKKFSQGGLVSPIYMGFPKISSSQNERSFIKPPYRKIHVVG

SEQ ID NO: 260057 - protein, 65 aa, Glycine max
  Clone ID: PAT_MRT3847_76856C.1.pep
HIFFDSFYQSYYYSHPLYNIFINHHYFSLYTIFLFLLFFLTILSFSFTFYFFFLSLLLLQLFLSN

SEQ ID NO: 260058 - protein, 138 aa, Glycine max
  Clone ID: PAT_MRT3847_76857C.1.pep
GYVAPEVWNRNFGGISQKSDVYSYGMMLLEMVGVKKNINGKASQTSEYFPDWIYNRLEQGIDLTTDGVIATQEKEIARRMTIVGLWCVQTIPQDRPTMSKVIDMLEGNMDSLEMPPKPVLSSPARSLPEFTTSSLQSG

SEQ ID NO: 260059 - protein, 372 aa, Glycine max
  Clone ID: PAT_MRT3847_76858C.1.pep
MANLPNSKLYGKEKMKGEQELEDEESFSRAMLLCSSVVVSMALQSATELGVFDVLQEAGAKLSAKEIASKLSCDNNPEADSMLDRLLALLASHSILNCSLILDHQNLGTFQRLYTITPVARFFARNSDGVSLGPLMALLQDKIFLHSWSELKDSIREGGIPFNRVYGTHAFEYPRLDARFNQVFNTAMINHTTIVMKKVLECYKGFENIKMLVDVGGGLGININLITSKYPHIQGINFDLPHVLEHAPSYPGVEHVGGDMFENVPKGDAIFMKWILHDWSDEYCLKLLKNCYDAIPDDGKVIVVEAVLPIIPETSNAAWKAVSQTDVLMMTQNPGGKERSDQEFMDLATAAGFSGIRYECYVRTFWIMEFFK

SEQ ID NO: 260060 - protein, 112 aa, Glycine max
  Clone ID: PAT_MRT3847_76859C.1.pep
FNCQRTLPLWWESMTWLQAVGPLPIVPASHLAQFCEGFRANVNHSRWYGWWVALTTTIWQHRNNLIFQGNQFDSSKVMEEAMFSAWSWLKAREKGFNTSFNHWSSNIKDHFG

SEQ ID NO: 260061 - protein, 119 aa, Glycine max
  Clone ID: PAT_MRT3847_7685C.1.pep
VSKVVSKTSVLKTKNSWKLFSHPLLFSSNAQGKTFRKQKCAQGGTKTFKCAQETKPNFIKHKTVFENSKQTKPNNQEIKETDKNITKPPTLCAKQTRVKHTERKKHVKIAYKAQIIQNS

SEQ ID NO: 260062 - protein, 95 aa, Glycine max
  Clone ID: PAT_MRT3847_76860C.1.pep
KQTPQTKFLYRGKFKSFPINFLAGTITILSFFGGLYHQNRKNSPVHQTIFLNTLKILYKKTGLYLAGENIYKKIFHLGLKKPLAFLLGPPQWRGL

SEQ ID NO: 260063 - protein, 226 aa, Glycine max
  Clone ID: PAT_MRT3847_76861C.1.pep
MTSPTALKAVTLTHVRYQRGDRVGHFLAWISLVPVFISLGGFVSHFIFRRELQGIFFALGLIVSQFINEVIKTSVQQARPATCALLEMCDSHGWPSSHCQYMFFFASYLTLLSLRGGLSFWHVRDNPPLHLLTWSLALLTMYSRVYLGYHTLAQVFAGTALGVFLGAVWFWVVNSVLHPYFPVIEESAFGRWFYVKDTSHIPNVLKFEYDMARAERRKVASNSKSD

SEQ ID NO: 260064 - protein, 72 aa, Glycine max
  Clone ID: PAT_MRT3847_76862C.1.pep
FRDPWADPLADPLVAPWLGQLAGLWAKWDSGEGLKSPLEFQTKGWLWLPLFSSIPFGAWQSIRINFMLPFSF

SEQ ID NO: 260065 - protein, 112 aa, Glycine max
  Clone ID: PAT_MRT3847_76863C.1.pep
FGINGISSAFIGHIGSRERAAYALGFTVLIRSANGILLGMASALSTLCGQAYGAKQYVMMGVHHQRSWIDMGITSLFVLAVFIFTRPIFLPHVIYSNRRPKSMRIRRRNKHY

SEQ ID NO: 260066 - protein, 76 aa, Glycine max
  Clone ID: PAT_MRT3847_76864C.1.pep
WKDMENLRNHWNMNCAIDAIISAPLALLCILVLLVHVSFTFQVVLPLFPLVPLHWLAYNGKEKVALMYLFIYYFFF

SEQ ID NO: 260067 - protein, 64 aa, Glycine max
  Clone ID: PAT_MRT3847_76865C.1.pep
VKIALGTLDDSFNGGSLKGYFAKVHATLNFVVAGVGSTIGYHEPTKDAALDPTGLVAIAVAHSF

SEQ ID NO: 260068 - protein, 151 aa, Glycine max
  unsure (1)..(151): unsure at all Xaa locations
  Clone ID: PAT_MRT3847_76866C.1.pep
MERIMVGSATKVAFNLLVTFAIVIPCLEAGIAEFDDFLKAQADEAQKIALEAYVPVPEDVTDELNFHVHLSLENSTRRELRQRKGRSGKKCVASNPIDTCWRCNKNWANDRYRLAKCGKGFGRRATGGLGGPIXVVTDNSDDDMVNPKPGT

SEQ ID NO: 260069 - protein, 39 aa, Glycine max
  Clone ID: PAT_MRT3847_76867C.1.pep
RPIPSQPVFLYQHQLVPGMMPGAAPFPNLCVPMVQQGQH

SEQ ID NO: 260070 - protein, 26 aa, Glycine max
  unsure (1)..(26): unsure at all Xaa locations
  Clone ID: PAT_MRT3847_76868C.1.pep
RTGXIKSSIRNPIKSHFFLNYELTPA

SEQ ID NO: 260071 - protein, 82 aa, Glycine max
  Clone ID: PAT_MRT3847_76869C.1.pep
HIYAAQGPPLLTILVGLFGLFDDCRSIWSMMTSLIRLILNRTCSLNEFCWNGRLCFTTLHYNREHLGRRTLCMHLDVIAQTE

SEQ ID NO: 260072 - protein, 79 aa, Glycine max
  unsure (1)..(79): unsure at all Xaa locations
  Clone ID: PAT_MRT3847_7686C.1.pep
SPISEAPSKGSKTRNINKSRSHDHRKKVPQIPSXTKTAFXXXXEXHAXDXXSIISDKSXXXVXXQKXEKPPTVLHHAKR

SEQ ID NO: 260073 - protein, 40 aa, Glycine max
  Clone ID: PAT_MRT3847_76870C.1.pep
HGNVVLAISITSYTFKRSIYYLVPVTYVSLYSCIPAKFGL

SEQ ID NO: 260074 - protein, 61 aa, Glycine max
  Clone ID: PAT_MRT3847_76871C.1.pep
LKPGVYSYHQRPCFETFVFSGSPPLTKKTGVFPGFFFKNNLFFFFQFSPLKKKSPTFLMSN

SEQ ID NO: 260075 - protein, 85 aa, Glycine max
  unsure (1)..(85): unsure at all Xaa locations
  Clone ID: PAT_MRT3847_76872C.1.pep
IILNESGLNSKPKNRNEDSKYHTLINQREIQQLKEKXRSILCWDPSFLQTERTQIESERFLKSFMDIPNRAKTYFGNQKTQKKKL

SEQ ID NO: 260076 - protein, 42 aa, Glycine max
  Clone ID: PAT_MRT3847_76873C.1.pep
FSLNTLSMMISCLLKSTQKNKFDLQPCSLWQRCMLSKMEKQV

SEQ ID NO: 260077 - protein, 89 aa, Glycine max
  Clone ID: PAT_MRT3847_76874C.1.pep
EKVHCSKKSTYCFAWREIRDVKVFRVKGYKESKIFFLGFLFWHKWGEKLSLNQIQAVIYGSFQSFHDIFIMCQPPKPAKHSHEFWDCCT

SEQ ID NO: 260078 - protein, 55 aa, Glycine max
  Clone ID: PAT_MRT3847_76875C.1.pep
IITFLNLAKILTGVYHELSLISEENLINLLHLFSSVLLHFFYKSFWLISIVIAKT

SEQ ID NO: 260079 - protein, 288 aa, Glycine max
  Clone ID: PAT_MRT3847_76876C.1.pep
MSASNKWRAMSHHQHQPLCTRTHQIGALLLVATTFFFTRMLSTSTLSTSVVHVSQPRFQWGQSQLSLKIYVYQEDEIDGLKELLRGRDAKITDEACLKGQWGSQVKIHKLLLQSKQRTWKKEEADLFFVPSYVKCARMMGGLNDKEINSTYVKVISQMPYFRLSGGRNHIFVFPSGAGAHLFKSWATYINRSIILTPEGDRTDKRDTSAFNTWKDIIIPGNIDDGMTKTGDTTVQPLPLSKRKYLANYLGRAQGKAGRLKLIELSKQFPEKVCHLLCWVGSPSENLPS

SEQ ID NO: 260080 - protein, 107 aa, Glycine max
  Clone ID: PAT_MRT3847_76877C.1.pep
FTHASPVFHNFALNYAVKRIDLGGKALTNYLKELVSFRSVNVMEETFIIDDVKEKLCFVSLDVNRDLTIARKSGKENLFRCTYVLPDGVTYTKGFVKYSIRRSDILH

SEQ ID NO: 260081 - protein, 106 aa, Glycine max
  Clone ID: PAT_MRT3847_76878C.1.pep
IHSLATMSPSANTNGTSATNGSSKPRPTFAVKAGLAQMLKGGGIMDVVNVEQAKIAEAAGACAVMALQRIPSDIRKDGGVARMSDPHMIKEIMEAVSIPGMAKSRI

SEQ ID NO: 260082 - protein, 65 aa, Glycine max
  Clone ID: PAT_MRT3847_76879C.1.pep
QKNVGWGVGAPSPKKKQKKKIFWASPTPKRLRNKCKVRQGEPPRPKRIGAHRRAPRGEGFNFWGL

SEQ ID NO: 260083 - protein, 133 aa, Glycine max
  Clone ID: PAT_MRT3847_7687C.1.pep
SNDPRFEHIDINEKQKVINKCVEAEKWFNEKQQQQQQSSLPKYANPVLLSAEMRKKAEDVDRFCKPIMTTQKPTKAVTPAGPATPSSQSDEQQQPQGDSDVNSNENAGNSSSQAAPASTEPMETEKSENTGSA

SEQ ID NO: 260084 - protein, 56 aa, Glycine max
  Clone ID: PAT_MRT3847_76880C.1.pep
MHFWPEYVASNTARELLAISYLSIASIISGYPLDTLRIRLQNSNNASDFTILKQME

SEQ ID NO: 260085 - protein, 132 aa, Glycine max
  unsure (1)..(132): unsure at all Xaa locations
  Clone ID: PAT_MRT3847_76881C.1.pep
HRLAVDISXDPKVCLCHMACQVGSGIAGLDEVTFLYRLTPGACPKSYGVNVARIAGLPTSVLQKAAAKSREFEATYGKCRKVSTVTNSPNKNWVDEIAAIIQILNNAATQETICVGSLSELQDKARELMQGC

SEQ ID NO: 260086 - protein, 96 aa, Glycine max
  Clone ID: PAT_MRT3847_76882C.1.pep
CDSPLFFLLRYTWSTTSHSSSQALSFIRNQPTPSSSSSFSSTTMPLLLARTPPSSLSPFPLQNARAPLITASQKRFPLAATRIVLFTSRRSILASP

SEQ ID NO: 260087 - protein, 131 aa, Glycine max
  unsure (1)..(131): unsure at all Xaa locations
  Clone ID: PAT_MRT3847_76883C.1.pep
GQKAIRSVWGHRRLRERKETWHSXGMKENTRTIDEETSMKHENSDWPVPLKIIXGTIXAAEMGTTCWKLSILLRNAGNGGVIDGNAATVFTSLSGIEAQSGKISKSEVCQCRCRNGPIKLRTRGEGQIHFE

SEQ ID NO: 260088 - protein, 64 aa, Glycine max
  Clone ID: PAT_MRT3847_76884C.1.pep
ANSSVEKKGGTNKNGLRFLLTNPFQAKFIYKKGGAQTNFRPQPVKKGKGCFFCSKKTPPQNYSM

SEQ ID NO: 260089 - protein, 73 aa, Glycine max
  Clone ID: PAT_MRT3847_76885C.1.pep
STRDLKKRNKPIDHHLANAACISLDRHKYSHTIKGTTYISKVACHCAPIDQVYYSGEESKTRRILDVLAWKLF

SEQ ID NO: 260090 - protein, 69 aa, Glycine max
  Clone ID: PAT_MRT3847_76886C.1.pep
PVGFSQGSGFGFSGSPRMLAKKKFSSGPKICVLLKGIASNATYPPAKLLMWPHMSYYFYQRLSPFFFFA

SEQ ID NO: 260091 - protein, 59 aa, Glycine max
  Clone ID: PAT_MRT3847_76887C.1.pep
PTRPPTRPPTRPHVYGMPYQCSIYHLLPTRPHHWLVAHTVARERERDSDGDSGFRRAYG

SEQ ID NO: 260092 - protein, 52 aa, Glycine max
  Clone ID: PAT_MRT3847_76888C.1.pep
KRSIYELLCRPRGRNFLKLNCKHSYKARKPANCFLLNHILFTSLEQPFYFVK

SEQ ID NO: 260093 - protein, 112 aa, Glycine max
  Clone ID: PAT_MRT3847_76889C.1.pep
MNFRSLEDFWAFYMNQHSKASTRRWHFAGTLFSILFFFCSLLFSWWFLLLVPFSGYGCAFYSHLFVERNFPETLRHPFWSLMCDFKMFGFMLTGNMDREIKRLGKRPVLQVF

SEQ ID NO: 260094 - protein, 81 aa, Glycine max
  Clone ID: PAT_MRT3847_7688C.1.pep
FSGSPPGFGFSVLLSVPVCPLSFGFSITGGKSLSPLPRGSPYGDLEMGLFLVKKMGLCFFLFFGFSCLISLASIFSFFSTI

SEQ ID NO: 260095 - protein, 39 aa, Glycine max
  Clone ID: PAT_MRT3847_76890C.1.pep
SSRAKRRAYSLAQALSETFNSGEQSCSKTIRLNNLGFSI

SEQ ID NO: 260096 - protein, 169 aa, Glycine max
  unsure (1)..(169): unsure at all Xaa locations
  Clone ID: PAT_MRT3847_76891C.1.pep
PTLVRFNGDIRSRLIPPLPRTYFGNALAATVTPGSYVGETSSKPLRYAAKKVREAIEMLTNEYIRSQLDIVXVKEQLDCIKALFSGQGERRNAPFAGNPNLQITSWISMPLYEADFGWGKPMYFGLAYVSAHDRAVIILSPHGDGSVIVSMHFQIAHMQLFKKYFYENI

SEQ ID NO: 260097 - protein, 77 aa, Glycine max
  Clone ID: PAT_MRT3847_76892C.1.pep
LGGTPRIATTKPSLLQLRIFAKVIASTSSLRTSGLYNEQRQRHLPVADHTSDLNEDRRADLVNALQSKIQQSGWTTF

SEQ ID NO: 260098 - protein, 73 aa, Glycine max
  Clone ID: PAT_MRT3847_76893C.1.pep
LSMVEGWKGELTKLREKVVMARKSLFSKGKEGSEEEQVVKKEAHKVMMAVQRDTHETMSEATVCLLMDRFVPC

SEQ ID NO: 260099 - protein, 45 aa, Glycine max
  Clone ID: PAT_MRT3847_76894C.1.pep
MGAACCVAARDKTIQSGSTSDNLHRNVRCSSTWSFRWDHRGRVAC

SEQ ID NO: 260100 - protein, 195 aa, Glycine max
  Clone ID: PAT_MRT3847_76895C.1.pep
MCFLNTKSLAHFMLLTTIVVGIAMGDSSKDKEECTEQLAGLATCLPYVGGQAQAPTPDCCSGLKQVLKNNKKCLCVIIKDRNDPDLGGLQINVTLALNLPTACNSPVNVSKCPELLHMDPKSAEAQVFYQLEKGPSKNGTGPAPSPSAAVGASPSSNQKANTPQKNDAFCKEKRLFGLEILAIGLQIWASVGLLC

SEQ ID NO: 260101 - protein, 233 aa, Glycine max
  Clone ID: PAT_MRT3847_76896C.1.pep
MGGRQMLLEQAKVLRDALSSKKEEAVDEKTNQQNANGSIKANGSPSLSNIEKKEKPWSKEEIDLLRKGMQKYPKGTSRRWEVISEYIGTGRSVEEIMKATKTVLLQKPDSSKAFDTFLEKRKPGAQSIESPLTTREELGVPAPASSTNNAEDSQNKGTDDQNSPANGVSSSSEQDVWSAVQERALVQALKAFPKETSQRWERVATAVPGKTVNQCKKKFALMKESFRNKKTAV

SEQ ID NO: 260102 - protein, 103 aa, Glycine max
  unsure (1)..(103): unsure at all Xaa locations
  Clone ID: PAT_MRT3847_76897C.1.pep
ELDHGWRGRAXXXEGIXYWYDYLGKXKGVDVGRGXXEELKGXENALPRVLGGATMAXLGGKLGXVWECQCNGKEMENWGAGDWGERKNSDGGNLWGQTLGLVL

SEQ ID NO: 260103 - protein, 636 aa, Glycine max
  Clone ID: PAT_MRT3847_76898C.1.pep
MAVHTEFPLITYSQEIVDGQPIFVSSNCLPIKALKFEPAGHSFHSAALKLLGVQEDNNDADDKKVVDDKEQTYLPSDSYSSKSKKKTGTGDMQQDHYALLGLGHLRYLATEDQIRKSYRETALRFHPDKQAALLLAEETEAAKQAKKDEIESHFKAIQEAYEVLIDPVKRRIYDSTDEFDDEIPTDCAPQDFFKVFGPAFMRNGRWSVNQPIPSLGDDNTPLKEVDNFYNFWYSFKSWREFPHADEFDLEQAESRDHKRWMERQNAKLTEKARKEDYARIRTLVDNAYKRDPRRLRRKEEEKAEKQRKKEAKFLAKKVQEEEAARIAEEERQRKEEEERQAAKAALQQKKVKEKEKKLLRKERARLRTLSGPILSQHLLDISDDDVERLCMSLDIEQLRSLCENMEGRQMLLEQAKVLRYALSSKKEEVVDEKTNQQNANGSIKANGISSLSNIEKKEKPWSKEEIDLLRKGMQKYPKGTSRRWEVISEYIGTGRSVEEIMKATKTVLLQKPDSSKAFDTFLEKRKPGAQSIESPLTTREELGVPAPASTNNVEDSQNKSTDNQNSPANGVSSSSEQDVWSAVQERALVQALKVFPKETSQRWERVATAVPGKTVNQCKKKFALMKESFRNKKSAV

SEQ ID NO: 260104 - protein, 253 aa, Glycine max
  Clone ID: PAT_MRT3847_76899C.1.pep
MFKCINYRSCTPTPPPFASNQYNLPSVKTSASQPSMYNQTSIGATELSQASISSSGARLSSYPNPPMMSAGFSRSASMPLTMFGNSPNQQQTENQPSILQSISVPPASFQSMHPVTQLQPLQPPQLPRPPQPPQLLRPPVHALQQLEQGMAVQSNVQVHHQLQMLQQPQVPSMQTYYQTQQQQFSHEQQQVEYTQQPGNSLSQQQQDAAMSLHEYFKSPEAIQSLLSDRDKLCQLLEQHPKLMQMLQEKLGQL

SEQ ID NO: 260105 - protein, 584 aa, Glycine max
  Clone ID: PAT_MRT3847_7689C.1.pep
MIARFPLLPLLLLGIVFLASVSVSLQVKPPSHHECLQSCESETDPYKRKACKLSCKFVPEHGEQQHEEEEREREHPQPHPPHEERGRRERGRQEGEKEEKEQDERELQPRPFPRPEEHEGEQWKGRHRHEDPEERARMRLREAERIEREREEQRVREEEEKLRRREKKEQREEKEEEGQGSEDSHSKRQNNPFHFSSNRFQTLFKNQHGHLRVLQRFDQRSPQLENLRDYRVVELMAKPNTLFLPHHADADFLLLVLSGRALINLVKPDDRDPYYLDRGYAQRIPAGTTVYLVNPDKKKDLRVIKLAIPVNKPGNFEDFFLSSTQDQQSYLQGFSENILEASFNTKFEEINRVLFGGEGRRHQQEGVILELSKEQIRELSKRAKSSSRSTNSFDYEPFYLRGSQISSNNFGKFYEITPEKNPQLRDFDILLNTVDINEGGLLLPHYNSKAIVILMVTEGEANIELVGLKEQQQGEETREVRKYRAELSEDDIFVIPAAYPFVVNATSNLNFVAFGINAENNQRNFLAGSKDNVIRQIQKQVKELAFPAGSAQDIENLIKNQRESYFADAQPLQKEEGKKGSFVF

SEQ ID NO: 260106 - protein, 88 aa, Glycine max
  unsure (1)..(88): unsure at all Xaa locations
  Clone ID: PAT_MRT3847_768C.1.pep
TRANRAEVHPDVVLQLGTQTAKTKVINSCLNPVCNVELHVTLTEPLGVLNLEVSDKDLVXADDKMGDAFXNLQPIVSAARFRDILRVS

SEQ ID NO: 260107 - protein, 101 aa, Glycine max
  Clone ID: PAT_MRT3847_76900C.1.pep
QLEQGMGLQSNVQVHQLQMLQQSQVPSMQTNYQTQQQQVEYTQQPGNCQSQQQQDAAMSLHEYFKSPEAIQSLLSDRDKLCQLLEQHPKLMQMLQERLGQL

SEQ ID NO: 260108 - protein, 215 aa, Glycine max
  Clone ID: PAT_MRT3847_76901C.1.pep
MSSATKVLDPAFQGVGQKVGTEIWRIEDFQPVPLPRPDYGKFYMGDSYIILQTTQGKGGAYLYDIHFWIGKDTSQDEAGTAAIKTVELDASLGGRAVQHREIQGHESDKFLSYFKPCIIPLEGGVASGFKKPEEEEFETRLYVCRGKRVVRIKQVPFARSSLNHDDVFILDTQNKIYQFNGANSNIQERAKALEVIQLLKEKYHDGICDVAIVDD

SEQ ID NO: 260109 - protein, 93 aa, Glycine max
  Clone ID: PAT_MRT3847_76902C.1.pep
FSWKGSFSFLLGRFLLRISRKTLNLKGKKKRHLVIWITNHQARSPRRRHVSRLSLSLTLYLIKLWNQSLPWRARNQMGLRCKTVIKMTSLGLN

SEQ ID NO: 260110 - protein, 174 aa, Glycine max
  unsure (1)..(174): unsure at all Xaa locations
  Clone ID: PAT_MRT3847_76903C.1.pep
MSSCLDVFKLTDDDAMKFLVCESHIGTKKMDYQMEHYVWKRRSDGIHIINIRKTWEKLLFAARAIAAIENPSDVVVVSAQPYAQRAVLKFAAHIGATPIVGRFTPGSLTNQIQKNFKEPRLLVVSDPQLDHQAVREAXYVNTPVIAXANTDXAVKFGDIAIPATTSKALRRLIG

SEQ ID NO: 260111 - protein, 238 aa, Glycine max
  Clone ID: PAT_MRT3847_76904C.1.pep
IIKCFVGSEEGTPDSANPSVVDDDEEEGLPSPPLDEGAFFVTQAGSMELSQFFDGMDDDGNPRPTGPFSKNHENGRKPAFDSHVLEMRKLQPSHDTVVINRDVKSQQQAKENKAAVMPVRPNKPVTADSGPGRPPKSNVQRKSNMEPKMQQKMENNSITRRPPTAQLDKSKRSDDDAVQVKLEATKRKLQESYQQAEKAKRQRTIQVMEINDLPKQGLHRNTHFKPGYHSRHWANGRR

SEQ ID NO: 260112 - protein, 59 aa, Glycine max
  Clone ID: PAT_MRT3847_76905C.1.pep
FVFFFLFFLFFFFFFSFFFFFFFFGAKLKNFFSIFPEKQKISTLNIQIPSGKKHYIGYK

SEQ ID NO: 260113 - protein, 67 aa, Glycine max
  Clone ID: PAT_MRT3847_76906C.1.pep
LHAQNNNGFYRLLSLCCCKNTKEHNKHENGGFGFATSHSFNQRWGLLPNGLVIPKCFFFFNSTLNVE

SEQ ID NO: 260114 - protein, 105 aa, Glycine max
  Clone ID: PAT_MRT3847_76907C.1.pep
VAYFRDQIELQLLSGKNVMIQPHGNSLRSIIMYLDKLTSQEVISLELSTGIPMLYIFKEGRFIRRGSPIGPSEAGVYAYTRRLALYKQKLDNISNDMLFRIYIHI

SEQ ID NO: 260115 - protein, 51 aa, Glycine max
  Clone ID: PAT_MRT3847_76908C.1.pep
TAARRRQKGDRKKWAQVMAVAYAILGHIHPMLLLPQILDSKGICISIIHTS

SEQ ID NO: 260116 - protein, 34 aa, Glycine max
  Clone ID: PAT_MRT3847_76909C.1.pep
VKYYFLLLRNNFLQFLEENTNLILRNSSCHIDLF

SEQ ID NO: 260117 - protein, 74 aa, Glycine max
  Clone ID: PAT_MRT3847_7690C.1.pep
STLESQISLCTLSNILYSTCQILVIGSCTTLAKFKNHLLKRRFSPIHKADCSKKISPLLCPLAHCSPKICIKNL

SEQ ID NO: 260118 - protein, 57 aa, Glycine max
  Clone ID: PAT_MRT3847_76910C.1.pep
KLKHPHWTKEGAFFKGKKFYILVHKGKRALINQIFETLTVLKKPRQHRGRGVKTQLG

SEQ ID NO: 260119 - protein, 108 aa, Glycine max
  unsure (1)..(108): unsure at all Xaa locations
  Clone ID: PAT_MRT3847_76911C.1.pep
SSRRPLWGVFFFFFFWXRGRLFICSLYFPKFFLPHNYPSFSILPVLPLPPFFCFPFDSWGVGLHFFAHSGCRSSRGRSGFPTLGFRPFRPFSWWPVTPAPRLRCLPAS

SEQ ID NO: 260120 - protein, 116 aa, Glycine max
  unsure (1)..(116): unsure at all Xaa locations
  Clone ID: PAT_MRT3847_76912C.1.pep
AFVDDLILFAETSGENILNIFCRTSRQKISLEKSRFFFXKLWRFVQRNQLSQEMGIQGTQDLGKYLGVPIFHKRASRSAFQFILDXVDQRLNTWKAKTLSFAASHLVFEDNSSVPL

SEQ ID NO: 260121 - protein, 114 aa, Glycine max
  Clone ID: PAT_MRT3847_76913C.1.pep
MVCPGSTKLSHDVRFYSNTGFCSFHHNRMFFFRLHLVTLNLSPCSLKQDSSALHLLSRPHAPIRHVPSRCNVFICQSVLIPGGGSGTPLMKSASVILTRSYDALQGNPTFLQLI

SEQ ID NO: 260122 - protein, 79 aa, Glycine max
  unsure (1)..(79): unsure at all Xaa locations
  Clone ID: PAT_MRT3847_76914C.1.pep
SYLSHXSAECKQNHKMNKLRATXXIHLSSIPSSGARRISHRLQAPSGIPQKWRSPXVEGPPGMEAPHMEARXPKAPXXG

SEQ ID NO: 260123 - protein, 37 aa, Glycine max
  Clone ID: PAT_MRT3847_76915C.1.pep
FNGITDGVSFEINLRLFISTGIEPGLGSIVYIMLLDA

SEQ ID NO: 260124 - protein, 140 aa, Glycine max
  unsure (1)..(140): unsure at all Xaa locations
  Clone ID: PAT_MRT3847_76916C.1.pep
MGEKVVCVHALEEGKQENNEESRTELKRDYDQCVADTEPHLSPNKKQAKEVSNDEVRSEVSNPNVSAAELAQTFQDISSQPTESENVNHXXCGELTSTCLEXSSSDETLSDEAGEQNNNNNNNNTFQSDKDTSSAAMHPV

SEQ ID NO: 260125 - protein, 91 aa, Glycine max
  Clone ID: PAT_MRT3847_76917C.1.pep
ILLVAHGLQDASAWLTISPQYALPSRAAGDEFDVSFDLITRFRSDMEIKKPSTVYGGIDVICFMGDIYVNCGFQATSVAPSKSSQVKVVVF

SEQ ID NO: 260126 - protein, 56 aa, Glycine max
  Clone ID: PAT_MRT3847_76918C.1.pep
EGKNDEFYKWGFEDECENQKHLGEHPSVDKLQYIDITSLNQKTCGRMCGRTRGVGP

SEQ ID NO: 260127 - protein, 93 aa, Glycine max
  Clone ID: PAT_MRT3847_76919C.1.pep
EIKIKHLISHTQSLLSHSLESRLTRKIGTGTLNVGTTSTSHVSVFVAITSSTNVWAPFHPCVQILFNVSPLYGLTLFMLAIMTLCISASLSIS

SEQ ID NO: 260128 - protein, 71 aa, Glycine max
  unsure (1)..(71): unsure at all Xaa locations
  Clone ID: PAT_MRT3847_7691C.1.pep
EINXKVXXXMXPNGXTLXDXXSIXXXXQLCAXKXXYPDTXKXXXDDPKHIXGAXXHAXDXXLXXXPPAXVX

SEQ ID NO: 260129 - protein, 85 aa, Glycine max
  Clone ID: PAT_MRT3847_76920C.1.pep
VKPPMEVDKEKGSPGIICILEKKKGGEKWRFRLLYWKGYKAKQCEQKKTAKFQRFQTVQGRKQWFWGSKSQEANINSFGGYPNSL

SEQ ID NO: 260130 - protein, 59 aa, Glycine max
  Clone ID: PAT_MRT3847_76921C.1.pep
FIYCCFGISPPSPHPILVMFQNDYLQINRRLKSFLGLSMLYLFSEVHKLMILDRSNSFK

SEQ ID NO: 260131 - protein, 74 aa, Glycine max
  Clone ID: PAT_MRT3847_76922C.1.pep
PPHLLIPVAPLSHILQKTHMAGATVASAHASPKPIPNSSILKDPYLLEDNRHPFCVAIRILHVVAHYLGKRHAR

SEQ ID NO: 260132 - protein, 62 aa, Glycine max
  unsure (1)..(62): unsure at all Xaa locations
  Clone ID: PAT_MRT3847_76923C.1.pep
NSDGGYSLSVDGTPIGGFKNMESPGVAFPKEQPVRIXSTLWXADDWATRRGLVKTGWSQARF

SEQ ID NO: 260133 - protein, 54 aa, Glycine max
  Clone ID: PAT_MRT3847_76924C.1.pep
NYKLTQTTRASSTFKYTPCRTSGIDAERGQQHLYQGRNHLHQYIQPQSLSTCKI

SEQ ID NO: 260134 - protein, 60 aa, Glycine max
  Clone ID: PAT_MRT3847_76925C.1.pep
EGGFFFELGNCRTSFLGQLSVLVLVWNNGFHFSDSYLYLTSKAKALLLLWLLLHEVMNKK

SEQ ID NO: 260135 - protein, 47 aa, Glycine max
  Clone ID: PAT_MRT3847_76926C.1.pep
TYTTGHRINIELSVCQSVLCLVLVSFHVSSQIKAQATLLVVALRDFL

SEQ ID NO: 260136 - protein, 94 aa, Glycine max
  Clone ID: PAT_MRT3847_76927C.1.pep
CYLPLSNLTLGAAIILSFLKPQTATQHNTSQYKFRIRNVTCFSLLPLLSTFSEFCPHFTQFQFLTPPARGIRVFAVPFIDASPPPILGIAAMAE

SEQ ID NO: 260137 - protein, 82 aa, Glycine max
  Clone ID: PAT_MRT3847_76928C.1.pep
RFLTKKVCFGPPRSFPPQKGPPFFFFFSPEFFVLGGGFKKKKKKKKKKKKKKKKKKKKKKKKKKKGRAALEKILTYCSAIVI

SEQ ID NO: 260138 - protein, 678 aa, Glycine max
  unsure (1)..(678): unsure at all Xaa locations
  Clone ID: PAT_MRT3847_76929C.1.pep
NGTTTRSFKMGLSMGSEGLRSIGELLGLGVSGAVFPEDLKVSEKKIFDXQDKFLFLWNKLFCXSFILAVSIDPLFFYLPVINDSLHCHGIDLRLETIVTTLRTXVDAFYLLHMALQXLRTAYIAPSSRVFGRGELVIDSAQIATRSLQRSFIIDFLTRPSIPNLRGTSPVDNTDSTNVLATRSPNSFDIMHHVDPMYRRVLLSSEEVHYTNAVFKEHSXPSGPLILXLHWLASXSLCSLWVLFMCSTECLREVEAXADIRNTKNLLHFSYEDIEGDSDWNRTGEDINXRSSADGDPSFFDYGIFRQVLSSGIISSKKFISKYCYCLWWGLQNLSTLGQGLQTSTYPGEVIFSIALAISGLILFALLIGNMQTYLQSLTIRLEEMRVKRRDSEQWMHHRLLPQDLRERVRRYDQYKWLATRGVDEESLVQSLPKDLRRDIKRHLCLALVRRVPLFESMDERLLDAICERLKPCLFTENTYIVREGDPVDEMLFIIRGRLESVTTDGGRSGFFNRGFLKEADFCGEELLTWALDPKSGSNLPSSTRTVKALMEVEAFALTADELKFVASQFRRLHSRQVQHTFRFYSQQWRTWAACFIQAAWRRYSKKKIMKLRQKEDESDGAHENVGGSSYSFGAALLASKFAAHTLRGVHRNRLAKTARELVKLQKPPEPDFSADDAN

SEQ ID NO: 260139 - protein, 88 aa, Glycine max
  Clone ID: PAT_MRT3847_7692C.1.pep
CWAVCIQNPFGPFLSEERVFLYKNFPPGFYYYLKRVGGPLRVFGFWQIQNLMLCMGPLSRVLPPHRSGRLSVSKKQGGFPLSLWQSYS

SEQ ID NO: 260140 - protein, 251 aa, Glycine max
  unsure (1)..(251): unsure at all Xaa locations
  Clone ID: PAT_MRT3847_76930C.1.pep
LASISCRIAIFSFLLICIFLSVYNIKVCEAQAKPPTAKGLSYNFYDKSCPKLKSIVRSELKKVFNKDIAQAAGLLRLHFHDCFVQGCDGSVLLDGSASGPGEKEAPPNLTLRPEAFKIIENLRGLLEKSCGRVVSCSDITALTARDAVFLSGGPDYEIPLGRRDGLTFATRQVTLDNLPPPSSNASTILSSLVTKNLDPTDVVALSGGHTICISHCGSFTNRLYPTQDPVMDKTFGNNLRRTCPXXNTDNT

SEQ ID NO: 260141 - protein, 103 aa, Glycine max
  Clone ID: PAT_MRT3847_76931C.1.pep
DLIVRRRWRTTTASYRGRRSTRQRCGSAPPSLPLSFPHWNAFPASTSPPLTPTTTMTTTIITPPPPPLPPPHPPPPPPPSPPLLPPFRSTGKKTNDDVSNLPV

SEQ ID NO: 260142 - protein, 100 aa, Glycine max
  unsure (1)..(100): unsure at all Xaa locations
  Clone ID: PAT_MRT3847_76932C.1.pep
PLIFVSVRIIILTNYLCSWNDVGLLFPLLVSSVGGLVIKKISLAITLAIVGRCKRELMWTAAFSIPMVLACVATLSNGXGDPIAWVDSSEIFPLRLRAQG

SEQ ID NO: 260143 - protein, 38 aa, Glycine max
  Clone ID: PAT_MRT3847_76933C.1.pep
MPAALFLFLMFSFNVICVFQGEALISEGVVASGSSATI

SEQ ID NO: 260144 - protein, 79 aa, Glycine max
  Clone ID: PAT_MRT3847_76934C.1.pep
ERHHKSNVFHCFDNTATPRNVQKTTAPVKKMKGRLILRLPKTHQKRYELRPPSLRNKVLGTHFSKYRGIHQTPVRKHMT

SEQ ID NO: 260145 - protein, 56 aa, Glycine max
  unsure (1)..(56): unsure at all Xaa locations
  Clone ID: PAT_MRT3847_76935C.1.pep
DWHVLVAGVVVAATKGIGTLIYKKPPPARPWRLQSFLXLLTTWKPGICLGLLVGCF

SEQ ID NO: 260146 - protein, 109 aa, Glycine max
  Clone ID: PAT_MRT3847_76936C.1.pep
GQRWKKVKHLLTWIATYAIFNGIACTTCKLSMFITTISATFVTCTAKLIQCFFALSCFYQLQWSFIFNSNGKSQQNNKNKSDGLHLNLIIEQYTPCFNLLPLLSSSRSR

SEQ ID NO: 260147 - protein, 39 aa, Glycine max
  Clone ID: PAT_MRT3847_76937C.1.pep
VVGELLPEEGQLVKNKHFISFIQWSIIEKQQRKPVSAAK

SEQ ID NO: 260148 - protein, 89 aa, Glycine max
  unsure (1)..(89): unsure at all Xaa locations
  Clone ID: PAT_MRT3847_76938C.1.pep
AHAYRKLTMYQDAISYYEKALALSTRSXSTYAGLAYTYHLQXDFTTAISYYHKALWLKPDDQFCTEMLSWALIDESRRGVDPVLNSGEV

SEQ ID NO: 260149 - protein, 131 aa, Glycine max
  unsure (1)..(131): unsure at all Xaa locations
  Clone ID: PAT_MRT3847_76939C.1.pep
HQHRAGYCLFKLPSVSLFLSASLPDVKTAQETFLFTSESVNEGHPDKLCDQISDAELDACLEQDPDSKVACETCTKTNMVMVFXEITTEADVDYEKIVRDTCKNIGYDSDDDGHDADNCEVTGNIEHQRPD

SEQ ID NO: 260150 - protein, 79 aa, Glycine max
  Clone ID: PAT_MRT3847_7693C.1.pep
SADLVDKKGRERLYAHCCFTQFICSAGTLELPPRREKVQCGEGYCIWVINPLENVGQFRKSKSDVSYRCQKQLMRMLRV

SEQ ID NO: 260151 - protein, 60 aa, Glycine max
  Clone ID: PAT_MRT3847_76940C.1.pep
PYAQSRCDDQCSLLSLIPDYVDFPYALSDVFPSSNTTRAPLIKLSVYITRVHEYSVGFSH

SEQ ID NO: 260152 - protein, 121 aa, Glycine max
  Clone ID: PAT_MRT3847_76941C.1.pep
AHETCLFTSESVNEGLPDKLCDQICDAVLDACLEQDPDSKVACETCSKTNVVMVFGEITTKANEDYDKIVRDTCRNIGFVSEDVGLDADYCEVLVNIERQSSDFAQGVHGLLTKMSEEIGA

SEQ ID NO: 260153 - protein, 396 aa, Glycine max
  Clone ID: PAT_MRT3847_76942C.1.pep
MDKEDAAAAEQEYALHSTLLQEFTAISAIDKAWLFKSHTHTASASSSHAMFCVSQPNLLVNKRKKSIVSATILTQNDASSVTFQWAPFPIQVSGVSAMVPSPSGSKLLIVRNPESDGPCRFEIWSSSQLQKEFHIPPSKHGSVYTDGWFEGISWNSDETCIAYVAEEPAPTKPTFNDLGGYKKAGSSEKDCGTWKGQGEWEEDWGETYAGKRQPAPFVININSGEVQAVKGIDKSLSVGQVVWAPSTEGSAQHLVFVGWTFETRKLGIKYCYNRPCALYVVKAPHHESKANETEIHSTEDVQAVNLTQTISSAFFPRFSPDGKFLVFVSARSSVDSGVHSATDSLHRIDWPEDSKLYKSAKIHEVIPVVLFAEDGGFPGLYSLLVIHGFLMATLLL

SEQ ID NO: 260154 - protein, 253 aa, Glycine max
  unsure (1)..(253): unsure at all Xaa locations
  Clone ID: PAT_MRT3847_76943C.1.pep
MSRRYDSRTTIFSPEGRLYQVEYAMEAIGNAGTAIGILSKDGVVLVGEKKVTSKLLQTSTSTEKMYKIDDHVACAVAGIMSDANILINTXARVQAQRYTYAYQEPMPVEQLVQSLCDTKQGYTQFGWSSGPFGXVSFLFAGWDKNFGFQLYMSDPSGNYGGWKAGAIGANNQAAQSILKQDYKDDITREEAVQLALKVLSKTMDSTSLTSEKLELAEVFLSPSGKVKYEVCSPEALTKMLVKSGVTQPATDTA

SEQ ID NO: 260155 - protein, 91 aa, Glycine max
  unsure (1)..(91): unsure at all Xaa locations
  Clone ID: PAT_MRT3847_76944C.1.pep
MGQETILFTCESGNEGHPDKLXDQISDAELDACLEHDPDSKGGCETCTKTNMEMVFGEITTKANVDYEKIVRDTCRNIAYGSDDVGHDADN

SEQ ID NO: 260156 - protein, 83 aa, Glycine max
  Clone ID: PAT_MRT3847_76945C.1.pep
HESKPNEPVVQSTEEFHALNLTQTISSAFFPRFSPDGKFLVFLSARSAVDSECTMLQIHFTELIGQQMESCSNLPKFMISFLL

SEQ ID NO: 260157 - protein, 101 aa, Glycine max
  Clone ID: PAT_MRT3847_76946C.1.pep
MAQDTWLFTSESANEGHPDKLCDQIFYAELDACLEHDPDCKAGCETCTKTNMETVFGEITTKANVDYEKIVRDTCRNIDFDSDDVWLDADNCKVLVNIEQQ

SEQ ID NO: 260158 - protein, 108 aa, Glycine max
  Clone ID: PAT_MRT3847_76947C.1.pep
MKICTTFCVSLATVLVMMSNIIMAVAETHIPTTLDGPFDPVTRRFDPSLRRGSDDLPMTHPRLRKNVTSNFPEQIALAISSPTSMWVSWVTGTLIISSPQNFHKIFVF

SEQ ID NO: 260159 - protein, 91 aa, Glycine max
  unsure (1)..(91): unsure at all Xaa locations
  Clone ID: PAT_MRT3847_76948C.1.pep
KAEAIGANXQAAQSILKQDYKDDITREEAVQLALKVLSKTMDSTSLTSEKLELAEVFLSPSGKVKYEVCSPEALTKMLVKSGVTQPATDTA

SEQ ID NO: 260160 - protein, 395 aa, Glycine max
  Clone ID: PAT_MRT3847_76949C.1.pep
MAQETFLFTSESVNEGHPDKLCDQISDAVLDACLEQDPDSKVACETCTKTNMVMVFGEITTKANVDYEKIVRDTCRNIGFVSDDVGLDADNCKVLVNIEQQSPDIAQGVHGHLTKRPEEIGAGDQGHMFGYATDETPELMPLSHVLATKLGAKLTEVRKNGTCPWLRPDGKTQVTVEYYNDKGAMVPIRVHTVLISTQHDETVTNDEIAADLKEHVIKPVIPEKYLDEKTIFHLNPSGRFVIGGPHGDAGLTGRKIIIDTYGGWGAHGGGAFSGKDPTKVDRSGAYIVRQAAKSIVANGLARRAIVQVSYAIGVPEPLSVFVDTYGTGKIPDKEILSIVKESFDFRPGMISINLDLKRGGNGRFLKTAAYGHFGRDDPDFTWEVVKPLKGEKVPA

SEQ ID NO: 260161 - protein, 44 aa, Glycine max
  Clone ID: PAT_MRT3847_7694C.1.pep
GHISAPEVNRHKWGYSQRVVASFFILKLVLRNRTINFLCLLIVQ

SEQ ID NO: 260162 - protein, 395 aa, Glycine max; identical to SEQ ID NO: 260160
  Clone ID: PAT_MRT3847_76950C.1.pep

SEQ ID NO: 260163 - protein, 87 aa, Glycine max
  unsure (1)..(87): unsure at all Xaa locations
  Clone ID: PAT_MRT3847_76951C.1.pep
LKIRIELQPLFIFYFTDSPKXFYMDIFERAIAFKLTQXFNYFFLKNLYFSIYPLPSTFIFIPSTINNKNSYTNKPSIYTYILLHKLL

SEQ ID NO: 260164 - protein, 100 aa, Glycine max
  Clone ID: PAT_MRT3847_76952C.1.pep
PGHVFDQLVSIGKLITDFQEVVDVPNGSSAMDGEEGLDDDVGVAVEFEENEDDDEESDLDIVQDEEEDDEDVAEPNGSGAMQMGGVGGGIGGGGGAFVGI

SEQ ID NO: 260165 - protein, 120 aa, Glycine max
  unsure (1)..(120): unsure at all Xaa locations
  Clone ID: PAT_MRT3847_76953C.1.pep
MRSGRALISYLYRTLNQFFSXKHRPTMLGTANXYHMRRLINFCKNSLLLNHTAANVLXILNEVWLYLSHKLKTRCLVXYFRLVKDTDIQHQPYYFFQQTNRELMLEMFQQVLSYFEPHIG

SEQ ID NO: 260166 - protein, 56 aa, Glycine max
  Clone ID: PAT_MRT3847_76954C.1.pep
EMMPPEQETTIGTNISSITTRPGTRLVQHGLKGSNTYQMKPRLKLDDYGISSEKQT

SEQ ID NO: 260167 - protein, 106 aa, Glycine max
  Clone ID: PAT_MRT3847_76955C.1.pep
IMGAFFIEKKKKATNVILQSYRCEKDPPSIFKFGPILMMTSAEYMRRFFSTPAPNTYMGHILDDPGVFSSIRSNALHQFSWHVVASTYMGTIQIKCAAQIQLACSI

SEQ ID NO: 260168 - protein, 77 aa, Glycine max
  unsure (1)..(77): unsure at all Xaa locations
  Clone ID: PAT_MRT3847_76956C.1.pep
NGRSTSEGXIRNGLLIAALFAGQHTSSITSTWTGAYMLRFKQYFTEAVEEQQDVMTRHGDKIDHDILAEMDVLYRCI

SEQ ID NO: 260169 - protein, 153 aa, Glycine max
  unsure (1)..(153): unsure at all Xaa locations
  Clone ID: PAT_MRT3847_76957C.1.pep
QFSLFPITSYLRQKKDTKKIIHSIKVGISLVLISLLYFVDPLYEQVGDNAIWAIMTVVVTFEFSAGIXATLGKGLNRGMGTILGGGLGCIAAVLAQNVGGGIGNSIIIGTSVFIFGTIATYCRLFPSVKKRYDYGVMIFILTFNLVGVSGVRI

SEQ ID NO: 260170 - protein, 81 aa, Glycine max
  Clone ID: PAT_MRT3847_76958C.1.pep
KELVLLYFFSSRFHLLSEFDNGKRSCRKRLADHNRRRRKTQQIAQEIHKSQHSLDNVARSLPESGAQSSSSSGKVAVRVTP

SEQ ID NO: 260171 - protein, 154 aa, Glycine max
  unsure (1)..(154): unsure at all Xaa locations
  Clone ID: PAT_MRT3847_76959C.1.pep
GRSPCSDDNGLXKGPWTPEEDHKLVQPIQKHGPGSRRALPKIAGLNKCGIRCGLRGTNYLRPDIKKGKFFQEEEQTMLHLHSILGNKRAAIASHLPCRTDHEIXNFWNTPFMKKLIXQMGFDSMTHQPTTDLVCTLTHLVALGNITDLMGHFTL

SEQ ID NO: 260172 - protein, 67 aa, Glycine max
  Clone ID: PAT_MRT3847_7695C.1.pep
ESSNHLRTRSGYKRSNIKGKKKTILRKPEPDQELKNIDKGNKKENQENTLAESTKTKIAGQCKTLKP

SEQ ID NO: 260173 - protein, 76 aa, Glycine max
  unsure (1)..(76): unsure at all Xaa locations
  Clone ID: PAT_MRT3847_76960C.1.pep
TRLLQKILRRKLIRVFPSIEPDPGYFYITCGRAHFLKSCHLCQMLGDGVVFSQNKERTFFLGLRVKVGKQKQNERX

SEQ ID NO: 260174 - protein, 81 aa, Glycine max
  unsure (1)..(81): unsure at all Xaa locations
  Clone ID: PAT_MRT3847_76961C.1.pep
MWENTDRSLQEAFQDLHALMHKALEVEKLAQIMTLKPLCGXNSQRSATNDEEMGSXADMRDWVVSDRIMSPVTKESAGALY

SEQ ID NO: 260175 - protein, 44 aa, Glycine max
  Clone ID: PAT_MRT3847_76962C.1.pep
GSSKHGCIQTQSIEAFHRTVQIQPLAPLRSFTLLASGTISEVSG

SEQ ID NO: 260176 - protein, 88 aa, Glycine max
  Clone ID: PAT_MRT3847_76963C.1.pep
LSRETQALRISSHPRLTRLFLVLALKSCDVPAESSPLHVLDQIGIYRSCIKQILQFITSYNTSVHLFGMQKGPLNNKYTKKNKVIDIW

SEQ ID NO: 260177 - protein, 32 aa, Glycine max
  Clone ID: PAT_MRT3847_76964C.1.pep
ELGNRACTKTSTISVNTNPCIGANDLEFMQHS

SEQ ID NO: 260178 - protein, 329 aa, Glycine max
  Clone ID: PAT_MRT3847_76965C.1.pep
MATLSACASPPWPNPNSPNSNPNPNFLPDQSQTLDFDSLMPPQPESPPPNHHHSPDASPPESSPSPPPPSILYLSFNQDQACFAAAADNGFRIYNCDPFRELFRREFDGGGIGHVEMLFRCNIFALVGGGPNPQYPPNKVMIWDDHQGRCIGELSFRAAVRGVRLRRDRIIVVVEQKIFVYNFADLKLVQQIETVPNPKGLCAVSQLSDSLVLACPGLHKGQIRVEHYAQKKTKFISAHDSRIACFALTLDGQLIATASTKGTLIRIFDTDHGTLLQEVRRGANAAEIYSLAFSSTAQWLAVSSDKGTVHVFSLKGNSSIPEQEKSQSS

SEQ ID NO: 260179 - protein, 307 aa, Glycine max
  Clone ID: PAT_MRT3847_76966C.1.pep
MDVLYHIHPLASPGGLSNPSHVTATSLHVDPGVRKGGRQGYPLRLVIDQDISVYCFADLKLVHQIETVPNPRGPCSDSQKSDTVVSRVRTCPILSFSRCPGLHKGQIALQHYAQKKTKFISAHEARFACSALTLDGQLIATASTKGTLIRIFDTDHGTLLQEVRRGANTAEICSLAFSSTAQWLAVSSDKGTVHVFSLKVNSSIPEQEKSQSSSNSDAAITPSSSSRSFIKLKGVLPKYFNSEWSVAQFHLQEGSHYTVAFGLQKNTVIILGMDGSFYRCQFDPVHGGEMTQLEYHNFLKPEPETAL

SEQ ID NO: 260180 - protein, 71 aa, Glycine max
  Clone ID: PAT_MRT3847_76967C.1.pep
ERPPNCKVAQRSVVCDALPIPPSVLFFFGRIVVSIVTPPIKKSLLCPACFRSVIPRPVHYYIFYINGWFVR

SEQ ID NO: 260181 - protein, 83 aa, Glycine max
  Clone ID: PAT_MRT3847_76968C.1.pep
AVKTKESCGVVVAVAIEMAASWSEKHVMVIGIYDCEQSTYALNCAVDNFIPSPICKLVLMHSRPTSTYTVSFSCPERFILLRS

SEQ ID NO: 260182 - protein, 323 aa, Glycine max
  Clone ID: PAT_MRT3847_76969C.1.pep
MAVKQLNESFKSKHVENMQASKHVTQADQARPDTPVTEIEVLPKDIMLDQISECSSYGISRRREILEADDQMLELWETADKDAAIGKQAEKTQKMVAEAAGNHQRGATMELRNKYPSTDSLVEKELSVDKLEVSRRLTLPREEGNQSKILERLDSDAQKLTNLQITIQDLMKKVEINEKSTKGKSVEFGEVKGQLEAAQENITKLFDANRKLMMNMEEGTLSSVGKDAAESGESGSVSRRRVSEQARRESEKIGQLHLEVQRLQFLLLKLGDGKEIKEKTKMTDRSPRVLLRDYIYGGMRTNNQKKKKKLPFCACVRPPTKGD

SEQ ID NO: 260183 - protein, 59 aa, Glycine max
  unsure (1)..(59): unsure at all Xaa locations
  Clone ID: PAT_MRT3847_7696C.1.pep
PPPQXPPQANMNLFPPPLMFGRPPPPQPQHPFLGFFPPPPMPSPPLAGPFPPVFSDGTP

SEQ ID NO: 260184 - protein, 201 aa, Glycine max
  Clone ID: PAT_MRT3847_76970C.1.pep
MYKQATQKTGEVLSMPSQWLGMYSDFITKNSSAVTQIESALRSLTYIIPGRFRESEVASESIHSGVQVLSLYHDSLLSKAMAQMPGTRRQPLTPHHRYTKFWTQNSPTYKRIALVLQMIQYTELLWEMAAKRKGEKVRWRVVVLLEIVKAVCMLLLLRLTNSRPLLSPALPQREIDPSSLEESSASADGMDTPPSERSVEA

SEQ ID NO: 260185 - protein, 105 aa, Glycine max
  unsure (1)..(105): unsure at all Xaa locations
  Clone ID: PAT_MRT3847_76971C.1.pep
TPATSITLSGYVLEQTVGASFSTLLILPSMDTAVRERGSIAEKPESSSNLRMGACLEAVAAAAAISNPAAMALVEERRTTKXTEVSFERSNNLLGWILCGEYESI

SEQ ID NO: 260186 - protein, 70 aa, Glycine max
  Clone ID: PAT_MRT3847_76972C.1.pep
NSHILQESTRYKINENPKASWDAAINSSFLQYTVEQFKRLLGVKPTPKKELLSSPAISNPKTLQIAQENF

SEQ ID NO: 260187 - protein, 286 aa, Glycine max
  unsure (1)..(286): unsure at all Xaa locations
  Clone ID: PAT_MRT3847_76973C.1.pep
MSEISNSKATVVEDCRGVLHVYNDGSIVRSSRPSFNVPINDDGTVLWKDVVFDTALDLQLRLYKPADDSAGSKLPIFIYIHGGGFCIGSRTWPNCQNYCFQLTSRLRAVVVAPDYRLAPENRLPDAIEDGFEALKWLQTQAVSDEPDPWLSHVADFSHVYISGDSAGGNIAHHLAARLGFGSPELDPVRVRGYVLLAPFFGGTIRTKSEAEGPKDVFLNLELIDRFWRLSIPIGETTDHPLVLPFGPXSQRLEVIDFDPILVVAGGSXLLKDRARRIMQKGLRNWG

SEQ ID NO: 260188 - protein, 206 aa, Glycine max
  Clone ID: PAT_MRT3847_76974C.1.pep
IYRLNKFTGVLPERLSWNISRFEISYNQFSGGIPSGVSSWTNLVVFDASKNNFNGSIPRQLTALPKLTTLLLDQNQLTGELPSDIISWKSLVALNLSQNQLYGQIPHAIGQLPALSQLDLSENEFSGQVPSLPPRLTNLNLSSNHLTGRIPSEFENSVFASSFLGNSGLCADTPALNLTLCNSGLQRKIKGSSWSVGLVISLVIVA

SEQ ID NO: 260189 - protein, 358 aa, Glycine max
  Clone ID: PAT_MRT3847_76975C.1.pep
MSRTLVQPIGQKRLTNVAVVRLKKHGMRFEIACYPNTVLSWRSGVEKDPDEVLQSHTVYTNVSKGVLAKSKDLISAFGTDDHSKICLDILKKGELQVAGKERESLLSSQFRDIATIVMHKTYNPETQRPYTISMIERLMREIHFAVDPHSTSKKQALELIQELQKHFPIKRCPLRIRATAPDDQVPELLGKLNEWNAIVISKEGSSAQESVIFELEPGLYKDCHDFVMNKMHGRFEVLAHSLYVEGDTQVEQYNDYEDIPEALPKEPYDSVLKLNEKLQKQTISSTSRPTEGQQKQNKCSTCNVSFDDTKLYREHHKSEWHKHNIKRKTRQLPPLTEEECMADMELGDSKSDLKDYSF

SEQ ID NO: 260190 - protein, 79 aa, Glycine max
  Clone ID: PAT_MRT3847_76976C.1.pep
SASAALYIQRVWRRLRVTKMISLQLKTYWETLENDNEGETTAKRISFNSKRPYLCFITRNLTHPKTVHSVETPFYEALL

SEQ ID NO: 260191 - protein, 88 aa, Glycine max
  Clone ID: PAT_MRT3847_76977C.1.pep
VLQLNKKLQKQTISSTSRPTEGQQKQNKCSTCNVSFDDSKLYREHHKSEWHKHNIKRKTRQLPPLTEEECMADMELGDSKSDLKDYSF

SEQ ID NO: 260192 - protein, 118 aa, Glycine max
  Clone ID: PAT_MRT3847_76978C.1.pep
GAAIVMTQNYMVLSSNLYNLVSSTTLHRIVEHPYVVVVSPPQRLALEHRAVGAGFKALNHVEIYFLEEVAPLCCCNYIAISTVDKIKYPQSAKQEKLNFNTTCCIFRFNPTKCGVRKR

SEQ ID NO: 260193 - protein, 393 aa, Glycine max
  unsure (1)..(393): unsure at all Xaa locations
  Clone ID: PAT_MRT3847_76979C.1.pep
MARETVDSEIPCVSIDDARLCKPGTLDPTKVKGKILCLPSEXNKVNFSSVRVNGVXLAGSVAVLVQNDDPSDNLLLAEHHVLHAASISATGSHNFKNCTGNNGNNNEILTYLNAAETXIGVKPASIXAGFSSSGPSSVQPLIQKPDITAPGVNVIAAFTQGAGTXFNIPSDRRRSLFNVATGNFDVLXHVAGIAGLLKTFHLTWSPSAIKSAIMTTATTLDNTNQPIRNAFHKVATPFEYGAGHIQPNLAIDPGLVYDLRTTDYLNFLCASGYNQALLNLFAKLKFPYTCPKSYRIEDFNYPSITVRHPGSKTISVTRTVTNVGPPSTYVVNTHGPKGIKVLVQPSSLTFKRTGEKKKFQVILQPIGARRGLFGNLSWTDGKHRVTSPITILP

SEQ ID NO: 260194 - protein, 351 aa, Glycine max
  Clone ID: PAT_MRT3847_7697C.1.pep
MNPSSQSQSPPPPVAKKVEHAMEMFGDVRIDNYYWLRDDSRTDPEVLSYLRQENAYTDSIMSGTKEFEDKLFAEIRGRIKEEDVSAPLRKGPYYYYKRTLEGKEYVQYCRRLISDNQKVPSVHDIMPTGPEAPPEHVILDVNVKAQHHLYYSIGAFKVSPNNKLVAYAEDTKGDEIYTIYVIDVETQATIGEPLVGVTSYLEWAGDNAFVYITMDEILRPDKAWFHVLGTEQSKDTCLYVEKDDMFSLDLQASESKKYLFVASESKNTRFNFYLDVSKPEEGLKVLTPRVDGIDTTVSHRGDHFFIKRRSDQFFNSEVVACAVNNTYSTTVLIPHRESVKIQEIQLLSDHL

SEQ ID NO: 260195 - protein, 91 aa, Glycine max
  unsure (1)..(91): unsure at all Xaa locations
  Clone ID: PAT_MRT3847_76980C.1.pep
VYLSCLFGFVLSFFFVFXPGKEMKTVFFYLPGFSKGVLNKIFYFPTITCGLLYKTCRRAFIYKKKINWVAQFHKVGDLAGADSPLKYILGL

SEQ ID NO: 260196 - protein, 497 aa, Glycine max
  unsure (1)..(497): unsure at all Xaa locations
  Clone ID: PAT_MRT3847_76981C.1.pep
DHAIHDGVDVISASIGSSNPYTEALLTDGMSIGAFHAVARNVVVVCSAGNDGPSPLSVTNVAPWSFTVAASTLDRDFLSDISLSDNMTEGGASLNRGLPPSSPSNKFYPIINSVEARLPHVSINDARLCKPGTLDPRKVRGKILICLRGDKLTSVSEGQQGALAGAVAVFVQNDEQSGNLLLAENHVLPAASISGTGNESQGGAFNICSKGVLAYLSAARTHIGVKPAPIIAGFSSRGPSSVQPLILKPDITAPGVNVIAAFTQGAGPSNIASNRRRSPFNVQHGTSMSCPHVAGLXVFLKHIILLWSSTAIKSAIMTTATTLDNTNQPIRNAFDEGVPPFEYGAGHIQPNLAIDPGLVYDLRTSDYLNFLCASGYTXALLNLFAKLKFPYTCPKSYRIEDFNYPXITVRHSGSKTISVTRTVTNVGPPSTYVVNTHGPKGIKVLVQPCSLTFKRTGEKKKFQVILQPIGARHGLPLFGNLSWTDGRHRVTSPVVVL

SEQ ID NO: 260197 - protein, 70 aa, Glycine max
  Clone ID: PAT_MRT3847_76982C.1.pep
MASIITLVTSTLLFLSFTLSCAIDTFTITNYTDNEVMTMYEEWLVKHQKVYNGLREKDKKFQVFKDNFGF

SEQ ID NO: 260198 - protein, 82 aa, Glycine max
  Clone ID: PAT_MRT3847_76983C.1.pep
PLPRYRGNCDLDPDTNRSLCTVKIIGPQHCALPELAAVAFNPSIDFHSPLDGYGPGSHTTSIAAGRYGIPVRMHGHQFGKGT

SEQ ID NO: 260199 - protein, 70 aa, Glycine max
  Clone ID: PAT_MRT3847_76984C.1.pep
LMRTLVCISEMDILKDRNLEFCDALVRAGKRVEYGVFRGVGHAFQILSKSQVSKSRAKEMMARVKSFMAL

SEQ ID NO: 260200 - protein, 45 aa, Glycine max
  Clone ID: PAT_MRT3847_76985C.1.pep
EFPIQNDGFTISINIWVCSLSCYVVSGVKTPNALCIFHPYKLEGL

SEQ ID NO: 260201 - protein, 37 aa, Glycine max
  Clone ID: PAT_MRT3847_76986C.1.pep
DHSSCCTLLLYTKGSCTRGVTLLRRRASLGQRLRCPC

SEQ ID NO: 260202 - protein, 63 aa, Glycine max
  unsure (1)..(63): unsure at all Xaa locations
  Clone ID: PAT_MRT3847_76987C.1.pep
PVFYEPDLSVIQYTXHTXXXIXRERGEESSYSKSXXKMSFLLIVLTSNSSLTIRLKENEGADK

SEQ ID NO: 260203 - protein, 127 aa, Glycine max
  Clone ID: PAT_MRT3847_76988C.1.pep
SEKLVEEGRTFDAVMALEVIEHVADPAEFCKSLSALTVPDGATVISTINRSMRAYTTAIVAAEYILRWLPRGTHQWSSFLTPEELVLILQRAGINVEEMAGIMYNPVTGGWSLSDDISVNFIAFGTK

SEQ ID NO: 260204 - protein, 58 aa, Glycine max
  Clone ID: PAT_MRT3847_76989C.1.pep
THKFILDNFIYLTHYYFNFCQDKLESFLFTNYSQSVGKGKMSLDTIKKLIKSIQIFTH

SEQ ID NO: 260205 - protein, 73 aa, Glycine max
  unsure (1)..(73): unsure at all Xaa locations
  Clone ID: PAT_MRT3847_7698C.1.pep
MKLSSSGFNPPAEEEGEKXVXNSELWHACAGPLVSLPPLGSREVYFSQGHSEQGAASTTREIDAHXIPNYPNF

SEQ ID NO: 260206 - protein, 75 aa, Glycine max
  unsure (1)..(75): unsure at all Xaa locations
  Clone ID: PAT_MRT3847_76990C.1.pep
VQNGTYGNVYRSRQNASCKICSLIKTCIHDDNXSVHTTTLRYVSILQMLSXDPYVRKVLDVKYGHINELLSELYL

SEQ ID NO: 260207 - protein, 52 aa, Glycine max
  Clone ID: PAT_MRT3847_76991C.1.pep
SQVIECKNFNEGLETNEAYSYTVKNGVCKKTTENVEVEVKETNSIILKAGNE

SEQ ID NO: 260208 - protein, 159 aa, Glycine max
  Clone ID: PAT_MRT3847_76992C.1.pep
FKLLLGAIMLCTLLFPYTHALRKTYIVYLGEHSHGPSPSLRDLESATNSHYDLLASVLGSHEKAKEAVIYSYNKHINGFAALLEEEEASEIEKKASVISVFMSKEYKLHTTRSWDFLGLEKYGGIPAESAWWNGNFGENTIIANFDSGVWPEHTSFNDN

SEQ ID NO: 260209 - protein, 70 aa, Glycine max
  Clone ID: PAT_MRT3847_76993C.1.pep
NQDFLSPRTKKIFEKKNRIFLTNDGLHFPLEYPFNSWVYWSNSRIARDFLVAAPSLFLKPILTTSPRECF

SEQ ID NO: 260210 - protein, 92 aa, Glycine max
  unsure (1)..(92): unsure at all Xaa locations
  Clone ID: PAT_MRT3847_76994C.1.pep
NSALLSSYLAEVVVGSAAWLGRGLSCVCVQRRDSDASNTFDLTLAQEECLQRIQRRIDVPYDSSIIEHQXLWNAAFPEEELHGLIANAIHVS

SEQ ID NO: 260211 - protein, 46 aa, Glycine max
  Clone ID: PAT_MRT3847_76995C.1.pep
NIIIYILSIWSLLILSPEIMKPSLRIMNYSLASNQKHFLLLAYGQN

SEQ ID NO: 260212 - protein, 53 aa, Glycine max
  Clone ID: PAT_MRT3847_76996C.1.pep
IDVVFSNQRRARWLFVQGFPAVIQAQECSGRFLRATDTCCQTSPIMIRVSICR

SEQ ID NO: 260213 - protein, 105 aa, Glycine max
  unsure (1)..(105): unsure at all Xaa locations
  Clone ID: PAT_MRT3847_76997C.1.pep
KPPFLFIFLLLFRFFDLRSSSLTLRDCISIHIGXAGIHVGNACWELYCLDHCIQSDGQMPCDKTVGGRDDAFNILFSETGARKHVPCAIFVDPEPTVIDDVTTGR

SEQ ID NO: 260214 - protein, 51 aa, Glycine max
  Clone ID: PAT_MRT3847_76998C.1.pep
AYYLLHKLFIMSQKKLILDGHSTVSVQQESPVYENGVLNNVTCLSSLSCAY

SEQ ID NO: 260215 - protein, 96 aa, Glycine max
  unsure (1)..(96): unsure at all Xaa locations
  Clone ID: PAT_MRT3847_76999C.1.pep
FERSDNPFTKYAVLITPISNAIDEKXLVHKRKPIAILDKTTILVTTVLXALFMPFFGYVMAFIAAFFNATISLLLPCICYLKMNKAALPFGLELIV

SEQ ID NO: 260216 - protein, 155 aa, Glycine max
  unsure (1)..(155): unsure at all Xaa locations
  Clone ID: PAT_MRT3847_7699C.1.pep
MPNNSFPEFRTDADSYANYNCSYTNVTSAQSKSGWRCTCKYGFKGNPYLDQGCKLGVSXASEPSFYSXGLWWLHKVIRKSIATKRKEKFFKQNGGXMLLKQRLSSGEVNVDKIKLFSLKDLQKATDHFNXNRVLGKGGPGTVXQGMLVDGNICAV

SEQ ID NO: 260217 - protein, 77 aa, Glycine max
  Clone ID: PAT_MRT3847_769C.1.pep
INIYIYIYIYIYMRNESEYQRYRDYNKNPDKWFPSQTRHLTAVLLGTTLDSLVIQLSIHYDCFPCLKTKASLRLDDH

SEQ ID NO: 260218 - protein, 122 aa, Glycine max
  unsure (1)..(122): unsure at all Xaa locations
  Clone ID: PAT_MRT3847_76C.1.pep
MKMKVLVFFVATILVAWKCHAYDMFPLRMNTGYGARTTEVKCASWRLAVEAHNIFGFETIPEECVGTTKGYIPGEHIRTDXKTQLPQRYFYARDLXECIPRTHFVLSIEGTVLFXMPHYKKH

SEQ ID NO: 260219 - protein, 38 aa, Glycine max
  Clone ID: PAT_MRT3847_77000C.1.pep
HASVQMLLLSIPLDGNNPYLKGVLGPNFSLLWVKCWSK

SEQ ID NO: 260220 - protein, 138 aa, Glycine max
  unsure (1)..(138): unsure at all Xaa locations
  Clone ID: PAT_MRT3847_77001C.1.pep
NXTTTXQXXETXQXXTTKTXXXPHXPXXIXXXPXXXXTQRXXXYPQGXXIXKXXXXRXXTNTXGAPHXXRXKXXTRXXXGXTXXLXXHXTHKXKXXIXDXPXHNXRAXXQXXGXXXXESXXXRPIHTQLXXXXXTXEX

SEQ ID NO: 260221 - protein, 107 aa, Glycine max
  unsure (1)..(107): unsure at all Xaa locations
  Clone ID: PAT_MRT3847_77002C.1.pep
GGKRGQVPKKTSALRKERAPLAYCISFKSETDXNITLNKAGAALEKYKMHAVAANELSTRKEQVVXTRGAEKGTDQREKSPTDNDVENTLIKHLPEKHATDMEDPGR

SEQ ID NO: 260222 - protein, 58 aa, Glycine max
  unsure (1)..(58): unsure at all Xaa locations
  Clone ID: PAT_MRT3847_77003C.1.pep
ALKQNILQRKEPXWECLHFNWVGPKLTINPYHFTLFLTPVTGLRLILEGIKHIILAIH

SEQ ID NO: 260223 - protein, 208 aa, Glycine max
  Clone ID: PAT_MRT3847_77004C.1.pep
MEQELPRSSVPDDDAATTTSSVDKPAIPHAGGTRHPLSGGVPARRWGRWVSHPLFRGVRKRRWGKWVSEIREPRKKSRIWLGSFPAPEMAGKAYDVTAYCLKGRRAQLNFPDEVHRLPPLPSSCTARDIQAAAAKAAHMMMVQAASADSPEKSSSITSDCDGSGGDDFWGEIELPELLNGKWWASDRHVTPWPETELPPQLPFTTACL

SEQ ID NO: 260224 - protein, 57 aa, Glycine max
  Clone ID: PAT_MRT3847_77005C.1.pep
ETPEKVPVQPCFHRTQHSPSGGRYPHFIKKERGPGASPRGVSGSKNVILRINRTLHT

SEQ ID NO: 260225 - protein, 196 aa, Glycine max
  Clone ID: PAT_MRT3847_77006C.1.pep
MANCQQYYFLLLSLAIFIPTLNANSLEKDEYWQSHVYEFDSYWQERAKAAKVDSQAAYFEDPYSVSSNFTSSVSELTIGKKDLRRNLKGKYRGDGPCIATNPIDRCWRCDPNWANNRQKLADCVQGFGRNTVGGKGGPFYVVTDPSDDDMVNPKPGTLRHAVTRDGPLWIIFARSMFITLQQELIMNSNKTIDGRG

SEQ ID NO: 260226 - protein, 51 aa, Glycine max
  Clone ID: PAT_MRT3847_77007C.1.pep
VPYSERAYIARMGLPCSKTCGNEENKDIHCNHTASSYQEQQTHMCPSRKSL

SEQ ID NO: 260227 - protein, 116 aa, Glycine max
  unsure (1)..(116): unsure at all Xaa locations
  Clone ID: PAT_MRT3847_77008C.1.pep
FGFQDRLNKLTNNSNSYMNISASLFLENVELEFSEEFRSHFIWLQDRLNNDTSNSHSYMNMYASLYLENVELEFSEKYRSHFLWLQDRHNKRTIDSDSYLNIXASISLENVELEFT

SEQ ID NO: 260228 - protein, 102 aa, Glycine max
  Clone ID: PAT_MRT3847_77009C.1.pep
VPFSQPFFWGGFLPANAAEWVSPFPFWVSPQKKSFLIPPNPKFLGVKKKILSPQIVFLPGLGPNPLINSGFFFRAKTSARYTGGGVSQGAFIFFEPPIIMFQ

SEQ ID NO: 260229 - protein, 58 aa, Glycine max
  Clone ID: PAT_MRT3847_7700C.1.pep
KPRSYALVPIAWRILTRKQLYDMFLALSYVAVHIDDSYTVLSLIKMSYDEGLWYIQSA

SEQ ID NO: 260230 - protein, 283 aa, Glycine max
  Clone ID: PAT_MRT3847_77010C.1.pep
MDDEYAKLIRRMNPPRVVIDNNACENATVIQVDSVNKHGILLDVVQVISDMNLVITKAYISSDAVWFMDVFNVIDHNGNKIRDKEVIDYIQRRLENNPSFAPSLRESVGVVPTEEHTVIELTGTDRPGLLSEICAVLTDLHCNVVTAEIWTHNTRAAAVVHVTDDSSGCAIKDPSRLSTIRDLLSNVLRGSNDPKTARTTLSPPGVTNRDRRLHQIMFADRDYERIERAGRGGLRDRDKRPLPHVTVVDCVEKDYTVVTMRAQDRPKLLFDIVCTLTDMQYVV

SEQ ID NO: 260231 - protein, 116 aa, Glycine max
  unsure (1)..(116): unsure at all Xaa locations
  Clone ID: PAT_MRT3847_77011C.1.pep
MRNITDSFLCVGYWASGGSVXVNTEIGATNLINLSVGXGVIGFFGEGCXSELLXNXEQKILRTIXNSXELRXEGGIXQRGKAQXRLRRRXTEAXRVXGSGYSESEREKLSLINSIY

SEQ ID NO: 260232 - protein, 54 aa, Glycine max
  Clone ID: PAT_MRT3847_77012C.1.pep
RLREDDRRVGRDGCQICDTVYNQVEYILNMIKYGTSIDSLSRWDLSFALFPVTA

SEQ ID NO: 260233 - protein, 49 aa, Glycine max
  Clone ID: PAT_MRT3847_77013C.1.pep
YPWAGEAKLLLPFTCRVTRTDVKIAACYCELFKHCVVPRLSAISFVRLP

SEQ ID NO: 260234 - protein, 60 aa, Glycine max
  Clone ID: PAT_MRT3847_77014C.1.pep
SIMIVLILYISFVLNINNKNLLIFILNMNKSYLTFFYLRDNFQNIFHLIESKIFFIDIKF

SEQ ID NO: 260235 - protein, 72 aa, Glycine max
  Clone ID: PAT_MRT3847_77015C.1.pep
RSCICRIKLGEGRDRICQMWMPDNRTLTLRISLPIPLIHSIPIPSPLQLQPLSVLIPNMKRGEPNHFLVPNS

SEQ ID NO: 260236 - protein, 102 aa, Glycine max
  Clone ID: PAT_MRT3847_77016C.1.pep
FGSSIKISKFLFSGVKLCYRCKIPTINQETAIAAPEPNETLMKTRSGELIRPNDKNKKRIYFGQNMTWNWMGFSAEGSGKIIKVGDSVYVLQKVSSTAEAAA

SEQ ID NO: 260237 - protein, 98 aa, Glycine max
  unsure (1)..(98): unsure at all Xaa locations
  Clone ID: PAT_MRT3847_77017C.1.pep
RPRQGASNQRXPPQTKTGYGKRSSEVKCARYRVAVEAHEIFFLKTIPEEXGEPTKDYINGEQLRSDSKTANQQGCLYASEREERQKNIFISGIYNTIL

SEQ ID NO: 260238 - protein, 94 aa, Glycine max
  Clone ID: PAT_MRT3847_77018C.1.pep
LCVRPCVRALNTHTVRHLNVRPLLCTVHGCFRSCTDRPLAGVLCMIVELELTIFTSLTDAFLEIHKALDYMLKGVSIICIIRMAVIISMRPVLT

SEQ ID NO: 260239 - protein, 160 aa, Glycine max
  Clone ID: PAT_MRT3847_77019C.1.pep
MAEAEDYGFLPEEMAVNENLGYPKAFAKLCRDRGFGPYSHGPPFSFIPYALSEDEAETAKDLDEIFPIIDPKAKATSKPKIFVSVLWKQLRHLGNAGFDPAVIRVDGYGNVLYYHADSASPLAWDVDHWFPCSRGGLTVLNNLKILQRQACKRKKNKLEF

SEQ ID NO: 260240 - protein, 188 aa, Glycine max
  Clone ID: PAT_MRT3847_7701C.1.pep
MVNVIISMRHMDNISVNLMHCGLPGSNFKLSNAWSSEDSCSTGSERGNKMVISLTGLLLDILRHNIPSSMIELENTLDDGVSTTSRQALEWRISISKRFIEEWEWRLSILQHLLPLSERQWRWKEALTVLRAAPSKLLNLCMQKAKFDIGEEAVHRFSLSAEDKATLELAEWVDSACKTPSVCSYGFD

SEQ ID NO: 260241 - protein, 62 aa, Glycine max
  Clone ID: PAT_MRT3847_77020C.1.pep
ARKSRLICQLTSRVLHTFSLVAPMLPPSAIVQCQLSPFYKGHLQNSTCKQACASGMERSSMM

SEQ ID NO: 260242 - protein, 95 aa, Glycine max
  Clone ID: PAT_MRT3847_77021C.1.pep
TGLAHHAEESIEKDSFVQMLDPSVTDWPLEQALCLAKIAVKYAELRRKDRPDLAKLVLPELDKLRDFAEQNMTMTMPIILGCTAPSPSHSEPSVQ

SEQ ID NO: 260243 - protein, 35 aa, Glycine max
  Clone ID: PAT_MRT3847_77022C.1.pep
LRRDIILPPFRLLTATGWFRGKPFSPFYFYYVLMF

SEQ ID NO: 260244 - protein, 61 aa, Glycine max
  Clone ID: PAT_MRT3847_77023C.1.pep
GLIVIPGCNARQCYQKIHKLISSNIVLLGDQSKQHKLGACIFRGGSLDRNKTVEEILLMLG

SEQ ID NO: 260245 - protein, 56 aa, Glycine max
  Clone ID: PAT_MRT3847_77024C.1.pep
TTLSSFSFSFPFTQTPLMMGLDQDASSNSGLQLILRLALTATITTTPSSPPSISNK

SEQ ID NO: 260246 - protein, 79 aa, Glycine max
  Clone ID: PAT_MRT3847_77025C.1.pep
LTLNCTFFKMISFPCQIFVFYFYFMLLLLLFLDNHNHHHPSFLSLHSLILRVVEALHFHHCLPLLHSTHTLFVFHQTFL

SEQ ID NO: 260247 - protein, 61 aa, Glycine max
  Clone ID: PAT_MRT3847_77026C.1.pep
LITVLLQHILSRTGERYHRRLPCPSVLSLLTEQKEGPSFSNRECYGLVSPKCKQAGCNIGS

SEQ ID NO: 260248 - protein, 87 aa, Glycine max
  Clone ID: PAT_MRT3847_77027C.1.pep
EPTHAVSIILCAHSLMSEENLSPFYKPINLGRAFSRPPLATACTYIFDTSPPLSLAFRKYTSSLAPRKELLNMRRACALIRRNIGET

SEQ ID NO: 260249 - protein, 25 aa, Glycine max
  Clone ID: PAT_MRT3847_77028C.1.pep
FFFFFFFFFFFFFFFFFFFFFNSWT

SEQ ID NO: 260250 - protein, 79 aa, Glycine max
  Clone ID: PAT_MRT3847_77029C.1.pep
LSTKETDRSFGLRNLRYIETLKEALHRACPGVVSCAAILVLSARAGIPSLRGPHIPLNPGITDGSRSRADVVQQFLPDH

SEQ ID NO: 260251 - protein, 79 aa, Glycine max
  unsure (1)..(79): unsure at all Xaa locations
  Clone ID: PAT_MRT3847_7702C.1.pep
PGASKGGPEAPTGPETIFGGGLNNKWTKSLKHPLPNSKSMVGFFFNPLSTIFFYYAWWYXLPHTPLNSLSSQRCSPRLP

SEQ ID NO: 260252 - protein, 451 aa, Glycine max
  unsure (1)..(451): unsure at all Xaa locations
  Clone ID: PAT_MRT3847_77030C.1.pep
VFKVADIPGTVSKGAPDFCTVYVVAKGKIQSMRSASRAAPAFSPLQNQLSHASARSDHSDPRVPLVNGAKGPERRSFEAPPHRSQDAPRKSNDGTTDSFRSPFTRNGMNDKSYGEISVPDFDISFVSDRRPSTDPSLPLLSNNYTCGSEETGISNPRLSYSSDTDGNNYSFESMHFGRRSMDISSDFSSFSQESEGLSSSALRGVDDVEAEMRRLKLELKQTIELYNNAYKEALTAQQKAVELQRWKLEEERRLEEARLAEEAALAVAEKEKARSKAAMENAEVQQRIAELESQKRINAEKKAFMESEEKRKAVDALSNNYVRYRKYTIEEIEAATNFFTESQKIGEGGYGPVYKCHLDHTPVAVKVLRPDAAQGRSQFQREVEVLSCIRHPNMVLLLGACPEYGCLVYEHMSNGSLDDRLFXRGNTLPIPWQLTFRIAAEIGTCLLFLHQ

SEQ ID NO: 260253 - protein, 110 aa, Glycine max
  unsure (1)..(110): unsure at all Xaa locations
  Clone ID: PAT_MRT3847_77031C.1.pep
MIILEYAFVAGEDPDRLFYWTITYGDIXPFGVKHQGFFMNGKSPGPEFYSVTNDXMIINVHNSLTEPFLLXWTGVQHRRNSYQDGANGTTRTIRAVKNVTYTLQVKDQVG

SEQ ID NO: 260254 - protein, 75 aa, Glycine max
  unsure (1)..(75): unsure at all Xaa locations
  Clone ID: PAT_MRT3847_77032C.1.pep
MRNTVTNQGSXGCPWHPPHRVTYLGSLFAQPQTYLDNXYPTQYGXHTADLSTEPHTFSTNLYLLVMHYRCAMLVD

SEQ ID NO: 260255 - protein, 132 aa, Glycine max
  unsure (1)..(132): unsure at all Xaa locations
  Clone ID: PAT_MRT3847_77033C.1.pep
KDKPLRLWELGRRPLKMCFGGGGNDNNLLWPTDLKPNAXGNYSLAGVQAISSLENQAQVLTFPSETFVGLYNGHGGPEPSRLXXXXXFSFLRKFATEEGDLSKEVIKKAFKATEEEFLLVWRKSWIARPQIA

SEQ ID NO: 260256 - protein, 196 aa, Glycine max
  Clone ID: PAT_MRT3847_77034C.1.pep
MQFHHYYYEVLSNRESARRSRRRKQAHLTELETQVSQLRSENSSLLKRFTDVSQKYNNAAVDNRVLKADVETLRTKVKMAEETVKRITGLNPMLHAITEMSSMAMPSFDESPSETSADAAVSVQEDPNHHRCQPTSNNGLGGISSIETVQQNVAAVVGGNKTGRTTSLHRVASLEHLQKRIRGGADSRGPPSNGEQ

SEQ ID NO: 260257 - protein, 214 aa, Glycine max
  Clone ID: PAT_MRT3847_77035C.1.pep
KAFILFSSGTGTNSALFNLKPNNLSFRMLSNRESARRSRRRKQAHLTELETQVSQLRSENSSLLKRFTDVSQKYNNAAVDNRVLKADVETLRTKVKMAEETVKRITGLNPMLHAITEMSSMAMPSFDESPSETSADAAVSVQEDPNHHRCQPTSNNGLGGISSIETVQQNVAAVVGGNKTGRTTSLHRVASLEHLQKRIRGGADSRGPPSNGEQ

SEQ ID NO: 260258 - protein, 460 aa, Glycine max
  unsure (1)..(460): unsure at all Xaa locations
  Clone ID: PAT_MRT3847_77036C.1.pep
MAPDASDALAVRQKVQLFLNAARTGSIDLLKKLALQLDEGKDLAKSVEAIKDANKRGALHFAAREGQTSVCEYLLTDLKLSVDSQDDDGETALIHAARQGHTATAKYLIDHGADPTVASNLGATALHHSAGIGDAELLKYLLSRGVNPDLESDAGTPLVWAAGHAQPAAVSVLLEHGANPHAETDDGITPLLSAVAAGSLACLELLIQAGAKANISGQAEHALADAKIMEVLNYDXCQKLVIGNGQLSDEDGVKLKQQVAARGYPKAVEILFPLTSKVDTIPTWTVDGILEYMQSETRKQQDESINAKETNQPKEADFPEQNVPEVAPEAKKRAAEAKSRGDGAFKRNDHHMAIDFYTQAIDLNPIDATLLSNRSLCWIKLGQAEHALADAKACRALRPDWPKACYREGAALRLLQKFDEAANAFYEGVKLDPENKELVNAFREAVEAGRKFHGTAENKS

SEQ ID NO: 260259 - protein, 334 aa, Glycine max
  unsure (1)..(334): unsure at all Xaa locations
  Clone ID: PAT_MRT3847_77037C.1.pep
RSGSRLKYLLSRGVNPDLESDSGTPLVWAAGHAQPASVSVLLEHGANPNAETDDGITPLLSAVAASSLACLELLIQAGAKVNISAGGATPLHIAADNGSLELLNCLLKAGADPNVSDEDGVKPIQVGAARGYLKAVEILFPLTSKVDTIPTWTADGILEYMQSETRKQLDESINDQETNHPKEADFPKQNVPEVAPEAQMRAXAESKSRGDEAFKRYDYHMAIDSYTQAIDLNPTDATLLSNRSLCWIKLGQAEHALADAKACRALRPDWPKACYREGAALRLLQKFDEAANAFYEGVKLDPENKELVNAFREAVEAGRKFHGTRENMLLIPRS

SEQ ID NO: 260260 - protein, 52 aa, Glycine max
  Clone ID: PAT_MRT3847_77038C.1.pep
VVGSKFCSSGREGHMCGSEVRIFNRLCLYMYLSDCYFIFSVVPFLFFLLYVL

SEQ ID NO: 260261 - protein, 77 aa, Glycine max
  unsure (1)..(77): unsure at all Xaa locations
  Clone ID: PAT_MRT3847_77039C.1.pep
VVRCKQVGLLCVQERGKNSPPMASVVLILRSAPASMSQPRDVGFCLGRNPMETDSSSSKQEESCPVNQVTVXMINLR

SEQ ID NO: 260262 - protein, 85 aa, Glycine max
  Clone ID: PAT_MRT3847_7703C.1.pep
QTFKPCFKIKQQQQQQLLFVLPLGGFLLSFSNLHTFWHVEFFATRITILILLTTSFSIETPKGGFSYFFNFPLQGWENKPSFTGG

SEQ ID NO: 260263 - protein, 130 aa, Glycine max
  Clone ID: PAT_MRT3847_77040C.1.pep
YNTPWDSTHRTFFSSFTSASSWFEVYAAFSTFMMLLRTAFHDLIPQQFRSLIVSKLESFFTKYQQNNEIRLKMNQFWDENSGDRNELFDAAQEYLPTRISHTYKSLKVGKLQDEKHIELAVDGRKTLGRI

SEQ ID NO: 260264 - protein, 63 aa, Glycine max
  Clone ID: PAT_MRT3847_77041C.1.pep
TFSNQPINDLFLFILQRELFLQVKLVPLRILFDIHAVLMDGLVLIRYVISTKHKPKLHLMLPP

SEQ ID NO: 260265 - protein, 44 aa, Glycine max
  Clone ID: PAT_MRT3847_77042C.1.pep
KGGFVPLNGPPPKGPLWVFEDLFLGPYHPVFYYANPRIGFPKPG

SEQ ID NO: 260266 - protein, 101 aa, Glycine max
  unsure (1)..(101): unsure at all Xaa locations
  Clone ID: PAT_MRT3847_77043C.1.pep
PRVRTEHEGYDPFLGGIQKYATPMMPLDEEILSKVAQDMVEEWFDCVDEEDFFEAESLRAILYGTVGLDYMHXLSDVATEGYIYVLSGYNGEIGLRRSDAG

SEQ ID NO: 260267 - protein, 126 aa, Glycine max
  unsure (1)..(126): unsure at all Xaa locations
  Clone ID: PAT_MRT3847_77044C.1.pep
SRNAIKGGAPTLVPFAPSDTPPKVKQMTCTPTASVYEGXLTDLECYHWIYLAXSGLNRSAKTDIFYEEGQISDVRSCSLLFMSKDKEPIMAERQDKXNLMYLCSPEDGQDIQGLQYERGQTYGPTY

SEQ ID NO: 260268 - protein, 89 aa, Glycine max
  Clone ID: PAT_MRT3847_77045C.1.pep
PRFYLPLMATHKQGVCFSFQGGGGTPSPSFTTLKVDNDLPWLPLSSISHTPRTFINKLPHLSMLLAAIINTFLPFFNHPIILYFKPHPP

SEQ ID NO: 260269 - protein, 35 aa, Glycine max
  unsure (1)..(35): unsure at all Xaa locations
  Clone ID: PAT_MRT3847_77046C.1.pep
SLPVDSAAVRKVDLYRASPDINFPQLXEAFGRLIR

SEQ ID NO: 260270 - protein, 123 aa, Glycine max
  unsure (1)..(123): unsure at all Xaa locations
  Clone ID: PAT_MRT3847_77047C.1.pep
ASWAIGFIKASEVKTQFMLDXLSDLQSKEQMLVEANRSLTVKLEEINSRNHYRQSWEAGDQSMPYGGGGPENSHSHQGFFQPLECNPTLHIGPDYRYNAVASDQITATTQPQQVSGFIPGWML

SEQ ID NO: 260271 - protein, 46 aa, Glycine max
  Clone ID: PAT_MRT3847_77048C.1.pep
TRIRRSKLFFTHVLDFNLATIMVALQRHALNMFRLHMHTSKQTQAS

SEQ ID NO: 260272 - protein, 616 aa, Glycine max
  Clone ID: PAT_MRT3847_77049C.1.pep
MTTTMESLIGLVNRIQRACTVLGDYGGADNNTFSSLWEALPSVAVVGGQSSGKSSVLESIVGRDFLPRGSGIVTRRPLVLQLHKLESGSQEYAEFLHLPRRKFTDFALVRQEIQDETDRVTGKTKQISPIPIHLSIYSPNVVNLTLIDLPGLTKVAIEGQPENIVQEIETMVRSYVEKPNCIILAISPANQDIATSDAIKLAKEVDPTGERTFGVLTKLDLMDKGTNALDVLEGRSYRLQHPWVGIVNRSQADINRNVDMIVARRKEREYFATSSDYGHLANKMGSEYLAKLLSQHLESVIRARIPSITSLINKSIEELESEMDHLGRPIALDAGAQLYTILELCRAFERIFKEHLDGGRPGGDRIYNVFDNQLPAALRKLPLDRHLSLQNVRKVVSEADGYQPHLIAPEQGYRRLIEGALGYFRGPAEASVDAVNFVLKELVRKSIAETKELKRFPTFQAELAAAANEALERFREESKKTTVRLVDMESSYLTVDFFRRLPQEVEKSGTPAATNIDRYAEGHFRRIASNVSSYIGLVADTLRNTIPKAVVYCQVRQAKQSLLNHFYTQIGKKEGKQLSQMLDEDPALMERRQQCAKRLELYKAARDEIDSVSWVR

SEQ ID NO: 260273 - protein, 39 aa, Glycine max
  Clone ID: PAT_MRT3847_7704C.1.pep
QKEKLIIITKYNFELTNSYRATHKIQAVRQVLTISQIYS

SEQ ID NO: 260274 - protein, 43 aa, Glycine max
  unsure (1)..(43): unsure at all Xaa locations
  Clone ID: PAT_MRT3847_77050C.1.pep
RRXTSGPXVVXXXAYKIDSNXFRKIFEIKKXCSITKQVDRLIQ

SEQ ID NO: 260275 - protein, 45 aa, Glycine max
  Clone ID: PAT_MRT3847_77051C.1.pep
ETTSCPATISVCLVLGNMMHNHLLLSHKGALWVFLIQYAANTYMI

SEQ ID NO: 260276 - protein, 73 aa, Glycine max
  unsure (1)..(73): unsure at all Xaa locations
  Clone ID: PAT_MRT3847_77052C.1.pep
DSQKQLRHEKHYRSVSSHDVAYWARXFMLDLERACKDHYTKRCWRFGLGLGFRVVSPSHGFRKLSVAHIVSPY

SEQ ID NO: 260277 - protein, 105 aa, Glycine max
  unsure (1)..(105): unsure at all Xaa locations
  Clone ID: PAT_MRT3847_77053C.1.pep
APPGPTLIRPWSDPGAGGTAHPYFGDPESKDTQIDRPSSSSVSLAKLSSEHDYCVQAQQSYGGSQRGRRPEFRDRTDLDDTVGSNDAGXSRTATSSKGATILLML

SEQ ID NO: 260278 - protein, 60 aa, Glycine max
  Clone ID: PAT_MRT3847_77054C.1.pep
ISPRPGITPKINPLRLSHKKIIEDLANLTNIHFKGLQVTLPLIGHKRNANVIMNPFINDL

SEQ ID NO: 260279 - protein, 38 aa, Glycine max
  unsure (1)..(38): unsure at all Xaa locations
  Clone ID: PAT_MRT3847_77055C.1.pep
FLLSWRPVVPXSWRLFSRVALAFXXSXCPSLPSXFLRF

SEQ ID NO: 260280 - protein, 35 aa, Glycine max
  Clone ID: PAT_MRT3847_77056C.1.pep
LRVRTSDFVSVFHCLKGGLHQWIPTDLTFVLSYYS

SEQ ID NO: 260281 - protein, 77 aa, Glycine max
  Clone ID: PAT_MRT3847_77057C.1.pep
YVQFPFYPMKAYAALLRGRAPPKEGEFGPPIQPPHKKAYHTVPPRIKARNCQRNLWIHRHRIVKMSLVPLSLHCLEL

SEQ ID NO: 260282 - protein, 91 aa, Glycine max
  unsure (1)..(91): unsure at all Xaa locations
  Clone ID: PAT_MRT3847_77058C.1.pep
MDANGNWEEDDDEEFELSRNYFQANELASSSAKTSRHQLIXFYVIDKHELRDAASKIEPNHEYEIPLLLDTYNIMXPEWICALMFCFGLLM

SEQ ID NO: 260283 - protein, 127 aa, Glycine max
  unsure (1)..(127): unsure at all Xaa locations
  Clone ID: PAT_MRT3847_77059C.1.pep
GHHATKPLPITFLXIACQYLFIGCADLFALAGLLEFLFTEAPSSIRSLESSXPXASLSDGYSLSSAIVSIVNSVSGSASHRPWLSGASLNHSRLQRISELKCVLSALNFLHNVFWAIRSKHTGTGYS

SEQ ID NO: 260284 - protein, 48 aa, Glycine max
  unsure (1)..(48): unsure at all Xaa locations
  Clone ID: PAT_MRT3847_7705C.1.pep
SCXGEVTHQLXQPRXRSSGRRVWXAMLAXYVLIXLCXNRXXRRYXRLT

SEQ ID NO: 260285 - protein, 128 aa, Glycine max
  Clone ID: PAT_MRT3847_77060C.1.pep
ARRQRRDFQRDILPGLASLSRHEVTEDLQTFGGLMKATGHAWNSGLNRRSSSRNGCGRGRRRSQAQVTPTPPPPPVATVETSTPLIQQLSNIEVVGLEDRSLAGWGKTTRRPRRQRFPAGNPPSIRLI

SEQ ID NO: 260286 - protein, 424 aa, Glycine max
  unsure (1)..(424): unsure at all Xaa locations
  Clone ID: PAT_MRT3847_77061C.1.pep
INAILSSYCFSENSGPVSSLHLFEKPTDQHTGSATESVCNWYIENIIKDVSGAGILFVPIHKCFRSTRPVGGYFAESVTDLRELQAFVRIFGGYGVDRLDRMLKEHTAALLNCIDTSLRSNRDVLEAVATSLHAGDRIEREASVKQIVDLETVIGFCVQAGLALAFDRLLAEASGAILEXGAPLIHSLLDGVIKHXPDGVPEKEEIRRMRTVANTVGVVNDHDSVWVRSILEEVGGASDGSWGLLPYLFATFMTSNIWSTTAFNVDTEGFSNNIHCLARCISAVIAGSEFVRLEREHQHRQSLTNGHASEGMDPELSSHMSAEASIKSTLAXFVKLFANIILDSWSETHRSHLVAQLIFLDQLCEISPYLPRSSLETHVPYAILRSVYSQYYADTQSTPLAILNASPRHSPAVLLAHAFSVLRH

SEQ ID NO: 260287 - protein, 56 aa, Glycine max
  Clone ID: PAT_MRT3847_77062C.1.pep
SPTRPAFNSVSPDFPVFCVTLKFLKQQIFRTLRKVILICMEFYHVIRVPIHFVKCT

SEQ ID NO: 260288 - protein, 54 aa, Glycine max
  Clone ID: PAT_MRT3847_77063C.1.pep
PRDQKIKINNLKKNCHLQHPNKKHCIPILISPGRQPKPPIPKHFPHLKKKLHLN

SEQ ID NO: 260289 - protein, 132 aa, Glycine max
  unsure (1)..(132): unsure at all Xaa locations
  Clone ID: PAT_MRT3847_77064C.1.pep
MSPGNCLGTCCALCACDACMTVVSGIPRRSARIVYCGLFDFSLAVLCILREADVPLMDSFAWADYDXHTPIREWIETGASTEVTKWNNEPITILAVLTVGVTTQRDSIDXMHHGGWMMTDICRCRLRISMCI

SEQ ID NO: 260290 - protein, 336 aa, Glycine max
  Clone ID: PAT_MRT3847_77065C.1.pep
MVIPIAVSLVVILIGLAYKAVKPPPPKICGSVGGPEVASPRVKLSDGRHLAYREFGVPKEEARYKIIVIHGYDSSKDTSLPVSQELVEDLGIYFLHFDRAGYGESDPHSLRSVKSEAYDIQELADKLEIGHKFYIIGMSMGGYPVWSCLKYIPHRLSGAALVAPFISYWWPSYPENLLREAFLMLPHSDQWTFRVSHYAPWLFYWWMTQKWFPSLTLTNLLSPDDIEIVKSLSELQNTGQERITQQGEYESLHRDIMSAFGKWEFGPTDITNPFPDNNGSVHIWQGFEDRIIPYTLNRYISHKLPWIRYHELPHAGHLFLFKKNECESIIRALVLT

SEQ ID NO: 260291 - protein, 153 aa, Glycine max
  Clone ID: PAT_MRT3847_77066C.1.pep
GSKKLQKWRGIWNKLGLVQRTERKEDRMGEEKGDSGVEVEVDKPLAESLERLRRVVNVQASEPVGQKLMRSYSVSCRSPCRTDGFTEESESKGSALNGRQEFMFQRNRSVRYSPNNPDTGLLRFYLTPTKSYKRSKAGRSSVKDLHSAARSGL

SEQ ID NO: 260292 - protein, 69 aa, Glycine max
  unsure (1)..(69): unsure at all Xaa locations
  Clone ID: PAT_MRT3847_77067C.1.pep
MVIPIAVSLVVILIGLAYKAVKPPPPKICGSVGGPEVASPRVKLSDGRHLAYREFXVPKEEARYKIIVI

SEQ ID NO: 260293 - protein, 46 aa, Glycine max
  Clone ID: PAT_MRT3847_77068C.1.pep
LNIFHAGILCALNFHCQRRILSKSFIDFLLVKVLLVLNIWQSYSKA

SEQ ID NO: 260294 - protein, 54 aa, Glycine max
  Clone ID: PAT_MRT3847_77069C.1.pep
ESFGIRRGRSLLVSSYKGYQGLMSCVGFGLSRERNGSGVHINLLEQPATYLFCF

SEQ ID NO: 260295 - protein, 284 aa, Glycine max
  unsure (1)..(284): unsure at all Xaa locations
  Clone ID: PAT_MRT3847_7706C.1.pep
FNAPLQQFEVANIKTIVEQKVPEGVNSIGLTFPGFIYVHNLFLKKGRTETLWAVLRKFEYDNDLKLRDDFLPVPSKQASDQSVELTSEAVEFLNGIFRLLDTDKDRYLRPAEVDKLFDIAPESPWNDAPYKDAAEKTDMGYISLNGFLSQWALMTLLDPKRSLANLIYIGYNGNPAEALRVTRRRSVDRKKQTTERNVFQCYVFGSKHAGKSALMYSLLGRPFSNNYTPTTVEQYAADVIELKGVTTRILILREIPDDGLXQFLSNHDWLAACDVACFVYDRSH

SEQ ID NO: 260296 - protein, 62 aa, Glycine max
  unsure (1)..(62): unsure at all Xaa locations
  Clone ID: PAT_MRT3847_77070C.1.pep
XXKPELSDVSXXPXXGLTSSLIDGRPFFYYFNYYFLNFITPQPGRGIEVAFKNNALITQYNN

SEQ ID NO: 260297 - protein, 89 aa, Glycine max
  Clone ID: PAT_MRT3847_77071C.1.pep
LLCTSCSTFLLMKLPQEYSLSGIHLETWCYEPSLAVRPQMRGVEIKIPKCLDQVLQTQWCRPIWIATVRKNAASEKTRRYNLLVHREKL

SEQ ID NO: 260298 - protein, 605 aa, Glycine max
  Clone ID: PAT_MRT3847_77072C.1.pep
MEVFKRAIIQPGPPESFALRTVQEVIKPQKQTKLAQDENQFLENILRMLLQEFVSAAVQFGEKIMQFGQSIDSSETTQGHIPRLLDIVLYLCEKEHIEGGMIFQLLEDLTEMSTMKNCKDIFGYIESKQDILGKQELFARGKLVMLRTCNQLLRRLSKANDVVFCGRILMFLAHFFPLSERSALNIKGVFNTSNETKYEKEPLEGICIDFNFYQTFWGLQEYFSNPTSISHAPAKWQKFTLSLSVVLNTFEAQPLSDEEGDANNLEEEAVNFSIKYLTSSKLMGLELKDPSFRRHVLVQCLILFDYLKAPGKGDKDLPSENMKEEITSWEERVKKLLELTPPKGTEFLHKIEHILEREKNWVWWKRDGCLPYEKQRIEKKAVPDGPKKRRPRWRLGNKELSQLWKWADQNPNALTDPQRVQTPSIMEYWKPLAEDMDPSAGIEADYHHKNNRVYCWKGLRLSARQDLEGFSKFTDHGIEGVVPLELLPPDVRSKYQAKPNDRSKRSKKEETKGTAHQIEENQIATNATEIDGDGIRTDTTATSMEFDAATAPGTQGGTTTPEELQKLSSDTDGGQEAGQLEADAEVEAGMIDGETDADVDLDTVG

SEQ ID NO: 260299 - protein, 38 aa, Glycine max
  Clone ID: PAT_MRT3847_77073C.1.pep
ILKKMKTIKNNFVRIILVVRVSFLVKKIFGSRPEFYLI

SEQ ID NO: 260300 - protein, 112 aa, Glycine max
  unsure (1)..(112): unsure at all Xaa locations
  Clone ID: PAT_MRT3847_77074C.1.pep
TTVNRAGAGMADPLTALXSMAVCPTXNTIIDFTSFASNAGRAQYMQMWPPVGYKKFETLSYLPDLDDAHLGKDGEYLLRTGWSPRXEFELEHGFLCREHNRAPEYYDGRYWT

SEQ ID NO: 260301 - protein, 254 aa, Glycine max
  unsure (1)..(254): unsure at all Xaa locations
  Clone ID: PAT_MRT3847_77075C.1.pep
VEDYITVIAHNYPYWNRTEGADHFLLSCHDWGPTISYANPXLFKNFIRVLCNANTSEGFTPNKDVYIPEVNLLPRGTLGSPNRGPHANDRTILAFLASXEHGAIRXTLLNHWKDKDNDVQIYESLPKGKVYTKLMGQSKFCLCPSGYEVASPRVVEAIYAGCVPVLISSSYSPPFTDVLNWSQFSVEIPVEKIPEIKTILQSVSPKKYLKLQMNVLRVQRHFTINRPAKPFDLMHMILHSIWLRRLNLKLVDSR

SEQ ID NO: 260302 - protein, 55 aa, Glycine max
  Clone ID: PAT_MRT3847_77076C.1.pep
STYSNPSGIFQVCPQLEKICSAYQTDAGFLGEVSQHSFQKLSLIDGHACVICGSP

SEQ ID NO: 260303 - protein, 47 aa, Glycine max
  Clone ID: PAT_MRT3847_77077C.1.pep
KNLLYTLSGRPFYSIQHYELVISSFFVFYGLKILNSLNFKLLVCNCK

SEQ ID NO: 260304 - protein, 128 aa, Glycine max
  unsure (1)..(128): unsure at all Xaa locations
  Clone ID: PAT_MRT3847_77078C.1.pep
MEPALAIGPPAQTSNHMSPHDQHILAATXSTSVKIWNYGSGKCLKIYSGHVNRVYCITSTFSVTNGKYIVGGSEDHCVYIWDLQQKLVQKLEGHTDTVISVTCHPTENKIASAGLAGDRTVRVWVQDS

SEQ ID NO: 260305 - protein, 117 aa, Glycine max
  unsure (1)..(117): unsure at all Xaa locations
  Clone ID: PAT_MRT3847_77079C.1.pep
LISQQTVWGEMSTGRTPXNFDSSKQSFCQLSIDLIGRGILVHKTGDCITLIQNSPISNLLTVARYXRKSCLMVNIVMSDNAADKRSECSSLVQVCITNIYSTEHGEACKWTNSEPHS

SEQ ID NO: 260306 - protein, 69 aa, Glycine max
  Clone ID: PAT_MRT3847_7707C.1.pep
ATSGGLNQQRTGVNLWTLEIILVKQGIVHLEVPVQKHQNSFSTYFHVPNINAHASHYKLIDIWDKYLLS

SEQ ID NO: 260307 - protein, 109 aa, Glycine max
  unsure (1)..(109): unsure at all Xaa locations
  Clone ID: PAT_MRT3847_77080C.1.pep
EPGKIDAILGRTIDPXYNEGHAHMETNMFTSFIDDVXELLKGTCSELKISESKXALCKNTFGGTILRGDLXTYFLSEGTFIARVDLQRTHRFKRTNQMGCTVGVPENTG

SEQ ID NO: 260308 - protein, 79 aa, Glycine max
  unsure (1)..(79): unsure at all Xaa locations
  Clone ID: PAT_MRT3847_77081C.1.pep
MIIIWLPQLMTSPSVTTVNRSRAGIVAPFSSLNSIAGFPIKKTNNDIXSIAINGRTIQCIQVLTPIRNTXFETLSLLPD

SEQ ID NO: 260309 - protein, 128 aa, Glycine max
  Clone ID: PAT_MRT3847_77082C.1.pep
KGKGIKTYLCFIRGNPFSAWVGPITKNNGGLRKGQPAFFRESPNFIRETKKKTPGQPKGGVGYKHYPPGLKKNIHNWGVPPGKFFIPPRIGPPEKRGVCPQWDRLRPTPQQKWGGVFFPKKLGVVSIC

SEQ ID NO: 260310 - protein, 142 aa, Glycine max
  unsure (1)..(142): unsure at all Xaa locations
  Clone ID: PAT_MRT3847_77083C.1.pep
KRWSWGGGEWRLEFLNRTGFDCEIICLTGWTATAMHDVXVTIGWFIFSHECVPRTYCVLNPQNPFVLNKWMGKLTFPQRTFRSVKRMSFFIGGGAGAKNAILMNLPNACLLMRRYFXVGDLAFEVXKMTFPSLKYSIFLIHL

SEQ ID NO: 260311 - protein, 50 aa, Glycine max
  Clone ID: PAT_MRT3847_77084C.1.pep
FCLATCTSIVSHVAACASRPPLYELISLMGSHIVWCAHLSSILYCRLIIR

SEQ ID NO: 260312 - protein, 29 aa, Glycine max
  Clone ID: PAT_MRT3847_77085C.1.pep
IPDDGEMDGDLDMSAADDEPAVKELDEMK

SEQ ID NO: 260313 - protein, 50 aa, Glycine max
  Clone ID: PAT_MRT3847_77086C.1.pep
LPYLLYAGLRLPGLLSSSFPLHDFYLLQIVSSYQSQLIFPFSSAFSKCVN

SEQ ID NO: 260314 - protein, 49 aa, Glycine max
  Clone ID: PAT_MRT3847_77087C.1.pep
LYTWATYNQFILLSYTTLILAKPLHNPPNYICNIFNFSHLEPLQKWLHF

SEQ ID NO: 260315 - protein, 439 aa, Glycine max
  unsure (1)..(439): unsure at all Xaa locations
  Clone ID: PAT_MRT3847_77088C.1.pep
GAVCCVAAKDKTIQSASPSEILHRNIRHSPTWNFRWDHRGRVAGEDTAVTWFSNSISGNDGFENKNESSYVSEDGSPLQNYQIQRNNRLQKSPISEGTARNVINSSSDQTISRNISSNVSIEQVKELAESSTVSCPYPAKLPHSLPSTSLSVSPLPSQSHPLPMSSTPSTLXVIPQDSNYSRHVSDSRILGFKTSSNFYSSEESPVAPSRTSVSAARSLGGSLDSGAWPGFSELTSTSLKERWSFDSESFGFNCERLVRSSSQFSNCSVDLQTCGVCSKLLTEKSSWGTQKIIASNDLSVVAVLICGHVYHAECLEIMTPDINKYDPACPVCTFGEKQTLKLSEKALKAEMDLKARNNKSKNRVVDSDIDDDSVVFDHFKGRGLKGKGPRIDSSSSGRSSFGKPFLRRHFSFGSKGSRSILDNHPTRKKGFFWAKSSKE

SEQ ID NO: 260316 - protein, 37 aa, Glycine max
  Clone ID: PAT_MRT3847_77089C.1.pep
KIHGEDQPFNDDGLTVQLSVVYREDKEPHRAIVDLEP

SEQ ID NO: 260317 - protein, 46 aa, Glycine max
  Clone ID: PAT_MRT3847_7708C.1.pep
LNIYLFSPITPFFSIYKIILSLHLNPSLYKPYLYYYNSIFLFPKNA

SEQ ID NO: 260318 - protein, 525 aa, Glycine max
  unsure (1)..(525): unsure at all Xaa locations
  Clone ID: PAT_MRT3847_77090C.1.pep
FGWASLVSHLRLSVLLLSVSLGNSASLQENFVQCLNLNSDRTFPFNPLIYTPKSPSFTSVLDSSGKNQRLLVPSTPKPKFIFTPTRDSHVQAAVICSKKLGIHLRVLSGGHDFEGVSYVSEXQSPFIVVDLIKLRDINVDIKSNTAWVQAGATNGELYYRIYEKSSLHGFPAGTCTSLGIGGHITGGAYGSMVRKYGLGADNVLDAKIVDANGRILDRKAMGEDLFWAIRGGGGGSFGILLWWKVKLVPVPPTVTVFTVKKTLEQGATKLLHRWQEVAPFLDENLFIRVRIQRAQSTVTTSYEGLFLGGARKLLKIMKTSFPELGVTRKDCMETSWIKSVLYIAGFPSGTPPEVLLKGKPIAKFFFKGKSDFVRKPIPETGLEGLRQRLLVEDSPLILWSPYGGRMNQFSESDTPFPYRNGTLFISLYISLWQEGEKNVAKHIDWIGNLHNYMGAYVPSFPRGQYVNYRDLDLGINTKNNTGNIQESAWGYRYFKNNFDRLVKIKTKVDPQNVFRHEQSIPPLPK

SEQ ID NO: 260319 - protein, 44 aa, Glycine max
  Clone ID: PAT_MRT3847_77091C.1.pep
RNQYSTHITDNNIYFSVFIFTIIHSLTLPELLPYTELKDIKLLC

SEQ ID NO: 260320 - protein, 87 aa, Glycine max
  unsure (1)..(87): unsure at all Xaa locations
  Clone ID: PAT_MRT3847_77092C.1.pep
DRQLRKHRDNEFVLTLDQANLQETASNHDFILVDFXARWCGYXRSLLXDYENAASTXTRQDSPVVMATGDPDEETSIDHASHSDVRG

SEQ ID NO: 260321 - protein, 145 aa, Glycine max
  Clone ID: PAT_MRT3847_77093C.1.pep
CLKKKKKKKKKKKKKKKKKKKKKKKKKKKKKKKKKREKQYKRGRPFMGSLATFRLLSSLTFFYGAPQIHFPARLLKPWGRENPWVPPIYPFGKLSLFPGGGNKQRAPPVAPSQRGATPDGKGAPPLAGALAPAGWGVSPQGPLTP

SEQ ID NO: 260322 - protein, 102 aa, Glycine max
  Clone ID: PAT_MRT3847_77094C.1.pep
MIDMWKSVLVLVFLCLSLSNGDDQEKKKPCLWEWKRLSSAYSAYRALFPSSIGLDMLKNLVTHTYARFFPPNIDEKFLEERRKGKSKRMELGKRLEKLLRKA

SEQ ID NO: 260323 - protein, 59 aa, Glycine max
  Clone ID: PAT_MRT3847_77095C.1.pep
QVITTYFLKDGNLKKFPTYPTRVNNLHHIFCFCFLFHKLLQKRNLIFTLFLVFKNLSRK

SEQ ID NO: 260324 - protein, 69 aa, Glycine max
  Clone ID: PAT_MRT3847_77096C.1.pep
DAWVVLVFLCLSLSNGDDQEKKKPCLWEWKRLSSAYSAYRALFPSSIGLDMLKNLVTHTYARFFPPNIE

SEQ ID NO: 260325 - protein, 62 aa, Glycine max
  Clone ID: PAT_MRT3847_77097C.1.pep
WSYHKTIFITRFIKLFTQKLPLGSGTSSWRRSEVRVSPAFLMSFLPAQLNDTLHMMVLHHFL

SEQ ID NO: 260326 - protein, 64 aa, Glycine max
  Clone ID: PAT_MRT3847_77098C.1.pep
ITDQELISLVIWVRHQVRGRFQAVLLCSVVSDISPAFDATGPVRLYIQGKIFIRFLGVRFGARM

SEQ ID NO: 260327 - protein, 318 aa, Glycine max
  Clone ID: PAT_MRT3847_77099C.1.pep
MRRESASTSTVFLPPTLTLIFGADVTHPHPGEDSSPSIAAVVASQDYPEITKYAGLVCAQAHRQELIQDLFKQWQDPVRGTVTGGMIKELLISFRRATGQKPQRIIFYRDGVSEGQFYQVLLFELDAIRKACASLEPNYQPPVTFVVVQKRHHTRLFASNHHDKSSFDRSGNILPGTVVDSKICHPTEFDFYLCSHAGIQGTSRPAHYHVLWDENNFTADALQTLTNNLCYTYARCTRSVSIVPPAYYAHLAAFRARFYMEPETSDSGSMTSGAVAGRGMGGGGGGGVGRSTRAPGANAAVRPLPALKENVKRVMFYC

SEQ ID NO: 260328 - protein, 59 aa, Glycine max
  Clone ID: PAT_MRT3847_7709C.1.pep
DPIMFCPYLSLGFGPPKAAIFTPIGYEKNHKFMLEGSCCNPNGGCFVDPIYDLLNWNHA

SEQ ID NO: 260329 - protein, 234 aa, Glycine max
  unsure (1)..(234): unsure at all Xaa locations
  Clone ID: PAT_MRT3847_770C.1.pep
MAKLLALSCWRSLSPRPHYPSMPKYPKGESVATVQELSESTAVLSVVGMSCAACAGSVEKAVKRLPGIREAIVDVLNNRAHVIFYPSFVNVETIREAIEDAGFEAALLTDDKKSVQVCRIQIKGMSCTSCSSTLESVLQALDGVLEARVGLATEEAQVHYNPILLTTNHILQAIQDSGFEAHLINSSQDLSKIDLLVESDITMKXIENSLQTLPRILADDITTPLNKKYDFLQT

SEQ ID NO: 260330 - protein, 54 aa, Glycine max
  Clone ID: PAT_MRT3847_77100C.1.pep
VHNTEPEGADYEPLTGNIQTTLPIENTDPQIRGEEPAFFDYPPALSWNGETWPK

SEQ ID NO: 260331 - protein, 83 aa, Glycine max
  unsure (1)..(83): unsure at all Xaa locations
  Clone ID: PAT_MRT3847_77101C.1.pep
KDCPFFVCCVYFPMSLTVVFMHFKESLMKYSINMFLSFKWAERLIEVLCQGISHFSVLSATRNNESVLITFFSFTXKDYLVKL

SEQ ID NO: 260332 - protein, 77 aa, Glycine max
  unsure (1)..(77): unsure at all Xaa locations
  Clone ID: PAT_MRT3847_77102C.1.pep
MADEVVLLDFWPSPFGMRVRIALAEKGIKYEYKEEDLRNKSPLLLQMNPVHKKIPVLIHXGKPIXDALIAGQYIEEG

SEQ ID NO: 260333 - protein, 72 aa, Glycine max
  Clone ID: PAT_MRT3847_77103C.1.pep
GSSSSRIGSSPKISPSFALWLFLLPIFVVISFLVASLSDHFGFFSGDLRRTRMQHFTARYGIREFSGEVRFR

SEQ ID NO: 260334 - protein, 114 aa, Glycine max
  Clone ID: PAT_MRT3847_77104C.1.pep
VTPSRLVQKNVLREAGVFRGAPPPGLLFCQETSPRIFGFCFSGRGPFPNNREGRSPSLSFSFFPGFFCPLIEKKSKGSLTGPRPPHICGLAKLFFVPEKDLTTSSWGRGHKNHQ

SEQ ID NO: 260335 - protein, 60 aa, Glycine max
  Clone ID: PAT_MRT3847_77105C.1.pep
HSMALICTIPPHNATTRYSYLSLSLHLLTFQKKMMMNEILKCTQDQDYSVRLKQTALVYT

SEQ ID NO: 260336 - protein, 54 aa, Glycine max
  unsure (1)..(54): unsure at all Xaa locations
  Clone ID: PAT_MRT3847_77106C.1.pep
IRNEKITCILADQNIGXAVKIAEKXRIRMQAFCPASAAQLVLGLSIPKMIDTGS

SEQ ID NO: 260337 - protein, 130 aa, Glycine max
  Clone ID: PAT_MRT3847_77107C.1.pep
KMSGFDPHLQSGDKSQYNTNSGQYYNQNQNQNQNVNISSPQSMHDRGRSRIYMREEGEGKEGKWSNNSYLSYSCPTCRRSTKSVPMSYYVTLFYKFLWLCFSLFCLLFDYKFLFNIDDRDKEQDRDRYRY

SEQ ID NO: 260338 - protein, 98 aa, Glycine max
  Clone ID: PAT_MRT3847_77108C.1.pep
LLLFFFFFLFFFFPGAIYPFWVLFLAPPPQLKPLFIGPKGLQYLFCPPQKIYFSLKTFWHPLFKQKPPQKYWTPFLSRELCGGGHKKNWVSNTLSPHC

SEQ ID NO: 260339 - protein, 83 aa, Glycine max
  Clone ID: PAT_MRT3847_77109C.1.pep
LVYQDLLTGDELLSDSFRYNEIENGMLWEAEGKWAAKGAVDVDLFLNPSAEGGKDEGFHYTPAKDAALANTFIPHEPPRFDKK

SEQ ID NO: 260340 - protein, 49 aa, Glycine max
  Clone ID: PAT_MRT3847_7710C.1.pep
LYVCLTYTSGKSNEMCGPKNGARLATLYGDWRGGVVLNCFMGILATDYV

SEQ ID NO: 260341 - protein, 115 aa, Glycine max
  Clone ID: PAT_MRT3847_77110C.1.pep
FIESGNVEEGPRRCAACVKKKRRQDSCFWKHKFLTGVQFEEEFKLLRTSNSRFYEILIIFLDTSITSILKFSTFFYFNNRSYFRILNNFFINPTRTYFLIFILVNYVFFNFLKNL

SEQ ID NO: 260342 - protein, 108 aa, Glycine max
  unsure (1)..(108): unsure at all Xaa locations
  Clone ID: PAT_MRT3847_77111C.1.pep
VPSAVLPEXXXICXXSGHAIKXXXKMAXXNPQXXLFFEDSVRNIQXGKRLGLHTVLVGRSYRVKGADYAMESIXXLKEAVPELWDADIKAQVECPGTEKLAVETSDIV

SEQ ID NO: 260343 - protein, 233 aa, Glycine max
  unsure (1)..(233): unsure at all Xaa locations
  Clone ID: PAT_MRT3847_77112C.1.pep
MAQAMASMAGLRGSSQAVLEGSLXSGSTRLNVGSGSRVASVTRAGFTVRAQQQQVSGEVQSSRRAVLSLVAAGLATGSFVQAVLADAKSIKVGPPPPPSGGLPGTLNSDEARDLQLPLKDRFFLQPLSPTEAAQRAKESAKEIVGVKKLIEKKAWPYVQNDLRLRAEYLRFDLNTVIAAKPKDEKKSLKELTGKLFQDISNLDHAAKIKSSPEAEKYYAATVSSLNDVLAKLG

SEQ ID NO: 260344 - protein, 137 aa, Glycine max
  Clone ID: PAT_MRT3847_77113C.1.pep
FCVSSTMSVTKFNAMVSGLFQLGSSYEWIVTKKAGRASEPDLLAAEERDSKAMSLQLHRGTSDSGLSELNKIKECQETVPVKKMNKIYKKELALAFLLLTAAVRSLLSAQGMHFYYLLFQGVSFLLVGLDLIGEQMN

SEQ ID NO: 260345 - protein, 76 aa, Glycine max
  Clone ID: PAT_MRT3847_77114C.1.pep
RIFLPPFNNKPPLRGGGYYSPFPLVPKISGYLFSRNLAKKRFFTPVAKRLKPFFLEGQLKNWEKNCLKQKRKGGEK

SEQ ID NO: 260346 - protein, 72 aa, Glycine max
  unsure (1)..(72): unsure at all Xaa locations
  Clone ID: PAT_MRT3847_77115C.1.pep
SEATHLEDKAKFTPTTVYTYGSPGPRYKWPTPPXPSYXYPSSPPAVYKCTSPTAPYKHQYPPPAPYKYQYPP

SEQ ID NO: 260347 - protein, 79 aa, Glycine max
  unsure (1)..(79): unsure at all Xaa locations
  Clone ID: PAT_MRT3847_77116C.1.pep
LCFIAGHTITSSDGLGKLGTGQFRARQLGFPKELKADVNGWRVGPDDKASFWSQLHYVWSNNGERQEAYLXNLVKEFRE

SEQ ID NO: 260348 - protein, 243 aa, Glycine max
  unsure (1)..(243): unsure at all Xaa locations
  Clone ID: PAT_MRT3847_77117C.1.pep
MASSLTFHWFLFLILWILVLCSHAHARFFTVDPVSDGFAAASGSKWQSILRLPTVLTGESVCEQTYGFLPCTTTVLGNLFLIIVYGFLMFKAATFLSGGSELLLEILGPGIVGGLFLPILGALPDAMLILVSGLSGSKEVAQSQVSVGMGLLAGSTTLLLTIIWGTCVIVGKCDIEGSIAIDSRDTRGFSLTGSGVSTDIWTSYAARIMXISVLPFVIVQLPQILNSTSGRHLAXLIALIVSL

SEQ ID NO: 260349 - protein, 340 aa, Glycine max
  Clone ID: PAT_MRT3847_77118C.1.pep
MWPGVSRSFNYNLAPHHDIFVVAPASSFYHHHNDVVLSDPNNNNGSNNSNNPATAHGVNVFPLLTATPCLESEGIMGNISHHRNRIQLWQEHESSPPQKQQGHMERDTCGDGGGTSTCQDCGNQAKKDCSHRRCRTCCKSRGFDCSTHVKSTWVPASRRRERQLKGVAAAGAAVGSNGATSGAKKPRLVASQTTSHTSTSSNTTPPRSFDTGCSPQDVGFKESLPSQVRAPAVFKCVRVTSVDDGGEDEYAYQAVVKIGGHVFKGFLYDQGVEDKEGYPNLSELHLSGGGGGNVTSGSDGGRNGISSSSPMVDRSHDVYAASGGGLLLGGSSNYGNHPIN

SEQ ID NO: 260350 - protein, 139 aa, Glycine max
  Clone ID: PAT_MRT3847_77119C.1.pep
DYASRPTYHNIDGRPHHTGVMPWIDHNDAYMRDEILTGSDILALAPTTEHGCISSCYDWANTMLYERYSALLDLSEKQSELLTGDSRTHCGYIESMRCIMFETYNEPAMYVAIEAVYALYAIGRTTCTELDSGDGVNHT

SEQ ID NO: 260351 - protein, 63 aa, Glycine max
  Clone ID: PAT_MRT3847_7711C.1.pep
QTPLPLELNLVISLTLREHHRTMTDMNMHLINCITVTKLVNATIYILHVICLVQIFNLSANHG

SEQ ID NO: 260352 - protein, 75 aa, Glycine max
  unsure (1)..(75): unsure at all Xaa locations
  Clone ID: PAT_MRT3847_77120C.1.pep
KGGEIFFILGPRGPKGFAGIFFCFQRAAHRGVLWVSTPPYCQPPKSGGDQNLRFLVLKKKRKNRYKQXLCPNNLS

SEQ ID NO: 260353 - protein, 115 aa, Glycine max
  Clone ID: PAT_MRT3847_77121C.1.pep
MLLANSSFSYECVKRAKAGEYLVRAWMEEIFPGLNHRILSYIIGFDSLKATSGNGNESSQTTSEDNRLRMDGLFEQKEQAIQFTREFIALYTNGPAGGGGISTGYKKETLLEKHL

SEQ ID NO: 260354 - protein, 139 aa, Glycine max
  Clone ID: PAT_MRT3847_77122C.1.pep
MKSGLKNGWPSVVRLRLRDKSVTPFCIFSKVKSAGNIPGNTPVYLNVYDLTTVNGYMYWAGIGIFHSRVEVYGVEYAFGAHDYPTSGVFEVEPRQCPGFKFRKSIFMGTTNLDPSQIREFMEQASVSHNGVHSSQPLTL

SEQ ID NO: 260355 - protein, 215 aa, Glycine max
  unsure (1)..(215): unsure at all Xaa locations
  Clone ID: PAT_MRT3847_77123C.1.pep
MVSPENSNWLFDYPLIDDVIPVGDASFSVSASAFSWPPPPANVSVEIDASLGDSDGPKDTALKKRARCDSSTASSSKACREKLRRDRLNDKFVELGSILEPGRPPKTDKAAILIDAARMVTQLRDEALKLKDSNTSLQEKIKELKAEKNELRDEKQRLKAEKEKLEMQVKSMNAQPAFLPPPPAIPAAFAPQGQAPGNKLMPFIRVPGVAMWXFM

SEQ ID NO: 260356 - protein, 228 aa, Glycine max
  Clone ID: PAT_MRT3847_77124C.1.pep
MHRFIILTILLSLALADGGSIGVNYGRIANNLPSAVKVVQLLKSQGLTRVKVYDTDPAVLRALSGSGIKVTVDLPNQQLFAAAKAPSFASSWVERNVAAYYPHTQIESIAVGNEVFVDPHNTTKFLVPAMKNIQKALTKHNLDKDIKVSSPIALSALANSYPSSAGSFRPELVEPVFKPMLDFLRETGSYLMVNVYPFFAYESNADVISLDYALFRDNPGVVDPGNGL

SEQ ID NO: 260357 - protein, 484 aa, Glycine max
  unsure (1)..(484): unsure at all Xaa locations
  Clone ID: PAT_MRT3847_77125C.1.pep
MLLKKLIINMRMYIPLTIKLKKNPKRFFFISTLQRALLPTAAYSNLSHFVYQITLSITLTHTELESYFAHIRFYIFIAIDSHFGSHSFSLPSNVLSFPSHPQYQTNQFKVHTHTQLGEENREFSEKIRRRRGIGFPGKQYLGMLEYPLIDYVIHVRYFPFFGTRIRGSLDPHPPSMGASKFIRSFGIPMAPQLKHSIDRVDARIYLPLFQTPLHKKQFSIFLSPNHTFNYSNTTLSLEGFSPKIPRARAMVSPENSNWLFDYPLIDXDVIPVGDSSFAVSAWSFSWPPXPPMSVSKLMLRLGDSDGLKNPALKKRTKSDSSTASSSKACREDSXRRDRLNDKFVELGSILEPGRPPKTDKASILIDAARMVTQLRDEALKLKDSNTSLQEKIKELKAEKNELRDEKQRLKAEKEKLEVQVKSMNAQPAFLPPPPAIPAAFAPQGQAPGNKLVPFISYPGVAMWQFMPPAAVDTSQDHVLRPPVA

SEQ ID NO: 260358 - protein, 48 aa, Glycine max
  Clone ID: PAT_MRT3847_77126C.1.pep
TLVAHASFAFTSYYQKQSRKGGSCYFGGTSYVVTQEPRYGSCEFPTGY

SEQ ID NO: 260359 - protein, 70 aa, Glycine max
  unsure (1)..(70): unsure at all Xaa locations
  Clone ID: PAT_MRT3847_77127C.1.pep
MVKSINFLQLLSLLAFVPSCHCXKKIGGYLXPQLYDGSCTSSQELVQSIDAKAVALETRMAASLLRLHFH

SEQ ID NO: 260360 - protein, 517 aa, Glycine max
  Clone ID: PAT_MRT3847_77128C.1.pep
MHRTLHPSAPQIPSNILKNTNPKTNTKRKTRASLSLSLCFSPQKQRMHRFIVLTILLSLTLADGGSIGVNYGRIANNLPSAVKVVHLLKSQGLTRVKVYDTDPAVLRALSGSGIRVTVDLPNQQLFAAAKAPSFASSWVERNVAAYYPHTQIEAIAVGNEVFVDPHNTNKVLVPAMKNIQKALTKHNLDKDIKVSSPIALSALANSYPSSAGSFRPELVEPVFKPMLDFLRETGSYLMVNVYPFFAYESNADVISLDYALFRDNPGVVDPGNGLRYYNLFDAQIDAVFSALSALKYDDVKIVVTETGWPSKGDSNEVGASVDNAAAYNGNLVRKILTAGGTPLRPKADLIVFLFALFNENQKPGPTSERNFGLFYPDERRVYNVPLTVEELKDYHDRPSAPVSGGGQQKETPAPVVSGGVSKSTTGNTWCVANPDADKVKLQAALDFACGEGGSDCGPIQRGATCYDPNTLVAHASFAFNSYYQKQSRKGGSCYFGGTSYVVTQEPRYGSCEFPTGY

SEQ ID NO: 260361 - protein, 56 aa, Glycine max
  Clone ID: PAT_MRT3847_77129C.1.pep
RHYNHGCNSDKKNMGANALPHYSAKIKCTSSFTNKYIEYVSFASSNFLYLNSYPIT

SEQ ID NO: 260362 - protein, 85 aa, Glycine max
  unsure (1)..(85): unsure at all Xaa locations
  Clone ID: PAT_MRT3847_7712C.1.pep
FTGENWSTPTRLGSRKWAPPFXYILTQQAMVAVANGTPVNRGFISNFLSDPVPGALKVCAXLRPPVDLFVPPEADFVCPELRFSH

SEQ ID NO: 260363 - protein, 68 aa, Glycine max
  Clone ID: PAT_MRT3847_77130C.1.pep
IPGLNRCCIFLHGSRKSLLPLLGMDTMSITVIQRLLLCPPGFCLIYSFMLVMYLSQIEYRMSRLFVHT

SEQ ID NO: 260364 - protein, 50 aa, Glycine max
  unsure (1)..(50): unsure at all Xaa locations
  Clone ID: PAT_MRT3847_77131C.1.pep
LNFLAFCVSRLSGVSICSSKQELVPVXLIQVALLAALPSWLPCMSSTRAA

SEQ ID NO: 260365 - protein, 54 aa, Glycine max
  unsure (1)..(54): unsure at all Xaa locations
  Clone ID: PAT_MRT3847_77132C.1.pep
IYGKMGERTFGHVLECLDTXKKEMVALKVVRGIKKYRXAGMVQIEVLHHLGKHN

SEQ ID NO: 260366 - protein, 72 aa, Glycine max
  unsure (1)..(72): unsure at all Xaa locations
  Clone ID: PAT_MRT3847_77133C.1.pep
NWFIVIILMFGLCKKLEHIIIVESIFILAPLSKGSHWWGNVGFEWERRKDPXVVVTMVVVVTMVVVVPWXWR

SEQ ID NO: 260367 - protein, 73 aa, Glycine max
  Clone ID: PAT_MRT3847_77134C.1.pep
LFLKGKSRYGILIQALEQNLTLGGTRGFFDPYEPECISRHSISCFTITFSLPSTHLLSLLSTFSFWKQHDHHE

SEQ ID NO: 260368 - protein, 100 aa, Glycine max
  Clone ID: PAT_MRT3847_77135C.1.pep
SSRYGSKWMGKEGGPQGTARRAKRVPFSLGGGAGAENALLKNVPKAVVAMAIDFEGHLGIVVIHMTSSYIKRTVSHYIITAKMVDDTINYDAVDHKLMQL

SEQ ID NO: 260369 - protein, 196 aa, Glycine max
  Clone ID: PAT_MRT3847_77136C.1.pep
MSQLGAVLRTQREPRRSTILGLLTEQMDGVDSGTRRRRSFKERFGFIGMGCCGATWGFRSDALSVTQGEQQQQETDPECVGPAGLGSGMNLAAALAAERQLRGPQEEAVRAPGTPWRVSLMRLLEETEAEKEKEKEKEENVVGNDSVCCVCMGRKKGAAFIPCGHTFCRVCSRELWLNRGSCPLCNRSILEILDIF

SEQ ID NO: 260370 - protein, 43 aa, Glycine max
  Clone ID: PAT_MRT3847_77137C.1.pep
MHPDDMPILQAISIVLNRHPELRQQGLAHEVLQWYICRMEAWF

SEQ ID NO: 260371 - protein, 63 aa, Glycine max
  Clone ID: PAT_MRT3847_77138C.1.pep
IRKRFIQERCLSHWEKCCSSIHRHDDVKIALTSEYLILCQLHLTLQFQGVYYRYIHQLLMTTS

SEQ ID NO: 260372 - protein, 194 aa, Glycine max
  Clone ID: PAT_MRT3847_77139C.1.pep
SVPYAVCLDRTCTVAVEGFCHEFCTQCALYLCSTNSTSTTTTGPPGSIACPLCRHGIVSFVKLPDARPLHKEMQRTSNLSLTFCTCSSEVLGDSSDMTTPFCKPTSRGSKNSSPSRSFRSISCQGFPSFRMNPSLCLGADVSPSLVPCTVGRNVRNHLARCSGSSFRRSSSQTERRKSSWFCSLNQSVDTGSGC

SEQ ID NO: 260373 - protein, 75 aa, Glycine max
  Clone ID: PAT_MRT3847_7713C.1.pep
FSFVYIHYGAHLFVIITITKREKKSLPLRRTILGAWQCHAYDTLPNQMNTGYGPLSPEVKCACWRLAEEAHNRGG

SEQ ID NO: 260374 - protein, 120 aa, Glycine max
  unsure (1)..(120): unsure at all Xaa locations
  Clone ID: PAT_MRT3847_77140C.1.pep
SFFDPIFKDLKEETEPFSIFHFXVLKVLREKLNWFLTILVEKAKWISKSIIEGILRSIFKRILSLTKVKQFXKWLFIKLKFIRIDELSDYKEDXTFIRINPMISETTISIQSLNSVNGSL

SEQ ID NO: 260375 - protein, 159 aa, Glycine max
  unsure (1)..(159): unsure at all Xaa locations
  Clone ID: PAT_MRT3847_77141C.1.pep
NNHNRPPGSIACPLCRHGIXVSFVKLPDARPLHKEMQRTSNLSLTLCTCSSEVLGDSSDMTTPFCKPTSSRGSKSSSPSRSFRSMSCQGFPSFRMNPSLCLGADVSPSLVPCTVSRNVRNHLARCSGSTFRRSSSQTERRKSSWFXSLNQSVATGGNRC

SEQ ID NO: 260376 - protein, 59 aa, Glycine max
  Clone ID: PAT_MRT3847_77142C.1.pep
LIYRYRMQADPFSNKRLEHLQNEDDGKPDTNTVTSLLADHHKDYGLSHTHTGLRKEPDA

SEQ ID NO: 260377 - protein, 49 aa, Glycine max
  Clone ID: PAT_MRT3847_77143C.1.pep
SRSLLRMWAVQSNMLCVYTLWAIGGSRCRFFFRLNEFGCLQDVKLVDQY

SEQ ID NO: 260378 - protein, 69 aa, Glycine max
  unsure (1)..(69): unsure at all Xaa locations
  Clone ID: PAT_MRT3847_77144C.1.pep
KMGRXREEPKGRLKRFVFSQTLQRMEXXPRRPXXPTRXXQRVCNKSXPLXHXXGPKXPGGFTVTEWRWR

SEQ ID NO: 260379 - protein, 142 aa, Glycine max
  Clone ID: PAT_MRT3847_77145C.1.pep
VDDALSVNNANAGSAVSRRWLLLSKLKQGLTKQKEGEGRGWNMGNEEKERENQEKHCGRKRRVGPVDHGLVLSALSRALEVTELAYLDMTDKLLDTNPELALMGSCLMVALMRDEDVYVMNVGDSRAIVAHYEPKEGDSSVE

SEQ ID NO: 260380 - protein, 96 aa, Glycine max
  unsure (1)..(96): unsure at all Xaa locations
  Clone ID: PAT_MRT3847_77146C.1.pep
NKKXDKKGPGENKRPGNPKHPKTKRPHHTQPGQEEGIRVPITTPLDKTGKRRYSQQPPPWANRRKPPRETHPPDQGDSPQGAAAPGGPCNQTTXPT

SEQ ID NO: 260381 - protein, 81 aa, Glycine max
  Clone ID: PAT_MRT3847_77147C.1.pep
SCDCLQDFRSTLTLSIRPQHIPWPTDAADAGLRRDLLRSDPCMDVHGWGTNDIRVLLTRVAANVCLCFLIHELGLLGQANE

SEQ ID NO: 260382 - protein, 126 aa, Glycine max
  Clone ID: PAT_MRT3847_77148C.1.pep
VCHVTVTLLFYNKYAVRAGVRVPFVPCPEALNFDPIQSRSRSRSLVQEPGSRGVNESPADLIISISDDGRRGFWFKLEEEKGSCSRRIRIPRNTYRAVLELYVSFHGNDEFWYSNPPNSYITANGL

SEQ ID NO: 260383 - protein, 170 aa, Glycine max
  Clone ID: PAT_MRT3847_77149C.1.pep
PRVRYGPMESVMGAGAKPYANWAAKMAVATGAGVPWVMCKQDDAPDPVINTCNGFYCDYFSPNSNSKPTMWTEAWTGWFTAFGGAVPHRPVEDMAFAVARFIQKGGSFVNYYMYHGGTNFDRTSGGPFIATSYDYDAPIDEYGLLRQPKWGHLRDLHKAIKQAEPALVSG

SEQ ID NO: 260384 - protein, 147 aa, Glycine max
  Clone ID: PAT_MRT3847_7714C.1.pep
KKCEGGISLRPPKKNFKVGFSKQTFHQKVGNPMNPFFGPFLDKNFFKMLKRFLNVSRLSVFRDRFFKPPPLMDDFFVLPVLYIPPLIYANCLQDPILVPKNNLIFSNKIFMFLFPLVGWFPKKKSPPVFFPREIKPQKKKTPSIFFL

SEQ ID NO: 260385 - protein, 42 aa, Glycine max
  Clone ID: PAT_MRT3847_77150C.1.pep
MFRIFSVFRTVNSEGSIGRHRLMWECKPPCMSETVARECRFE

SEQ ID NO: 260386 - protein, 92 aa, Glycine max
  Clone ID: PAT_MRT3847_77151C.1.pep
PRPAARNSARVMILFHVRKRTNYSGMSSQLGPGIFRLFNRSYVCLVKAHMAWLQMNMLTCQMQCPTRVTPCNMEAGDCTKPLPSGWTAYRTY

SEQ ID NO: 260387 - protein, 419 aa, Glycine max
  Clone ID: PAT_MRT3847_77152C.1.pep
MALILHATKANKNAFKTLIAAEYSGVQVELAPNFEMGVSNRTPEFLKMNPIGKVPVLETPDGPVFESNAIARYVARLKGDNALFSSSAIDNAHIDQWIDFSSLEIDANIMKLYLPRLGFAPYLPPVEEGANSALKRAFEALNTHLASNTYLVGHSVTLADIITTCNLYLGFSQLLVKSFTSEFPHVERYFWTLVNQPNFRKILGQVKQTESVPPIPSAAKKPSQPKESKPKPKDEPKKAAKPEPKQEAEPEEEAPKPKPKNPLDLLPPSKMILDDWKRLYSNTKTNFREVAIKGFWDMYDPEGYSLWFCDYKYNDENTVSFVTLNKVGGFLQRMDLARKYAFGKMLVIGSQAPFKVKGLWLFRGQEIPKFVIDECYDMELYDWTKVDISDETQKERVNQMIEDFEPFEGESLLDAKCFK

SEQ ID NO: 260388 - protein, 468 aa, Glycine max
  Clone ID: PAT_MRT3847_77153C.1.pep
MKTRLGPALLGFRQSYKIPNSFPLCRFLLHRRRGRVAAKPSHPLTCLVQDMALILHATKTNKNAFKTLIAAEYSGVQVELAPNFEMGVSNKTPEFLKMNPIGKVPVLETPDGPVFESNAIARYVARLKGDNALFSSSAIDNAHIDQWIDFSSLEIDANLMKLLLPRLGFAPYLPPVEEGANSALKRAFEALNTHLASNTYLVGHSVTLADIITTCNLYLGFSQLLVKSFTSEFPHVERYFWTLVNQPNFRKILGQVKQTEAVPPIPSAKKPSQSKESKPKPKDEPKKVAKPEPKEVAEPEEEAPKPKPKNPLDLLPPSKMILDEWKRLYSNTKTNFREVAIKGFWDMYDPEGYSLWFCDYKYNDENSVSFVTLNKVGGFLQRMDLARKYAFGKMLVIGSQAPFKVKGLWLFRGQEIPQFVIDECYDMELYDWTKVDISDETQKERVNQMIEDYEPFEGEPLLDAKCFK

SEQ ID NO: 260389 - protein, 83 aa, Glycine max
  unsure (1)..(83): unsure at all Xaa locations
  Clone ID: PAT_MRT3847_77154C.1.pep
KNRADRTRTAVKPNLLYDFLCKPNDIHALYTTPWEERVKNHXNHTVHATHHIAXSCIHASRKCFFFYFSHIKFNTIISISSFY

SEQ ID NO: 260390 - protein, 127 aa, Glycine max
  unsure (1)..(127): unsure at all Xaa locations
  Clone ID: PAT_MRT3847_77155C.1.pep
IAASFLDLLLTFPTVFGADHEDGDTTGWXSPGNYNTCATAKTFTAGDTLVLKYDSTHQVDEIDESAYYNCSLRNSIKNYQDGNSKIELTSPHKRYFLSTISCHCGAGMTQHRREAAASDDHNRLLEG

SEQ ID NO: 260391 - protein, 128 aa, Glycine max
  Clone ID: PAT_MRT3847_77156C.1.pep
MATDARDSRRKYRRSSSPEDVDRSSKRHKHRHHSHRHRHGSKKRDEEIKFDDRTIGAVPSPTPHGHLPDDDDVEEGEILEDEALDGEVGKKETESDAEPGEIKVTGDRDVRSDNQNSGHLTKISVTRN

SEQ ID NO: 260392 - protein, 65 aa, Glycine max
  Clone ID: PAT_MRT3847_77157C.1.pep
FEYPSAANPTIKIYNTDRAVSGPIPSVIANMLGDTGSDVPLIISLTGIAGQSFACSLTPGRTPRI

SEQ ID NO: 260393 - protein, 105 aa, Glycine max
  unsure (1)..(105): unsure at all Xaa locations
  Clone ID: PAT_MRT3847_77158C.1.pep
MKIFSGWHRFVFXFPLIFLLTHLFSVRELHTNSKMEEPRKQLNKKLDHLVLGPAAGQGLSNRLQCQGTKSLNRIHSSNSRSGADGSITFVTVFTIYNSSLNEGDD

SEQ ID NO: 260394 - protein, 201 aa, Glycine max
  Clone ID: PAT_MRT3847_77159C.1.pep
MSTINEDDIVDESNCSETKLVEEEEEDLQKLLVPDLQNLPLTPASAVETNFAIYFALDFMKPAHDQYVYRHANGLCVIGLAPSHIAFNDEGGITAVDFNVGKSDRSGIKVTGKRKKNAQHFESNTALCKISTKNDTYIVRCCVKGSLLEINQQLIKQPELLNVSAGREGYIAIIMPKPADWLKVKASLVSLQEYKKSREVN

SEQ ID NO: 260395 - protein, 83 aa, Glycine max
  unsure (1)..(83): unsure at all Xaa locations
  Clone ID: PAT_MRT3847_7715C.1.pep
KNGFPVCRAGDPPKGDQPLIVFPGGEAPGTPVAMKTMKPLXKKKGKPIRGDAKKVPTKPKPLEIGGWVKTSFFFGTLWERFLP

SEQ ID NO: 260396 - protein, 102 aa, Glycine max
  Clone ID: PAT_MRT3847_77160C.1.pep
KVGPFVFFQSKPINGAPSSSSPHEGWRPLDFLIWKLPPWAPPPNSAWKNFFQKSSLMPSLNELNVGEDFFIMPQNGIVNVSQNPKKIKINGGFDLLMTLSMF

SEQ ID NO: 260397 - protein, 51 aa, Glycine max
  Clone ID: PAT_MRT3847_77161C.1.pep
NPISITWECGSLTSPICAPLCFTSHSYVGLTAPLRSFNFSSPQTAKIPRSQ

SEQ ID NO: 260398 - protein, 63 aa, Glycine max
  unsure (1)..(63): unsure at all Xaa locations
  Clone ID: PAT_MRT3847_77162C.1.pep
MNKDTSALALSSMYIKVDAPSKRKHGVWIDGXYLXSLMTFQQMLIYTGENDEYFPVIGITKFS

SEQ ID NO: 260399 - protein, 58 aa, Glycine max
  Clone ID: PAT_MRT3847_77163C.1.pep
RVRRCQPFDSMFSDFSGTNQGGLAVTMVVFSHIPNQWSFTMLTLFYVSTFNHLSSCYC

SEQ ID NO: 260400 - protein, 53 aa, Glycine max
  Clone ID: PAT_MRT3847_77164C.1.pep
LHLWVAYRSSFQGTKSKLLPHVRKATCFRIENAHTLRPIVVLMIIYASSLTVF

SEQ ID NO: 260401 - protein, 97 aa, Glycine max
  Clone ID: PAT_MRT3847_77165C.1.pep
MASIKLLSEAVRSSLRSGIFLVDFTRVVEELVFNSLDARATKGETEKLKVSVFVSTGSCYLKVVDDGSGIPRDGMEMVGERYGVHFIVVVSFFFLPC

SEQ ID NO: 260402 - protein, 114 aa, Glycine max
  unsure (1)..(114): unsure at all Xaa locations
  Clone ID: PAT_MRT3847_77166C.1.pep
MSHFKGIHHDELINNAGYIDTPEEGILAADEATGTIDKQFGQHHKQRTLNPHRRALRERFLTAAGALQYLNGVILFXERTLYQSTAAGPASVNGVKEASVLAGVTDDKGTGQLA

SEQ ID NO: 260403 - protein, 128 aa, Glycine max
  Clone ID: PAT_MRT3847_77167C.1.pep
YGTTIKQVSWNWQWRRQLFVWEHELLNELEEILQGACVVFVEQDSWIWLLDPISGFSVAATYKLVQNALAQEHNPTQHGSTYNKLWDCMAPSKVTIHGLALTQQQTSNSGPAAKKEYSNSGSTFTMLF

SEQ ID NO: 260404 - protein, 69 aa, Glycine max
  Clone ID: PAT_MRT3847_77168C.1.pep
ILLNYFIMQPKQLLSLIQHIRIDFIVSTHYEYGIDKYIFFNILESVINEIITPLHSILLITIYKHTRCF

SEQ ID NO: 260405 - protein, 130 aa, Glycine max
  Clone ID: PAT_MRT3847_77169C.1.pep
SSSSSYGKGMYVIPFTLLLASVQIKYTEAVTNPFLSTPAMPLLIASITCHGLASMADTNLRAPFIIFHLSGIVGCEVLIWVILTDIFWYCMVNMLASLVAFLCFFNNHIPNIFADHEMPIIEMQPPKEEV

SEQ ID NO: 260406 - protein, 437 aa, Glycine max
  Clone ID: PAT_MRT3847_7716C.1.pep
MLRSLARAAATNHRWHHNHATFSSLGHSSRPPKPTPPFKPDPKKPTAAAAVALFDDQERRRQLDADDKNPSLDVGPKGRPLFSAVPSLSHLSRNDVCTYFKLTKDALNKVLPEGLPMGMVDEFQDSLRTALLVRQSFLDLRDNFRRVVDPPMWSSNGKGVKVRKQVVLDGPVSCGKSIVLAMLVQWAREEGWLVLYVPKGKDWTHGGFFYKHPQTGLWDTPVQAENVLKDFLKYNESYLKEMPCQIFDPILLGEGAGVGWLKDVDSLAIPEGTNLYELVKAGIEQTHAAVGVVVRLRKELSLVKDRPVLIAVDQYNNWFTFSEYEEPVTIRSCRPIHARELTMVKAFRSMVHDDMMVGAFSHSTAVGKLRKDLPDVPVDSRVMFPRYSLDEAETVCHYYLRQRLIRREAFSEENWKKIYFLSNGNGTEIRGLVPFMR

SEQ ID NO: 260407 - protein, 58 aa, Glycine max
  unsure (1)..(58): unsure at all Xaa locations
  Clone ID: PAT_MRT3847_77170C.1.pep
NHTNFGVLEEASFESQIIEICFHWWNEFSVFLYAXKTHQXXFXNXCMXALLAXCXCPI

SEQ ID NO: 260408 - protein, 182 aa, Glycine max
  unsure (1)..(182): unsure at all Xaa locations
  Clone ID: PAT_MRT3847_77171C.1.pep
KRGNFTEHEEKMIIHLQALLGNRWAAIASYLPQRTDNDIKNYWNTHLKKKLKQSGSDEGVDQEGHSSSSSSNSHPKGQWERRLQTDIQMAKKALCDALSLHKPATATATNLVVPDDATKPSSTSHQPYKHASSSYASSYENISRXMENWMKSPNSNSTNNSPGYYSSSFSNMVNNNTTTGSS

SEQ ID NO: 260409 - protein, 118 aa, Glycine max
  unsure (1)..(118): unsure at all Xaa locations
  Clone ID: PAT_MRT3847_77172C.1.pep
ETHPCEIDRTQCVCYAISDDQTDITXGKGSDDFLFQAPXDAGTTYSSMSSSQYLSTGLRXPLDNKMDGLYIDPAFMDKLVGHISKNXLTLTNIXVPLILGIXWGRKGKGKFFQCELCL

SEQ ID NO: 260410 - protein, 81 aa, Glycine max
  Clone ID: PAT_MRT3847_77173C.1.pep
IVLYCPRKGRPLLLTPHQGCNKHHVGSRFIVLTPLVIYKLMPLNHSNGPVCLLRHYKLPCLSVFRQLVIGIYFLLFILSRR

SEQ ID NO: 260411 - protein, 107 aa, Glycine max
  Clone ID: PAT_MRT3847_77174C.1.pep
LIIKLFYSKKLRWTSLVVLGIYCGSLLYIIGLILCTWLYGAPSVSDFLLIFFVAFLPLRSCTTLPATTSTSSSSSPTIKTTVYTYIVNGENCLFMLYSRFRSLGFHI

SEQ ID NO: 260412 - protein, 291 aa, Glycine max
  Clone ID: PAT_MRT3847_77175C.1.pep
MDPSAALLFNHLKGADPFFLLAGPNVIESEEHILRMAKNIKTIASEVGIPLVFKSSFDKANRTSSKSFRGPGMVEGLKILEKVKIAYDIPIVTDVHESIQCEAVGRVADIIQIPAFLCRQTDLLVAAAKTGKIINIKKGQFCAPSVMTNSAEKVRLAGNPNVMVCERGTMFGYNDLIVDPRNLEWMREANCPIVADITHSLQQPAGKKLDGGGVASGGLRELIPCIARTAVAVGVDGIFMEVHDDPLKAPVDGPTQWPLRHFKELLEELVAIARISKGKQRFNIDLTPFRE

SEQ ID NO: 260413 - protein, 245 aa, Glycine max
  Clone ID: PAT_MRT3847_77176C.1.pep
LIIYDFVPNGCLANVRYRKVGSSPSHLPWEIRLKIAKGVARGLTYLHEKKHVHGNLKPSNILLGNDMEPKIGDFGLERIVTGDTSYNAGGSARIFGSKRSTASRDSFQDMTFGPSPSPSPSSISGVSPYHAPESLRNLKPHPKWDVYSFGVMFLELLTGKIVVLDDMGQGPGLLVEDKNRALRMVDMVIRADMEGREEALLAYFKLGYSCVSSIPQKRPPMKEALQVLEKISSSFSSSSSYHYSV

SEQ ID NO: 260414 - protein, 156 aa, Glycine max
  Clone ID: PAT_MRT3847_77177C.1.pep
MDPSAALLFNHLKGADPFFLLAGPNVIESEEHILRMAKNIKSVASEVGIPLVFKSSFDKANRTSSKSFRGPGMAEGLKILEKVKIAYDIPIVTDVHETIHCEAVGRVADIIQIPAFLCRQTDLLVAAAKTGKIINIKKGPLCAPSVMTNSPEKVRL

SEQ ID NO: 260415 - protein, 50 aa, Glycine max
  Clone ID: PAT_MRT3847_77178C.1.pep
DNFIKHIASNLSFAVEKKTLTLFEQYQLRISTTIADLLQESVSLLLTFLP

SEQ ID NO: 260416 - protein, 43 aa, Glycine max
  unsure (1)..(43): unsure at all Xaa locations
  Clone ID: PAT_MRT3847_77179C.1.pep
YYPSSXXSXTFLTLSLNFDYQLHKXWYDGHCLKKLQKKLXKYC

SEQ ID NO: 260417 - protein, 67 aa, Glycine max
  Clone ID: PAT_MRT3847_7717C.1.pep
IGEGDFRIDEAGAEAEPLLKILTREDEEQEAGLVPDSSPVIHELMVSESLLKIVSIVVMGGVCKTTL

SEQ ID NO: 260418 - protein, 48 aa, Glycine max
  Clone ID: PAT_MRT3847_77180C.1.pep
SSITNQQTYAALNVLAQTSTDSEGIHTEDCGTDADIHAHEYNPEENRG

SEQ ID NO: 260419 - protein, 99 aa, Glycine max
  unsure (1)..(99): unsure at all Xaa locations
  Clone ID: PAT_MRT3847_77181C.1.pep
SXDARAXXXESXLXXGXXXXLXIANENXCSLXPHVXXLXPXEIXHRHXXXRXXXHMPLLVIIRAITSXCIXNXIXPICLXNHKDLGPGXXXKHLSWNXV

SEQ ID NO: 260420 - protein, 43 aa, Glycine max
  unsure (1)..(43): unsure at all Xaa locations
  Clone ID: PAT_MRT3847_77182C.1.pep
NTKFTIALINQKLKETLITTSHIEXVKDEKEPITFNPTSLLSN

SEQ ID NO: 260421 - protein, 81 aa, Glycine max
  Clone ID: PAT_MRT3847_77183C.1.pep
HHRYIFETKEVKKTESKGKKDKEGKSENVPEQKTIARLQECGPRFTLKLISLQHGTFDTKGGEYEWVHKPEMDTSRRRFFL

SEQ ID NO: 260422 - protein, 75 aa, Glycine max
  Clone ID: PAT_MRT3847_77184C.1.pep
PLSIKPHILIHPYYLNSQGRAFSFTQPLFLSPSLILLLLLIALSASSIPPTCFSHKVFDSQSTHAMNNPPHAKKS

SEQ ID NO: 260423 - protein, 94 aa, Glycine max
  Clone ID: PAT_MRT3847_77185C.1.pep
FSPPVLLLAKEFSDFVYPPRALPLFSLGPERPRSFLPGGHRFFGGPAARPWEEPLYPPNWAPPLFAPPNSSRKPFIEWVSRNRSVFTKNPGFRF

SEQ ID NO: 260424 - protein, 97 aa, Glycine max
  unsure (1)..(97): unsure at all Xaa locations
  Clone ID: PAT_MRT3847_77186C.1.pep
EELKYDNYNNKISSRIIKWNGAATGRVVEALQDQSLCRWNDALRLSXHQFKNQVGSLCKGNMTSYTAMISTTLKHAKANQLEELFRTAMYLSWWGPN

SEQ ID NO: 260425 - protein, 92 aa, Glycine max
  unsure (1)..(92): unsure at all Xaa locations
  Clone ID: PAT_MRT3847_77187C.1.pep
IRFLGNFYPLGRGGFKPFPKFXNVRGPLPEKSWPTLRAHKNVRGIFKPAHFPFWPKMGPTLLFPSGYFRVGLPGPPPKPPNPGNFSFFSWEL

SEQ ID NO: 260426 - protein, 805 aa, Glycine max
  Clone ID: PAT_MRT3847_77188C.1.pep
GSWYTSDGNPDLLSSNVADIKLQSSSAPAQPLGFHGYVLTGKLKSPKLWSAEKPYLYTLVVVLKDRSGRIVDCESCPVGFRKVSKAHKQLLVNGHAVVIRGVNRHEHHPQVGKANIESCMIKDLVLMKQNNINAVRNSHYPQHPRWYELCDLFGMYMIDEANIETHHFDYSKHLKHPTMEPKWATSMLDRVIGMVERDKNHTCIISWSLGNESGFGTNHFALAGWIRGRDSSRVLHYEGGGSRTPCTDIVCPMYMRVWDMVKIANDPTETRPLILCEYSHAMGNSNGNLHIYWEAIDNTFGLQGGFIWDWVDQALVKVYEDGTKHWAYGGEFGDVPNDLNFCLNGLTFPDRTPHPVLHEVKYLYQPIKVALKEGKLEIKNTHFFQTTEGLEFSWSISADGYNLGSGLLGLVPIKPQSSHAVDWQSGPWYSLWASTDEEELFLTITAKLLNSTRWVEAGHIVSSAQVQLPTRRNIAPHVIDINGGTLVAETLGDTIVVKQQDAWDLTLNTKTGLVESWKVKGVHVMKKGILPCFWRAPIDNDKGGGSASYLSRWKAAGMDCLHFITESCSVQNITENSVRILVVFLGVTKGEDGSLSNQDKSKVLFTTEMAYTIYASGDVIIECNVKPNPDLPPLPRVGIELNVEKSLDQVTWYGRGPFECYPDRKAAALVAVYEHNVSELHVPYIVPGESSGRADVRWATFRNKDAFGIYASKYGSSPPMQMSASYYSTSELDRATHNEELIEGDSIEIHLDHKHMGLGGDDSWSPCVHEQYLIPPVPYSFSVRLCPVNPATSGHDIYKSQFQNS

SEQ ID NO: 260427 - protein, 103 aa, Glycine max
  unsure (1)..(103): unsure at all Xaa locations
  Clone ID: PAT_MRT3847_77189C.1.pep
MGITAFNGTGFGYGFCIGCEFGIGWGFGGMPLNSVGLGAGRCCRVGLGLGXSFGAAFGSKYRSLRVTFTGVDCDMKEQVISTVMCIPGSQVTRLRARLDNVEL

SEQ ID NO: 260428 - protein, 129 aa, Glycine max
  Clone ID: PAT_MRT3847_7718C.1.pep
IFSLWALSPLRLGGLNFTTDDVGNVLAISGLAILVFQLTLYRLVQKACGPVAQVRIAGVLSILLLQCYPLMTMLSSFTLDIVINIASILKNGLIGAFSTSLFILQNKATVIFWFIPSDVIYFPYFRYIF

SEQ ID NO: 260429 - protein, 213 aa, Glycine max
  unsure (1)..(213): unsure at all Xaa locations
  Clone ID: PAT_MRT3847_77190C.1.pep
GNKLSGIIPRWVLANNENIDISDNNFSWDSSSPTECQRGSVNLVESYSSSVNTQTKINSCLKKNFLCTASPSQYRYSLNINCGGNEANVSGNIYEADREQKGAAMLYYTSQDWALSSTGNFMDNDIDSDPYIVANTSRLNVSALNSKLYTXXARVSPLALTXYGLCLINGNYTVKLHFAEIIFINDRSLNSLGRRDFDVYIXGNLVLKDXDIR

SEQ ID NO: 260430 - protein, 51 aa, Glycine max
  Clone ID: PAT_MRT3847_77191C.1.pep
LTIKRGLGRAQFLFNKSMVIYFQKKKCERNTLLIFLGFPWKVLGSVSSFVP

SEQ ID NO: 260431 - protein, 101 aa, Glycine max
  unsure (1)..(101): unsure at all Xaa locations
  Clone ID: PAT_MRT3847_77192C.1.pep
RXXAYVXLXIXLXXDXRXXALXXAKMXXXLCFXRXXNCSXXRQXCKXXXPNIXXXXSXXRGGXXXRXHXXXCLRRSRYIXPYHXQWXGWEAYTLFAXEXLX

SEQ ID NO: 260432 - protein, 68 aa, Glycine max
  Clone ID: PAT_MRT3847_77193C.1.pep
YKADSATVLFKSLKNKVHFSIFQRRVISCIFHHHGRPFLCLMLEALQHFVFYTKKQFVPYSIMPLGCP

SEQ ID NO: 260433 - protein, 126 aa, Glycine max
  unsure (1)..(126): unsure at all Xaa locations
  Clone ID: PAT_MRT3847_77194C.1.pep
REIQDKEGIPPDQQRLIFXGKQLEDGRTLSDYNIQKESTLHLVLRLRGGMQIFVKTLTGKTITLEVESSDTIDNVKSKIQDKEGIPPDQQRLIFAGKQLEDGRTLSDYNIQKESTLHLVLRLRGGQ

SEQ ID NO: 260434 - protein, 74 aa, Glycine max
  Clone ID: PAT_MRT3847_77195C.1.pep
SVKEHYGERVRSLFYDYGYGAGHAAACCDVNPMVLRQTNHGTWGRAIETPVPWMSLGQRLAHTHYRLRRHVAYA

SEQ ID NO: 260435 - protein, 238 aa, Glycine max
  Clone ID: PAT_MRT3847_77196C.1.pep
NAEAELESQLLLVAMDAVATAKPLLSLSFLLLLPSFLPIAVAYRPGDIVPMSRMGQYHSSRTVWQDLIGRHCPIFAVNREVLMPIPKPTGYTGADAYKISFQVGREKFLIPWLLVVNRKSTEVPMIEVDLRYSGSDLHGVTAKVVDMPHHYVEVHPEIRKQFWDSQHWPKHILVRYTWKEHSEIDVTSGFFVLFGSGLMLSFILSIYVLQSSRDKLERFVRETVVESSVPGEVVAKVE

SEQ ID NO: 260436 - protein, 66 aa, Glycine max
  Clone ID: PAT_MRT3847_77197C.1.pep
SCSVSDVLPAARPSFVAIALESSNSCLRATACRVRKCGSLSHQICSLIMPSVTLAECMSKKDRFTN

SEQ ID NO: 260437 - protein, 41 aa, Glycine max
  Clone ID: PAT_MRT3847_77198C.1.pep
KINITLYADKIQDRGLGEYSAREPDVTRLRPRAALVEAVSE

SEQ ID NO: 260438 - protein, 50 aa, Glycine max
  Clone ID: PAT_MRT3847_77199C.1.pep
SLLEPYTDYIINNYDLKDLNSAADIYLSTRSSDMVIAKQAIWVAYLYDPH

SEQ ID NO: 260439 - protein, 57 aa, Glycine max
  Clone ID: PAT_MRT3847_7719C.1.pep
CESNKTMLSEHISDDIYLKLLDELIRHLVRKTGSNFNAAVLKRLVMSKVSIAHAIPL

SEQ ID NO: 260440 - protein, 79 aa, Glycine max
  Clone ID: PAT_MRT3847_771C.1.pep
IQQCYKYSRWRSWWVALTWSVWQLRNKIIFSSGTFNGNKLMEDSLFLLWTWLRNYEKDFISHYNQWSSNLREAFIFRQG

SEQ ID NO: 260441 - protein, 67 aa, Glycine max
  Clone ID: PAT_MRT3847_77200C.1.pep
LFLQFDEQRDQVAIEQILRVIFLDPEKPSPVLDKLKRMLAEADAALEARKKPLEEKGPCVAGEGLVI

SEQ ID NO: 260442 - protein, 75 aa, Glycine max
  Clone ID: PAT_MRT3847_77201C.1.pep
AKNESDPRGIQSTFSRNKRQKCSYMNGNHLFSIRPILKPKKGISNPTFPKNRRPKMLKKIGNNWFPSRPNLQAKE

SEQ ID NO: 260443 - protein, 208 aa, Glycine max
  Clone ID: PAT_MRT3847_77202C.1.pep
MKNNFRLIRTEKTRISSPTQGIRETESTMAPEWTDEKHSMYIKSIEASFVNQLYDSKQMKTSYDPATTSGQFKVLRGGCWQKINFERVNPQTSRINQCHDLMENPWIQHYRFSSKQRSIVAPSLQESVTTTSNVVDLGQRKGVPSGSGHLHLCESRICHKDMLCSDTEMSDQNFVDEEVKGKKQNKKSKVKRQRSLISDAQSNDQGTK

SEQ ID NO: 260444 - protein, 90 aa, Glycine max
  Clone ID: PAT_MRT3847_77203C.1.pep
STPRTIGQVLLMQPSFGRLVHKHQTSLLSNDAPRIFRRKRRSRRRTRCQKELRQRVERAKVPCRGSGSQRPRMNHSMSHVLVIWLGDSNH

SEQ ID NO: 260445 - protein, 113 aa, Glycine max
  Clone ID: PAT_MRT3847_77204C.1.pep
LVLPPLSPAPKFVVPSPIFNHSSFPSYLCLHFCFKLLLLSSLCVYFSAVFLFGEMQHHFKSCVSKTCFNCQIQMCAIASICLCFLLFSGWIIMSINGLPSIAFLLNINKYYCG

SEQ ID NO: 260446 - protein, 46 aa, Glycine max
  Clone ID: PAT_MRT3847_77205C.1.pep
MASSAATTIPSLSERITAPYGSWKSPITTDVVSGASKRLGGTAVDG

SEQ ID NO: 260447 - protein, 57 aa, Glycine max
  Clone ID: PAT_MRT3847_77206C.1.pep
SPAGVSVVARLRLRACSVRWSARVDEVYHTAHGGFRLNHTEVPLGGGGFHVFFLSPA

SEQ ID NO: 260448 - protein, 59 aa, Glycine max
  Clone ID: PAT_MRT3847_77207C.1.pep
NKQIGLKFRDILLISPENFIPFYRVLFLEFVVKCNYELIGIMCYICKISLVSSMLRCWM

SEQ ID NO: 260449 - protein, 122 aa, Glycine max
  unsure (1)..(122): unsure at all Xaa locations
  Clone ID: PAT_MRT3847_77208C.1.pep
MDHTELTSEQXPSGDIRCETYRATKLISCTNLXLLRRYDHLDQSPKGHMLEDGGTSYGRVIAPVLRDIYKAYTAEYGLALIEXNAGLTPXRAGLFHDTALVDXDTCEPFLRLLXEGSWLIQE

SEQ ID NO: 260450 - protein, 72 aa, Glycine max
  unsure (1)..(72): unsure at all Xaa locations
  Clone ID: PAT_MRT3847_77209C.1.pep
TTYTGNHNKPAALLHKSGMKKECKRIVKSVENQLVRNYCRPDLRKADLARXNAVNRNLNFARVWVESRNKQS

SEQ ID NO: 260451 - protein, 58 aa, Glycine max
  Clone ID: PAT_MRT3847_7720C.1.pep
RTLQKRHTGPTSKKWTCLTEPSITLKLCYITIPHRMFFIETQLHFDNHGGLKIWCCSP

SEQ ID NO: 260452 - protein, 188 aa, Glycine max
  Clone ID: PAT_MRT3847_77210C.1.pep
SPAQVGRYQIKESFGSILQSILHKYGDIGANCHLESVAMRSYYIECVCFVVQELHNSSSVMQLSKSKVKELLAILKDVESAQLSVAWLASALDELAQNIELINRYQEVEAQKDNSGGQVESLREELESELESLAQKEQEVANIKTRIPEIRGRLSQLELESEELNKSMLSINSKVDNLHIKSLLDELL

SEQ ID NO: 260453 - protein, 92 aa, Glycine max
  unsure (1)..(92): unsure at all Xaa locations
  Clone ID: PAT_MRT3847_77211C.1.pep
VLVGRNSGIPADVLAKRAHEFEKHAAHESLKDQMPAVDQLCSPQGNKFXNLMNLIQSVAGDLKLLTVGKMFEVQHIPVSNISARENHVLQIP

SEQ ID NO: 260454 - protein, 53 aa, Glycine max
  Clone ID: PAT_MRT3847_77212C.1.pep
GNHKLKHIDMHTGFSFFYADQITVTGHLLSQMPYHFVNVKPLAETIFLEGKPN

SEQ ID NO: 260455 - protein, 38 aa, Glycine max
  Clone ID: PAT_MRT3847_77213C.1.pep
CLNRVAHLLLKKKKKKKKKKKRKKKKKKKKKKKKKKKK

SEQ ID NO: 260456 - protein, 84 aa, Glycine max
  unsure (1)..(84): unsure at all Xaa locations
  Clone ID: PAT_MRT3847_77214C.1.pep
RTCSRISGLEKMPLWQKAILCXMGHFVSRRSKXTWYSGMKXKFVEMMKSIXEHEXTDWPVPLQIVSXTIRAASLVTTFWRLFSW

SEQ ID NO: 260457 - protein, 99 aa, Glycine max
  unsure (1)..(99): unsure at all Xaa locations
  Clone ID: PAT_MRT3847_77215C.1.pep
EEVSYQLAFNKQELRKVIKEYPGKEVKKGLDNLYKKVDKHLCEEENLLQVVWHSMQDEFIRQYKHFEGLIARCYPGSGVXMEFTIQDILDYCSSIAQSH

SEQ ID NO: 260458 - protein, 39 aa, Glycine max
  Clone ID: PAT_MRT3847_77216C.1.pep
MPSQALTSVLLPSNLSVSLHALGSLIIARAFTMSLDIYR

SEQ ID NO: 260459 - protein, 57 aa, Glycine max
  Clone ID: PAT_MRT3847_77217C.1.pep
AHIRNLRSPKVFKTGRGVENQASSSVGKKDQSIKAEGRHFSSHFHFTIPFPYYFILV

SEQ ID NO: 260460 - protein, 129 aa, Glycine max
  unsure (1)..(129): unsure at all Xaa locations
  Clone ID: PAT_MRT3847_77218C.1.pep
ARRRIACLDAFIATHAGVASTGIRNNTKVQYKAGHSFPTHCASXRLMETKFSGLRSTSCVTYAHDAKESLLRDLVSLQLTPITIEIINPCELXTMDIMKVAINGITLIVRHLLRCLHIRNNSPLDVVDI

SEQ ID NO: 260461 - protein, 175 aa, Glycine max
  unsure (1)..(175): unsure at all Xaa locations
  Clone ID: PAT_MRT3847_77219C.1.pep
MKLSTSGLGQQGHEGGEKKCLNSELWHACAGPLVSLPTAGTRVAYFPQGHSEQVAATTNREVDGHIPNYPSLPPQLICQLHNVTMHADVETDEVYAQMTLQPLTPQEQKDTFLPMELGVPSKQPSNYFCKTLTASDTSTHGGFSVPRRAAEKXVFPPLDFSQQPPAAELIARDLH

SEQ ID NO: 260462 - protein, 55 aa, Glycine max
  Clone ID: PAT_MRT3847_7721C.1.pep
ALVSHHVDYMITILHRRRPGPFFFSPAFASDLPPYTCYGLGLGLVKDRNIEWRLL

SEQ ID NO: 260463 - protein, 113 aa, Glycine max
  Clone ID: PAT_MRT3847_77220C.1.pep
FTPLSSPLYWHFILSAANLHCLAPTLFPLLLPLALPLIGNPFFPVPVTTCCWYCIHLTDCTLTPSPPKVSRNSARSPPPFYALNQVRPSNRGSSGLFIRLSAFYPPVPVSVGS

SEQ ID NO: 260464 - protein, 238 aa, Glycine max
  Clone ID: PAT_MRT3847_77221C.1.pep
SQFYPRPGTPAARMKKVPSNVVKRRSRELTNVFESFTPYSGMEGKVERIWITDIASDGVHLVGHTKGYIQVLVLAPDNMLGTSAMVKITSVGRWSVFGDVIETVNPVSDNKALNKLVPNQDCGNSAKTGGFSEEPEYCACGNDICCGQGTLENNDNSRGSAVPQNQSKRNFIGWMLRKREHLHKTVESELASGSVKKQEGIMRKWDFVDKVLLGGISISILTIMALVVAVMFRVIWSQ

SEQ ID NO: 260465 - protein, 116 aa, Glycine max
  Clone ID: PAT_MRT3847_77222C.1.pep
MPLPREPTRCLLLRYEWHPFPRSYLLYSWLPSQAIDAIIDWYRAMISRRNVIRSVIAMLRWRALKVTVIISNMWIFQKEDVQVSLSRTCVHFIWSSSGAYEAINVLKLKPLLTVDP

SEQ ID NO: 260466 - protein, 42 aa, Glycine max
  Clone ID: PAT_MRT3847_77223C.1.pep
KLAVFECVEYAKDKCYMCKLVFFGWGFCDYVKSYKLHRTFKM

SEQ ID NO: 260467 - protein, 81 aa, Glycine max
  unsure (1)..(81): unsure at all Xaa locations
  Clone ID: PAT_MRT3847_77224C.1.pep
NSQFPSSQNDNIELCCXLXLXXXXLXIASSXXTPSXFIKSSXSTTQXPALCIXSLXVYASTIQQXXHELVQXXLXVXXNXS

SEQ ID NO: 260468 - protein, 176 aa, Glycine max
  Clone ID: PAT_MRT3847_77225C.1.pep
VGKGLSKDDKAHKLALRHWLEAIDPRHRYGHNLHIYYAVWFHSQSSQPFFYWLDVGDGKEVYLDECPRSELSRQCIKYLGPKERDAFEVIIEGGWLVYRKGQNLAHTVEGAKWIFVLSSSRILYVGEKKKGSFQHSSFLAGGATIASGRLVAQNGVLDAIWPYSGHYCPTKKHLWN

SEQ ID NO: 260469 - protein, 59 aa, Glycine max
  Clone ID: PAT_MRT3847_77226C.1.pep
CFWFNLSFCFLSLVYRRCYIRFIRKVNDKKGMEGQEETRKAFDFMLNYVGKLFSVVLFA

SEQ ID NO: 260470 - protein, 42 aa, Glycine max
  Clone ID: PAT_MRT3847_77227C.1.pep
PGGLIKSKSLSTPYQLEIFPPLRRKKKIMRNQNDITDIRSRT

SEQ ID NO: 260471 - protein, 125 aa, Glycine max
  unsure (1)..(125): unsure at all Xaa locations
  Clone ID: PAT_MRT3847_77228C.1.pep
SKYALPHMKPGSVIINNASINAFIGRPDLLDYTSTKGAIISFTRALHNXVFSKGIRVNAIXPGPVWTPLIPATMTKKAIEQFTAPIGRPSQPSEIATVAVFLAAPDSSSISGQTLHPNGGTVVNG

SEQ ID NO: 260472 - protein, 154 aa, Glycine max
  Clone ID: PAT_MRT3847_77229C.1.pep
RISTMPSETLENQKPQVEDQQDLAEDSHTEQEDNSEMKEIDGKGEEEKEKEEEVEGDEENEEKEERDELKSKKSTKESAFATPGSERPTRERKTVERYTVSSPDKFPRSSSIKALSIEKGSGTQLMDIPNVAFTLSKRKADDNLRALHSIWFGK

SEQ ID NO: 260473 - protein, 85 aa, Glycine max
  Clone ID: PAT_MRT3847_7722C.1.pep
DFRYQHRELGTEVGADPSLLKAVSLMMQRKEGLDHLQCSRWRLYEQVRIPSQKDIPRLLEPKPYSSCNIVSSSSSGKWHRREAYG

SEQ ID NO: 260474 - protein, 85 aa, Glycine max
  Clone ID: PAT_MRT3847_77230C.1.pep
LGTGVAPKGSSRNSLVHIFLAILFFLEGILLATPFVHVVDDLASEKRIFTVKDGFFNYKIRVKTSPVSAFKKKARNYGIKIAFYH

SEQ ID NO: 260475 - protein, 99 aa, Glycine max
  Clone ID: PAT_MRT3847_77231C.1.pep
LHPWVCGPFLLMPRGRVRGCLVFWAPRCVAAWCLLATSVVSGCPPRACVGLCGQCRLRACPAAVSLQCVSCEAPRSVSQSPLSVPGRGPWLTLFAGSSR

SEQ ID NO: 260476 - protein, 80 aa, Glycine max
  unsure (1)..(80): unsure at all Xaa locations
  Clone ID: PAT_MRT3847_77232C.1.pep
MTTSNTARMEDSGGDLADTIKKWNIIYPVYLNSKRXVADGRRIAAAKACTDPTCIEIADCCSHLKIAHAIELDKAYPRDF

SEQ ID NO: 260477 - protein, 47 aa, Glycine max
  Clone ID: PAT_MRT3847_77233C.1.pep
IILVSQFQHRKFMIFLRCATLRTGLINPRSFPCISSPCSTFQCKIPS

SEQ ID NO: 260478 - protein, 138 aa, Glycine max
  Clone ID: PAT_MRT3847_77234C.1.pep
LCYRLHWQSSERTLGLLEPETQQHRLRAKDLARHKISSKHHVNINCSHCHINLSFTQFSRTIKLCTKVSMQGPILITLKVVLLHTYLKFLMLTSQYQYLNTWLAYSHSLVAMLEDMEGACICCQQLLQSFVMNVGLHI

SEQ ID NO: 260479 - protein, 63 aa, Glycine max
  Clone ID: PAT_MRT3847_77235C.1.pep
GSMKGGENKKNWRGVYFDKIDFFKKNILKFTGLIFSKGFLNKAEMKTGLPGKRFQRSREGFLT

SEQ ID NO: 260480 - protein, 183 aa, Glycine max
  Clone ID: PAT_MRT3847_77236C.1.pep
RVVLLELVTGRKPVDQTQPLGDESLVEWARPLLLRAIETRDFSDLIDPRLKKHFVENEMLRMVEVAAACVRHSAPRRPRMVQVVRSLDCGDESSDLSNGVKYGHSTVYDSGQYDKEIMLFRRLANGTFVDSDFEIYSREYSLSRDTSMTSRGSHQELIRHSSSGSLNLELSTCIGPVLNENRD

SEQ ID NO: 260481 - protein, 339 aa, Glycine max
  Clone ID: PAT_MRT3847_77237C.1.pep
MTKCEPKHPSLKLKLSRKTLGIKVIGPKPQLSFQVGAKIEVLCQDSGIRGCWFRCKILSMSPRLLKVQYDDLLDIDGPQKLEEWVPASRVAAPDKLGMRSSGRLTVRLCPPEYNTGHTFEIGAPVDAWWCDGWWEGVVTAVNVCGDGVLQVYTPGEERFLKVEKKNIRISRDWINNRWVDIQGKPDICSYLSSNARSSIRMSANSAVVDGSMSDCSAILESKPTPSAKVEVAKKVEPELSGLEAPVNLENIITTLREPLYAIHEDKDNNSGDGCDDEADKAVKTLLALNEHKDKYSGGGNNGDTDNDVDVDADNDEDDSEEDFDCSESKLDAAEAIQVA

SEQ ID NO: 260482 - protein, 131 aa, Glycine max
  Clone ID: PAT_MRT3847_77238C.1.pep
MFSPCLLRHLLTYTEPVKHQTVGLKGGMSCHGRAGAVHRDSDIMVSDQRFDVDQMEHNETETGKCPGGNVRESVYKMQARTGFWVDEAHPHRDRANETVPVIFGDNDLEAEHSETGVAENNASKDVHSASS

SEQ ID NO: 260483 - protein, 71 aa, Glycine max
  Clone ID: PAT_MRT3847_77239C.1.pep
YGCEKTTEGGSYQMAGSVRLLCLSFLSLFISFSIAQTYIRPKALVLPVTKDVSHQFLSMSHKSNKEPHLWQ

SEQ ID NO: 260484 - protein, 80 aa, Glycine max
  Clone ID: PAT_MRT3847_7723C.1.pep
YFNQKQKKSAAVFDEQPALSLEKLEVFKIKRRDKHDRMTLRIIAKFFPLRLESVDLLKKYLEERVFPKLMVHRKFAVLYV

SEQ ID NO: 260485 - protein, 301 aa, Glycine max
  Clone ID: PAT_MRT3847_77240C.1.pep
KLEECRNLFEIPDNINLLSSLRELLLKGTDIESVSASIKHLSKLEKLDLSDCRRLYSLPELPQSIKELYAINCSSLETVMFTLSAVEMLHAYKLHTTFQNCVKLDQHSLSAIGVNAYVNIKKVAYDQFSTIGTNSIKFLGGPVDFIYPGSEVPEWFVYRTTQASVTVDLSSSVPCSKIMGFIFCVIVDQFTSNDKNYIGCDCYMETGVGERVTRGHMDNWSSIHACEFFSDHVCLWYDEKCCLKNQECESESMEELMASYNPKISFEFFAKTGSIWEKRSDIIIKGCGVCPIYDTECANFF

SEQ ID NO: 260486 - protein, 83 aa, Glycine max
  unsure (1)..(83): unsure at all Xaa locations
  Clone ID: PAT_MRT3847_77241C.1.pep
MVVNLTPMTICTHIVYGCQLNTNDNMCAYGLNPGISGSRLLGTIPQSISQLTVLDQMAIVSTPLNFDSSXQCFCQYAIDLLGG

SEQ ID NO: 260487 - protein, 56 aa, Glycine max
  Clone ID: PAT_MRT3847_77242C.1.pep
PEGSEASRIVHSLTMLGPSTKPLLHGCHHRHAREVQVGNNKSGLLGDGPVWTHIWH

SEQ ID NO: 260488 - protein, 40 aa, Glycine max
  Clone ID: PAT_MRT3847_77243C.1.pep
GTSSDKISSVSVNTGFLLSGLSLQSNPILFLQFTLETEFP

SEQ ID NO: 260489 - protein, 109 aa, Glycine max
  Clone ID: PAT_MRT3847_77244C.1.pep
PTRKPRRPSESIYNRLAIVMKSGKCTLGYKTVLKSRIISRWKLIIIASNCPTLRKSEIEYYAMLAKVGDHHYNGNDVDWALPDANIQSVQLSVFDPGESDVVNTLPVEQ

SEQ ID NO: 260490 - protein, 84 aa, Glycine max
  Clone ID: PAT_MRT3847_77245C.1.pep
APHGSSSICVPCFPAEIRILGTLRLLHKWLLDIPHIIRRSYGHSELHKKIINHVVRISVNRRTLILLDGDLIANLSKCIFREKE

SEQ ID NO: 260491 - protein, 83 aa, Glycine max
  Clone ID: PAT_MRT3847_77246C.1.pep
PYPKVSGALVGFYETMVSETYCLLLKTAIGRDQIPTLSQEQFLSWNRHIDSALSSRKSYISINPAKYISCKNFPNKWSFTIFT

SEQ ID NO: 260492 - protein, 101 aa, Glycine max
  Clone ID: PAT_MRT3847_77247C.1.pep
RLLKLHNCNGCMVRCFDWKLLVYIKAAREDLINLKLFSLYGCNWCVFFVFSLKKRVKFKTIQYYNRKLNSKVLLTLNRSIFSLFGKRKDGDWSNQSRMMVM

SEQ ID NO: 260493 - protein, 78 aa, Glycine max
  Clone ID: PAT_MRT3847_77248C.1.pep
EFTENVTNFINNNNVIQNCSKNFYKVDYALECASIQQSIQLITGVHCQNHSYLPCIPQIYKFTLKLPRNWPKRKNNNA

SEQ ID NO: 260494 - protein, 79 aa, Glycine max
  Clone ID: PAT_MRT3847_77249C.1.pep
ILLCLNRVHYVTFQRHEYYGLDRHTNIVIMMMGKRIRVEVSDNTSNTKRLLFLHFSNLFFHGIQELGSQTCISTTGSLT

SEQ ID NO: 260495 - protein, 160 aa, Glycine max
  Clone ID: PAT_MRT3847_7724C.1.pep
GLQDFLREQEPEFVTSLVRTRILPLYAIAVSLPYLVASANWVLGELGSCLPEEMSTDVYSQLLMALVMPDRQGPSCYPVRISAAGAITTLLDNDYLPPDFLPLLQVIVGNIGNDENESESSILFQLLSSIMEAGDEKVAVHIPLIVSSIVGPVSKWVTSN

SEQ ID NO: 260496 - protein, 52 aa, Glycine max
  Clone ID: PAT_MRT3847_77250C.1.pep
NYRCSLRPTQRVIFFPLEDRHPNSRQKLEESNNQATSTFVSGFRLRHPVITV

SEQ ID NO: 260497 - protein, 233 aa, Glycine max
  Clone ID: PAT_MRT3847_77251C.1.pep
MVEPAVAASSELSDSTRNTNTNTPSPSSSSSLSPSPSPSSSSSKKRARDNNNSRNNSNKHSVYRGVRMRTWGKWVSEIREPRKKNRIWLGTFATAEMAARAHDVAALTIKGSSAILNFPELAASLPRPASNSPRDVQAAAAKAASMEAPPRTPPSPAATPEDDLGEIVELPPLGTSFDSPDRSSEFVFLDMDDGWPYSHPWYHSIYDGGYFISDMNNMVSMQESESMVLSLWP

SEQ ID NO: 260498 - protein, 48 aa, Glycine max
  unsure (1)..(48): unsure at all Xaa locations
  Clone ID: PAT_MRT3847_77252C.1.pep
XXGSAEXGXXXXXXXXESXELXKHXKXXQVRXXHHXHHXXRXXTSTNH

SEQ ID NO: 260499 - protein, 97 aa, Glycine max
  Clone ID: PAT_MRT3847_77253C.1.pep
RISQLAENKRQGEGFLITLTNSQLNSVCSSSLFQGIMILRCETPSNVTQNGSTLELIVHSESKSRSWSLILALNFFKTGSMFVTHLLLLACLLSSHI

SEQ ID NO: 260500 - protein, 132 aa, Glycine max
  unsure (1)..(132): unsure at all Xaa locations
  Clone ID: PAT_MRT3847_77254C.1.pep
PPTVSGLESARRRSPSPSKKSFVLQKSEPGAFTLATXPPHRRPSDEGFSTCIWPCESSIALVHCRVSRSWGGLFTLDRTGPVPQNKVVPRQGHFFRLGACLSVLPPHSFWSSPPIELSSRVEGMHTIVGPPL

SEQ ID NO: 260501 - protein, 61 aa, Glycine max
  Clone ID: PAT_MRT3847_77255C.1.pep
MKFTEYLFLVHRMGDFINGLYVYFLIFVVVVSTYPWLCFAPRPPGPPPPPPPPPPPPPPPP

SEQ ID NO: 260502 - protein, 338 aa, Glycine max
  Clone ID: PAT_MRT3847_77256C.1.pep
MVPNTAFDVGMLDLTHPKTATWFKQILREMVDDGVRGWMADFGEGLPVDAVLYSGEDPISAHNRYPELWAKINRELVEEWKSSSLDKVKEDEDEGLVFFMRAGFRDSPKWGMLFWEGDQMVSWQTNDGIKSSVVGLLSSGISGYAFNHSDIGGYCTVNLPIVKYRRSEELLLRWMELNSFTTVFRTHEGNKPSCNSQFYSNHQTMSHFARSAKVYKAWKFYRIQLVKEAAQKGLPICRHLFLHYPDDECVHRLSYQQFLVGSEFLVVPVLDKGKKKVKAYFPLGESSSWIHIWTGKVFSKQGREEWVEAPIGYPAVFVKVGSQVGETFLNNLRSLGIL

SEQ ID NO: 260503 - protein, 466 aa, Glycine max
  unsure (1)..(466): unsure at all Xaa locations
  Clone ID: PAT_MRT3847_77257C.1.pep
HNFLSIQEDSSSGETKRPLKNLDNEIAQITKLKSTPHQQLVQVGTGRPELPVSPVKMLAGRESNYXGRGRFSSADRCHLLSRYLPVNGPWLIDQMSSRAYVSQFSADGSLFIAGFQGSHIRIYNVDRGWKVQKNILAKNLRWTITDTSLSPDQRYLVYASMSPIVHIVNAGSAETESLANVTEIHDGLDFSSNDDGGYSFGIFCVKFSKDGKELVAGSSGDSIYVYDLEANKLSLRILAHTCDVNTVCFADETSHLIYSGSDDSFCKVWDRRCLIAKGKPAGVLMGHLEGITFIDTRGDGRYFISNGKDQTIKLWDIRKMSSNVTSNPGYRSYEWDYRWMDYPPQAKDLTHPCDQSVATYRGHSVLRTLIRCYFSPAFSTGQKYIYTGSHNACVYIYDLVSGAQVATLKHHKSPVRDCSWHPFHTTLVSSSWDGDVVKWEFAGSGDTPGSSTKKRVWTRHFYEHYL

SEQ ID NO: 260504 - protein, 59 aa, Glycine max
  Clone ID: PAT_MRT3847_77258C.1.pep
GSPNTKFLQLILSITQIANKKADSVLIRPLVIHHIVECSANHLRMHNQMIHEVGGQLRE

SEQ ID NO: 260505 - protein, 61 aa, Glycine max
  unsure (1)..(61): unsure at all Xaa locations
  Clone ID: PAT_MRT3847_77259C.1.pep
RYPDMSQKTSLAPPTSCPSGENGEELEEDVVAKDIDEGNRGEVIVSGEVGVVDDEXGEGGA

SEQ ID NO: 260506 - protein, 123 aa, Glycine max
  unsure (1)..(123): unsure at all Xaa locations
  Clone ID: PAT_MRT3847_7725C.1.pep
MIYTAIDTLDLTDXQLANSPSRKDGIDEATETTLRIYXPQAVMATGQVLFHRFYCKKSFARFNVKKVAASCVWLASKLEENPRKARQVIIVFHRMECXRESFPMEHLDLYSKKYVDLKMELSR

SEQ ID NO: 260507 - protein, 160 aa, Glycine max
  Clone ID: PAT_MRT3847_77260C.1.pep
FHISSFILFVLAQNILEAEGPWFESFLINILLVYVSEMIIDIIKHSFIAKFNNIKPIAYSEFLEDLCKQTLNMQTKSAKKNLTFVPLAPACVVIRVFTPVYAANLPPNPLPWRLFWILLFSAMTYVMLTSLKVLIGMGLQKHATWYVNRCKKRKHHFHED

SEQ ID NO: 260508 - protein, 401 aa, Glycine max
  Clone ID: PAT_MRT3847_77261C.1.pep
FNFLEEMHNGNSLRSTTTLGNEKERERVYDTIFRLPWRCELLIDVGFFVCFDSFLSLLTVMPARIMMTIWRLLKTRQFKRLSTMEVSDFGCFLILSSGVVLLQQTDISLIYHMIRGQGTIKLYVVYNVLEIFDKLCQSFNGDVLQTLFLSAEGLANCPPESMRFWIWRFISDQALAVAASIVHSFILLAQAITLSTCIVAHNNALFALLVSNNFAEIKSNVFKRYSKDNVHSLVYFDSVERFHISSFILFVLAQNILEAEGPWFESFLINILLVYVCEMIIDIIKHSFIAKFNDIKPIAYSEFLEDLCKQTLNMQTESAKKNLTFVPLAPACVVIRVLTPVYTANLPPNPLPWRLFWILLFSAMTYVMLTSLKVLIGMGLQKHATWYVNRCKKRKHHFHED

SEQ ID NO: 260509 - protein, 65 aa, Glycine max
  Clone ID: PAT_MRT3847_77262C.1.pep
VALLAAVLCLVVLSAPMAHASITCGHVTNCLCSIGFSYLHNGGTHPIGCCNGVKSLNSYVMTTVD

SEQ ID NO: 260510 - protein, 68 aa, Glycine max
  unsure (1)..(68): unsure at all Xaa locations
  Clone ID: PAT_MRT3847_77263C.1.pep
GCKXLQLTLSAXCWVFWRTAMVGHRTAFKNQICLPYRSQESGLGCPALSHLGGLTSSRIPSLRTRXCD

SEQ ID NO: 260511 - protein, 286 aa, Glycine max
  unsure (1)..(286): unsure at all Xaa locations
  Clone ID: PAT_MRT3847_77264C.1.pep
MAESSEVEIVGKPVQDLVLNSENLPKTYIYEEGGAGFRDALVPSQDENIPVIDLHRLSSPSTALQELAKLHHALHSWGCFQAINHGLKSSFLDKVREVSKQFFHLPKEEKQKWAREPNNIEGYGNDIILAPKPLXISGNQRLDWTDRVYLKVLPEDERKFKFWPQNPYDFRSIVLQYTESMRLLSEVIIKAMAKSLNLEEDCFLNECGERADMFLRFNYYPPCPMPDHVLGLKPHADGSTITFLLQDKEVEGLQVLKDDQWVKGPIIPDALVINGGDQIEIMSHGI

SEQ ID NO: 260512 - protein, 122 aa, Glycine max
  unsure (1)..(122): unsure at all Xaa locations
  Clone ID: PAT_MRT3847_77265C.1.pep
MSMASTTRDESSDNDSTCSSITLADSTRSWLSTFSFRRSSSSNSSSLPLCAAAPDTTKSASWEAMRRLRLDTGGIGLDNFRLLRRLGSGDIGNVYLCQIQNSMVGRPQSLYYAMKGVDRXXX

SEQ ID NO: 260513 - protein, 74 aa, Glycine max
  unsure (1)..(74): unsure at all Xaa locations
  Clone ID: PAT_MRT3847_77266C.1.pep
LQASCVRTSHHHHFHHHKXDDEHGDARYKNEXMYPKRLEHLGVLGASVAGAHALHERHEAKTDPAHFDRHNVKE

SEQ ID NO: 260514 - protein, 86 aa, Glycine max
  Clone ID: PAT_MRT3847_77267C.1.pep
TINLPISFTEHQRFQSCPTSDYLGQGHCHENVAKRAMELLAYKYSTSPIVRPLSGTQSWKRQARAEVTSISVIEYLQYHCLLELCI

SEQ ID NO: 260515 - protein, 38 aa, Glycine max
  Clone ID: PAT_MRT3847_77268C.1.pep
PYPSLLILLLLLTSRVTFYGSEKEKSKTFIDPGPAGSQ

SEQ ID NO: 260516 - protein, 56 aa, Glycine max
  Clone ID: PAT_MRT3847_77269C.1.pep
RFKWPLVIVTMQGRERFRFLFCVSLLDVSIIILPTQLAKYLASYFHSQLTRMCFTF

SEQ ID NO: 260517 - protein, 153 aa, Glycine max
  unsure (1)..(153): unsure at all Xaa locations
  Clone ID: PAT_MRT3847_7726C.1.pep
MIYTAIDTFYLTDEQLANSPSRKDGIDEATETTLRIYGCDLIQESGILLRLPQAVMATGQVLFHRFYCKKSFARFNVKKVAASCVWLASKLEENPRKARQVIIVFHRMECRRESFPMEHLDLYSKKFVDLKMGVSRTXRHFLKEMGFIWHVEH

SEQ ID NO: 260518 - protein, 129 aa, Glycine max
  unsure (1)..(129): unsure at all Xaa locations
  Clone ID: PAT_MRT3847_77270C.1.pep
VTSVRMVVRALPVLHIVQVSPPAPQTFPPPVCKRYSRPPSLGPSNPLICPSPFLFIPRVEFVYVPPPEIHFAINFPASPYEPDRSAFQNSAFEGKVKSSPSLASWRVXTRRSCFCVVFITELDPIALAP

SEQ ID NO: 260519 - protein, 63 aa, Glycine max
  Clone ID: PAT_MRT3847_77271C.1.pep
SAFRSCSQFCSGHSHSGHCHTLDSSIVCWISKFIINHCLTLNHKFPCNKDMFLEVMFTKTPFI

SEQ ID NO: 260520 - protein, 129 aa, Glycine max
  unsure (1)..(129): unsure at all Xaa locations
  Clone ID: PAT_MRT3847_77272C.1.pep
ADCPFFNSRFQLLSTTTNGDFVQGKDLALVXVNVLCAAVGLTSSYTSTPLLXFGLLKDRGLIVEFFGRMSYVAYNCKXIQDKDLLDGKFSFDFKXLSRLKKVXSSTKAQFVIGKXFIFDLIGVWLHFFK

SEQ ID NO: 260521 - protein, 324 aa, Glycine max
  Clone ID: PAT_MRT3847_77273C.1.pep
MGRQAVTKLLSSIASRRHGLRLFSAASPAVFVDKSTRVICQGITGKNGTFHTEQAIEYGTNMVGGVTPKKGGTEHLGLPVFNTVAEAKAETKANASVIYVPPPFAAAAIMEAMEAELDLVVCITEGIPQHDMVRVKAALNRQSKTRLIGPNCPGIIKPGECKIGIMPGYIHKPGRIGIVSRSGTLTYEAVFQTTAVGLGQSTCVGIGGDPFNGTNFVDCLQKFLTDPQTEGIILIGEIGGTAEEDAAALIKDSGTEKPVVAFIAGLTAPPGRRMGHAGAIVSGGKGTAQDKIKTLREAGVMVVESPAKIGAAMLDVFKQRGLVQ

SEQ ID NO: 260522 - protein, 45 aa, Glycine max
  Clone ID: PAT_MRT3847_77274C.1.pep
RISNCYALYVWRIYIDILILECHLNFLYNMQLFMVSDKKFTNHIL

SEQ ID NO: 260523 - protein, 55 aa, Glycine max
  Clone ID: PAT_MRT3847_77275C.1.pep
YDYIPLFICRAAFMCGREPNFELPEEEKRDLSKFKWDEFLAMTRQAITRKSNVSL

SEQ ID NO: 260524 - protein, 110 aa, Glycine max
  unsure (1)..(110): unsure at all Xaa locations
  Clone ID: PAT_MRT3847_77276C.1.pep
TQRPCNQILFLFLKPYPTGKANLGRTLTTKPSPLSGKLDTIDNVKAKIHDKEXIPPDQQRLIFAGKQLEDGRTLSDYNIQKESTLYLVLRLRGGXMQIFVKTLTGKTITL

SEQ ID NO: 260525 - protein, 68 aa, Glycine max
  unsure (1)..(68): unsure at all Xaa locations
  Clone ID: PAT_MRT3847_77277C.1.pep
TPAAFFFFFFFXEKIXKWFFPLLRGVDSFVRLSCFYFAGSGGVRSDEYYSTPKKKFSAALGGLLSALQ

SEQ ID NO: 260526 - protein, 167 aa, Glycine max
  unsure (1)..(167): unsure at all Xaa locations
  Clone ID: PAT_MRT3847_77278C.1.pep
RNITMKATTTATILATAAVASAQVALPDTIPILGYPFGQQCQQTVLGLFTNGSFSQCFPATALLPLLTSTTDSIVPVLDNFMTELCYNEPCSNDTLTAAAQQVAQGCADDLTASGLTAEQLTEIFSIYPTLREVLCLKTTDYYTEDLYGGFLGAPAIPISDAXHLTD

SEQ ID NO: 260527 - protein, 67 aa, Glycine max
  Clone ID: PAT_MRT3847_77279C.1.pep
RATTKWTRLLKIDCGGFNCFLPRSIPMYCHHSYIHCYAYSSTDLAYDEYPLILGLLLTNISLNPLQP

SEQ ID NO: 260528 - protein, 473 aa, Glycine max
  unsure (1)..(473): unsure at all Xaa locations
  Clone ID: PAT_MRT3847_7727C.1.pep
MSTWDRSTPPEEXLLREAHEQAKHKSMXAFNAIAIGVGSARKTYEGLLLKFFKKAFEDYRKDAFMEADLQCSNAIQSMEKRLRAACNASDAKIDNVAKVLDALLSEYEKTIQGPGKWQKLAVFLQQSFEGPVLDLVKRLIATIESEKRSHALQYRSIEEKVDLLTKRLEATEGEKSNYIKRYEDAINDKKKLMDEYKNRITDLQANRRSLDERYSSLLKTLDSTKQESMDWKRKYEQVLSRQKAEEDQASSEIAALKSRSGAAEARLAAAKEQAQSAQEEAEEWKRKYDIARREAQSALQKAANVQERTNKQTQLREDALREEFSGTLAEKEDEIKEKTAKIEHAEKCLTTLNLELKAAESKIRSYDTEISSLRIEIKELTEKLKAENAKAQSYEREAIVFQQEKNHLEQKYHTEFKRFDEVQERCKTAEKEAARATEVPDKARXEAGMAQKERSEMQRLALSICANASVGPV

SEQ ID NO: 260529 - protein, 47 aa, Glycine max
  Clone ID: PAT_MRT3847_77280C.1.pep
MYFTLNFFYKKKSNLLIFFLSILKYLIIYGLDRLVESNSLSSFNSPA

SEQ ID NO: 260530 - protein, 65 aa, Glycine max
  Clone ID: PAT_MRT3847_77281C.1.pep
SPLPQQRNRRLKAFQKSFNQKNFLFKTGVFKGNGGKAQSNLFPLKGFFFVVSPISTQVENGRNIS

SEQ ID NO: 260531 - protein, 210 aa, Glycine max
  Clone ID: PAT_MRT3847_77282C.1.pep
VDRGRGRGGRGGWGWGRGGGFNTFASQVPFDLFPEAVTLPDVNLDDIHDDTKKLLRWDSHLQNYWEASPYFLEDKTSKKRQSMHIAKFSDRKKNDFTRDSLSQVLMFNDFPQELVQGASKRASRRKKFRWNPESEMKKLDFFEQQEKTNQGKEENDENEKKDGEDGDEDENAQEEDEEDISDDDYNQNIDFDDDEDDYNDVDDGDDEPTY

SEQ ID NO: 260532 - protein, 71 aa, Glycine max
  unsure (1)..(71): unsure at all Xaa locations
  Clone ID: PAT_MRT3847_77283C.1.pep
LITIIRLRAYLHKDIDNEDSIXSAELRDENAKLESMSIGVXTTDVGHENAEHAFRLGQKVRHKKSVYRAVI

SEQ ID NO: 260533 - protein, 181 aa, Glycine max
  Clone ID: PAT_MRT3847_77284C.1.pep
MATVGRNVAAPLLFLNLIMYFIVLGFASWCLNRFINGQTYHPSFGGNGATMFFLTFSILAAVLGIVSKLLGGNHMRTWRSDSLASAGATSMVAWAVTALAFGLACKQIHLGGHRGWRLRVVEAFIIILTFTQLLYLILIHAGLYSSRYGPGYHDTDYGHGHGVGGTTGDPMHKPATAGTRV

SEQ ID NO: 260534 - protein, 156 aa, Glycine max
  unsure (1)..(156): unsure at all Xaa locations
  Clone ID: PAT_MRT3847_77285C.1.pep
FASWCLNKFINGQTXHPSFGGNGATMFFLIFSILAAVLGIVSKLLGANHIRTWRSDSLASAGATSIVAWAVTALAFGLACKQINIGGHRGWRLRVVEAFIIILTLTQLLYLILIHAGLYSSRYGPGYRDTDYGNAHGVGGTTGDPMHKSAAAGTRV

SEQ ID NO: 260535 - protein, 204 aa, Glycine max
  Clone ID: PAT_MRT3847_77286C.1.pep
RIGGVSVADLYAEESEGNDDFRAEFLCPFCAEDYDVVSLCCHIDDHHPIQAKNGVCPICGKKVGVDLVGHFTTQHGNFLRISFLQRKRRVRKGGSASTISILRKELQEGALQSLLGGSSYLASSNSEPDPLLSSFMFNPVVADESVSATPPSTEDALVKESSKDDFLKRKPQQLQLSEEDQVEKARRFEFVQGLLMSTILDDKL

SEQ ID NO: 260536 - protein, 200 aa, Glycine max
  Clone ID: PAT_MRT3847_77287C.1.pep
MKEVTVEAEGGAPGVVQEGGKGTTVRPDIHNSAMKILRAREPYNGYTEEVGEKPSGFEVMGWYLYEFCFYFVQTVLVPVVFPLIISQLQPLPAADSLQEWNKNHPTKHCSQKEFHLYSKLTNHTIRTSGGSNFSALEWTSIAWATGLALAAPILGFISFHLDGHFPKLITAAATGIGVFFCLPAGFFQVTAIFIPYIGGI

SEQ ID NO: 260537 - protein, 295 aa, Glycine max
  Clone ID: PAT_MRT3847_77288C.1.pep
MAGLDLGSASRFVQNLHRPDLHLQQNFQQHQDQQHQRDLEEQKTPPNHRMGAPFDDDSDDRSPGLELTSGPGDIVGRRPRGRPPGSKNKPKPPVIITRESANTLRAHILEVGSGSDVFDCVTAYARRRQRGICVLSGSGTVTNVSLRQPAAAGAVVTLHGRFEILSLSGSFLPPPAPPGATSLTIYLAGGQGQVVGGNVIGELTAAGPVIVIAASFTNVAYERLPLEEDEQQQQQQQLQIQPPATTSSQGNNNNNNPFPDPSSGLPFFNLPLNMQNVQLPVEGWAVNPASRPQPF

SEQ ID NO: 260538 - protein, 89 aa, Glycine max
  unsure (1)..(89): unsure at all Xaa locations
  Clone ID: PAT_MRT3847_77289C.1.pep
TXTNNTPAAFLLHCRSTQTHISLQTSSLSLLFLSPYTYLPTCIYLTTLIHINYLSTNAHSPPFVSLTIPKTILYIFFIISFHNTYSQFS

SEQ ID NO: 260539 - protein, 120 aa, Glycine max
  unsure (1)..(120): unsure at all Xaa locations
  Clone ID: PAT_MRT3847_7728C.1.pep
MIYTAIDTFYLTDEQLANSPSRKDGIDEATETTLRIYGCDLIQESGILLRLPQAVMATGQVLFHRFYCKKSFARFNVKKVAASCVWLASKLEENPXKARQVIIXFHRMECXRESFPMEHL

SEQ ID NO: 260540 - protein, 86 aa, Glycine max
  Clone ID: PAT_MRT3847_77290C.1.pep
QTAIIGSRTLKPDTKAIATCYQEFLTFSLLFGVRVLKGKKITLCAGHRLKESSSFTFLDYLLNTVLFDIRLRVRFKLLMFLFQHSD

SEQ ID NO: 260541 - protein, 99 aa, Glycine max
  unsure (1)..(99): unsure at all Xaa locations
  Clone ID: PAT_MRT3847_77291C.1.pep
VLVFDDLRRVFLQSHAQLVHAHSRAWKIDPSRLLDWENFXQSLEIIDVLSTIYLQIPRGVVLGDNVYKYGDDVARYKCXYYPGDEGFWWTSCLLYLDYF

SEQ ID NO: 260542 - protein, 63 aa, Glycine max
  Clone ID: PAT_MRT3847_77292C.1.pep
SFFQKTQDECFYFFSTDPTMGFSLDKGSYHCVTYKKNNSYIHFAVILNIKSPGKLAPFMFSVY

SEQ ID NO: 260543 - protein, 84 aa, Glycine max
  Clone ID: PAT_MRT3847_77293C.1.pep
EYSCCWKQHMMSAWTQFTVKYLGCIDPSSYLEDVDVPLLSSFTSSLCHYLDLISHNILVAHIFEVVYHSLAHTVCFMVTCSLPT

SEQ ID NO: 260544 - protein, 70 aa, Glycine max
  Clone ID: PAT_MRT3847_77294C.1.pep
QKKGKTILQVCYLLCPIIPQDLIEIFTTDYCMSPPRNFFCDHHLTEKPTLIKSLFISFFLPLLYRMLSSL

SEQ ID NO: 260545 - protein, 56 aa, Glycine max
  Clone ID: PAT_MRT3847_77295C.1.pep
GHSVTNPHCVPLHIWSEASSNRAFIRIRRSRGSKLTYSCKQRHSSSVGSPKFRSRA

SEQ ID NO: 260546 - protein, 85 aa, Glycine max
  Clone ID: PAT_MRT3847_77296C.1.pep
AGPGGHAKFRSSSPPFRWGIPPGLGPRCGPFIFHGPGSLFFHLPLGGLTTSLVWGRLVSPGLEDCGAPCPSIQKKCLGPGGFPFL

SEQ ID NO: 260547 - protein, 202 aa, Glycine max
  Clone ID: PAT_MRT3847_77297C.1.pep
MHQDILLELLYKGNSVTPLLIVSRSRKLVKGRRFGHCFSVADSDQLAADNSSSKDFDKVESSPTNDQPSNGPITQNQGSEAFLKSQSATKRLNLTARERLKAARSINRYAESKASKQDMSSRVLEASKQSDKGSGKKKSGLPEAPTNLFDDSKRGLSTGFTFQFPGGSDLFFIIFSFVFISTVMFATTYIVWKVGAIHFNEY

SEQ ID NO: 260548 - protein, 252 aa, Glycine max
  Clone ID: PAT_MRT3847_77298C.1.pep
MMTISLNPIVSFSSTKLETKYQDASRYSVGASLPKATQFTPLLIVSRSRKLVKERRFGHCFSVADSDQLAADNSSSKDFDNVESSATNDQLAFMNPPDENFQLQTEVNAESGSPTLEASNGSINQEQGSEASPKSQSATKRPNLTARERLKAARSLNRYAESKASKQDLSSRVLEASKQSDKGSGKKKSGLPEAPTNLFDDSKRGLSTGFTFQFPGGSDLFFIIFSFVFISTVMFATTYIVWKVGAIHFNEY

SEQ ID NO: 260549 - protein, 68 aa, Glycine max
  Clone ID: PAT_MRT3847_77299C.1.pep
IHVICHLGSIPVPVNVSSLAVYIFSRVPIPSLRLVMTAGALFRPLDRAHRKRWKAHIGVLLGMTVPYP

SEQ ID NO: 260550 - protein, 52 aa, Glycine max
  Clone ID: PAT_MRT3847_7729C.1.pep
SENLGSDFALFACLSSIEFLPFVINMYRSVYIIIFLIRICKLKIYVFYLTRQ

SEQ ID NO: 260551 - protein, 63 aa, Glycine max
  Clone ID: PAT_MRT3847_772C.1.pep
LGLEKNFGGKVYSKIFREKLVRGEFGPPKFGFFFVQSPFFGFLNFYMGPLFLKGDSQACFFFG

SEQ ID NO: 260552 - protein, 41 aa, Glycine max
  Clone ID: PAT_MRT3847_77300C.1.pep
GTGGTVTGAGKYLKEQNPDIKLYGIEPVESPILSGGKPGEY

SEQ ID NO: 260553 - protein, 69 aa, Glycine max
  Clone ID: PAT_MRT3847_77301C.1.pep
LLDFSETLQQFRQSLVNPFSERFMWPKSSPRGLTWSCQDDLVLKETYCGLPSKDAGLKLKKKKKKKKKK

SEQ ID NO: 260554 - protein, 88 aa, Glycine max
  unsure (1)..(88): unsure at all Xaa locations
  Clone ID: PAT_MRT3847_77302C.1.pep
MTSLSRVLVXFLILQFLVVVLFKESVHKLVXESGFFFNMKYFEEKVQAGEWVEVEKYLTGFTKVDDNRYSMKIFFEIRKQKYLVALDG

SEQ ID NO: 260555 - protein, 51 aa, Glycine max
  unsure (1)..(51): unsure at all Xaa locations
  Clone ID: PAT_MRT3847_77303C.1.pep
XLXFXHFXFSXSCWQLLXAXKSVXLYRXEXIXMVPXLRLLXSNLXXIXIMI

SEQ ID NO: 260556 - protein, 36 aa, Glycine max
  Clone ID: PAT_MRT3847_77304C.1.pep
SRVSSEIIRSDQTSQVFVLVSKGVRKNWSHFLLGPD

SEQ ID NO: 260557 - protein, 82 aa, Glycine max
  Clone ID: PAT_MRT3847_77305C.1.pep
IKTTKVFLQVPKTLSEHILAWAKRLTSQQPVLVIVNLQKMNGRRTRHSSSSLCPMCFTFIKLFHFFFIATCLMSFLLHSSLP

SEQ ID NO: 260558 - protein, 130 aa, Glycine max
  unsure (1)..(130): unsure at all Xaa locations
  Clone ID: PAT_MRT3847_77306C.1.pep
GTILRADLWANFWTTGTSRARVDLQRTHRIKGMIKMRATDGIPDNTGIAXTYAMNRNFRWRAKSDFNTIXSQDXESRNPACTKAKTMSFNPNPHADARSLELMKRTGSHXDITCGNGWTATPMQDVQVTM

SEQ ID NO: 260559 - protein, 66 aa, Glycine max
  Clone ID: PAT_MRT3847_77307C.1.pep
WTSWWIALTRTIWHHRNKLVFENQTFNATKVMDDVLLLLWSWLKATEKDFVFHFNHWSSNLKEAFV

SEQ ID NO: 260560 - protein, 174 aa, Glycine max
  unsure (1)..(174): unsure at all Xaa locations
  Clone ID: PAT_MRT3847_77308C.1.pep
AILLYSAFNFFVSGFAASDLSNFGVMGFGQKFIPVTTYYDGNRFITNLDGVWKGSNILGXATPLLLTVAVIELSDIAFAVDSIPAVFGVTRDPFVVFTSNLFAILGLRSLFLIISEGMSELKYLQPSIAVVLGFIGVKMILDYFGLHVSTEASLAFVASSLTIGVVLSLVNKSD

SEQ ID NO: 260561 - protein, 50 aa, Glycine max
  Clone ID: PAT_MRT3847_77309C.1.pep
LQDPDSEVVPPITYREFASQLVVHTVINVIYVKYLFFHIFPQLTSRMHKL

SEQ ID NO: 260562 - protein, 219 aa, Glycine max
  Clone ID: PAT_MRT3847_7730C.1.pep
MIYTAIDTFYLTDEQLAISPSRKDGIDEATETSLRIYGCDLIQESGILLRLPQAVMATGQVLFHRFYCKKSFARFNVKKVAASCVWLASKLEENPRKARQVIIVFHRMECRREDFPMEHLDLYSKKYVDLKMELSRTERHILKEMGFICHVEHPHKFISNYLATLETPPELRQEAWNLANDSLRTTLCGRFKSEVVACGGVYAAGRRFQVPLPENSPGR

SEQ ID NO: 260563 - protein, 44 aa, Glycine max
  Clone ID: PAT_MRT3847_77310C.1.pep
KKNQPCQPFLLIIQEDPTSIEGGYFKPYGTTYDTNNITNNHSSL

SEQ ID NO: 260564 - protein, 139 aa, Glycine max
  Clone ID: PAT_MRT3847_77311C.1.pep
VFFFFFFFFFFFFMFFHFFFFGREGFEMKSTDKKKKNGRGLVKEKKKNLRNFVISIKIAVRKERTIHQPGGGGGRKTQKMGLFFRSKKFTVVCDCNCPWTWEEKKKRKWGAWKINAKKKILGFFEPSPFTFEGEGETKS

SEQ ID NO: 260565 - protein, 89 aa, Glycine max
  unsure (1)..(89): unsure at all Xaa locations
  Clone ID: PAT_MRT3847_77312C.1.pep
SALSLLRSRVGQLSDIANSVKWLQTPCSTNAALYSELNELLRYFQARVHKLTIHHVCVESXIITVVIALDGMRRMTSLVWVRSSGDLDD

SEQ ID NO: 260566 - protein, 123 aa, Glycine max
  Clone ID: PAT_MRT3847_77313C.1.pep
LLKLFNILIYYSLFVILSSGKPFKYSFPIYIYHSFSFITLSNLVALSPFGGIHFLFPFFSLCLFSCHFLSMYKMAIMLLSYITSSAHLSCLSCLCFILLTHTLFLHCYFGKIVFVDNLLISQH

SEQ ID NO: 260567 - protein, 89 aa, Glycine max
  unsure (1)..(89): unsure at all Xaa locations
  Clone ID: PAT_MRT3847_77314C.1.pep
NSXRXTXXDSCTLLMSXIIEXIXVRTEXXXXSSXHXPSXSCXKLXKXXFXWXXHXRFXEDQLTVFSRXXXFXTXFPXKKKXCGCLYFQH

SEQ ID NO: 260568 - protein, 362 aa, Glycine max
  Clone ID: PAT_MRT3847_77315C.1.pep
VRNSRTRPIRFEQIPGKGRGLVASQPLKAGQIVLTESPLILYSASPLLTPSSSPYTYCDHCFRILPLTHNSTTVTCPSCSNHSFCSQKCFSLALKSSHSTWVCKALMSLQQHPNSTLLQQHPQERQVQARLIVASHKLFLHNHTPSELDTFLSLHGTPDDAILDAANFLHSLISPLFPPQAQLSVDLIAQLLAKDRLNSFGLMDPYSPDGPQRSIKAYAIYPKATFFNHDCVPNACRFDYVDSTNDDYEHNSTDIVIRLIEDVDEGKEVCISYFRIGRDYCTRKRILMEDYGFTCGCDRCKIEANWDGEENNSDLPHVRFLSKYVCERKNCAGTMAPLPPKDDVPSNVLECNFCGNFKIDAA

SEQ ID NO: 260569 - protein, 137 aa, Glycine max
  Clone ID: PAT_MRT3847_77316C.1.pep
LEDAIKYVKQLQERVKTLEEQAVDKTVESAVFVKRSVVFAGVDSSSSDENSDQSLPEMEARISGKEVLIRIHCDKNSGGAAAILRELEKHYLTVQSSSFLPFGNNTLDITIVAKMNNDYCLTAKDLIRSLSQCLRQL

SEQ ID NO: 260570 - protein, 165 aa, Glycine max
  unsure (1)..(165): unsure at all Xaa locations
  Clone ID: PAT_MRT3847_77317C.1.pep
MADQYPSPAQAHRATAPPPSLSAAFLQKLQDRAPNSTQLAGILPLLVTASVFLLLTGLTVAGAVLGLIFFLPLTLVPRPVPGPAPTRHXLFIVTAAFLSVCGFGVALVAVLSHVSDYFRGLHPPGSDRVDYARSRIYDTASHVKDYAREYGGYLQSKVKDAAPGA

SEQ ID NO: 260571 - protein, 77 aa, Glycine max
  unsure (1)..(77): unsure at all Xaa locations
  Clone ID: PAT_MRT3847_77318C.1.pep
NTTEGTLFLPYDKNRVVLKSSTDYRPEAXGDINAGLVLICSVVNVFYFIATQGSLQHTYXDFWEMIIQFDCPVIIML

SEQ ID NO: 260572 - protein, 34 aa, Glycine max
  Clone ID: PAT_MRT3847_77319C.1.pep
LAGNLIEIPHRLLNGHNLASKVLSTWLSDEGPRY

SEQ ID NO: 260573 - protein, 84 aa, Glycine max
  Clone ID: PAT_MRT3847_7731C.1.pep
SAGHILPGLGHEGFSREYWQPASMMVSDPRLYCWLNHWLEPGLEVGMPPVLLLLLLLLCEVWTCQAYMAFECLIYVRASTMREE

SEQ ID NO: 260574 - protein, 40 aa, Glycine max
  unsure (1)..(40): unsure at all Xaa locations
  Clone ID: PAT_MRT3847_77320C.1.pep
EFLFVQNVVFELLSIQGYSFKTAHHRAEKCVIXTLFFVLE

SEQ ID NO: 260575 - protein, 48 aa, Glycine max
  unsure (1)..(48): unsure at all Xaa locations
  Clone ID: PAT_MRT3847_77321C.1.pep
RLHGYLLQCIEQGKCPKKLVSSLSCEALVHVLEIKKVLQSSSVILIXV

SEQ ID NO: 260576 - protein, 64 aa, Glycine max
  Clone ID: PAT_MRT3847_77322C.1.pep
VGFSYSQSFVLHRLKVSFPVIEECLKRYYIYRSTTAGVVCSESEDTYKVCWRRVYHLIIGSIPQ

SEQ ID NO: 260577 - protein, 78 aa, Glycine max
  Clone ID: PAT_MRT3847_77323C.1.pep
CSTSLNPRFPTVHKIEYHFLSRFQVIQNRIILVPLVGQPAIEIGCLQTARINDTQTNLKKEVCNGDKNSNTVTAKCRI

SEQ ID NO: 260578 - protein, 123 aa, Glycine max
  Clone ID: PAT_MRT3847_77324C.1.pep
NLALRFNVKSTCQSQSPKSLHNSSFSMNNWVFPVAPGVGNPPIPPIFFFGHQHDPSITIPGHVAPPFGRFLGLGLPSTKQPIGAPFIFSTGTPIHPTVAFSANVNGESGIPDGPKKASVPNWL

SEQ ID NO: 260579 - protein, 48 aa, Glycine max
  unsure (1)..(48): unsure at all Xaa locations
  Clone ID: PAT_MRT3847_77325C.1.pep
PLDSAGGGKLFYIXFWDKETENFNNYAGLGPNYWGKILNGEKIINQGR

SEQ ID NO: 260580 - protein, 241 aa, Glycine max
  Clone ID: PAT_MRT3847_77326C.1.pep
MEYVSPEGLRLDGRRPMEMRQIRAEIGAVSKADGSAIFEMGNTKVIAAVYGPREVQNRNQQISSHALVRCEYSMANFSTGDRMRKPKGDRRSTEISLVIRQTMEACILTHLLPRSQIDIYVQVLQADGGTRSACINAATLALADAGIPMRDLVTSCSAGYLNSTPLLDLNYVEDSAGGPDVTLGILPKLDKVTLLQMDSKLPIDILENVMQLAIEGCKAIANYIREVLLENTKQLEYRRGV

SEQ ID NO: 260581 - protein, 57 aa, Glycine max
  Clone ID: PAT_MRT3847_77327C.1.pep
LVPSLKKKNTITKKNLLSSFIVYITSIMIKFYRFTKYKNNQNKNHHSYISNILNRFN

SEQ ID NO: 260582 - protein, 53 aa, Glycine max
  Clone ID: PAT_MRT3847_77328C.1.pep
KFNLILLPQNILIFSHKHQPTSLFLFIHQPSSQIINKNSIQSLLPIIILISYI

SEQ ID NO: 260583 - protein, 104 aa, Glycine max
  Clone ID: PAT_MRT3847_77329C.1.pep
IAEHSHPHPTRRNSLAGTTRKNNSLVPPPTTHRHQKNTNCSSKSIEVQQSMNLKKEEDFTDWLDDDSAQFVDGWIPSSDLEKLIGLECQHFALDGGFTDDFPHP

SEQ ID NO: 260584 - protein, 70 aa, Glycine max
  Clone ID: PAT_MRT3847_7732C.1.pep
IFRFSRHNVAASHIFMSMFACYCMLRPGLFKLLCTCVRLNSWHNVRSEVGSNFYWCDCHISAAIDITHTM

SEQ ID NO: 260585 - protein, 276 aa, Glycine max
  Clone ID: PAT_MRT3847_77330C.1.pep
MSQNNAFEELRKAETMITAEQPSPVSVLDAAFYKDDPPSPVKNKSDISKNLGEALSTDEDSEESSVDLLQEIDWIDEKLFNFNNNRDPDHKYIAKILLASGLLSGRSYSQIFHSPGHLINPKLFFALEQMKTKRPLNIEGSAKKIPRNINPEQMQRKLIFDVVNDILVQKLILDSSSALWCQPNELAGTTLKGKQLLDELCTEIDQLQPQNRNVSLVHEEENLKHHQAIWTNCCNEMPNIVLDVERLIFKDLITEVVRGEVANHPGTHCRQLVFYK

SEQ ID NO: 260586 - protein, 157 aa, Glycine max
  Clone ID: PAT_MRT3847_77331C.1.pep
IRLEDKFLLNTVLDMYSTLQEQVSVAYALPLPDTNGSMGTSELLKEKGNAAFKGRLWNKAVDYYTEAINLNGTNATYYSNRAAAYLELGCFQEAEEDCNMAILHDKKNVKAYLRRGTAREVLLCYKEALKDFQHALVLEPQNKTASLAEKRLRKSTS

SEQ ID NO: 260587 - protein, 81 aa, Glycine max
  Clone ID: PAT_MRT3847_77332C.1.pep
YSPKLSNARGLSTKDFENSSAYKGGHYTCNPFYNRDYTPYAKLFPYHILHQSGYLRAYQVFTPFFKLPKIPHMVQRIRKAS

SEQ ID NO: 260588 - protein, 83 aa, Glycine max
  Clone ID: PAT_MRT3847_77333C.1.pep
GFSYVGIFKPKVMYHMYLLSWRVWQGFMACIRSLFLPPLNIPSTCFLKMGGFFGARDSLFFSCPPPAPHVRSYDAYSFVILWL

SEQ ID NO: 260589 - protein, 45 aa, Glycine max
  Clone ID: PAT_MRT3847_77334C.1.pep
GQSSNKLMHLRVLYETPYLLLKMHSQYHPHLVEKERIYQLSHREN

SEQ ID NO: 260590 - protein, 94 aa, Glycine max
  Clone ID: PAT_MRT3847_77335C.1.pep
YGCEKTTEGLAFNPYKMEVFNGVLIEKLKKAGIITGVIDDFDMTFSWHFDNRCNDGIHYGRAPAKMKWRDGKIGHQYFVDLMLAHVLLNALCAR

SEQ ID NO: 260591 - protein, 48 aa, Glycine max
  Clone ID: PAT_MRT3847_77336C.1.pep
LKNTPMRNIATGRADKATHPHTLKAELTESISTLIIVFTSSGYCIVYN

SEQ ID NO: 260592 - protein, 114 aa, Glycine max
  unsure (1)..(114): unsure at all Xaa locations
  Clone ID: PAT_MRT3847_77337C.1.pep
GSRFKDTVSQQQRHTAFTGAACNHKVVGAHPYVTKRIMASPSVYVARFLLYTATELPATQLHXARDEHLDRSAETEEHICVLDDCGVPIIYTIVRLGHIINNTGLKGWLGKNTN

SEQ ID NO: 260593 - protein, 53 aa, Glycine max
  Clone ID: PAT_MRT3847_77338C.1.pep
VNPPGLRGGMLCGVVSLSHCHPVCRYSLQYDKLLKIAIMEGWQERRKRSGIKK

SEQ ID NO: 260594 - protein, 91 aa, Glycine max
  Clone ID: PAT_MRT3847_77339C.1.pep
MSLNVNDYDIDTPENNLALDKDFWSEVLSSDNSGVTSGFPTLDYDQFQPMSPLVTEEGVLIDCSSSTCDDGMDFWCNVYSRAEEFTQLLEL

SEQ ID NO: 260595 - protein, 194 aa, Glycine max
  Clone ID: PAT_MRT3847_7733C.1.pep
MASNFSLRTLMIFALAFSLVLQGTLGGIECESLSHDTCSFAVTSAGKRCVLEKQVKRTGEEAYTCRTSEIEADKLKDHIETEQCIKACGLDRKSLGISSDSLLQSSFTQKLCSPICYQCCPNVVDLYFNLAAGEGVFLPKLCEAQGLNARRGMAELKSSGIVAPGPVHGVQFTATPPINPVELTIEPAVAPSPN

SEQ ID NO: 260596 - protein, 66 aa, Glycine max
  Clone ID: PAT_MRT3847_77340C.1.pep
KHAAEVKFLDNLFLKDEKKLANQQEEPLKVHYKKFKMIKGIMADKTAHRLARKKNIHVAKNWARLD

SEQ ID NO: 260597 - protein, 48 aa, Glycine max
  Clone ID: PAT_MRT3847_77341C.1.pep
IKGIGSGDLLGSRVFVFTLRGDIKNIAQGDTVIDYAYMILIEIGNKMV

SEQ ID NO: 260598 - protein, 72 aa, Glycine max
  unsure (1)..(72): unsure at all Xaa locations
  Clone ID: PAT_MRT3847_77342C.1.pep
SAWFRWAAAXFHSFFFFFFSRKKPSFSSLVGGNGHILQTIQGLFHPNWFYITKTYRMPPSCLLVPPTRTKGL

SEQ ID NO: 260599 - protein, 406 aa, Glycine max
  Clone ID: PAT_MRT3847_77343C.1.pep
MLLYQPLKEEVETTIMMKGDNVLDLKTLIEELESSTIEVPSVFICPISLEPMQDPVTLCTGQTYDRSNILKWFSLGHNTCPTTMQELWDDSVTPNTTLYHFILSWFSQKYLVMKKKLEDVQGTALELLDTLKKKVKGQNIVRALKKLRQLVDSHVSTRKTVEENNGSSLISSLLGPFTSHAVGSEAIGILVNLELGSELKRNLMHPAKVSLLVDIMNEGTIQTKMNCAKLIQTLLVEGNPSETVVLSSLSLLVGVLRLVRDKKHPTSVLTGLILLKIVCSREPVRSSIISIGAVPQLIQLLPTLNNECLEIALHILEVLSTLPEGRLALKECPNIIPNVVKLLMRVSESCTQFALSILWAIYKLAPEECASKAVLKQKSTEFLKMCSLDYSTSIFISKCMLTATIQ

SEQ ID NO: 260600 - protein, 153 aa, Glycine max
  Clone ID: PAT_MRT3847_77344C.1.pep
ILLKIVSSRESVRGSIISIGAVPQLIQLLPTLNNECLEIALHILEVLSTLPEGRMALKECPNIIPNVVKLLMRVSESCTQFALSILWAIYKLAPEECASKAVEAGLAAKLLLVIQSGCNPVLKQKSTEFLKMCSLDYSTSILISKCMLTATIQ

SEQ ID NO: 260601 - protein, 46 aa, Glycine max
  unsure (1)..(46): unsure at all Xaa locations
  Clone ID: PAT_MRT3847_77345C.1.pep
ASKHNFSCAPTPSSLKIQNWHNRLNRWLKVNHTTAYIALRGXPSFL

SEQ ID NO: 260602 - protein, 118 aa, Glycine max
  unsure (1)..(118): unsure at all Xaa locations
  Clone ID: PAT_MRT3847_77346C.1.pep
YNEVHAQIGTDLHKMAVGDGDTRKGYMLXRKSSQDLMGLANTTAXRSLYADEKSDYSPTDCTNRAKNDSVYTERSXGMKNLADADAIRWNSNVAISCAMNSFFRGRDNSYLHTMCCQD

SEQ ID NO: 260603 - protein, 232 aa, Glycine max
  Clone ID: PAT_MRT3847_77347C.1.pep
TRPPKMLFRRFYRADIAAVTVVVPDDVSEDVTHQKVAASLPMQSECIVDDKVSYEGDVKEDKNNEPREEDEPYDSNLKLEGSIDTCDKSDDADAPMEVAHQDTVVVADDVFDQDVAGTLPMSPVNDALKEFVECNTDDDQGINKGDDNQDMNSETENLNLADGNMAHEDYQHPFNDDEKSADERDSMTGSEGGFVELESISHSAAIEVCTESSLPDVEAEENTSGNWEAEES

SEQ ID NO: 260604 - protein, 312 aa, Glycine max
  Clone ID: PAT_MRT3847_77348C.1.pep
MATSQGANSYRNARTSLKPHVKSKPTQQRRNSTGSVNGKEHAAVPGRVRVAVRLRPRNAEESVADADFADCVELQPELKRLKLRKNNWDADTYEFDEVLTEFSSQKRVYEVVARPVVESVLDGYNGTIMAYGQTGTGKTYTLGRLGEEDNAARGIMVRAMEDILADVSLETDSVSISYLQLYMETIQDLLDPANDNITIVEDPKTGDVSLPGASLVDIRDKQSFVELLRLGEAHRFAANTKLNTESSRSHAILMVHVKRSVKGRDAALSSENGNHSHVVKSIKPPLVRKGKLVVVDLAGSERIDKSGSEGHT

SEQ ID NO: 260605 - protein, 307 aa, Glycine max
  Clone ID: PAT_MRT3847_77349C.1.pep
LAPAYAVAGNIAPYFEFGSSFNKDCLVVQWSGDNPNSVAGLTLNIPGDLAISLGTSDTVFMITKDPNPGLEGHVFPNPVDAEGYMVMLVYKNGSLTREDVRNCYANKSWDVFNKFLQQTQPLNGGKLGFYYKEHEILPPLPVGFHRYIIENFSDTPDGLKEQEMEEFDPPSEVRALIEGQFLSMRAHAERFGMPSPPKRIIATGGASANHCILSAIASIFGCDVYTVQRPDSASLGAALRAAHGWLCNKKGGFLPISDMYVDKLEKTSLSCKLSVSAGDHELVSKYATLMKKRIEIENRLVQKLGRF

SEQ ID NO: 260606 - protein, 129 aa, Glycine max
  Clone ID: PAT_MRT3847_7734C.1.pep
LQGTYHVPKIPRCNTEGIPPPSLSPHSLTTEKGWAGLYLTSRLVEVTPASNPTKAALTDPRRSANSPDWPTQTLPCRPCNRTVSPCPTDIAPRDAKNTGTPFPLGRAWKKEPGPPAAGNPEEDAQMITS

SEQ ID NO: 260607 - protein, 114 aa, Glycine max
  Clone ID: PAT_MRT3847_77350C.1.pep
NKIFSLSKKLNPFFDLILAHQGAPSQSTIEAGVFKGATVIVLKDGPKKCSQFLLLLHTLVFNRPGYRGMGLMFFPPPSFKIFPQCPYIPGPLSFDLMTMLAFGCLQLTIWGGFE

SEQ ID NO: 260608 - protein, 114 aa, Glycine max
  Clone ID: PAT_MRT3847_77351C.1.pep
EASSQSPLVLFHRPPTLAYGGDHLSRGGRLLNAHLSPDPLPVFLSRHAASVTAFVNIGRLKIDTQLLSHLPSLQLLVCTSVVTDHVDLAECKRRGIARTNAGDAFSDDLSDCAF

SEQ ID NO: 260609 - protein, 193 aa, Glycine max
  unsure (1)..(193): unsure at all Xaa locations
  Clone ID: PAT_MRT3847_77352C.1.pep
MSWHTCRDIVNEYSKKIMALAYALFELLSEALGLNRFYLKEMDCAEGQLLLCHYYPACPEPXITMGNTKHSDGNTITILLQDQIGGLQVLHDSQWIDVPPMHGALVVNIGDIMQLMTNDKFISVQHRVLAKDQGPRISVASFFRTGISRVFGPIKELLSEEHPPVYRDISLKDYMAHRYTSGSGTSALLHFKL

SEQ ID NO: 260610 - protein, 254 aa, Glycine max
  unsure (1)..(254): unsure at all Xaa locations
  Clone ID: PAT_MRT3847_77353C.1.pep
MAATSTDKLEAGTVSSYDRKSEIKAFDDSKTGVQGLVENGVTKVPLMFYSENSNLNDGVTGASYSKISIPIIDLTGIHDDPILRDHVVGKVRYACEKWGFFQVINHGIPTHVLDEMIKGTCRFHQQDAKVRKEYYTREVSRKVAYLSNYTLFEDPSADWRDTLAXSLAPHPPEAEEFPAVCRDIVNEYSKKIMALAYALFELLSEALGLNRFYLKEMDCAEGQLLLCHYYPACPEPEXTMGHTKHSDGNTITIL

SEQ ID NO: 260611 - protein, 201 aa, Glycine max
  Clone ID: PAT_MRT3847_77354C.1.pep
MEVRRRVLRPAPAGEPLKPKQDPNSQQQQQPQQSYLTNAVFFGLFFSVAYFLLHRWREKIRTSTPLQAVTLSEMAAIVSLIASVVYLMAFFGITFILHPFLNSRSSPDDDIDLDIPKLPVPTPCSAALPPKLPPPPLPHHDEDIVLAVVSGSIPSYSLESRLGDSHRAASIRREAVERITGRSIQGLPAEGFDYDSILGQC

SEQ ID NO: 260612 - protein, 103 aa, Glycine max
  Clone ID: PAT_MRT3847_77355C.1.pep
SKELAGVTNQMQLANVQSHLEKLSPGIYHLNVMAKYAYRSYILAYNSHSMKDIFNVPRLDLQAVAASFCFSNPPKVNLNIDSSASKHRKKIRKVEGKINKGNL

SEQ ID NO: 260613 - protein, 49 aa, Glycine max
  Clone ID: PAT_MRT3847_77356C.1.pep
LTPTCHDSLSELVESTANADDLSSANADHIAHDLFNLRQSYDREDHSTD

SEQ ID NO: 260614 - protein, 101 aa, Glycine max
  unsure (1)..(101): unsure at all Xaa locations
  Clone ID: PAT_MRT3847_77357C.1.pep
PPQAQAPHAMWATSAQPPTQQEPASANKVQTLWIRDQEYWDDENYIYTCLAHTGEVTSSKEILNKRTSQSEGCGXIEFNKHAGAERILHTYNGAIMPNGRQ

SEQ ID NO: 260615 - protein, 65 aa, Glycine max
  Clone ID: PAT_MRT3847_77358C.1.pep
SGPVTYKSHTVPHSHKGVDVRGHHFDLLPIDGGGNLSPVKGLSLQMVQLRLASRSQSYAVLKPSQ

SEQ ID NO: 260616 - protein, 198 aa, Glycine max
  unsure (1)..(198): unsure at all Xaa locations
  Clone ID: PAT_MRT3847_77359C.1.pep
FSFRLEERAIKRKEFFPLLRLEILAKEAEKTNLQAXKSNENQEAEIRLLRKSMAFKATPMPSFYKEPPPKVELKKIPTTRAKSPKLGRHKESAMNNNSGEDKTCSIPRGKQQQNDSNKVKGHKDMVSKKPIRKTQAKVKSQENVTPENKEQCQDTHVNNSECKNDMELQSETGHAPNSTLLLNSTTPELLSYEVTVGV

SEQ ID NO: 260617 - protein, 56 aa, Glycine max
  Clone ID: PAT_MRT3847_7735C.1.pep
LLPTPMCMKKINLYQTLWHFASTSNKTVYMIFARPALRIYYTKTNLGTSCSSTGLF

SEQ ID NO: 260618 - protein, 67 aa, Glycine max
  Clone ID: PAT_MRT3847_77360C.1.pep
EGICKPGPNLTRDPKTHIKKGNATRAAAKKVKRTQEWALQQKRTTLKWGKIFKPFNKRGTCPYHSCF

SEQ ID NO: 260619 - protein, 42 aa, Glycine max
  Clone ID: PAT_MRT3847_77361C.1.pep
GRPFFFFFFFFFFFFFFFFFFFFFFKTKALLIGQTKGKYWFF

SEQ ID NO: 260620 - protein, 42 aa, Glycine max
  Clone ID: PAT_MRT3847_77362C.1.pep
FWINHDLETIIYKLLNKMIVKLKINLIRRHLFNYRCLENKFY

SEQ ID NO: 260621 - protein, 67 aa, Glycine max
  Clone ID: PAT_MRT3847_77363C.1.pep
PRSGLYTVGDFMTNNEDLHVVKPTTSVDEALEILVEYTRTGLPAIDDNCELVGVVADYDLIALNSIS

SEQ ID NO: 260622 - protein, 34 aa, Glycine max
  Clone ID: PAT_MRT3847_77364C.1.pep
LSTSKKYLTVHISCLIQIQHSISQQFKKKKRAAA

SEQ ID NO: 260623 - protein, 98 aa, Glycine max
  Clone ID: PAT_MRT3847_77365C.1.pep
QQDQNPRQLYKKKKRKISKGFTKKGKWSERTIQREGFHLVCYLSLSLIPIFNFCPLPWGIVVFCYDAFSEKERESDLLPCRFGLNKQRIRVVVFLEPN

SEQ ID NO: 260624 - protein, 46 aa, Glycine max
  Clone ID: PAT_MRT3847_77366C.1.pep
FFFFFFFFFFFFFFFFFFFYFFFFFFRSHKNYSHSISQMQYHSSFC

SEQ ID NO: 260625 - protein, 49 aa, Glycine max
  Clone ID: PAT_MRT3847_77367C.1.pep
SINKIRIFYFTLNGQYNFLCIILLSIYDARKKKKVFSMFINHAIVSQHL

SEQ ID NO: 260626 - protein, 45 aa, Glycine max
  unsure (1)..(45): unsure at all Xaa locations
  Clone ID: PAT_MRT3847_77368C.1.pep
XVLQXGSXVXWXRVAGIGXLSXXAXVVESEEXERXXNGSGKXRXS

SEQ ID NO: 260627 - protein, 135 aa, Glycine max
  Clone ID: PAT_MRT3847_77369C.1.pep
EVVSPLWHENLKVLFVTNGTSKIHYYTKELDGAVLGMEEAPITPFTCDMSATGDGIVAALMRMLTVQPDLLTDKGYLEHSIKYAIDCGVIDQWILGRVRGFPPHEDMEEDITPDSNGIRSISETEYRTAVGSASE

SEQ ID NO: 260628 - protein, 113 aa, Glycine max
  unsure (1)..(113): unsure at all Xaa locations
  Clone ID: PAT_MRT3847_7736C.1.pep
CLYFVGDLVFEGSNMTTCYFKCTVYFFIAFGNLADDTIYFEAFPHKLVQFGVYHEKVVLKYSQEEFLSXWSTXVRSATTLLADGCPILFAMVXHDISMSTLPGDFVICLYLFF

SEQ ID NO: 260629 - protein, 61 aa, Glycine max
  unsure (1)..(61): unsure at all Xaa locations
  Clone ID: PAT_MRT3847_77370C.1.pep
RFPPPAHPPPSCSMSTPVILSLMISEVSKNLFIPQXLFSLIEWKWELMCFVGLHSISFLYV

SEQ ID NO: 260630 - protein, 53 aa, Glycine max
  unsure (1)..(53): unsure at all Xaa locations
  Clone ID: PAT_MRT3847_77371C.1.pep
SAQGLRPRPRGEKDQHQEASLRVPKPGFMVEGPTXLETVTPFPYDVVNDPREG

SEQ ID NO: 260631 - protein, 121 aa, Glycine max
  Clone ID: PAT_MRT3847_77372C.1.pep
MALGRGSAVVLLLCFLVLQSEMARAATYRVGDSRGWTFNTVTWPQGKRFRAGDTLAFNYSPGAHNVVAVSKAGYDSCKTPRGAKVYRSGKDQIRLARGQNYFICNYVGHCESGMKIAINAA

SEQ ID NO: 260632 - protein, 53 aa, Glycine max
  unsure (1)..(53): unsure at all Xaa locations
  Clone ID: PAT_MRT3847_77373C.1.pep
RPSMVKGGSVDVFQRRRKCRRSGVQKGVDTLQGYISVLYSCRYCIDDCMGXVG

SEQ ID NO: 260633 - protein, 132 aa, Glycine max
  Clone ID: PAT_MRT3847_77374C.1.pep
TSGGKTGKYQAGTKGGAKKFPGGEMFRRGANREKKGKRGKRKTRQKNQKNYRPKMKRVKRGGPKRENTKKKWLGAPGPFWRRETRGAAKKRKETGGGRGGLEIGPKGGLFLKMRQRDQRGGTPPAVPRKKGK

SEQ ID NO: 260634 - protein, 49 aa, Glycine max
  Clone ID: PAT_MRT3847_77375C.1.pep
IKGGGVLKTKWGLIYILETKMMIDHVKTLILCVKRRANRLKGGIYCNRL

SEQ ID NO: 260635 - protein, 61 aa, Glycine max
  Clone ID: PAT_MRT3847_77376C.1.pep
IRHQILVGLVVDCARGEIELFVIADHGFLTSLSKHALSSFNQFMLKFNISPLCWAKVFVIL

SEQ ID NO: 260636 - protein, 93 aa, Glycine max
  Clone ID: PAT_MRT3847_77377C.1.pep
FLDPKGKGAFTGYSQAVPSPVGAKRYGGALAKGRPKRAASSKGGFPYRVPKPQPKTGEVIGVFQSFQPSATILGAKAPKDAKIQGIWDVQLES

SEQ ID NO: 260637 - protein, 249 aa, Glycine max
  Clone ID: PAT_MRT3847_77378C.1.pep
MPTHHASAAIFGIIGNMISVMVYLAPVPTFYQIYKKKCTDGFHSLPYLLSLMSSMLWLYYAFLKIHDGVVPLITINSIGCVIELIYILTYIKYAHKDARNLTYTLFAAMNIAFLTLVLSSHFALHGSHRVKVIGWICDAVSLSVFASPLSIMAKVIRTKSVQFMPFYLSFFLTLNAITWFVYGLSIQDKCIYVPNVGGFGLGLVQMVLYGIYRNGGESEKEQALAEGAINIVVVNPLGPAEVFNRRGSG

SEQ ID NO: 260638 - protein, 77 aa, Glycine max
  Clone ID: PAT_MRT3847_77379C.1.pep
LIRIMSAVRERGRIQMTRKIQLLKTTGHAITCSLSHIFTFLATRLFSLFSSSPCPASVIFKGRGGLPLVSSSRPCKH

SEQ ID NO: 260639 - protein, 213 aa, Glycine max
  unsure (1)..(213): unsure at all Xaa locations
  Clone ID: PAT_MRT3847_7737C.1.pep
MVIRMSKAYDAGELILVSKHIRTLDSLLRFHALTVTSGHSTNLFMASKLISLYDSLNNDPSSCSTLFHSLPSKDTFLYNSFLKSLFSRSLFPRVLSLFSHMRASNLSPNHFTLPIVVSAAAHLTLLPHGASLHALASKTGLFHSSASFVSLYSRCGRMELARKVFDEIXQRDVVAWTALIXRHVHNXEPEKGLSVSVTCMGLLEMMRKPMLKR

SEQ ID NO: 260640 - protein, 280 aa, Glycine max
  Clone ID: PAT_MRT3847_77380C.1.pep
MGSHNALAATFGILGNIISVMVYLAPVPTFYRIYKKKCTDGFHSLPYLLSLMSSMLWLYYAFLKIHDGVVPLITINSIGCVIELIYILTYIKYAHKDARNLTYTLFAAMNIGFLALVLSSRFALNGSHRVKVIGWICDAVSLSVFASPLSIMAKVIRTKSVQFMPFYLSFFLTLNAITWFVYGLSMQDKCIYIPNVGGFALGLVQMVLYGIYRKGSESEKEQGLGEGVINIVVVNPLGPAEVFPIAVDDNKVKDLVVVDDVTVSQQEKEKNVEAKDDCPV

SEQ ID NO: 260641 - protein, 66 aa, Glycine max
  Clone ID: PAT_MRT3847_77381C.1.pep
RSISRLGNARAELEMILLYRDAYDDQRHVYHVYLADYDIIKEAYDAVDLGINQYDTDQSARYVNNT

SEQ ID NO: 260642 - protein, 51 aa, Glycine max
  Clone ID: PAT_MRT3847_77382C.1.pep
TFFKLTKWDYLKDYAMQKELVWSQWSFALKKLRWIERSSLSWKAKAATSSC

SEQ ID NO: 260643 - protein, 113 aa, Glycine max
  Clone ID: PAT_MRT3847_77383C.1.pep
QCHQQEIKGEYFIYLQSSCSQYILLLNFILASIVDLNIFVQIHSLQAGTLIQTCIVEMLITPETKMGKHPVQHYQEFGLYIEANDVAAPPKCKGTHNDPIKAEVKYAERWHDE

SEQ ID NO: 260644 - protein, 96 aa, Glycine max
  Clone ID: PAT_MRT3847_77384C.1.pep
SPLTESRKDHLPPKSFCHPWRVSNNRSHGSNIVYPTMCRKPFYMGCVKSAFFYLPRGFGSPGWGLNRFLSPGSIYITGVPAFVRITLVCPRFNGFA

SEQ ID NO: 260645 - protein, 130 aa, Glycine max
  unsure (1)..(130): unsure at all Xaa locations
  Clone ID: PAT_MRT3847_77385C.1.pep
EREREDLFTERNALLMCGEDPKYLVNMLGGTYGAFMKLLQEQEEKXTYYKLFQREITEQYDLPLYDGFAINKSCYHAHAYDPLMLELIALIIKLHSMHXMILVICFSHHIIEHALGGKECRSANGCNIGV

SEQ ID NO: 260646 - protein, 87 aa, Glycine max
  Clone ID: PAT_MRT3847_77386C.1.pep
KGDDASNDETKALAEMTAGCGQFHENAARDYSLPAVDLYHTGDFNQATIYHSKALDIKERELGLGHPGTIKTYWDLSAFYYRLQHIE

SEQ ID NO: 260647 - protein, 63 aa, Glycine max
  Clone ID: PAT_MRT3847_77387C.1.pep
RLREDDRRGCLQIFTSSAVIRLAQSLSFSTRRAYTMHWALWRFCVHLMLLASDSYAPFDMATT

SEQ ID NO: 260648 - protein, 61 aa, Glycine max
  Clone ID: PAT_MRT3847_77388C.1.pep
TKKKCPPKKEKHPKYNKPKLGKKKAKKSENIKGKKNKKTGQKKKRQKKEEKLTGNHQISGA

SEQ ID NO: 260649 - protein, 64 aa, Glycine max
  Clone ID: PAT_MRT3847_77389C.1.pep
VLWPCGFPRFSWLGKFQFHHIKRGYNPHLLGNFACLQFPLYIFLGKRHVFFFFFPGPSVVFSQP

SEQ ID NO: 260650 - protein, 57 aa, Glycine max
  Clone ID: PAT_MRT3847_7738C.1.pep
IFFPKKPPISNTHLSNYYMKIIINKGENHQEKIRLRKLGYIKIPRIAFHVVLRGRVM

SEQ ID NO: 260651 - protein, 84 aa, Glycine max
  unsure (1)..(84): unsure at all Xaa locations
  Clone ID: PAT_MRT3847_77390C.1.pep
YQSTRKKLETRRLAYDTSLAKMQKTKKEDFRMEEELRAQKAKYERXSEEVFRRMQDIKESEVDMVQDLTAFLEAELSYYDRCRE

SEQ ID NO: 260652 - protein, 60 aa, Glycine max
  Clone ID: PAT_MRT3847_77391C.1.pep
GYEGFKSRVKFFSILDPPRICNYLSEVYDAGFLGPIFKVTMEELPNEAFTNTSADKCWES

SEQ ID NO: 260653 - protein, 146 aa, Glycine max
  Clone ID: PAT_MRT3847_77392C.1.pep
LCPPVTHFLSAFSPHLARQVETLSATVSGSGAEGVCPSHCITGYPLARPGGQLALRVGRLIDGFIWAAGTSGLLAVSATVRTSVSLFVSSLSRHPWCFPLGCRVGCCVEFYASHTVALYADMSFNITSYYKNQYRKAGTNPGNGPK

SEQ ID NO: 260654 - protein, 82 aa, Glycine max
  Clone ID: PAT_MRT3847_77393C.1.pep
ENVKKEGSEVICAYVHSSSSSGMPRPAPTWAGECAVRPPWARQTWGPLRHTSARGPILVHGLATSAASTTPPPSIPFVPFHL

SEQ ID NO: 260655 - protein, 56 aa, Glycine max
  Clone ID: PAT_MRT3847_77394C.1.pep
RLRENTEGEKDYDTYYHMHVRAVLDNMWAQNYSISEVDKLKANFIARQIIHGIATW

SEQ ID NO: 260656 - protein, 86 aa, Glycine max
  Clone ID: PAT_MRT3847_77395C.1.pep
DNLVNPFPLFVIVKSFFYKGDQACLELKKKVEKKNFVGGKGVSTTPPLSPSKRTPPRFPNLDLGFLTNGSENSFFSPSKNDFLNRG

SEQ ID NO: 260657 - protein, 50 aa, Glycine max
  Clone ID: PAT_MRT3847_77396C.1.pep
KVRELFLRTGKVLAPHASTQRTTAFNQMCNIMSSKKKKKKKKKKKKKKKK

SEQ ID NO: 260658 - protein, 49 aa, Glycine max
  Clone ID: PAT_MRT3847_77397C.1.pep
SVSLSTTPFLPFTVKNASTRIPSCTLFSYRKARNYQDSKKGGLACVGSS

SEQ ID NO: 260659 - protein, 58 aa, Glycine max
  unsure (1)..(58): unsure at all Xaa locations
  Clone ID: PAT_MRT3847_77398C.1.pep
GVEGLTHEXPPAFYFCTFDGCREWTPEGGGVTKYLLRGSLYELLHIPHGGSSLIGKGR

SEQ ID NO: 260660 - protein, 87 aa, Glycine max
  Clone ID: PAT_MRT3847_77399C.1.pep
VGYAGSALIKNPFVLFGASWGTGPFSKVFKGAGEVGPNPKKKFGGAENPPNRKVGVPFAPVLFGSPKPPEASGPNFSKPAPAQGLTP

SEQ ID NO: 260661 - protein, 184 aa, Glycine max
  Clone ID: PAT_MRT3847_7739C.1.pep
MGLSFGKLFSKLCAKKEMRILMVGLDAAGKTTILYKLKLGEIVTTIPTIGFNVETVEYKNISFTVWDVGGQDKIRPLWRHYFQNTQGLIFVVDSNDRDRVGEAKDELHRMLNEDELRDAVLLVFANKQDLPNAMNAAEITDRLGLNSLRQRHWYIQSTCATSGEGLYEGLDWLSNNISGKASFK

SEQ ID NO: 260662 - protein, 76 aa, Glycine max
  Clone ID: PAT_MRT3847_773C.1.pep
TCRHRLFPHCKQSWRVVLSLGMNSTTVCPCPFRSIIHTSDGTTTPLGHPRAHMFHPESRCCHEAHRRFYTRCLCSP

SEQ ID NO: 260663 - protein, 63 aa, Glycine max
  Clone ID: PAT_MRT3847_77400C.1.pep
NNNFKGLSGQSYGRTNKMHEKKHPSEVITRVKSSKSSTGPDHIQHGLCFVLFTAQFVQITDQS

SEQ ID NO: 260664 - protein, 124 aa, Glycine max
  Clone ID: PAT_MRT3847_77401C.1.pep
SRCEKHTDAMAMLGGGPIAIRTDTVASHVLTCVEPDSADASFAKFKPYLYCLSVWDYVMTFTIHIPLQLKVRALLFVKTTASLCADPNPSVYIQRLNLNYMQLHTDDIYLNLYADSKNEFEPIS

SEQ ID NO: 260665 - protein, 116 aa, Glycine max
  unsure (1)..(116): unsure at all Xaa locations
  Clone ID: PAT_MRT3847_77402C.1.pep
PEDLEDLPRGKFLFRMEGPNFFIIPYYKKLEFGGRKLTSSYFXEWIXMGLAPIFPWNLWITTRLAPIXFQIVFLTWSTTDQXALTEPTLKRVASLTWXKFNLRDLQEPSTQILLSS

SEQ ID NO: 260666 - protein, 119 aa, Glycine max
  unsure (1)..(119): unsure at all Xaa locations
  Clone ID: PAT_MRT3847_77403C.1.pep
PPHTPTPTGGGTKTTPARTRLTRDTKRLQQDPPVGNRGAPQDNTIMLWNAVIQGPEDTPWDGGTFKLTLQXTEDYPKKPPTVRQETRKIHPNIYADGSIRYGRTQKQRSTNKDAAAILT

SEQ ID NO: 260667 - protein, 130 aa, Glycine max
  unsure (1)..(130): unsure at all Xaa locations
  Clone ID: PAT_MRT3847_77404C.1.pep
GWPISRGRGGVRSVTDDXXXPXKEXEAYGXRXXXXEKPTETETEXXXLXKALXDYXYGTDLXRESXPSETRAXIVELITXLEAXNPNPXPTDALTLLXXKWILPXXXXFAGLFPXLXXWNTPLVKXXEIS

SEQ ID NO: 260668 - protein, 80 aa, Glycine max
  Clone ID: PAT_MRT3847_77405C.1.pep
KHHKKLKIPLGSGLQYRDCFRSYKKNCKQNQLMRPQLQSRFFKNLIGGSRPGLFFDMTKPDQWGDPDCKTVLQSQGPQKP

SEQ ID NO: 260669 - protein, 75 aa, Glycine max
  Clone ID: PAT_MRT3847_77406C.1.pep
KHHKKLKIPLWSGLQYRDCFRYYRKNCRQKQLMRPQLQSRFFQNLIAGSRPGLVFDMTKRDQCGDADCETALQSQ

SEQ ID NO: 260670 - protein, 70 aa, Glycine max
  Clone ID: PAT_MRT3847_77407C.1.pep
GWPFDSKVGDPRKKGLKAALLLEQKNPKGFFFNSSLFSSSLSSTSSISESTLNSLNPALKSLSSNGFEKR

SEQ ID NO: 260671 - protein, 122 aa, Glycine max
  Clone ID: PAT_MRT3847_77408C.1.pep
MCPTRMFYGPGGPYALFAGKDASRALAKMSFEEKDLTGDISGLGPFEVEALQDWEYKFMGKYVKVGTVKKTVPVTEPESPGEAAESNVHDAESSKPTEDDGPSESAAAKNDGTPSKIDADKE

SEQ ID NO: 260672 - protein, 263 aa, Glycine max
  Clone ID: PAT_MRT3847_77409C.1.pep
MAHAFTINITSPFFATLLLSDTHRTLKLNTHSVQQQQQQQEKKMALQLWETLKEAIVAYTGLSPPTFFTLLALILALYYVVSGLFPSSDHRHNTASRDLEPQMEPLRPPVQIGEVTEDDLKAYDGTDPEKPLLMAIKGQIYDVSQSRMFYGPGGPYALFAGKDASRALAKMSFEEKDLTGDISGLGPFELEALQDWEYKFMGKYVKVGTVTKTVPVTEPESTAEPSESTPHDESSKPTEDDGPSESAAAKNDETPSKVDADKE

SEQ ID NO: 260673 - protein, 77 aa, Glycine max
  Clone ID: PAT_MRT3847_7740C.1.pep
CAVPSWKIHVRVAASSSSSSSGSTINTDQLRSQLDHLHSEADATRAKGTLLNLPISIIVLVHSYFILSYFLYLFFFF

SEQ ID NO: 260674 - protein, 114 aa, Glycine max
  Clone ID: PAT_MRT3847_77410C.1.pep
MAGGVVPVDSSPLANGFAGKITLSVIITCIVAASGGLLFGYDIGISGGVTTMVPFLEKFFPAILRKAASTEVNMYCVYDSQVLTLFTSSLYLAGLVSSLAASRVTAVLGRRNTI

SEQ ID NO: 260675 - protein, 51 aa, Glycine max
  Clone ID: PAT_MRT3847_77411C.1.pep
NLSQYKIHPALLRKLMMIFNLGFLSVALSQPYKIYNDHVLLNSSFNNSKNT

SEQ ID NO: 260676 - protein, 55 aa, Glycine max
  unsure (1)..(55): unsure at all Xaa locations
  Clone ID: PAT_MRT3847_77412C.1.pep
KEIDYHNCSGYFDSKNKAMVEDLLKNYDNVSTXRVRMTMSSELLKPSNFITKTTR

SEQ ID NO: 260677 - protein, 93 aa, Glycine max
  Clone ID: PAT_MRT3847_77413C.1.pep
ASARECQESPPAQLTTWRDLFLECSFLNWSDIVKLKSEESVSTYCRACSNPSAGFVDCFLPAPAPIRLQPLSNGLSVGPVDEHVATRRKREER

SEQ ID NO: 260678 - protein, 118 aa, Glycine max
  unsure (1)..(118): unsure at all Xaa locations
  Clone ID: PAT_MRT3847_77414C.1.pep
FRVPTWVATLCAMDGTMAEKLPCDKPFARRKTSCSMVFNMEVRLEVFKKVRIIVRIMIKIRGKVGCHPYFIPCSVXGTGLPSKGLSXGVRQLXCDYGGLAGQVTRQMVNKMAHMCSGL

SEQ ID NO: 260679 - protein, 82 aa, Glycine max
  Clone ID: PAT_MRT3847_77415C.1.pep
RGSILGKESVCQICGSYSKGDKAIEELCRKMEKQKKNGAIEALVEIGGVKVLDDANERGRAMFIRARANHILCSEKKWFRLN

SEQ ID NO: 260680 - protein, 25 aa, Glycine max
  Clone ID: PAT_MRT3847_77416C.1.pep
PFTLVNCSYSYLDVCKSCTLMTVKA

SEQ ID NO: 260681 - protein, 184 aa, Glycine max
  Clone ID: PAT_MRT3847_77417C.1.pep
MFFPKLAIIITALALVPLIFINESDSAEVTPFASQKVNLSVYYASLSQPCATFIVKNLEEIFHSDLINILNLQLVPWANAYVDKTNHSIICQNGPDECELNSLEACALNVLDDVNKHYALIYCFEFLAIEGRHKKWQDCFSQLDLPEEPILSCYNRGNGTELGQKSINETALLYAPHEFLPWVM

SEQ ID NO: 260682 - protein, 75 aa, Glycine max
  Clone ID: PAT_MRT3847_77418C.1.pep
DITFVSFFFSRQINYFILQLYLSSLSICPFIVKTYIRKGNYTNSISSENGQKDYSRFIGPGRNAYHYHVCAKLPS

SEQ ID NO: 260683 - protein, 81 aa, Glycine max
  unsure (1)..(81): unsure at all Xaa locations
  Clone ID: PAT_MRT3847_77419C.1.pep
RRLTKKKTFKKFNFRXVDHHALLHMYTVELHKMFSTWPHRKLDRGLTTKQMVLIKNLXKTKGXAPPCEKPEPVRTHLRNMI

SEQ ID NO: 260684 - protein, 52 aa, Glycine max
  Clone ID: PAT_MRT3847_7741C.1.pep
GNDLLQPILHKSPLSLSMSHSLTHSAKCVVVTLSREVLALLCAFPNFDDIKE

SEQ ID NO: 260685 - protein, 79 aa, Glycine max
  unsure (1)..(79): unsure at all Xaa locations
  Clone ID: PAT_MRT3847_77420C.1.pep
SRRKSREAHFTAASSVRRVLMSAAXLSDRCFSRSTAARTIPGRKDNKVQVVQGSYMGRESKLVHDYRHKWVIHMGRMTR

SEQ ID NO: 260686 - protein, 44 aa, Glycine max
  Clone ID: PAT_MRT3847_77421C.1.pep
FEVPANLLIQLNTRVLSVTHSTLRREGWKPNCYKLELYRNRSHI

SEQ ID NO: 260687 - protein, 39 aa, Glycine max
  unsure (1)..(39): unsure at all Xaa locations
  Clone ID: PAT_MRT3847_77422C.1.pep
DCAPGKTKLPRCYLPHXTRTSRHXSNLRITVMSEPIRLE

SEQ ID NO: 260688 - protein, 103 aa, Glycine max
  Clone ID: PAT_MRT3847_77423C.1.pep
MNIGLVVIVAVVLWSGVAAAHAQRVPCYFILGDSSADYGNNNQLWSNARANYLPYGIDSSVGPTGRFSNGKTTADVIAELLGLAGFIRPYACAGARDIFYGVN

SEQ ID NO: 260689 - protein, 160 aa, Glycine max
  Clone ID: PAT_MRT3847_77424C.1.pep
MKTEEGTNASSCRSFDRMQDDLWQVSNNKTTVTRTTNDIDSFDVWNDFTSSANTQDHSTNVWKQTVNLTSANDSETNLPVSNSSHDKDFSGFSQHDLFSGQFGSSLPVTSSNRVDEVDITRGNSGDVSTAGGSKDDVEMLMSQMHDLSFMLENNLSIPPK

SEQ ID NO: 260690 - protein, 85 aa, Glycine max
  Clone ID: PAT_MRT3847_77425C.1.pep
LAFLFVYSAIKLIKHNYFPVFHFKIFELFFFFFCFFFFFFFFLFVTTAQSYYSTLFLFLKYISSGKKDRPCCLCMPLTYNTRFYS

SEQ ID NO: 260691 - protein, 138 aa, Glycine max
  unsure (1)..(138): unsure at all Xaa locations
  Clone ID: PAT_MRT3847_77426C.1.pep
MIPASNPNPKNVYLIRGLXVEFPYQXYGSQFVFMGRVISTLXLAQKEGHCRTLLESPTGTAKSLSLLCSSLAWQHHYKSQQHHLKPVSEATTDPLAHGGRFVPXSEIPDHTQTEFNNKNKMKKEAPTIYYASRKHSQI

SEQ ID NO: 260692 - protein, 108 aa, Glycine max
  Clone ID: PAT_MRT3847_77427C.1.pep
GQDSLIWRVCRECLPTRIQLQTREMVFKCLKSFSAENTRFWLCASRWRRQFCTGWIDVVMEVQEKETLAMFKAMKWVEQLPFSVVIFESDCKGLVNQVKSRNNSTTEF

SEQ ID NO: 260693 - protein, 57 aa, Glycine max
  Clone ID: PAT_MRT3847_77428C.1.pep
PCAIMMDQVSQQTPATHHPSGYEEPESSPEMCTEGWRERRFVHFVTRSLCSMAALLI

SEQ ID NO: 260694 - protein, 116 aa, Glycine max
  Clone ID: PAT_MRT3847_77429C.1.pep
QGSECSTQCRIRGSHGPPCWFSSTMFPIFVHTFKNTLARKLTSQVPCSRLLLRVQLKLSLLFTTSAILCSTNTGLNHHVPCLLGFWAWQDSGSHWVPGGDRAFSVRYAAVPRDLCQ

SEQ ID NO: 260695 - protein, 73 aa, Glycine max
  unsure (1)..(73): unsure at all Xaa locations
  Clone ID: PAT_MRT3847_7742C.1.pep
NXXNNKXYWFCXGVTESDKKKSKXQDXERAKKXWXMDXIXPLXCXXXSXXXXXSSRFGSXSSRIPSLRTRACD

SEQ ID NO: 260696 - protein, 153 aa, Glycine max
  unsure (1)..(153): unsure at all Xaa locations
  Clone ID: PAT_MRT3847_77430C.1.pep
FPANKDNAVVYSDLVVNGVFWPVPWVRLGNPPRVSFRKKGTPNFLFFLFKLPEIGPQFYPPRGFPARTTPKFGQGLFFFPLKICVLERGPGPPPPRGTGACAPVFSPLFXGRFGGNCPVFFPGGPLPFXWGGGDFLVFFPGPPPVVFFGFLPP

SEQ ID NO: 260697 - protein, 91 aa, Glycine max
  unsure (1)..(91): unsure at all Xaa locations
  Clone ID: PAT_MRT3847_77431C.1.pep
NESHQDPPPKXEAFCTPLEGFLYNATQGYTSKEPSLNLDQNRELLIETTNQCLGNLPRRIGYNVIKLSDPWDYSSSTAGNHYGSNTGIHGS

SEQ ID NO: 260698 - protein, 48 aa, Glycine max
  Clone ID: PAT_MRT3847_77432C.1.pep
CYSRPSRSHHLSFGGGIPGMVQLPLVFWESLLAQERHLLALLSSSRSR

SEQ ID NO: 260699 - protein, 61 aa, Glycine max
  Clone ID: PAT_MRT3847_77433C.1.pep
VELHVRSLSISDDSLDAHTVMPILIAPMQQVGNTMLSSEVTTSLPAPSPFKPSQHLTHSTT

SEQ ID NO: 260700 - protein, 137 aa, Glycine max
  Clone ID: PAT_MRT3847_77434C.1.pep
MFDVLVSTATLAWGVNLPAQTAIIKGTQIYNPQKGAWTEIGPLDIMQMMGRAGRPQHNALGKGILMTHNTELQYYLSLMNQQLPIESQLVAKLPDTLNAEIVLGTVTNVVEAMEWLTYTYLHVRMCKAPALYGIVAD

SEQ ID NO: 260701 - protein, 42 aa, Glycine max
  Clone ID: PAT_MRT3847_77435C.1.pep
FFFFFSQNGLKMINSDGGKKIGPFTNGENFFRTKAGPINNNN

SEQ ID NO: 260702 - protein, 203 aa, Glycine max
  unsure (1)..(203): unsure at all Xaa locations
  Clone ID: PAT_MRT3847_77436C.1.pep
LSTLHSLTLPHQESSPQDADXIFNGRKVTGLIPNAVAMLDGLCKDGLVQEALKLFGLMREKGTIPEIVIYTAVVEGYTKAHKADDAKRIFRKMQSSGVSPNAFSYMVLIQGLYKCSRLHDAFEFCVEMLEAGHSPNVTTFVGLVDGFCNEKGVEEAKSAIKTLTDKGFVVNEKAVRQFLDKKAPFSPSVWEAIFGKKAPQRPF

SEQ ID NO: 260703 - protein, 160 aa, Glycine max
  unsure (1)..(160): unsure at all Xaa locations
  Clone ID: PAT_MRT3847_77437C.1.pep
WFWFQKALKLFGXLIWEKGPIPEIVIYQAVVEGYTKAHKADDAKRIFRKMQSSGISPNAFSYTVLIQGLYKCNRLHDAFEFCVQMLEAGHSPNVTAFVGLVDGFCNEKGVEEAKSAIKTLTEKGFVVNEKAVGQFLDKKAPFSPSVWEAIFGKKAPQRPF

SEQ ID NO: 260704 - protein, 74 aa, Glycine max
  unsure (1)..(74): unsure at all Xaa locations
  Clone ID: PAT_MRT3847_77438C.1.pep
KSLSSMSIPYPRDTPPRRLSIQGIXKVKNPLPSSHSSDPVTKSNLALIPVVGELRGVNTGRFTLISHEQPHKEI

SEQ ID NO: 260705 - protein, 104 aa, Glycine max
  unsure (1)..(104): unsure at all Xaa locations
  Clone ID: PAT_MRT3847_77439C.1.pep
ENPGRPTRTDVATETQEGAGGGKKTMGGGQDSKTNRTEEEDANTKRMTAATTQHEKEGIEPKQXRRPEEGSETAKDKSKDSKTNLMRSCEKNGKTDNEGDEPTN

SEQ ID NO: 260706 - protein, 156 aa, Glycine max
  Clone ID: PAT_MRT3847_7743C.1.pep
HMRDNILIQLCSCHRCHSQKTKCSGKRPCDGCLSSGRAEECQFPAKERKIRVDERSAERRTSVIKVDKPPVISINSKKRTGVCEPSLPGARHWETSESPQIAKIKTNLRRCPKRRVTCLILSLTDTRRTQSTNGLWSLDSLEKHNALLSATDSYHA

SEQ ID NO: 260707 - protein, 109 aa, Glycine max
  Clone ID: PAT_MRT3847_77440C.1.pep
AFPNKIVFDDNLVWAHTQQFCDGNFPVDSWLPIIVNSLYPVSQSPSVAATGNVTCGLGRGGLPTTVRISSALNNRSSYINKRIRTALWKGEKIVFLTRIDPLPVSLLAV

SEQ ID NO: 260708 - protein, 70 aa, Glycine max
  Clone ID: PAT_MRT3847_77441C.1.pep
RVALCIVPVPPFPITLSSLKCWVGLSSFPKLVSHVNHSMSMIGSWNLILNINHFNYLSRSSINEVQRNYI

SEQ ID NO: 260709 - protein, 116 aa, Glycine max
  unsure (1)..(116): unsure at all Xaa locations
  Clone ID: PAT_MRT3847_77442C.1.pep
SLSHFSCFSIKNINWPFQISARGYVNSSPXPPXKYPPVSPPYHYSSPPPPPNXPYYYHSPPPPFPSPPKNPYYYHSPPPPLPPPPNKPYYYHSPTPPSPFPPYKPYYYHSPPPSLL

SEQ ID NO: 260710 - protein, 116 aa, Glycine max
  Clone ID: PAT_MRT3847_77443C.1.pep
GGEKKKPLKNYRGPFFQENLTFLAPILFLNRPKEPLTSGVPRGPQNPPGKFGKGFKAQFLEGGGPRKIIGHTFNRAPKFLGGATPGELGAPQPQKEPCLKGGAPPFGEVFNLPGLW

SEQ ID NO: 260711 - protein, 203 aa, Glycine max
  unsure (1)..(203): unsure at all Xaa locations
  Clone ID: PAT_MRT3847_77444C.1.pep
GIDNDPSAGSPTETLLRLLLPLNDKVQWTSHXSRAANRSRRRNPNTSPDHSIGRSDGRCVQRAGTXSTRADDSRLLGIPRXRPTIAMIYPHHDEISKXYPDLSAKAIDSLNTSVXARVRPRTSKGXHRPVIASNFRGLSGHSPSKKLAGEGYLHIAIXQAEVSFVNGINQTNRSTNXERPCTTTHRIKKELSVCQSLLCLDLV

SEQ ID NO: 260712 - protein, 62 aa, Glycine max
  Clone ID: PAT_MRT3847_77445C.1.pep
TYKYLCTNKDKQLASSMIYSPPVTTVKRAGACMVAPFTGLKYMAGFTTRYTNTDITSIASNS

SEQ ID NO: 260713 - protein, 110 aa, Glycine max
  unsure (1)..(110): unsure at all Xaa locations
  Clone ID: PAT_MRT3847_77446C.1.pep
PTFFGSPVCPTRPVLFVXLPFRIWFNQSRLXNPGNXPRTMFRMNTACCXPITVPSGLHLPVVELRMAPAXREPTFSAMDVPLASRTIINTTTSRPNKPIFSSLGGLRCCR

SEQ ID NO: 260714 - protein, 239 aa, Glycine max
  Clone ID: PAT_MRT3847_77447C.1.pep
YGCEKTTEGYGCEKTTEGYGCEKTTEGYGCEKTTEGRTRGTENVKKEEGRRKYRGVRQRPPWGKWAAEIRDPFKAARVWLGTFDTAEAAARAYDEAALRFRGNKAKLNFPENVTLRQPQFTVSNPPSSLVSITTSIDPVVHSTRPLLLPSQASTATNVYEYFQLSGFPTNTNLYDGNRMFVTSNAMASHHLQSSSSLLSSSSSAFVSSVTSQDTSLSSLYSGQLPPWSKVSGHSSSSSG

SEQ ID NO: 260715 - protein, 323 aa, Glycine max
  Clone ID: PAT_MRT3847_77448C.1.pep
MGLMECNVEDNKNLYLHAPTFIEWLKPCSSPNYSYLNSNTISYSSSSSPSSSSFSLTQNEFVQETIQFLPILSEKASKDEDQSFEVKEEKVEQVTVALHIGLPDSNKGHADEVDEKMIFHVKEEEESSKRSFHGCSFNNQERRFWIPTPAQILVGPMQFACSICSKTFNRYNNMQMHMWGHGSEFRKGPDSLKGTQPAAMLRLPCYCCAQGCKNNINHPRAKPLKDFRTLQTHYKRKHGTKPFMCRKCGKTFAVKGDWRTHEKNCGKLWYCTCGSDFKHKRSLKDHIRSFGKGHNPHPPFEAFEDEKECITGSDEDEVNAHHT

SEQ ID NO: 260716 - protein, 191 aa, Glycine max
  Clone ID: PAT_MRT3847_77449C.1.pep
MDTPPSERSVEAENWAMPRTGLSMPSLPDSSDISSYLLSKVLTADDIKPPKALLHRVSGKGELAEALYILRPVVYALAMQHFSGDRKSWRPWLIGVSMEYGARQLAKKDFQERLAGGLRGLTGLEKEELRKRGWSLGWWAMRGAFYENITKAWIHSITGKLKGKPLLDMVGGVIEDYEFLWDQYYFPTATL

SEQ ID NO: 260717 - protein, 105 aa, Glycine max
  Clone ID: PAT_MRT3847_7744C.1.pep
QIEIDTVGYTDTSYTFSVSRSHVECFLCRSWSLLLWISWSLLLSFSVTIGSRMLWSFSVSLYLALCYCFVSRCLSQCLFISLSFCPLSEYRSVCICVICLFINLS

SEQ ID NO: 260718 - protein, 171 aa, Glycine max
  unsure (1)..(171): unsure at all Xaa locations
  Clone ID: PAT_MRT3847_77450C.1.pep
VEVATLASQIRKDXTLSVEQLAQVKLVEQLPLVSEAFLEAKGDIEEADKXLGVXEAKKRKVLSLKNDYKEKVAQRESEMDRNTLAIQEIDDQIRQLQSKRSELSAALESMQKGKVELTSGEAGVANSILSLVGEINHGLSEKSKWEMKKANSARRVAEIQKKFINIRGLKF

SEQ ID NO: 260719 - protein, 56 aa, Glycine max
  Clone ID: PAT_MRT3847_77451C.1.pep
RNSSLLREGFFLLQIPGKEGTIPKPYGQFNWSGLITSFHLRKAKIIFFPGGKGLKN

SEQ ID NO: 260720 - protein, 478 aa, Glycine max
  unsure (1)..(478): unsure at all Xaa locations
  Clone ID: PAT_MRT3847_77452C.1.pep
MAIAYWSLTSSTLCRTMSTPPVVERVSECFIKPQHSNHESNQICYLTPWDIAMLSAHYIQKGLLFKKPSSPLVSHNNFIENLLEKLKHSLSLTLFHFYPLAGRLVTHQTHDPPFYAVFVDCNNSDGARFIHATLDMTISDILSPVDVPPIVQSLFDHHKAVNHDGHTMPLLSVQVTEFVDGVFIGCSMNHTLGDGTSYWNFFNTWSQIFQVQXSSHEHDVPISHPPIHNRWFPEGCGPLINLPFKHHDDFINRYETPLLRERIFHFSAESIAKLKAKANSECNTTKISSFQSLSALVWRCITRARRLPYDQRTSCKLSANNRTRMEPPLPQEYFGNSIYTLNAGTATSGKLLENGIGWAAWKLHKSVVNHNDRAVLETLKEWLESPLIYDLGRYFDPYCVMMSSSPRFNMYGNEFGMGKAVAVRSGYANKFDGKVTSYPGREGGGSIDLEVGLLPHIMSALESDEEFMNVVSVSNPLC

SEQ ID NO: 260721 - protein, 57 aa, Glycine max
  Clone ID: PAT_MRT3847_77453C.1.pep
AYNDWKIKKCPHVIIPTRNCLFPKSREGFPNYPSYQLDHGVSKKKKKKNQKKKNQPK

SEQ ID NO: 260722 - protein, 70 aa, Glycine max
  Clone ID: PAT_MRT3847_77454C.1.pep
YHIGTQRHDILASAVCPAAWTRCTALIYAHISLAGAHDGLLVSEPSTADYDTMTTELSSNITRSREPAAT

SEQ ID NO: 260723 - protein, 61 aa, Glycine max
  Clone ID: PAT_MRT3847_77455C.1.pep
SKPMRTEELSPERTYLETLIRYPHRQLRKSSILLLLKVLNRIVGPIMVPIIPIIIVISRRS

SEQ ID NO: 260724 - protein, 93 aa, Glycine max
  Clone ID: PAT_MRT3847_77456C.1.pep
MCHLWLTETDKGSTNVTAAVQQIFNDHGTSRKIIFVNSSTYILTETVTIPKDVKVHGEAWSQFAAYGNAFSTTRYAFRPSKWIYADAISATRK

SEQ ID NO: 260725 - protein, 70 aa, Glycine max
  Clone ID: PAT_MRT3847_77457C.1.pep
GFTRGVKPNWGRGNGPPFLRAGYKLLKNQNLKPGGPRGGPYAQVSWVQGGFNPLRNPPLDRVGGDPKGFP

SEQ ID NO: 260726 - protein, 101 aa, Glycine max
  Clone ID: PAT_MRT3847_77458C.1.pep
MVLLTYWLHHQELSGYDSSPGDDSANKMNKPSEPLSISADVQDTKMPLPPLALAPSQHGIKPCTVSEELADLVDAVRPLAQGQKRGVKLSELLSSPLLAAV

SEQ ID NO: 260727 - protein, 65 aa, Glycine max
  Clone ID: PAT_MRT3847_77459C.1.pep
MIYTLYSISLIKTYESLFFRALRCFLISSTPFVSPVVKCFAANSGMASSRIMIVVRFQSKRLIDR

SEQ ID NO: 260728 - protein, 378 aa, Glycine max
  Clone ID: PAT_MRT3847_7745C.1.pep
GDSDGGECGKKLGIEAVIVAPSRELGMQIVREFEKVLGMDNKRAVQQLVGGANRTRQEDALKKNKPAIVVGTPGRIAELSASGKLRTHSCRFLVLDEVDELLSFNFREDMHRILEHVGRRSGADQNSDSRKAERQLIMVSATVPFSVVRAARSWGCDPLLVQAKKVAPLGTVSPSEPISLSQSSPSSSPSLAMPSPAAVESLPPALKHYYFVTRVQHKVDVLRRCIHALDAKFVIAFMNHTKQLKDVVFKLEARGMKAMELHGDLGKLARSTTLKKFKNGEVRVLVTNELSARGLDVAECDLVVNLDLPTDSIHYAHRAGRTGRLGRNGTVVTICEESEVFVVKKLQKQLGIPIASCDFAEGKLLVSEEEKTVSTSER

SEQ ID NO: 260729 - protein, 51 aa, Glycine max
  Clone ID: PAT_MRT3847_77460C.1.pep
FFFWGGGMVTTVGNYYFLTTCHSKCLVKTLLRFSIWSVCKTTSPPSFSLQK

SEQ ID NO: 260730 - protein, 88 aa, Glycine max
  Clone ID: PAT_MRT3847_77461C.1.pep
SGGRPGVPKVLDFKGLPFTCSSQKGVRKLVPQLWGPLLFGGWGYFVPPEGDAVGHPLWGGPPPHGLGFPTRRVFPPFLEGLFSINLGF

SEQ ID NO: 260731 - protein, 66 aa, Glycine max
  Clone ID: PAT_MRT3847_77462C.1.pep
SKNIHNHLIHPPIVITKLNNNESKGQEREGKVYDVDLMGWAGPGRMRISPSNPSTDCTAQWACGRV

SEQ ID NO: 260732 - protein, 241 aa, Glycine max
  unsure (1)..(241): unsure at all Xaa locations
  Clone ID: PAT_MRT3847_77463C.1.pep
AERYRYPDVPSFLVYVHNRLVVRFRTLEKPKEDEFSLELTKLDTYDNVVEEVAQHIGLSDPSKIRLTSHNCYSQQPKPQSIKYRGMEHLSDMLIHYFWQRDILYYEVLNIPLPELQCLKTLKIAFHHDTNDEVVIHTIRLPRHSTXVSDVPHDLILKGDLSQTXAKLRLLEIFYHKSYKIFPVSEXIENINDQXYWALRAEEGLXEEKNLGPHDPVIHVYHFLKAQLXNHEQVKNFGHPFY

SEQ ID NO: 260733 - protein, 420 aa, Glycine max
  Clone ID: PAT_MRT3847_77464C.1.pep
SSKKTVENVASKLFVQCSRQKGLIKIYRHLLNYRKNVFNLCSLPNLEGLTYRQIRHRFPEAVVCGLYRSGKIYFHPNDGEILQQTDKVLFIGSLRDTNTKKPEVILDGKEGMYEIHNEEILEKDVEHAIELSKVRLANIVKRPNRSGSKGSDGNLGPKECILLLGWRPEAVEMIQEYDNYLGPESVLEVLSDTPLDDRINKASNINGHNKLKNVRVSHRIGNPMDYDTLKETILNIQNSLKNEDVPMSIAVISDRDWLLGDPAKADKLSAYSLLLAENICNKLGVKVQNLVAEIVDSKLGKQISRIKPSVTYIAAEEIMSLVTAQVAENSELNEVWKDVLNAEGDEIYVKDIGLYMKEGENPSFSELSERAYLRREVAIGYVKNKKNVINPVPKSEPLSLEMTDSLIVISELEGEQPVVL

SEQ ID NO: 260734 - protein, 277 aa, Glycine max
  unsure (1)..(277): unsure at all Xaa locations
  Clone ID: PAT_MRT3847_77465C.1.pep
STVAAITGSDGNLGPKECILLLGWRPEAVEMIQEYDNYLGPESVLEVLSDTPLDDRINKASNINXIINSNVRVSHRIGNPMDYDTLKETILNIQNSLKNEDVPMSIAVISDRDWLLGDPAKADKLSAYSLLLAENICNKLGVKVQNLVAEIVDSKLGKQISRIRPSVTSIAAEEIMSLVTAQVAENSELNEVWKDLLDAEGDEIYIKDIGLYMKEGENPSFSELSERAYLRREVAIGYVKNKKNVINPVAKSEPLSLEMTDSLIVISELEGEQPVVL

SEQ ID NO: 260735 - protein, 56 aa, Glycine max
  Clone ID: PAT_MRT3847_77466C.1.pep
SLLKKISAMSVAITPTRKRRNKHTFSTTLSLFKHILLNWIRCPSLSCTCSDTYVYL

SEQ ID NO: 260736 - protein, 36 aa, Glycine max
  Clone ID: PAT_MRT3847_77467C.1.pep
QSWSLDRRRLKAQHLHPSLRHLLKYLRSFAEARVEF

SEQ ID NO: 260737 - protein, 76 aa, Glycine max
  unsure (1)..(76): unsure at all Xaa locations
  Clone ID: PAT_MRT3847_77468C.1.pep
HEESHNEQLIFFERQTFIGKLKKRKRKMEVDAIQCSCAFHENHLVTXSIXLSEYLPSSIMACTFKLLTTXFFFFFL

SEQ ID NO: 260738 - protein, 403 aa, Glycine max
  Clone ID: PAT_MRT3847_77469C.1.pep
VGVTLFSLGHLWPLRLRKKVCGGRQMRVFAPSPSGFRKVILATNIAETSVTIPGIKYVIDPGFVKARSYDPGKGMESLIIIPTSKSQALQRSGRAGREGPGKCFRLYPEREFEKLEDSTMPEIKRCNLSNVILQLKALGVDDILGFDFIDKPSRAAIIKSLEQLFLLGALTDECQLSDPVGHQMARLPLDPLYSKALILASQFNCLEEMLITVALLSVESIFYSPRDKLEEARTATKWFSARRRQKGTLINVYRASNDFLEKRSMEMNTAKTEKVYRKWCKENFINSRSLRHARDIHRQIQGHVEQMGLNLSSCGDDMLQFRRCLAASFFLNAAVKQPDGTYRTLASGQVVQIHPSSVLFRQKPECVIFNELVQTNHKYVRNLTRVDYLWLTELAPQYYAMHN

SEQ ID NO: 260739 - protein, 581 aa, Glycine max
  Clone ID: PAT_MRT3847_7746C.1.pep
MGVWWWKLFFAALAGILFSTQHCASQKVPNYTFMHNATTAPDVSYYDYIVIGGGTAGCPLAATLSQNYSVLLLERGGSPYGNPNISDLAAFGAALSDTSPTSPAQRFISEDGVINSRARVLGGGSCLNAGFYTRASPQYVREAGWDGRVVNESYEWVEKIVAFEPQLKQWQSSVRDGLIEIGVVPNNGFTYDHIDGTKVGGTIFDQNGFRHTAADLLQYAKPTGITLLLDATVHRILFRVKDRSKPMAHGVVFRDSLGRRHKAYLKPDPRNEIIVSAGALGSPQLLMLSGIGPEEHLKAHNIRITLDQPLVGQGMSDNPMNAIFVPSPVPVEISLIEVVGITTFGTYIEAASGENFAGGSPKDYGMFSPKIGQLSTVPPKQRTPEALAKAIEVMETLDQAAFRGGFILEKIMGPISSGHLELRTRDPNDNPSVTFNYFQDPRDLQRCVQGLSTVEKIIESKAFSPFRYPNMPVPVLLNMTASAPVNLLPKHTNSSLSLEQYCRDTVMTIWHYHGGCQVAKVLDRDYKLLGVDALRVIDGSTFNYSPGTNPQATVMMLGRYMGVKILSERLGGAAAAAETEQ

SEQ ID NO: 260740 - protein, 148 aa, Glycine max
  Clone ID: PAT_MRT3847_77470C.1.pep
KRGPTFFFLLKGPVCPPQKMCVTPFGPPGFHFFFSPRIFCGKLRAKNFFPRAADIPVFPPPFFASPYRKSVSPPKTGPGFPGGARAGARGCVYFFFKNTPFSPRAGKNFVYWAPKSTRQIVPSFFSPVSLRKIRKLLLCLKTPCFFFF

SEQ ID NO: 260741 - protein, 502 aa, Glycine max
  unsure (1)..(502): unsure at all Xaa locations
  Clone ID: PAT_MRT3847_77471C.1.pep
MGKVAVGAAVVCAAAVCAAAALVVRHRMISSRKWSRAMAILKEFEEKCGTPIVKLRQVADAMDVEMHAGLASEGGSKLNMLISFVDNLPTGDEEGLYYAXLDLGGTELSWLLRVHLWGKKTRGVNGRDXQEVSIPPNLMTGSSEALFDFIAAALAKFVGSEXESLHPPPXRQSELGFTFSLPVRQTSIASGTLIKWTKGFNIDDAIGEDVVGELTKYMEKIGLDMRVAALVNDTIGTLAGGRFDNQDVIAAVILGTGTNAAYVERAHAIPKWXHGLIPKSGDMVINMEWGNFRSSHLPLTEYDLALDAQSLNPGEQIFEKLISGMYLGEVVRRALLKMAEEADFFGDTVTPKLKVPFILRTPDMSAMHHDTSSDLKVVGNKLKDILEISNTSLKMRKIVVELCDIVATRGARLAAAGILGILKKIGRDTVKVGEKQKSVIALDGGLFEHYTKFRECLESALKELLGDEAAETIVIEHANDGSGIGAALLAASHSQYLGVEES

SEQ ID NO: 260742 - protein, 83 aa, Glycine max
  Clone ID: PAT_MRT3847_77472C.1.pep
PTRPEIYDPSLDPNLSGDPYKTLLVAFLRDERTDHRLKREFEAYGPIKRLRMITDKETNKPRGYAFIEYFHTLYMKSAYKQSD

SEQ ID NO: 260743 - protein, 76 aa, Glycine max
  Clone ID: PAT_MRT3847_77473C.1.pep
CSDYSVGQGVNLWCSLLYMPFDRNPIINSEKQRIFCCFLYTLQSIKGLQKKKKNPWHVRQLVYCRSFKGHLLYFGY

SEQ ID NO: 260744 - protein, 86 aa, Glycine max
  unsure (1)..(86): unsure at all Xaa locations
  Clone ID: PAT_MRT3847_77474C.1.pep
SERXTHDFMNVDSFSQLPFIRPAPLVREKSGIRLFGIEFAGGXXXXXXXXNNFVVVSAEDSESAEITTAANTNTNINXNKSTFDLD

SEQ ID NO: 260745 - protein, 133 aa, Glycine max
  unsure (1)..(133): unsure at all Xaa locations
  Clone ID: PAT_MRT3847_77475C.1.pep
ILHLMRFGYESQGSTKLHKPVHFPLELXLGRELLVSPSTEGRKYELVATITHHGTEPSKGHYTADAQYPNGRWLRFDDQSVFAIGTNKVLHDQAYVLFYRQMFYQISTHYSPIRKDCWSINVMHGEKMWVIIY

SEQ ID NO: 260746 - protein, 126 aa, Glycine max
  Clone ID: PAT_MRT3847_77476C.1.pep
PPPPTPPPPPPPPPPPPPAPPPPPPPPPPPATHPPPPPVSAPFSQSHTPPWSCPPGSSPSTVFSPVHLQGHSCSCSVLLVSPQCSMPKWVPCFNASSVHFPPHTLAVPHLFTVPSLILRLVHTMWL

SEQ ID NO: 260747 - protein, 117 aa, Glycine max
  Clone ID: PAT_MRT3847_77477C.1.pep
TARKSVRIVTLPKIMILHLMRFGYGSQGSTKLHKPVHFPLELVLGRELLVSPSTEGRKYELVATITHHGTEPSKGHYTADAQYPNGRWLRFDDQSVFAIGTNKVLHDQAYVLFYRQM

SEQ ID NO: 260748 - protein, 552 aa, Glycine max
  unsure (1)..(552): unsure at all Xaa locations
  Clone ID: PAT_MRT3847_77478C.1.pep
YSILASWISNLYLLTNTSDSKMFLFGSFTEDETQSLLSKQSSGKKEKPVEKNQLQFGSLNSVTVESNNLLNSSKASYNAPPSDSRKCNGVKSAIDNSPEVSGTVKENGSITNISPRSTSTISVNEVEEKNVNFFTLRCEDGPLNKFTKLSLDASEAESLKNVHTTGSGDDSAPKLPDREPQKAPNGHAVMHVKDILPRGLINSGNLCFLNATMQALLSCSPFVHLLQQLRTCNLPKVGYPTLTAFAEFITQFDMPSTTKVKKQDADTFESGRPFRPVMFEGVLKNFTPDVPNSISGRPRQEDAQEFLSFVMDQMHDELLKLEGQSSSLNGSKSSLVSSVEDDEWETVGPKNKSAVTRTQSFLPSELSGIFGGQLRSLVRAKGNRASATVQPYLLLHLXASATVQPQLMIHFHLFSAPVHPIGYRTSLTAKAGXVVTARKSVQIVTLPKIMILHLMRFGYGSQGSTKLHKPVHFPLELVLGRDLLVSPSTEGRKYELVATITHHGMEPSKGHYTADAQYPNGRWLRFDDQSVFAIGTNKVLHDQAYVLFYRQI

SEQ ID NO: 260749 - protein, 68 aa, Glycine max
  Clone ID: PAT_MRT3847_77479C.1.pep
KTKIEGRVPLDVVVAKGRPVLNRLCVLDEGLMIRGNSFPVRSKDFPRTLWRQSFPLQGVMVPLEEGVW

SEQ ID NO: 260750 - protein, 82 aa, Glycine max
  Clone ID: PAT_MRT3847_7747C.1.pep
SQFLQHSQNTWFQVVVTDHNIAIFRPLCSMSIGMCVGFQALLVSHQSYGKIRTCPLILNSNPVGWFQNNTVVMYARRFKRKN

SEQ ID NO: 260751 - protein, 48 aa, Glycine max
  Clone ID: PAT_MRT3847_77480C.1.pep
PSVGTHMVQLVEKFTCPERTLGPIGPLNGANQLEKLVASFPTGLFECG

SEQ ID NO: 260752 - protein, 109 aa, Glycine max
  unsure (1)..(109): unsure at all Xaa locations
  Clone ID: PAT_MRT3847_77481C.1.pep
LCRTVYVSGFASEPRLKNSIRWYAGKHTTNLLINLRCDVCQGAYQAAFNRGFFNKLSLDDYLLRHTVCHRCCMVRSEIXYINDGVHGDAPTAHTVAYTCIFLLRLSGRQ

SEQ ID NO: 260753 - protein, 90 aa, Glycine max
  Clone ID: PAT_MRT3847_77482C.1.pep
PADIGPVPHTRSGTMPAECARRTTTQCFVYEVPAKRIMRCIGWREEEDHQKTAESGGQRAVKNSPGKDGNSRASETAKKGTQADKRQATE

SEQ ID NO: 260754 - protein, 295 aa, Glycine max
  unsure (1)..(295): unsure at all Xaa locations
  Clone ID: PAT_MRT3847_77483C.1.pep
SAHRPPDYLNTTDQLIKDLDYYDIVFHIEDMPYANGYTSQGDQFTAQVQEISSTVPYIIASGNHERDWPNTGSLFDTPDSGGECGVFAETMYYFPAENRAKFXSEHDWREGSEQYKFIEHCLATIDRKHQPWLIFSAHRPLDYSSNDWYGKEGSFEEPMGRESLQKLWQKYKVEIPFYGHVHNYERMCPIYQNQCVNQEKXNYSGTVNGTIHVVVGGGGSHLSDFTPTPPIWSLYRDXLDYGFGKLTXAFNHSYLLFEYKRSSDGKVYDSFTISRDYRDVLACVHDGCEKTTLAT

SEQ ID NO: 260755 - protein, 92 aa, Glycine max
  Clone ID: PAT_MRT3847_77484C.1.pep
SLQDKHGEDVSNINIQAEKSLVKDYLVDQNARSQKRIIPVPSPASIEDMRTLITENNKSTENPLKLIQTESKIPRLAASPNRTPFADVNSVN

SEQ ID NO: 260756 - protein, 68 aa, Glycine max
  Clone ID: PAT_MRT3847_77485C.1.pep
MRGPLGAVIGRYPSSDGTTHLGGIIRHNKKCRDIAVLVIFDAFWIALIVNSSFAFNRGNPLRLTYGLD

SEQ ID NO: 260757 - protein, 87 aa, Glycine max
  Clone ID: PAT_MRT3847_77486C.1.pep
RSSFVLRPRSSWGLSLSSSSSAHSWSTVTILRSHIVSVCRLLLSSSIIWRVLLKPEIESCMLRSYFRDRGIRLCVRTRGRTRVRTRG

SEQ ID NO: 260758 - protein, 81 aa, Glycine max
  Clone ID: PAT_MRT3847_77487C.1.pep
KKNTPHQFGLCHLIFNYNWMVCPNFSFFDGPIQPRFFLPSSIFPYFIFPLIIFSFLSGPQMASSFQEDLLRDIFPRRGIQP

SEQ ID NO: 260759 - protein, 122 aa, Glycine max
  Clone ID: PAT_MRT3847_77488C.1.pep
SSACRRPRQRVHLVPADRQAAWRIFSSQAGLWLIHGAGWWAVEDKETGRLVGNVGAFFREDSTVMELGWNTYRAFWGRGYANEAAAAVVNHALEIRREPKVRALIAAANESSLRVAKRLGLT

SEQ ID NO: 260760 - protein, 57 aa, Glycine max
  Clone ID: PAT_MRT3847_77489C.1.pep
PPFYPRVFYFLPSGLNLFCNFDRDSVSLSEPVLLFFSSQVPICLFFIFFMYPFRSRL

SEQ ID NO: 260761 - protein, 45 aa, Glycine max
  Clone ID: PAT_MRT3847_7748C.1.pep
NTKKKSATGYKKARPNYTIIPYVNFHATSNSIQFSGRASIKWSHV

SEQ ID NO: 260762 - protein, 57 aa, Glycine max
  Clone ID: PAT_MRT3847_77490C.1.pep
LFRVAEFTTEEGGLSEEGIKKAFEATEDEFLRVVRESWIARPQIAFGGSCCPFGADS

SEQ ID NO: 260763 - protein, 333 aa, Glycine max
  Clone ID: PAT_MRT3847_77491C.1.pep
YFSLSNCIEGLKVLVQSLFGATFRIIPLAPGESWDPHVLKLCPGHPEEGDLGYLYLDLYSRKGKYPGCAHFAIRGARRISQTEYQLPIVALVCKFSGPGKASAARRSDREGAAANAACGHGRRSPVAWTDYQHFSGTRTVLDFAEIPSNLFEYYAWDYRVLKKFARHHSTGEEIPQKLVESMQGARDMFAATDLQRQIFYALVDQTLFGEQPFPHGDISSVVAKLKREHTSCEHVEGTHWEARFSHLLNYGAGYYSYLYAKCFAATIWKKLCQEDPLSPTTGFALRTKFLQHGGAREPAALLNDLAGDGIYRYCDGGIMPDISCLCDEMKLFE

SEQ ID NO: 260764 - protein, 128 aa, Glycine max
  Clone ID: PAT_MRT3847_77492C.1.pep
GREYIFHGVQVRATTLYPIVMEQQSGLPHVRNLVASDNPDIMIIIEDFLTLYTTKKNNDERIAQSKKNEGRLCGTDTTLIFPPGLCYENDLCRGNAKTKMINHIITQPKLYNWLHGYGPCFRHEFTGG

SEQ ID NO: 260765 - protein, 51 aa, Glycine max
  Clone ID: PAT_MRT3847_77493C.1.pep
LVFSSGWGSPELLKEDAPIRSFRGWSRFCQPILSGAFFFRGGKFRVYCNVV

SEQ ID NO: 260766 - protein, 72 aa, Glycine max
  Clone ID: PAT_MRT3847_77494C.1.pep
IKEQTNTRMASKNSLVEEIESSQGDLTQPSAIPRRTIPTAQVNPHRLNLTHPSKHVPQFRCLIPHKEHIKLV

SEQ ID NO: 260767 - protein, 60 aa, Glycine max
  Clone ID: PAT_MRT3847_77495C.1.pep
FTRSRSRGSTQGFQMLPTKLAVWIRFVPPPIILYLLEFSWKPRIVHDILTLTWISTFIPS

SEQ ID NO: 260768 - protein, 141 aa, Glycine max
  Clone ID: PAT_MRT3847_77496C.1.pep
MTLSQILQQHFRPRLLHSLLPHHPLRLLSEHRHQHLPQAPPRHPQLRPCLPRHAALLRLTRHASGTQAIRDVTVRVYKKWGWSHEHVLLAFKNCPYCMLTEPDEIDAVFSYWVRILGGSSLELVKYPIGKARQHGHALCYV

SEQ ID NO: 260769 - protein, 240 aa, Glycine max
  Clone ID: PAT_MRT3847_77497C.1.pep
MLDEELDGSMFNIIGSLVLSFGGIYYQDSVTLTSKGLRMEFVKILTVLTSVDFSSNNFEGTIPEELMNFARLHLLNLSNNALAGHIPSSIGNLKQLESLDLSSNHFDGEIPTQLANLNFLSYLNVSSNCLAGKIPGGNQLQTFDASSFVGNAELCGAPLPKNCSNETYGLPCPFGWNIIMVELGFVFGLALVIDPLLFWKQWRQWYWKRVDLILCRIFPQLNLEYESSGGHCYQVLRWRH

SEQ ID NO: 260770 - protein, 98 aa, Glycine max
  Clone ID: PAT_MRT3847_77499C.1.pep
IFQAGWSEDGYGYWFQTPEAWTMDGHYRSLMYMRPLAIWGMQYAINRPKAILEAPKINIMDRIHLSPVIGGYSHNETGVRKIATKAGCFSNSVFNCAC

SEQ ID NO: 260771 - protein, 649 aa, Glycine max
  unsure (1)..(649): unsure at all Xaa locations
  Clone ID: PAT_MRT3847_7749C.1.pep
MLLVSPADQVEDEVDAADCYNYKNMDYDKWGLKKFLESWDLSDVLFIVGKEEKPVPGPRAILAASGKFSLCSSSFVINLPTVSYLLFRALLHYIYVGWTQIPQEQLGSLRDLSLQFEVTPLVKQCEETMERFKLDKKLFDTGKNVELTYPSIRPHCSTLPSLPVSTQQLKQLKLTGQYSDVNIYIEGYGLIARAHKIVLSLWSIPFARMFTNGMSESMSSEVTLRDVPPEAFKAMLNFLYDGQLNDKVIDSGVGLVXVLFIVGKEEKPVPAHKAILAASXVSEDSVCPLLQVVSSMPSCRLIKESLQRRISMNFDYYISASTDFVLLDETTLINIIKHPDLTVTSEEKKVLNAILMFGMNAKQLFGWEVVDQLMENSKPELLFGERLQLIYDLLPFVRFPLLQYSLLEKLQHSSIGRHIPVFQNLVNEAINFVKCGLAESENEENVRFQHRRSSYRELQYICDGDDHGVLYFAGTSYGEHPWVNPLLAEPRKITITASSPHSRYTDPKVLVSRTYQGTCFAGPRLENGQNCSWWMVDLGQDHQLMCNYYTSGQNYSKAVPGFWHVQGPRDASIRVFSGFDQSNRIICNPGQFALHILCIPKKLIYWPIIGPNALLPFRYFRVVLTGTTTDATNPWNFCICYLELYGYFL

SEQ ID NO: 260772 - protein, 115 aa, Glycine max
  unsure (1)..(115): unsure at all Xaa locations
  Clone ID: PAT_MRT3847_774C.1.pep
PKKAFFFPPFFPPQKKFFPVGENPGGPPLRFFFWPRGEGQPLFPPFPGEKKKPPGGQXQTPFPPPGGPFFFPGAPPVFPFERGPFSPPPKLGGGPPQGPPGFPFFYSGLFFVGVF

SEQ ID NO: 260773 - protein, 28 aa, Glycine max
  Clone ID: PAT_MRT3847_77500C.1.pep
DLGLLDWYQVARCASYLYSLPCCSIMYQ

SEQ ID NO: 260774 - protein, 72 aa, Glycine max
  Clone ID: PAT_MRT3847_77501C.1.pep
MFDHIMYRDVVLPIVLEHICQPSVDIKTVLSQVMERLSNYAASSSDVLPEFVQVEAFSKLSNAIGKVIEAQP

SEQ ID NO: 260775 - protein, 232 aa, Glycine max
  Clone ID: PAT_MRT3847_77502C.1.pep
MVMEESNPLDNEVQPTTSSSSFTITTPSTSSSSSIEEATNTTTKEKKKKRAISNIEGKHPTYRGVRMRQWGKWVSEIREPRKKSRIWLGTFPTPDMAARAHDVAALTIKGSSAYLNFPELAAKLPRPASTSPKDIQAAAAKASALDFGHQSHEAESELSQAVSSSIQTQSSSSSSNSSLKGVDDTFLDLPDLSLDLSHGADEFHYSSAWLVAGAEHIELGFRLEEPFLWESY

SEQ ID NO: 260776 - protein, 97 aa, Glycine max
  unsure (1)..(97): unsure at all Xaa locations
  Clone ID: PAT_MRT3847_77503C.1.pep
MATFLDRTLFLFHYLSKTFDAHXRPCPXVKVFVNFMARRHVWERGSYALIXPKGGKHHVLVETDCGRDVKKGEALSLSLMXLSTSDPAWVHVLSERW

SEQ ID NO: 260777 - protein, 149 aa, Glycine max
  Clone ID: PAT_MRT3847_77504C.1.pep
MLRNMDEGEIMTNIAFPQNLTASAASSDHNNPPPSLKRKRNLPGNPDPEAQVIALSPKTLMATNRFLCETCGKGFQRDQNLQLHRRGHNLPWKLKQRTGKEARKRVYVCPEKSCVHHDPSRALGDLTGIKKHFCRKHGEKKWKCEKCSK

SEQ ID NO: 260778 - protein, 69 aa, Glycine max
  Clone ID: PAT_MRT3847_77505C.1.pep
NKELFGPQDFLLAVPKVGLLTKLCLPNIAHLGRTCLDILKEHRITGLWIRTSLIIVLAILTVPHINHTL

SEQ ID NO: 260779 - protein, 69 aa, Glycine max
  unsure (1)..(69): unsure at all Xaa locations
  Clone ID: PAT_MRT3847_77506C.1.pep
TRFNQPALGRFSLQVLVEKETLAPSPPHYSRIICSINFILSLPFPFFPIVLFXIKVLLLFYLSLLKYNC

SEQ ID NO: 260780 - protein, 95 aa, Glycine max
  Clone ID: PAT_MRT3847_77507C.1.pep
SSCGGLKWSMCARSHRASLVVRVQGQYAMVRWNCGSTTSVSVCSCCRSGLPPREMMAWERIGDLLVAVVLFSRYKPLMFPDNNAISVFVYRCFQI

SEQ ID NO: 260781 - protein, 90 aa, Glycine max
  Clone ID: PAT_MRT3847_77508C.1.pep
MKDVIRLSNRLGGKPEKEVGDLRRNLFPTPFLFFVGSTFEGAPREQQALLELEDPAARLKREKETLKNTLNYLTAAFAVKDVFPSSSNSS

SEQ ID NO: 260782 - protein, 51 aa, Glycine max
  Clone ID: PAT_MRT3847_77509C.1.pep
QLEVKRNGPNEDVFLDKTTLRVKKLCYGLNMQFIDPFKVTFKGRKGIYKGV

SEQ ID NO: 260783 - protein, 70 aa, Glycine max
  Clone ID: PAT_MRT3847_7750C.1.pep
CIEQHLRMTGKVLSTSYYMKLSCSFPKIFITLIVIFDIGVFRYSSMLQSGERATQNFVQNRCRHWKLHMG

SEQ ID NO: 260784 - protein, 285 aa, Glycine max
  Clone ID: PAT_MRT3847_77510C.1.pep
MAFTQLIPSPSSSSLNPITLSLNPKSPTSPPQQHFNLDILRHRRRRPNSTLRCSASSFSEKHHTNSSNSDDVVELPLFPLPLVLFPGAILPLQIFEFRYRIMMHTLLHTDLRFGIIYTDAVSGTAEVGCVGEVIKHERLVDDRFFLICKGQERFRVNGVVRTKPYLVAQVTWLEDRPSPSTDLDLDGLATEVETYMKDVIRLSNRLGGKPEKEVGDLRRNLFPTPFSFFVGSTFEGAPREQQALLELEDTAARLKREKETLKNTLNYLTAASAVKDVFPSSSNSS

SEQ ID NO: 260785 - protein, 94 aa, Glycine max
  Clone ID: PAT_MRT3847_77511C.1.pep
PPCPASGHGRACFYQMVAMTPSPRERKSRFLLSRTKKRSLPVEPRVVLVHAKRSPLYQSLPVPNHLLCKILPIWMYSQIFPFPKLNMLDIPCVV

SEQ ID NO: 260786 - protein, 68 aa, Glycine max
  Clone ID: PAT_MRT3847_77512C.1.pep
ASMCRCNNTTPFHELLNLLTKISIRSLPNSSTLPTNGRNCWGSFPSVLYYLCVTSIAKLEELLSNINL

SEQ ID NO: 260787 - protein, 47 aa, Glycine max
  Clone ID: PAT_MRT3847_77513C.1.pep
PKRPSSLQRLELNFLRLIPNAKTQQHVLVAQSLNHQGYSSGYSVGNT

SEQ ID NO: 260788 - protein, 60 aa, Glycine max
  Clone ID: PAT_MRT3847_77514C.1.pep
NRITGQTNPSLNIQPSCQYKGKILNFLIGLTFHWLKSTVCFLPYRPQKKFFPIHLKLGGP

SEQ ID NO: 260789 - protein, 49 aa, Glycine max
  Clone ID: PAT_MRT3847_77515C.1.pep
SWPPASKNNDPVDGKPGAAALFVKVSMDGAPYLRKVDLTNYTMYQELMI

SEQ ID NO: 260790 - protein, 94 aa, Glycine max
  Clone ID: PAT_MRT3847_77516C.1.pep
GAKKGSLTYKPIQQLLVFFPVKEGKVSNFPTQGPLFCPMLHYLFLQRRALTPADGIKKFFCRFGKNTKTFSKFLNFPFPFKGQRRDPKEGLPRG

SEQ ID NO: 260791 - protein, 71 aa, Glycine max
  Clone ID: PAT_MRT3847_77517C.1.pep
APAKDTSHTTRSYIAPPYNLKLVKFTAGNYYLPRNGQTELLNTAKEQLYYMTTSKPTVYPLDRALACRLNS

SEQ ID NO: 260792 - protein, 91 aa, Glycine max
  Clone ID: PAT_MRT3847_77518C.1.pep
FFGWFSDTGFVFTCGDGSFGQLGHGDNASHCSPVKVSCFVDLHVAQVACGMRHSLVLLKDCSGNQVYGFGSGKRGQLGVSNDRVKSVNVPK

SEQ ID NO: 260793 - protein, 101 aa, Glycine max
  Clone ID: PAT_MRT3847_77519C.1.pep
SVTDSYNCGLPKYAGEVLFVPDPAQQPAQLGVGRCCRIAFSHLDSTCLASSLSVRHIGEKVAYPIPSRLARMLRKLTLRDSVLAGRVSLRVARTHEPAQWL

SEQ ID NO: 260794 - protein, 149 aa, Glycine max
  unsure (1)..(149): unsure at all Xaa locations
  Clone ID: PAT_MRT3847_7751C.1.pep
TTPSFFNYPALLLLDSLNGLXQVIRSYVLALLDAYALVKTKVLTQRPTXLSLFVVXDWVTATLSLARLSXSAGITVLYLNDLGHCHFGEDCHTYVILVASAILSWLPPSISYLIMLWLLAAGEQTVHSGRVLPCITCTLYWHRSYGVSL

SEQ ID NO: 260795 - protein, 844 aa, Glycine max
  unsure (1)..(844): unsure at all Xaa locations
  Clone ID: PAT_MRT3847_77520C.1.pep
KYEVLQKAHIKLDERYKLFKAALTRVKGIRPNIYEEFMPTGGTDVKVYTVGPEYAHAEARKSPVVDGVVMRNPDGKEVRYPVLLTPAEKEMAREVCIAFRQAVCGFDLLRCEGRSYVCDVNGWSFVKNSHKYYDDAACVLGKMFLDVKAPHLSYAIXPPTLPWKVNEPVQPSEGLTRQGSGIIGTFGQSGXLRCLIAVMHLGKRTAXRRPTVKVTDLSPLEQMWRYNTSXIKRHTLPIMRPESLQEIMSYETLETMEEMIRPFTMPAEDFPPATPAAFSGYFSKSVLDRLVILWPKIVCNGEGEEERPVQALMVLKYGGVLTHAGRKQAEELGRYFRNNMYPXMSAAAFAKGLLDLEGQLTPILVSLVSKDSSMLDGLDNASIEMEEAKARLNEIITSSSKTIYSNGSPEFSWMVDGAGLPPNASELLPKLVSLIKKVTEQVRLLATDEDEKLAEKSLYDVIPPYDQAKALXGKTNIDVDRIAAGLPCGSEGFLLMYARWKKLERDLYNERKERFDITQIPDVYDSCKYDLLHNAHLNLEGLDELFKVAQALADGVIPNEYGINPKQKLKIGSKIARRLLGKILIDLRNTREEAISVAELKSNQDHDSFSVKTEKEDTEAKSKLLNKNDEIRKSSTLNDISMDQEDDDDKETKYRLDPKYANVKSPERHVRTRLYFTSESHIHSLMNVLRYCNWDESLLDEESLVCYNALERLYKTKELDYMSYIVLRMFENTEVALEDPKRFRIELTFSRGADLSPLQKNDSEAASLHQEHTLPIMGPERLQEIGSYLTLEKMEMMIRPFAMPAEDFPPPATPAGFSGYFSKSVLERLVNLWPFHKHGNSNGK

SEQ ID NO: 260796 - protein, 225 aa, Glycine max
  unsure (1)..(225): unsure at all Xaa locations
  Clone ID: PAT_MRT3847_77521C.1.pep
YGVSVSTRYEGKDDVLFANILRSRNKFVDALALYERVLESDGGNVEALVGKGICLQMQNMGRLAFESFAEAIRMDPQNACALTHCGILYKDEGCLVEAAESYQKALQVDPSYKAAAECLAIVLTDIGTNXKLAGNTQEGIQKYFEALKIDPHYAPAYYNLGVVYSEMMQYDTALSFYEKAASERPVYAEAYCNMGVMFKNRGDLESAITCYERCXTVSPNFEMQR

SEQ ID NO: 260797 - protein, 122 aa, Glycine max
  Clone ID: PAT_MRT3847_77522C.1.pep
MQILKHMYGCVLDITLDNFLPLYEGALYFGVETLLLKCETWLSELLSPKRFQSTQIQMEDLIQIWEFGSDCASDFILHLCMGYLARNFMWAKHSKSFGKLPYDLLLSLVKHPHLTVDSELHL

SEQ ID NO: 260798 - protein, 104 aa, Glycine max
  unsure (1)..(104): unsure at all Xaa locations
  Clone ID: PAT_MRT3847_77523C.1.pep
GKGRRKKKNCLQFHGQRSWGKKVFPLSMGGFTLKMSSPSDPEWGLYVGTLFSRREGGLFFGEGSLFQKTGCESPAMCPAWDVLNGDPNGFQWFPFXXPFPPXXI

SEQ ID NO: 260799 - protein, 54 aa, Glycine max
  unsure (1)..(54): unsure at all Xaa locations
  Clone ID: PAT_MRT3847_77524C.1.pep
XXXXXTXXISXFXXXXVXXXPSXRSXXXXXXSXXTGINHFAXXLIXSLRTLXQL

SEQ ID NO: 260800 - protein, 146 aa, Glycine max
  unsure (1)..(146): unsure at all Xaa locations
  Clone ID: PAT_MRT3847_77525C.1.pep
NSNKISKSTVVRVTNELVNLAISSQTSQNDFCKNEEYSMDLDNKGDMGQPSLSFNGCTDSMEQTDISFNGCTDSVVARDSLSSSLSPDSEAILPYNGLNYAHCQQFETVNREQFTWEPQLDDNXFSTFQMFDLDSAYETGXPIDGL

SEQ ID NO: 260801 - protein, 290 aa, Glycine max
  unsure (1)..(290): unsure at all Xaa locations
  Clone ID: PAT_MRT3847_77526C.1.pep
MGDHIAKGQELAKXAENKLHACCPLFGSNLEDAAELFHKSATSFKLAKSWDKAASLFVKSAKCHLKLDSKYDAANAYVDAAHCYKKTSTSGAISCLNKAVTIFTEIGRHIMAAKYSKEIGELYELDQDIEHARSYYERAAELFEIGDAATSVIQCKVKVAQFCAQLQQYQKAIKIYEDIARQSLDSNLLKYGVRGHLLNSGLCQLVQGDFVAITNSLERYQDLDLTFSRTREYKFLADLSASIDEGDVEKFTRVVKEFNSITPLESWKSTLLLRVKDAMKVKEMEDDDLT

SEQ ID NO: 260802 - protein, 112 aa, Glycine max
  Clone ID: PAT_MRT3847_77527C.1.pep
YLVSISLQMLLPRGCEWESSRESAFSSPSIYLTNCHLWATIQQQVCPLCCSNFSSPAPEPVKLSYRSSCSLSLAGLVRCRSLSVSEQLGGIHLPCWAAIPRDLTLRKRIVER

SEQ ID NO: 260803 - protein, 146 aa, Glycine max
  unsure (1)..(146): unsure at all Xaa locations
  Clone ID: PAT_MRT3847_77528C.1.pep
MIKSKELKIEDTNLAGIGSETDKKLREEAAKTEQAYKDAGKQVGLQIWRIEQFHIKSVPKDTYGSFYSGDSYVVLNTYKKKGSEALAWDVHFWLGKYTTQDEAATAAYATVMLDDLLGGAPVQHREVQENESALXLSYXKNYLRXL

SEQ ID NO: 260804 - protein, 55 aa, Glycine max
  Clone ID: PAT_MRT3847_77529C.1.pep
RNLFFGVALGHFNVWNSHAKNDSPGARTCLVCGNPHGLIRKYRLIVFRQCLSFYA

SEQ ID NO: 260805 - protein, 97 aa, Glycine max
  unsure (1)..(97): unsure at all Xaa locations
  Clone ID: PAT_MRT3847_7752C.1.pep
TTHTLFRINATRPKTKXXXXXXXXXXXXQHFTTQFCNFPFPFSTAPPLPPSSFNIFHSLPLSVYSRVRVLLTPQWPFQPLSPLPNWRPYSSNALPPL

SEQ ID NO: 260806 - protein, 60 aa, Glycine max
  Clone ID: PAT_MRT3847_77530C.1.pep
KSISSFYYSWKGINIASTLFVFNFFSLPISPDNFCLLLPCNGETFTFFNLSFPNPIDILI

SEQ ID NO: 260807 - protein, 98 aa, Glycine max
  Clone ID: PAT_MRT3847_77531C.1.pep
ADVWAVRSPPASLSGSDLHHQSQQNVPSSVPSSSLACAQRAKHFSSQFGLFQHQLIAYIGGTDAPQQQQQSTGSNDTQPTVNALAMLAAAGINGGSGT

SEQ ID NO: 260808 - protein, 56 aa, Glycine max
  Clone ID: PAT_MRT3847_77532C.1.pep
CLTIVTYFSSTRKWKMKLHTYLVRELIKLDSDIVDCAMCCLDLRVDTHLDEASLNA

SEQ ID NO: 260809 - protein, 79 aa, Glycine max
  Clone ID: PAT_MRT3847_77533C.1.pep
FDYEMVDASNSDSGSSLNFPLLLINRNQRLPHVHFHTGKINYISLSCAFIYLQSNIDIQLRIVSILFRSYGFVDNKKIT

SEQ ID NO: 260810 - protein, 106 aa, Glycine max
  Clone ID: PAT_MRT3847_77534C.1.pep
CGVRRRCEQGPLDHRVSSRSLVRGRCEWVGGETGRQPSAAAVVRREGTRAWGLTIRAGSDADEVVRRARGVGSRGRGILGSGWSNASCVKRLGAIGLENSEANRQA

SEQ ID NO: 260811 - protein, 76 aa, Glycine max
  Clone ID: PAT_MRT3847_77535C.1.pep
MSAMVEGWKGELTKLREKVVMARKSLFSKGKEGSEEEERVVEKEAHKAIMAVQRDSTHETMSEATVCLLMDRFVPC

SEQ ID NO: 260812 - protein, 70 aa, Glycine max
  Clone ID: PAT_MRT3847_77536C.1.pep
EKENALSKIKGVLPVDSSDQKYVFQGVHSMLAACPGKTWDPTEKRITKLVFIGRNLDETALKKGFKGCLV

SEQ ID NO: 260813 - protein, 28 aa, Glycine max
  Clone ID: PAT_MRT3847_77537C.1.pep
TMLLYNWLDKFHKVEYSYVPLCSFVFSY

SEQ ID NO: 260814 - protein, 130 aa, Glycine max
  Clone ID: PAT_MRT3847_77538C.1.pep
FGSRTKLKEVISNAAATTSEGRSVFQVYIDAAEVMLEDDVASNRAIGSYGASIIQQQTEKQKLSVLTHCNTGSLATAGYGTALGVIRALHSAGVLKRAYCTETRPFNQGSRLTAFELVHEKIPGTLIADS

SEQ ID NO: 260815 - protein, 365 aa, Glycine max
  Clone ID: PAT_MRT3847_77539C.1.pep
MAFESNEVAATTLQAICYKRGSLQLLDRRKLPLETVYLEIRDSTDGWNAIREMVVRGAPAIAIAAALSLAVEVFNLDFNGSATDAVSLLQKKLEYLVTSRPTAVNLSDAATKLKEVISNAAATTSEGRSVFQVYIDAAEVMLEDDVASNRAIGSYGASIIQQQTEKQKLSVLTHCNTGSLATAGYGTALGVILLKRAYCTETRPFNQGSRLTAFELVHEKIPGTLIADSAAAALMKAGHVDAVVVGADRVASNGDTANKIGTYSVALSAKFHNVPFYVAAPLTSIDLSLSSGQEIVIEERSPKELLNTHGGLGEQIAASGISVWNPAFDVTPANLISGIITEKGVITKTSAGDAFDIKAFVQKTG

SEQ ID NO: 260816 - protein, 91 aa, Glycine max
  unsure (1)..(91): unsure at all Xaa locations
  Clone ID: PAT_MRT3847_7753C.1.pep
CVCLAGAWWAWFSGFXVFPLFGPGCGPGGLFGALRGLALVLGACLLVXXLVFCGGCVWSSLVLYFRCAPSVVCLLPGSRRAWVGPGRSGPV

SEQ ID NO: 260817 - protein, 62 aa, Glycine max
  Clone ID: PAT_MRT3847_77540C.1.pep
QASTSACYDHTARVINGQRQLLDYRCIHCPPSTPEMRPHLRHIAAERRLALIQPYVIWNAHQ

SEQ ID NO: 260818 - protein, 80 aa, Glycine max
  Clone ID: PAT_MRT3847_77541C.1.pep
IVKSTNMKCLTPPSALEGDCGFLAANLYAKSVFGEDALVNVSIEKQADGKLSGYIRIRSKTQGIALSLGDKITLKQKGAA

SEQ ID NO: 260819 - protein, 160 aa, Glycine max
  unsure (1)..(160): unsure at all Xaa locations
  Clone ID: PAT_MRT3847_77542C.1.pep
LQGSRLTAFELVHEKLSGTLISNSAAAALMKAGHVDAVVVGADRVASNGDTANKIGTDSVALSAKFHNVPFYVAAPLTSNDLSLSSGQEIVIEERSPXELLNTHGGLGEQIAASGISVWNPAFDVTPANLISGIITEKGVVTKTTAGGAFDIKAFVQKTG

SEQ ID NO: 260820 - protein, 498 aa, Glycine max
  unsure (1)..(498): unsure at all Xaa locations
  Clone ID: PAT_MRT3847_77543C.1.pep
TFYHFRSARVCSCALWIIGEYCLSLSEVESGIATIKQCLGDLPFYTVTEEGDGQEASKPIQQVNSTTVSSRRPAILADGTYATQSAALETAMSPPTLVQGSLSSIGNLRSLILSGDFFLGAVVACTLTKLVLRLEEVQTSKAEVNKATTQALLIIVSMLQLGQSSILPHPIDNDSYDRIVLCIRLLCNTGDEIRKIWLQSCRQSFVKMLADKQRRETEEIKAKAQISNAQPDDLIDFYHLKSRKGMSQLELEDEVQDDLKRATGEFTKDADDANKLNRILQLTGFSDPVYAEAYVTVHHYDIVLDVTVINRTKETLQNLCLELATMGDLKLVERSQNYTLAPESSKQIKANVKVTSTETELFLVNXVYETSSNVLERTVXVLNDIHIXIMDYISTASCADVAFRTMWAEFEWENKVAVNTVLQDERDFLNHIIKSTNMKCLTPPSALEGDCGFLAANLYAKXVFGEDALVNVSIEKQSDGKLSGYIRIRSKSREGRLQ

SEQ ID NO: 260821 - protein, 158 aa, Glycine max
  Clone ID: PAT_MRT3847_77544C.1.pep
MDMRLMDLDSPFFNTLHRIMDLTEDAEKNLNAPTRTYVRDAKAMAATPADVKEYPNSYVFVIDMPGLKSGDIKVQVEDDNVLLISGERKREEEKEKEGGKYLRMERRLGKLMRKFTLPENANTDAISAVCQDGVLTVTVNKLPPPQPKKPKTIEVNIA

SEQ ID NO: 260822 - protein, 507 aa, Glycine max
  unsure (1)..(507): unsure at all Xaa locations
  Clone ID: PAT_MRT3847_77545C.1.pep
QIRAARVCSSALWIIGEYCLSLSEVESGIATIKQCLGDLPFYTXVTEEGDGQEASKPLPQVNSTTXVSSRRPXILADGTYATQNAALETAMSPPTLVQGSLSSIGNLRSLILSGXFFLGAVVACTLTKLVLRLEEVQTSKAEVNKATTQALLIIVSMLQLGQSSILPHPIDNDSYDRIVLCIRLLCNTGDEIRKXWLLSCRQSFVKMLADKQRRETEEIKAKAQISNAQPDDLIDFYHLKSRKGMSQLELEDEVQDDLKRATGPRTXDANKLNRILQLTGFSDPVYAEAYVTVHHYDIVLDVTVINRTKETLQNLCLELATMGDLKLVERPQNYTLAPESSKQIKANIKVSSTETGVIFGNIVYETSSNVLERTVIVLNDIHIDIMDYISPASCADVAFRTMWAEFEWENKVAVNTVLQDERDFLNHIIKSTNMKCLTPPSALEGDCGFLAANLYAKSVFGEDALVNVSIEKQSDGKLSGYIRIRSKTQGIALSLGDKITLKQKGAA

SEQ ID NO: 260823 - protein, 62 aa, Glycine max
  Clone ID: PAT_MRT3847_77546C.1.pep
ILNSHFYPYTKPNFTVELDTFVRYKLVTFCCWNVSELLFFQFSPTTKDGLSWEPERKQTKQT

SEQ ID NO: 260824 - protein, 60 aa, Glycine max
  Clone ID: PAT_MRT3847_77547C.1.pep
SEEDKLIRKTNRLPVNLLLNRAIISETERTGSSCYQRWVVLRASGCHGNHSYKPKFGSGP

SEQ ID NO: 260825 - protein, 53 aa, Glycine max
  Clone ID: PAT_MRT3847_77548C.1.pep
MAAAPAATFAIGTTGSLGQRGSSLPQSKSFGLKFNSLNHLKSFCGLKAMPSVR

SEQ ID NO: 260826 - protein, 68 aa, Glycine max
  Clone ID: PAT_MRT3847_77549C.1.pep
LRTNTLPVFPTCKIHRILTIFDLITTLPLLKTFLYYKLFSIRSSTRTPKYISNNESPLSHDPNSQLLT

SEQ ID NO: 260827 - protein, 82 aa, Glycine max
  unsure (1)..(82): unsure at all Xaa locations
  Clone ID: PAT_MRT3847_7754C.1.pep
RPFLPLFAGPSLGGLPLRDHFKCLSAYVRFILNSFTDLSGCFLSFCSLLLIVXFGSPLFFAGGVXTQLFFIFPXFFLGGRRL

SEQ ID NO: 260828 - protein, 104 aa, Glycine max
  unsure (1)..(104): unsure at all Xaa locations
  Clone ID: PAT_MRT3847_77550C.1.pep
MLINILLHVANAMVGSRSSIGELFHRTTTMRDDKFIDYXLSPIEEERLQRLQERLQVPYDETRPDHQESLRALWHCSFPNVSLEGLISDQXKNMGWQGPNPSTD

SEQ ID NO: 260829 - protein, 126 aa, Glycine max
  unsure (1)..(126): unsure at all Xaa locations
  Clone ID: PAT_MRT3847_77551C.1.pep
ISPFFFSYTLLFQQSINFPTIRVFHLKCGEPTMEPLESESVSSSAKDPLLGEPSSSVHPLDHDPQPSDLNHVTPVDDALGEELQGKLDLKDEGESDNKGSNLEDGGEKLSEDKGSNLEDESGKXSD

SEQ ID NO: 260830 - protein, 48 aa, Glycine max
  unsure (1)..(48): unsure at all Xaa locations
  Clone ID: PAT_MRT3847_77552C.1.pep
AAQSXSDXTLMIIRXCXXIDXTXGXPDTXGKXPVAGXMGYLFYADRKG

SEQ ID NO: 260831 - protein, 134 aa, Glycine max
  Clone ID: PAT_MRT3847_77553C.1.pep
LKILQSLSPPEQVEFSTILWCLWHRRNEKASENVENPPLLSIHLARENIMQWQKVCEPHLNPAANFPHLILNGQTEWRDLSNAMLVLPYSGSPIPILVLAREIMRVIISNRKCGGIMVFHLFKRLRLQHYFCML

SEQ ID NO: 260832 - protein, 144 aa, Glycine max
  unsure (1)..(144): unsure at all Xaa locations
  Clone ID: PAT_MRT3847_77554C.1.pep
MSTFFFKFIFIFWERFFFKPLKSLRRSVSNITYATHQFKYQRYHSLLHRNSDLNDHTLIFDVEGALLKSSSVFPFFMLVAFEAXGLLRAIVLLLVYPFVCLVGDEMGLKMMVMICFFGIKEESFRVGRTVLPKFLLEDVGSKMY

SEQ ID NO: 260833 - protein, 45 aa, Glycine max
  Clone ID: PAT_MRT3847_77555C.1.pep
FFYTNVKLCHTKALTEQTVVTTLSICSILIDHNVLPTSHSPNSLY

SEQ ID NO: 260834 - protein, 98 aa, Glycine max
  Clone ID: PAT_MRT3847_77556C.1.pep
MSALAASCATPSAAQTLSLFRSLLRAAREFPDYNIREYTKLRTADAFRHNATLSDPNSISTAFAHGKSQLAVVKRQAVAYSLYAPPLRNVMELQQTPF

SEQ ID NO: 260835 - protein, 50 aa, Glycine max
  Clone ID: PAT_MRT3847_77557C.1.pep
SNTGANIPSFGLRTWLAQPGLVAHALATAINVGYRHIYSAHIHGIVIYIG

SEQ ID NO: 260836 - protein, 111 aa, Glycine max
  Clone ID: PAT_MRT3847_77558C.1.pep
GSRRYSEEVRLERILRYLKKRNQRNFNKTIKYACRKTLADRRVRVRGRFARNNELCEEDMATKKHENHHHHKEDFYGGDSIQFQLKNDEEDWLQEAMASLVYLSHSSPEDM

SEQ ID NO: 260837 - protein, 144 aa, Glycine max
  unsure (1)..(144): unsure at all Xaa locations
  Clone ID: PAT_MRT3847_77559C.1.pep
IDIPNPDFTVLVQLQEWLNFRLDILCTITFAFYLVVVISFPNSITAPGLAITDGLNXSLNGLQFSXMWCLCNLGNKINPIXRILQHTSISSEAPLVVKDNQPDYSWPSSGEVHIQDLQGILISYHHEFLRLMRMEKIGVWVKGR

SEQ ID NO: 260838 - protein, 227 aa, Glycine max
  Clone ID: PAT_MRT3847_7755C.1.pep
TDTIVNLHFHGVPIEDLCLDFTLPGYPEYTLKPGDEIVDINNLEEYISLVADATVKTGIMRQIEAFRAGFNQVFDISSLQIFTPQELDNLLCGCRELWESETLADHIKFDHGYNAKSPAIINLLEIMGGFTPEQQRAFCQFVTGAPRLPPGGLAVLNPKLTIVRKLSSTAVNTSSNGNGPSESADDDLPSVMTCANYLKLPPYSTKEIMYKKLLYAINEGRGSFDLS

SEQ ID NO: 260839 - protein, 54 aa, Glycine max
  Clone ID: PAT_MRT3847_77560C.1.pep
FLISQQLSKYALKFRHTKILNSSKIDQWQIDHHLFSLILTLTNHALFLKIQHQR

SEQ ID NO: 260840 - protein, 80 aa, Glycine max
  Clone ID: PAT_MRT3847_77561C.1.pep
KRGDRGKPPPNGGGRVLWLFFFWGENKPKAKKQGKNAKTPPKRQLFPTKGDQTLGVCAKKTQACYRQQMRGKQPSPPRTK

SEQ ID NO: 260841 - protein, 81 aa, Glycine max
  unsure (1)..(81): unsure at all Xaa locations
  Clone ID: PAT_MRT3847_77562C.1.pep
MRYVLTRVNVLCHQYYDIHYLEDSHFCKHISYNVYCNIYMDSLRLNLIDAAQFHTLLXLKQLSFTNKVYPRAVHFILEHFL

SEQ ID NO: 260842 - protein, 61 aa, Glycine max
  Clone ID: PAT_MRT3847_77563C.1.pep
PLSTPIFTVNNPVLRETTPFMTLPSTSKLPNDNQNPKNHESSIIHSVTRQHLQANHLLLTH

SEQ ID NO: 260843 - protein, 38 aa, Glycine max
  unsure (1)..(38): unsure at all Xaa locations
  Clone ID: PAT_MRT3847_77564C.1.pep
NXFSKITFFILISTLLTIIRVVLEIHSLNTLLQARTKP

SEQ ID NO: 260844 - protein, 46 aa, Glycine max
  Clone ID: PAT_MRT3847_77565C.1.pep
LLEMVLNLSLYIFKNFHALPHTITRPFFIPPPFKLNPETDLINLSP

SEQ ID NO: 260845 - protein, 122 aa, Glycine max
  unsure (1)..(122): unsure at all Xaa locations
  Clone ID: PAT_MRT3847_77566C.1.pep
EQHGFARNKIWFIEKDPPSLAGDFNGKVYIDLLLKPSEDDMKIWPHRFEFRLRVSLAADGNLTLTSRIRNVNGKNFSFSIAYHTYFSVSDISEVRVEGLETLDYLDNLHQKERFTEXGDALT

SEQ ID NO: 260846 - protein, 81 aa, Glycine max
  Clone ID: PAT_MRT3847_77567C.1.pep
VKYLLVRGTYIFYSPKIRYVSLYPPCQQVFLAWCSTSPTLASASAYSLSFQILHCKKTFKQMNGNAASFLDYLHASKINKY

SEQ ID NO: 260847 - protein, 94 aa, Glycine max
  Clone ID: PAT_MRT3847_77568C.1.pep
LPFSYVHSSRKVFHLICNSSIDLEERAFIKKGIIKDLSLKMQFFLKQTCGTFFEGHVHQIFMALSSSIIKKPILQKSKRHLRLRWRAIVLFGGV

SEQ ID NO: 260848 - protein, 90 aa, Glycine max
  unsure (1)..(90): unsure at all Xaa locations
  Clone ID: PAT_MRT3847_77569C.1.pep
CANGRWKRWMIMXNGAGNELVLKDDDALNWGXYAMRLRELESLEYILGAXQRKERXXXSGSVTLHCCPNILKTQXSGCIFKKEASSSPRK

SEQ ID NO: 260849 - protein, 94 aa, Glycine max
  unsure (1)..(94): unsure at all Xaa locations
  Clone ID: PAT_MRT3847_7756C.1.pep
PVCFPPLALLSALSCFLSPLGLPFFLFCRSCWPFRRWSACLRCFPCPVVCLFRVFGWGLVFFFFLRGXGRVGFFISPLPRSRSSGQGKLRRGSV

SEQ ID NO: 260850 - protein, 154 aa, Glycine max
  Clone ID: PAT_MRT3847_77570C.1.pep
MARVGRMKLGSEGFEVSMQGLGCMGMSAFYGPPKPEPDMIALIHHAVQSGVTFLDTSDVYGPHTNELLLGKALKGGVRKKVELATKFGISYPEGKWEIRGDPAYVRDACEGSLKRLGIDCIDLYYQHRIDTRVPIEVTIGELKKLVEEGKIKYI

SEQ ID NO: 260851 - protein, 116 aa, Glycine max
  Clone ID: PAT_MRT3847_77571C.1.pep
RPLEAAGRGCTKERTKLSLRSDWAATMENNDSIISREKIDQAAVWLGSAVSSAFFSSLERFSCVNVATSDPDNDEDDDDYYSTTTATPTAASTTTTSPPSIQIDGKKTNDVSNLPV

SEQ ID NO: 260852 - protein, 87 aa, Glycine max
  Clone ID: PAT_MRT3847_77572C.1.pep
WAKPFWPPSKVLDFLQKVFFRSPPPREAFVEMCSYEFVPKIPFYSFLSQPVVPGHPLGDLKLALTPLGGFVRPPPIRGGMKNLFVCP

SEQ ID NO: 260853 - protein, 46 aa, Glycine max
  Clone ID: PAT_MRT3847_77573C.1.pep
RRSDKIGSYYCVKGGGCSVSLALKPLIEKTFICFSFILPYNERSCV

SEQ ID NO: 260854 - protein, 200 aa, Glycine max
  Clone ID: PAT_MRT3847_77574C.1.pep
RVLWKSCVYIITVGMLVALLLGLNMSWTAITAALALIVLDFKDATPCLEKVSYSLLIFFCGMFITVDGLNKTGIPSALWDIMEPYSHVDRASGIAILAIVILVLSNLASNVPTVLLLGGRVAASAAAISKADEKKAWLILAWASTISGNLSLLGSAANLIVCEQAIRAPNLPYTLTFWSHLKFGLPSTIIVTAIGLTFIR

SEQ ID NO: 260855 - protein, 65 aa, Glycine max
  unsure (1)..(65): unsure at all Xaa locations
  Clone ID: PAT_MRT3847_77575C.1.pep
IIAWSIAPAVIPTMIGHTVAAPHWKRALXPSYMPDRMVGHKLGXFSRTMNFGGHAKPDNRSRRYR

SEQ ID NO: 260856 - protein, 109 aa, Glycine max
  Clone ID: PAT_MRT3847_77576C.1.pep
LKDGFPSDVEVLYVGSLKAEIEPCKQEEVAQLLLDKFRCVPTFIPSEVHSKFYHGFCKHYLWPLFHYMLPMSPSQSAQFDLEQWNAYVLAYRIYADKDTSVLTPDDDHV

SEQ ID NO: 260857 - protein, 918 aa, Glycine max
  unsure (1)..(918): unsure at all Xaa locations
  Clone ID: PAT_MRT3847_77577C.1.pep
RTRGRTRGRSRKARSRNHTLANSMPAVHIRTHDMLNPLERQFLDAAEKGNRPVLEACLAKQLRKAPLNINAVDTMGRTAIEIAVDNENLEIVQLLLRQPDVRIGNALLCAIREGVYELVEVLVNHPSITRDMLGEGWAKYLDPTETATSEYSSDISPVIMAAHLNQFEILQMLLRKDANIEKPHKHYCACEMCDSERINDGLHRSLKRINKYRALASPAWISLTSSDPILSAFKLSRELQKRAKVEDEFKDQYLQLAEQCKQYACDLLSQCRSTEEVMAVLNKEDNFCNEEVDLNAAKCSLARLKLAIKYEQKTFVAHPHCQQLLTSIWYEGFPLKRHRSSSLRTLLIALLLVLGWPLMAICYIAFPKSRVGEIVRSPFMKFLYYSTSFGCFLALLTMVTFEVHREQTGEVKGGTATRAADRGPTPTLIEWLVFIWVIGMLWSEIKQMWLEGFTKYIHQWWNWLDFVMVCLYLCTISIRFSAYSIYVMHNVGEQFTPRHVIRTHWNAFEPVLVSEALFAVGNVFXTNPYLGPLQISLGCMLVDVAKFCFIFVLIISSFSIGLAQLYWYYDSQTPVCLSSDRCKIVPNAFSSIASSYMTLLWSLFSITKVEDTEVVEAHHFTVWVGRGLFILYHMTSIIVLLNMLIAMMSHSFERINDHADLEWKFHRSKLWMAHFDEGSTLPPPFNIFPTPKAFIHTCRAIINVVNWCFGRYNYMAAKEGTRATIRRPGYSKRWHDMEGGLSGAPNGAGGTEPRKPITYTEIIQRLVSRFIHEQKKSMKMDGVNEDDLLEIKQDISSLRYELRDDRRKEIVRSLSHIDAVKREIMRSMSTTTRIFGNTPRRQLSVKERSVAEEADSELGDSSATEEGGTESIRSSLPFFDSLRSATLSPHPFITIAASGDKQFQYAERDAVAEPLRYR

SEQ ID NO: 260858 - protein, 55 aa, Glycine max
  unsure (1)..(55): unsure at all Xaa locations
  Clone ID: PAT_MRT3847_77578C.1.pep
KKTHAAATXPXPPSFKISFPRSYATTTCLLFYTNPNPHHTIKILPFKFLTLXAFL

SEQ ID NO: 260859 - protein, 180 aa, Glycine max
  unsure (1)..(180): unsure at all Xaa locations
  Clone ID: PAT_MRT3847_77579C.1.pep
MMESPPKCKLTFTLIFFIVVSHSLGLVSFTLCIASETKRNKKGDLRWNGKLCHLPSSPAFGLGIASLVCLVLTQIVGEFYIIQDLLFRRKXETLKFEISAVARILLLISWLSFGIAVILLIVATSMSRRQAYGEGWLNGECYLVKGGIYVGSAILILVSVESLMGSALLTMKTNEEAESG

SEQ ID NO: 260860 - protein, 65 aa, Glycine max
  Clone ID: PAT_MRT3847_7757C.1.pep
HQAMIKPYGAPLYHLCVLLQHLRITTMSTMSNNFIDRDHLYSSWSFSKLMAIFLLVISISYLIYS

SEQ ID NO: 260861 - protein, 53 aa, Glycine max
  Clone ID: PAT_MRT3847_77580C.1.pep
HPNLSVFYDIRLFKSPYCLIVWARCSRLEAAHWRTNQYSLLGRVLINRVSTPL

SEQ ID NO: 260862 - protein, 39 aa, Glycine max
  Clone ID: PAT_MRT3847_77581C.1.pep
MPIRNIPIVRPEEATDPDTSNAGLAAFMSALIFNFAGSG

SEQ ID NO: 260863 - protein, 109 aa, Glycine max
  Clone ID: PAT_MRT3847_77582C.1.pep
MVETPPKCKLTFTLIFCIVISHSLGLVSFTLCIASETKRNKKGDLRWNGKLCHLPSSPAFGLGVASLVCLVLSQIVGNSILFRTYCSGGKRNAKFEIPFVARILLLISW

SEQ ID NO: 260864 - protein, 64 aa, Glycine max
  Clone ID: PAT_MRT3847_77583C.1.pep
FAGDYSWGEASSEKLVNKLLIIQFKVYLEKFNCYCNKCENINRCRESPNQVPVYYVQNTCFIPN

SEQ ID NO: 260865 - protein, 63 aa, Glycine max
  Clone ID: PAT_MRT3847_77584C.1.pep
SLLSLLFFCALSLSLDKESITLFTFVFSLPQTQSLQTERIIPFFFDHARVITHRHTRQPSFHG

SEQ ID NO: 260866 - protein, 51 aa, Glycine max
  Clone ID: PAT_MRT3847_77585C.1.pep
GNYKNRFTLHSSLTPFPLKLLYNFLYHTYYTHILNHYPLLKFLITYKYSPF

SEQ ID NO: 260867 - protein, 73 aa, Glycine max
  Clone ID: PAT_MRT3847_77586C.1.pep
CLITLIGAFKATLPCLIYSCEAECYASITFVQSIGVCYREIADNVPSKPDVADLYKTNGPVKMRISYPDEQAL

SEQ ID NO: 260868 - protein, 44 aa, Glycine max
  Clone ID: PAT_MRT3847_77587C.1.pep
WMFFLRPRLIFFFLKHYWHDFGPCVFCSADHNKITCRRVGHVVF

SEQ ID NO: 260869 - protein, 81 aa, Glycine max
  Clone ID: PAT_MRT3847_77588C.1.pep
LLQAFLERGSNTIASAAADKIPGLLGVFQKLIASKANDQQGFNLLNSIIEHMPPESVDQYRKQIFILLFQRLQNSKTTKFI

SEQ ID NO: 260870 - protein, 121 aa, Glycine max
  Clone ID: PAT_MRT3847_77589C.1.pep
MSIMDYKGGTVLAMAGKNCVVGGSDKRLGVQNLTLSTEFQKVFPVTEKCYIALSGLASDVQTLSELFSLKCNMYKLREGTEIEPLSLGNMISLTLYGRRFGPYFWEPIIARSCQYYYTTFL

SEQ ID NO: 260871 - protein, 417 aa, Glycine max
  unsure (1)..(417): unsure at all Xaa locations
  Clone ID: PAT_MRT3847_7758C.1.pep
VEPLVSRSKGERKTHYGKGGSDGLKKRFSLRLRPRLRLLAMRMKRASIRSILNEVGIFIRKNIRAVTFSASISTVFCLCFLFLKLTALPPPKSVPYSDLIISLQNGHVEKVLVEEGSRRIYYNMKSQHIENDGVSGEESEVADVSIDKDVDKIGSEGTSGAGQTPVGNVLKKFSKTRASIPEWQYSTRKIDHDEKFLVSLMREKGVTYSSAPQSVLRSMRSTLITVITLWIPLIPLMWLLXYRQLLAANSPARKQRPNGQTVGFDDVEGVDSAKVELVEIVSCLQGDINYRKLGAKLPKGVLLVGPPGTGKTLLARAVAGEAGVPFFTVSASEFVELFVGRRAARIRDLFNAARKFAPSIIFIDELDAVGGKRGRSFNDERDQTLNQLLTEMDGFESEMRVVVIAATNRPETLDPAL

SEQ ID NO: 260872 - protein, 156 aa, Glycine max
  Clone ID: PAT_MRT3847_77590C.1.pep
MQEQEAPEVWQEDGGFQEAVEIWLGGPSDNEVAPVGRIHGFYFPEDDNVYSVELRELLSRRSVSNLLGSSFRESLDQLIQSYVERQGHAHVEWELQETTPSPLAEQVSRQHSRDPIVSPQATVNSSLDRPLPPTPPPQPLWDRHSRHDNWSQSALN

SEQ ID NO: 260873 - protein, 73 aa, Glycine max
  Clone ID: PAT_MRT3847_77591C.1.pep
THGSAATHPLFSARVDRAGGPYSFLLHYYVLVAFLAHSSQLLFLPLFCLFSPLYDAFLFHPMYPEIAHSFQCE

SEQ ID NO: 260874 - protein, 85 aa, Glycine max
  Clone ID: PAT_MRT3847_77592C.1.pep
LRVECEAVDPVDVEKLATTVKRALGTYGTPAMTQMIQNCMSQDFSWKGPAKHWEKVLLSLEVAGSEPGIDGDEIAPLAKENVATP

SEQ ID NO: 260875 - protein, 112 aa, Glycine max
  unsure (1)..(112): unsure at all Xaa locations
  Clone ID: PAT_MRT3847_77593C.1.pep
KPNLFTIXMIDKHQYIIHPKQHLTVQMLKSTNVNNKITLHKVLLINTNTSYYIKKPIITNTLLYTTVQEQSLDRRXMFFKYENKXHYRKNIXHRRPNTHIRINSIISYDNYP

SEQ ID NO: 260876 - protein, 259 aa, Glycine max
  Clone ID: PAT_MRT3847_77594C.1.pep
MTNSFESKLRPGGYGQVYKGNLSNNSPVAVAVKVLNASKGNGEEFINEVISISRKSHVNIVNLLGFCLEGQKKALVYDYMPNGSLEKFIHNRNLETNPPLSWERLHRIAEGIAKGLEYLHRGCNTRILHFDIKPSNILLDKNFCPKTEVNICTTTNTLPIPVLQGVSISEPIDELGKVLNCENEAECSFSTKHAEHREYLGLGLMIPLHLALHKKLAKGKRKDQGEMTVDIPTMLVPQPLTSQKILLQIYSLEAKLQNT

SEQ ID NO: 260877 - protein, 40 aa, Glycine max
  Clone ID: PAT_MRT3847_77595C.1.pep
ESMWNYSTRGTKREQTPELEFINAVGQPAFLFSHWLLKVS

SEQ ID NO: 260878 - protein, 333 aa, Glycine max
  unsure (1)..(333): unsure at all Xaa locations
  Clone ID: PAT_MRT3847_77596C.1.pep
MSQTPPQTLDSDEAPQTTHATQTPSLLHLSFNQDSGCFAAATDRGFRIYNCDPFREIFRRDFGPGGGVGLVHMLFRCNILAFVGGGSSXPDPRYPPNKVMIWDDHQSRCIGELSFRSEVKGVRLRRDRIVVVLAHKIFVYNFADLKVLHQIETIANPKGLCDLSHVSATMVLVCPGLQKGQVRVEHYASKRTKFIMAHDSRIACFALTHDGRLLATASSKGTLHVFNLKVDSGLLGHDRSHSTSEANLASPTAMSSLSFFKGVLPKYFSSEWSVAQFRLQEGLQYVVAFGHQKNTVVILGMDGSFYRCQFDSAAGGEMTQLEYYNFLKAEETF

SEQ ID NO: 260879 - protein, 137 aa, Glycine max
  unsure (1)..(137): unsure at all Xaa locations
  Clone ID: PAT_MRT3847_77597C.1.pep
DGAAWTLRLKEEFXALLAYTQMTXSNDNDWVRLSAAPPEGALWTGHCWYVRILLKCQFHLHFDVPVTSLFPAPELALPRLDGTTREMYRGGAICLTVHFLPLWAXNCPRSGLAHALCLRLAPWLAAEVPILVVSGVI

SEQ ID NO: 260880 - protein, 376 aa, Glycine max
  Clone ID: PAT_MRT3847_77598C.1.pep
MSQTLGSDEPPQTTDSHTPSLLHLSFNQDSGCFAAATDRGFRIYNCDPFREIFRHDFGSGGGGVALVHMLFRCNILAFVGASSSSSSSEPRYPPNKVMIWDDHQSRCIGELSFRSEVKGVRLRRDRIVVVLAHKIFVYNFSDLKVLHQIETIVNPKGLCDLSHVSATMVLVCPGLQKGQVRVEHYASKRTKFIMAHDSRIACFALTHDGRLLATASSKGTLIRLFNTLDGSLLQEVRRGADRAEIYSLAFSPTAQWLAVSSDKGTVHVFNLKVDSGLLGHDRSHSTSEANLASPTAMSSLSFFKGVLPKYFSSEWSVAQFRLQEGLQYVVAFGHQKNTVVILGMDGSFYRCQFDSAAGGEMTQLEYYNFLKAEETF

SEQ ID NO: 260881 - protein, 53 aa, Glycine max
  Clone ID: PAT_MRT3847_77599C.1.pep
CRSHVPNCIDAASRTIRCFIHAPVYLNYETLGYVLFSTPVQTLTHKSLQPWMM

SEQ ID NO: 260882 - protein, 47 aa, Glycine max
  Clone ID: PAT_MRT3847_7759C.1.pep
RTMMLLDRSVEHGSPQVQIESPGLSSKQIAATVVSLTQRKKQALLFK

SEQ ID NO: 260883 - protein, 253 aa, Glycine max
  unsure (1)..(253): unsure at all Xaa locations
  Clone ID: PAT_MRT3847_775C.1.pep
HILCKKTNTILHLAAKLAPPGRLGLVSGAPVQMCLELIXAQEVRKIMPPSFIMFKNSDGLTAQELFTKEHEGLRKGEEWMKRTAEFCMLISTVIATAVFAAAVNIPGGIDDGTKKPNYLDKTSFQVFAISDAAAFVSSATAILIFLSILISRYAEYDFYKSLPLKLICGLVTLFISIACMMVAFGSAFFITYYYGLKAVPDIIAVLACLPLLLYIGLQFSLWSDIIYSTFYCRNLFKPSKRMIYVATKELGTL

SEQ ID NO: 260884 - protein, 61 aa, Glycine max
  unsure (1)..(61): unsure at all Xaa locations
  Clone ID: PAT_MRT3847_77600C.1.pep
TTDGISGARQYNNILLXNAVIFGSDDTPWDGGTFILTLXLTEDYPNKPPIVRFVSRMYHPN

SEQ ID NO: 260885 - protein, 49 aa, Glycine max
  Clone ID: PAT_MRT3847_77601C.1.pep
NLDLMHLVIHAPLCFEGFKSLVPQFNLKLLLLIFTITLMITHLFSFLII

SEQ ID NO: 260886 - protein, 100 aa, Glycine max
  Clone ID: PAT_MRT3847_77602C.1.pep
TTALFPSLILHWFMKLILSLCLPPMIKPFCIIKDPSGRFPMYLLSRCLFILHMNVSEPYSTQVHSDLDGHLHNMICSGQHLVNFPMNDHDYVHFSIVNSI

SEQ ID NO: 260887 - protein, 222 aa, Glycine max
  Clone ID: PAT_MRT3847_77603C.1.pep
KKTSFQVLENLVENSLPYLKCRYKKYRVGRKKNEKGEAREKFQFSSRVQKEYLKPSYSASIGEELEDGLFDDFLELALQFGMILMFACAFPPAFAFAAVNNLMEIRTDALKLLVILRRHVPRAAATVGAWLNIFQILILMSICTNCAILAWLYDEEGKWKIEPGLATILIMEHVLLLTKFGFSRFSPEVIDLLPTMLAPQEQNLRSSGGSRNMNFKSGPLFI

SEQ ID NO: 260888 - protein, 60 aa, Glycine max
  Clone ID: PAT_MRT3847_77604C.1.pep
LIPLSWERALKFWKKKAPLLTPFVKARLELLNFGFGWNGIPPKSWFGTNLALKNNKPQKI

SEQ ID NO: 260889 - protein, 78 aa, Glycine max
  Clone ID: PAT_MRT3847_77605C.1.pep
QELLKPEDHEEGRVPRTVECELTQDLVDACIPGDVVTVTGIIRGINTYMDIGGGMPELACLCYSPYMVPCFNTCLDVE

SEQ ID NO: 260890 - protein, 68 aa, Glycine max
  unsure (1)..(68): unsure at all Xaa locations
  Clone ID: PAT_MRT3847_77606C.1.pep
SSNLILISHSLATNYKPFKNPPSYKPXEYNFPLYKPPSYXPKPSLYKLIPLFYXPPYTKPPYMKPPYL

SEQ ID NO: 260891 - protein, 533 aa, Glycine max
  unsure (1)..(533): unsure at all Xaa locations
  Clone ID: PAT_MRT3847_77607C.1.pep
MIKRFPSRNNQRSKGIKVKHVLQIVLLLGVCFWLIYQVKHNHDKKNEFAKDAKLSVSTQTDLILKLGRRDLHPGKHEEIQNEKHEEEEEDEHIEEDEETKHDHEEQQDGNKNETEEREENKHEGRLQRGEENKHGAEDQEEDVEDVGRGGGDDDIDENDQEKSEMDTIDRDDEFLDEEKEKEEVDEKEXENEDEEKESLVENHNNHEAREEHYKGDDASSAVAHDTHATSTETETLSLENSDVNLEMNIPKPENETTYSDESVGKQNDSDLKVSEGDMIDGISSNTTAVQETGNNTLSNPVDDSSLLNKTTATNSDSHLESSSNLTVVTTEASNNLTGAGNDTSSSSEQNKKVMLSESDQAQSSTMNTTIPGDIKNVQTEGLEQSGNRTSDENLHDTNSTISVKTENGGEDAGESSNLVASNVTENAYRNERSESDISESGKFNGNSETSETDENPNVDATEDEMFKGDTQTGETDETSDSSSANETMDSAEQDAIDSSDTHIHEDVAEARTDLDTLPDIRNEGDDSDETAAE

SEQ ID NO: 260892 - protein, 145 aa, Glycine max
  unsure (1)..(145): unsure at all Xaa locations
  Clone ID: PAT_MRT3847_77608C.1.pep
VRVGVNVLRELSLHSPEEARQSRWKALSRLXWLQIADVPTIAQIEELHSMQRMMNAPDSNDNIDLLLSIDQLGLQRSIGQAFPNKTVFNDKLVLANTQELFDGNFPADSWIPIFENWLYPVRQLPSEASSXNSTCGTGPAGSPTT

SEQ ID NO: 260893 - protein, 373 aa, Glycine max
  Clone ID: PAT_MRT3847_77609C.1.pep
MALSTTFMPPSSPKLNLYSKIRRPFYPHSVRFLNPLKIRASTTLDYSNVSTNDKSPPLKTSNWQWKFKDNLINIYYEEHVKESPEPSQNILMMPTISDVSTVEEWRLVAGDIAQRNGNTNWRATIVDWPGLGYSDRPKMDYNADVAREFLVDFINSPNGPMKQPENDLIIFGGGHAASIVARAAKKGLVKPKAIAAVAPTWAGPLPIVFGRDSSMETRYGLLRGTLKAPAVGWMMYNMLVSNENAIQSQYKSHVYANPDNVTPGIVESRYALTKRKGARYLPAAFLTGQLDPVTSREEFLELFAALEGKTPVLVVSTKGSPKRSKAEMEALKGAKGVSKFVEVPGALLPQEEYPALVAEELYQFLQEYFGTVA

SEQ ID NO: 260894 - protein, 138 aa, Glycine max
  unsure (1)..(138): unsure at all Xaa locations
  Clone ID: PAT_MRT3847_7760C.1.pep
RPFVRPRVRGRVGKNLKCLMIDEADRILEANFEEEMKQIINILPKKRQTALFSATQTKKVEDLARLSFQATPIYIDVDDGRKKVTNEGLQQGYXVLPVLQRSGALYSFLRRYQSKKXMGFFSLCTSXQFHADLLKCTG

SEQ ID NO: 260895 - protein, 59 aa, Glycine max
  Clone ID: PAT_MRT3847_77610C.1.pep
VRVGGRVGRPGILVPVPADVNASLSVRRTKRKALPNECQRIGTSAGAMAQARRQSRFGD

SEQ ID NO: 260896 - protein, 138 aa, Glycine max
  Clone ID: PAT_MRT3847_77611C.1.pep
ALYFGVLVIGNWAPKGEGEFTLAVGWIYVKGLFLFLKKKKKKKKKKKKKKKKKKKKKKKKKKKKKKKKKKTKKKKKKWGRPPIKDLLTPKIISDPDPKRYQLFLLGSKLNTWEKKGKNVFLGKNCYPLKFQKKNNPEK

SEQ ID NO: 260897 - protein, 74 aa, Glycine max
  Clone ID: PAT_MRT3847_77612C.1.pep
MIQLLFMVIFVEGVLAFLLLVKIGPLRDLVIKSLDQLKMGKGPATVKTIAGTMSVILLSSLMSIVKIQNKGAKL

SEQ ID NO: 260898 - protein, 71 aa, Glycine max
  unsure (1)..(71): unsure at all Xaa locations
  Clone ID: PAT_MRT3847_77613C.1.pep
PFGWVSLGFWRAXPEVLYIIFIQYPLYCFLXILIHIYNLPSKKKKIDGQSQXRLFALXXATNNXAKRNKGF

SEQ ID NO: 260899 - protein, 299 aa, Glycine max
  Clone ID: PAT_MRT3847_77614C.1.pep
MSSGGGGGGAKPFFCHVCSQRITCSDESEPFCPICMESFVEECNPNNPNPNLFTENEESSDSEISFSLLPLFLSSVSRSRPEPDMFDPMVFLQNHIQGLRADGANIQVDFGHPSEQQGFRLPANIGDYFMGPGLEQFIQQLADNDPNRYGTPPAAKDAVENLPTITVDDELLNSELNQCAVCQDEFEKGSLVTQMPCKHAYHGDCLIPWLRLHNSCPVCRYELPTDDAEFGSSEVRGNGGDGGSRTGGSGDSGGGSCGGGGGGSNRPVRRTVRIYLRHPDAADSAQDSAERGWEWGSWD

SEQ ID NO: 260900 - protein, 466 aa, Glycine max
  Clone ID: PAT_MRT3847_77615C.1.pep
ETFDNDVTGNEEVRRSQHISTDIGQVLDLFSAKDDGNIPSGVKKGNEVVKQKDVSSDDFRPAIGVKGREEYPDSSLGTSQQKSGPESPDHSDWMKLSETSDNKVAGNDVERSQLNDTDIGQILDVFSAEDNENIPSEAQKENEFVKDVSSDDSRPATDIKVRKKYPNSRLATSPQRKCRNSNLDKKLCDIAPKTARKAYKKQSKVAPDKDLNSMDLPLQVFYPQTFCSANTEFCSFPGSNGIQTKSALYTDLQLIDEDEEEQEAQDLKSQITSEFRKLNMSFPSKLKAREKQKLELEAFSSREPYDSCTEVIPSTPIIVSTKRQRRSKPCTDVAILNEPMNRKIITRRAVQPDKHETEGRALVPYDSNFSELQKRRKALKLPITVDMETNSDRVSMDSRSQLVLHTSKLHSLVDSHDGTSSLLPGDLNSLSLTDLRAMAKDHKVKQYYKLRKGALVEQLAKQFRSC

SEQ ID NO: 260901 - protein, 101 aa, Glycine max
  Clone ID: PAT_MRT3847_77616C.1.pep
DVSCVRQYLDQRFLMLNMVNVNTDFSYQRYHRQVRHGNHGKNVCVLRTDYPTNAPLIIGCISCSSWLNDRPLAVDCTLSFFPVVTTNSLASIKWSSSLYCA

SEQ ID NO: 260902 - protein, 192 aa, Glycine max
  unsure (1)..(192): unsure at all Xaa locations
  Clone ID: PAT_MRT3847_77617C.1.pep
MAEAQATPTFKLVLVGDGGTGKTTFVKRHLTGEFEKKYIATLGVEVHPLGFTTNLGQIQFDVWDTAGQEKFGGLRDGYYINGQCGIIMFDVTSRITYKNVPNWHRDLVRVCENIPIVLTGNKVDVKERKVKAKTITFHRKKNLQYYDISAKSNYNFEKPFLWLARKLVGNQSLEFVAAPALAPPXVSVDPAA

SEQ ID NO: 260903 - protein, 161 aa, Glycine max
  Clone ID: PAT_MRT3847_77618C.1.pep
KPKNPSPNKVTRGENFSLPIRLKNRAGPPKYFWRTILINPGGDPTGGARPTGFYLQNPTPLGAWVLKGEKGTPKGGLTKGEGGVKPKPPPPKSLGGATKNKAPLKKKDTLGCWREKNPRKENFVEKKPPPLVLRGGGGGGKILPPNCKTSLFFFKKHKAFR

SEQ ID NO: 260904 - protein, 38 aa, Glycine max
  Clone ID: PAT_MRT3847_77619C.1.pep
ILFYTTYIRISIQQCQNFIKNTETVPIYVYLYLTFELV

SEQ ID NO: 260905 - protein, 45 aa, Glycine max
  unsure (1)..(45): unsure at all Xaa locations
  Clone ID: PAT_MRT3847_7761C.1.pep
NEAWGTXEELLLAYAVNRHGXRDWDAVVMDVETRTTRILSTERHY

SEQ ID NO: 260906 - protein, 131 aa, Glycine max
  unsure (1)..(131): unsure at all Xaa locations
  Clone ID: PAT_MRT3847_77620C.1.pep
LLFFFGVPNILWDKLVRLQQRVLWGGGLGHNKIAWVNWDSACLPKEKEGLGNRDXRKPNYALLGKRRWNLFHHQGELGARVSDSKYKRWRNLDEERRAQSESFRWQEISFITHSTEDGSWLEKRTKWKMGG

SEQ ID NO: 260907 - protein, 51 aa, Glycine max
  unsure (1)..(51): unsure at all Xaa locations
  Clone ID: PAT_MRT3847_77621C.1.pep
PLFIQHLKWFXHLPMTATRXSFAIXNNKNSTQVVFRAXKKKKKKKTQKKGG

SEQ ID NO: 260908 - protein, 106 aa, Glycine max
  Clone ID: PAT_MRT3847_77622C.1.pep
VKGWGHQGLSGKETTRSLVQGSAILQFNFFGTLSVKGLTADIDLPSKAKRVFLEPPKFVEARSVIVPFGFGLGSGKQASKQAGLQTCRVTPCLSALTVISFVERKR

SEQ ID NO: 260909 - protein, 140 aa, Glycine max
  Clone ID: PAT_MRT3847_77623C.1.pep
TTLFCVSNPISHLSAFASLRAPPFFFNSPALRIHAGGRERRGSAVATRAGPSTSSILFAIALPSSLLGVTILAALRMGDKLDRDWLEEMARNEALMELETYDDDDNDDNDDVSSEEDSMETNVQEKPALTQARNRPKREA

SEQ ID NO: 260910 - protein, 36 aa, Glycine max
  Clone ID: PAT_MRT3847_77624C.1.pep
FLTFFFLVLVLIIKRVLIMHYYETRTVQKRACCLLD

SEQ ID NO: 260911 - protein, 81 aa, Glycine max
  Clone ID: PAT_MRT3847_77625C.1.pep
EINPFNLHSPLRFLQNPNHSFAHLFTDSAEASTSLSSEGEIVGVHFLEERSTVKRNLRKRRWKIGERTIKRRFIHFDGFCC

SEQ ID NO: 260912 - protein, 158 aa, Glycine max
  unsure (1)..(158): unsure at all Xaa locations
  Clone ID: PAT_MRT3847_77626C.1.pep
MAEVQAKAPAVQRVAKKGKKKGDDEEGAGKQVVQLGPQVSETELVFGVAHILATWNDTFLHITDISGRETYCRITGGMKVKADREESSPYAAMLAAADVVMRLQELRVNAIHIKIRARGGTDTKTPGPGAQAALRALARFGRRIXSIEHVAPIHSDST

SEQ ID NO: 260913 - protein, 204 aa, Glycine max
  unsure (1)..(204): unsure at all Xaa locations
  Clone ID: PAT_MRT3847_77627C.1.pep
MASSKPHGVENVGSCLRNTKGFTLQVLTGCWFMEFSSFMIMSVSGASYMFSLYSRDIKSVLGYDQSTLNFLSFFKDLGSNIGIISGLINEVTPPWVVLTIGGVLNFFGYFIIWLAVARKIAKPQVWNMCLYIFIGANSHCSTNTGVIVTSVKNFPGTRGIVIGLLSGYLGLSAAIITQIYYAFYGNDSQXLILLMAWLPTAVTF

SEQ ID NO: 260914 - protein, 55 aa, Glycine max
  Clone ID: PAT_MRT3847_77628C.1.pep
CLSKTVGLYTDQADREDHTFTLQTCLLMSITTLIAADIPMVTSMGGCGSPGVDCS

SEQ ID NO: 260915 - protein, 75 aa, Glycine max
  Clone ID: PAT_MRT3847_77629C.1.pep
QESTLFYYYSICFLCSLKRRGRRRSFNLFTALMSSLVQYYSADMLGVAAWKHMHTTGLTWYICSSIGFGIAEHAI

SEQ ID NO: 260916 - protein, 56 aa, Glycine max; identical to SEQ ID NO: 242893
  Clone ID: PAT_MRT3847_7762C.1.pep

SEQ ID NO: 260917 - protein, 54 aa, Glycine max
  Clone ID: PAT_MRT3847_77630C.1.pep
GSRATAGFWQLEGDASDRILQAVSDMLKNRSTLNVGADAVSVLSGNQEGAYQWV

SEQ ID NO: 260918 - protein, 186 aa, Glycine max
  Clone ID: PAT_MRT3847_77631C.1.pep
NSARVLMEERKKHPSFPSNYLTLAQLQERWLKQQNQINQPQPQPQPQEQHNHHHRQQPHQEQVLVPRNGNAYRSRPQFQYVAKNRNDSETRRRATKVAVASDDNCKSEAVAGIGDETADLNGKSSESKKNQNNRRNGKGKWKTKTEKRGARGDGSGTGAQGKEEAEKKATIEKKMSWRRTWFGIGG

SEQ ID NO: 260919 - protein, 292 aa, Glycine max
  unsure (1)..(292): unsure at all Xaa locations
  Clone ID: PAT_MRT3847_77632C.1.pep
PEMLKLKDXPPPDXFEDLWPGHCDEFIRSLPFQEYSDPRTGILNLAVKLPAHVLKPDMGPKTYIAYGIKEELGRGDSVTKLHCDMSDAVNILTHTAEVILTDEQHFTISKLKEAHRAQNEREQCAQERVADHLEDRPYKDNKEHIENKEVLEAKSMKKQPIEIDGNIFPNNVLEXIVHPIHDRCFYLTWEHNKKLNKELGVEPWTFEQKLGEAVFIPAGCPHQVRNLKSCTKVAVDFVSPENIHECLRXLTKKFRQLPKNHKAREDKLEIKKMIVYAVDQAVKDLKDLLKCS

SEQ ID NO: 260920 - protein, 98 aa, Glycine max
  Clone ID: PAT_MRT3847_77633C.1.pep
RNMIKGAMRVCMVTSEPCGEGFFFSHLPTHNGVEDTYTLLTLSFEVPFRELLEKGSRSGCFQIPGLAVDRIWFLDGQHLFFFPLPLLSILIFFPFNSG

SEQ ID NO: 260921 - protein, 473 aa, Glycine max
  Clone ID: PAT_MRT3847_77634C.1.pep
MKTLYSLRRFYHVETLFNGTLALTGRDQETTGFAWWAGNARLINLSGKLLGAHVAHAGLIVFWAGAMNLFEVAHFVPEKPMYEQGLILLPHLATLGWGVGPGGEVIDTFPYFVSGVLHLISSAVLGFGGIYHALLGPETLEESFPFFGYVWKDRNKMTTILGIHLILLGIGAFLLVFKALYFGGIYDTWAPGGGDVRKITNLTLSPSIIFGYLLKSPFGGEGWIVSVDDLEDIIGGHVWLGSICILGGIWHILTKPFAWARRALVWSGEAYLSYSLGALSVFGFIACCFVWFNNTAYPSEFYGPTGPEASQAQAFTFLVRDQRLGANVGSAQGPTGLGKYLMRSPTGEVIFGGETMRFWDLRAPWLEPLRGPNGLDLSRLKKDIQPWQERRSAEYMTHAPLGSLNSVGGVATEINAVNYVSPRSWLATSHFVLGFFLFVGHLWHAGRARAAAAGFEKGIDRDFEPVLSMTPLN

SEQ ID NO: 260922 - protein, 419 aa, Glycine max
  unsure (1)..(419): unsure at all Xaa locations
  Clone ID: PAT_MRT3847_77635C.1.pep
MCQRSMSGGGMKLLRMFVFVGLVIVKWVEGFEDANVTDLGMQYVSGRGFYRPLMVGFTHINGAAAKGAVCLDGSLPGYHFHRGYGSGSNSWLIQLEGGGWCGTVKNCLYSKKTRHGSSFFMEKQIPFIGILSNKAEENPDFFSWNRIKIRYCDGASFSGDSQNAGAGLYFRGQRIWQAAMEDLMSKGMRYAKQALLSGCSAGGLATIIHCDEFRELFPRTTRVKCLSDAGLFLDSVDVSGRRSLRNLFGGVVTLQGVQRSLPRSCTSRLNPILCYFPQHLIAGVRTPLFLLNAAYDTWQIQASLAPPSADYHWNWYECRXNYARCSAPQIQYLQGFRNQMLRSTRAFSRSFKNGLFINSCFAHCQSERQDTWFARDSPRIGNRGIAESVGNWYFDRVSVQAIGCPYPCDKTCHNLVFKR

SEQ ID NO: 260923 - protein, 71 aa, Glycine max
  Clone ID: PAT_MRT3847_77636C.1.pep
GSFFLFQFSLSLSPLPILKFRILMQRRRITFLFISIFCSFSFSINPYSYLYFSIFCIRNIADIFFARLLYV

SEQ ID NO: 260924 - protein, 89 aa, Glycine max
  Clone ID: PAT_MRT3847_77637C.1.pep
IKENPMFVDTVNLNNSCVFTGIVVNHNPWWVHPSNKLSIFIIHVFMYNMKLQKQTQTKWLCYDSTRKWLVILNVLRRLKKLRTGTNNFL

SEQ ID NO: 260925 - protein, 62 aa, Glycine max
  unsure (1)..(62): unsure at all Xaa locations
  Clone ID: PAT_MRT3847_77638C.1.pep
KVSLSVAPFXDXKRKIINAAVGVGKGAXKRLGIRXNPXASPPLTAXYXLXYMGTXRWTQRPR

SEQ ID NO: 260926 - protein, 67 aa, Glycine max
  Clone ID: PAT_MRT3847_77639C.1.pep
TNFIIIYKWYFYAIITLYDPRSLLTYTSQYSHTHPIITTLLLSSKIPYIVTTSYTYILTILYYQYPT

SEQ ID NO: 260927 - protein, 55 aa, Glycine max
  Clone ID: PAT_MRT3847_7763C.1.pep
SYLSQTRRNILPYIIGNFTLVEVKNWAVPPPTLYNALITYALYVIPNALDSNNIV

SEQ ID NO: 260928 - protein, 81 aa, Glycine max
  unsure (1)..(81): unsure at all Xaa locations
  Clone ID: PAT_MRT3847_77640C.1.pep
GHLSTLNCFMDLNDVRRFMKRDDFEQLSLPILDXVNRPLYNALXAEPGLNAVNLHTPXATDSGSHIPAINKIFTEIFNLEP

SEQ ID NO: 260929 - protein, 97 aa, Glycine max
  Clone ID: PAT_MRT3847_77641C.1.pep
PGLTRSEFPSSPPKSVPKSSCSSAGPGKVEAGQDGDGGGDQKKGLVIRFVSFIGVSIWGAVGSVNVFSREKVGLTSPFHSLVWFFFFESKIHVLVSL

SEQ ID NO: 260930 - protein, 64 aa, Glycine max
  Clone ID: PAT_MRT3847_77642C.1.pep
RRIRVRLPSPTRTSISIYIYVCVCVCVLDLHFNCYLLCYISRILVERFFSDYVSILIPSQRRTI

SEQ ID NO: 260931 - protein, 133 aa, Glycine max
  unsure (1)..(133): unsure at all Xaa locations
  Clone ID: PAT_MRT3847_77643C.1.pep
VRPPASGYAVQRPRTRALVAVHEPVLKHLVMPVQIVGERVRYTIDGSKTIKVSLAPKHXTKSKFKLETCVPVHRYLSRESVVLKYPIPRSRLYLLALHFFLYYVCCMQVFISWHCLGIAFSYLYNPLSLGLTK

SEQ ID NO: 260932 - protein, 128 aa, Glycine max
  Clone ID: PAT_MRT3847_77644C.1.pep
VYAWVRLEEQASHVAQRAAEALRQSRMLLSHDSVSVSTWTGRSGTAGAPSSVKRKFGSTANSQLGNNSKASDELPNKGTNKINGFAAAGASAGKALSSAELWAQIRGHQEKAIGAGLEHQDWCVVKLH

SEQ ID NO: 260933 - protein, 47 aa, Glycine max
  Clone ID: PAT_MRT3847_77645C.1.pep
GRYISNFYRIKTRFLRVNSLTPSQAFLILCQGNNLSVEPLRRAKHSY

SEQ ID NO: 260934 - protein, 143 aa, Glycine max
  Clone ID: PAT_MRT3847_77646C.1.pep
AVFNPPPRRTYSFLLTNQLKPKNKPTNNKKRKPCTHHEKKQSNPNPEKKTPQKHKQTPPNLGGGETPFPTKKPTPPKNHTRKKKAPNKPPQQSPHQTLATPRKKKTPDPPQETQKATPPKGGPPYPRQKHKPPSPGEFPPPKQ

SEQ ID NO: 260935 - protein, 71 aa, Glycine max
  unsure (1)..(71): unsure at all Xaa locations
  Clone ID: PAT_MRT3847_77647C.1.pep
PRVRERTTFQCGMQLPLHLIRSPSGRPWPIIKWSLVGLLAFCSVVVVLVCAAAKFCKDCRVRSXEVFDAEA

SEQ ID NO: 260936 - protein, 66 aa, Glycine max
  Clone ID: PAT_MRT3847_77648C.1.pep
TLSNYHYSCSGGGWDNKSHYHPHRILCCDISNFIDSYRRSLDGQTYKHSHAAPLLLYCIIEIDAYL

SEQ ID NO: 260937 - protein, 97 aa, Glycine max
  Clone ID: PAT_MRT3847_77649C.1.pep
SSSIITVPVVHLCYPFLAPPNYPIPMCCVCRRGAFFPTTTSYTTLYASCSFRYPRLIYSNLWSTLTIPTSPSFLVNVFIPPPPPPQAGGTPTHVARQ

SEQ ID NO: 260938 - protein, 62 aa, Glycine max
  Clone ID: PAT_MRT3847_7764C.1.pep
LALDIIHDVLVAGRQVLSMEVLTLGMVLVVPFVGVASVASREDNTAREGVCVCCRRKGRNRL

SEQ ID NO: 260939 - protein, 67 aa, Glycine max
  Clone ID: PAT_MRT3847_77650C.1.pep
SVIIIILQGFYYFNIFCLHQILALIWYRKHAENDTSVPDAANKAENFAQRWVSYYLLFLVHFERFVA

SEQ ID NO: 260940 - protein, 72 aa, Glycine max
  Clone ID: PAT_MRT3847_77651C.1.pep
MMSFMLFCGAIVLFGVIDQGLIIKLIPGHDKELGRRCDRNEDGSGGHESMPSFHLIVKSFRDTSEKREMSFF

SEQ ID NO: 260941 - protein, 114 aa, Glycine max
  Clone ID: PAT_MRT3847_77652C.1.pep
SAFAIPGHRYRKLLVGSIGLAVSIALYASPLVAMKKVIQTKSVEFMPLPLSLSSLLASLLWMTYGLLIGDIFVAGPNVVGTPLGILQIVLYCKYWKKIATEEPNKVELHNVNTI

SEQ ID NO: 260942 - protein, 70 aa, Glycine max
  Clone ID: PAT_MRT3847_77653C.1.pep
GLFFFYCSFPVSKADKGGQVLVTTKTSASNKDTDRDKKRPTSHSSPAAIHFPECPDHKQSNQRVHSNKPL

SEQ ID NO: 260943 - protein, 121 aa, Glycine max
  Clone ID: PAT_MRT3847_77654C.1.pep
GTIHRDCGDRSLIFEGERPVLNTTIMLFLVQDGIPNGAIYALLGLALVLVFAVTRVILIPQGEFVTYGALTYASLAAGQMPGTAKLALALGIGAFGFDLFVARKALHGRLILRSVLTNIVL

SEQ ID NO: 260944 - protein, 38 aa, Glycine max
  Clone ID: PAT_MRT3847_77655C.1.pep
NIIFFTCNPVGPVELNNILMGNMQVFIIYYYYYVYNTY

SEQ ID NO: 260945 - protein, 69 aa, Glycine max
  Clone ID: PAT_MRT3847_77656C.1.pep
VLRLHKHYLIYIVHYRSIKTFGIWHSLCGTTFFSGQNSTTLQIHLEQPFFRQESVSNANEAIIHLGALF

SEQ ID NO: 260946 - protein, 231 aa, Glycine max
  Clone ID: PAT_MRT3847_77657C.1.pep
LSKVKVLSLGLSNQGDSFNKYGELYIKRYPELKIKIVDGSSLVVAIVVNSIPKEARQVLLCGKPNKVSYAIASALCERGTKVTTMYKDEYDKLQLRISNESKNNLVFPGSYSAKIWLVGDQCDEVEQKKAPKGSLFIPISQFPPKKLRKDCFYHSTPAMIAPPSLVNVDSCENWLPRRVMSAWRVAGILHALECWKVNECGNVMFSVEKIWQASLQHGFRPLKITLYSFLN

SEQ ID NO: 260947 - protein, 431 aa, Glycine max
  Clone ID: PAT_MRT3847_77658C.1.pep
MPHPSFHKLLLPSTVQPNQQLRLPDNFMRKYGGELSPIVTLSVPDGSVWHVGLKKADNKYCFLDGWKEFVQRYSIGVGSLCVRTRVGKSVRTVVIFNLATSEINYQSVTRSSNEGLHFTNCLKFFEEMEGEDSIEISDSSPSHLSPSSLQNQALAGSVDKMMPGKSYNTPPALQNLFNGSKLNSINWGEGGNAHSSRSANSLDNRLTRDIGLQFNAVEFKRSTEELKLRASIEERMKKTTRKKRKSDGQEPSAGHEEEVEMRFRFYESASARKRTVTAEERERVINEAKAFEPSNPFCRVVLRPSYLYRGCIMYLPSCFAEKHLNGVSGFIKLQISNGRQWPVRCLYKGGRAKLSQGWFEFSLENNLGEGDVCVFELLRMKEVVLQVTIFHVTEDVGLLSPPLQHNQNMTSAKLLSTPLQQHLTSTKMVRN

SEQ ID NO: 260948 - protein, 173 aa, Glycine max
  unsure (1)..(173): unsure at all Xaa locations
  Clone ID: PAT_MRT3847_77659C.1.pep
METASDYGAFMEKFTLPPNSAPSLPLNSLTFAVKEIFDAEGYVTGFGNPDWARTHTVATSTAPTVLALLRAGATCVGKTVMDEMAYSINGENIHYGTPRNPCAPDRVPGGSSSGSAVAVGAELVDFSLGTDTGGSVRVPASYCGIXGFRPSHGAISESGVIPMCXSFDTVAWL

SEQ ID NO: 260949 - protein, 82 aa, Glycine max
  Clone ID: PAT_MRT3847_7765C.1.pep
LGTLWAGPGLATHPGRTAIGPRRRDERRMGGKTAVPGSAAAPPSSDGPWAVRQLGSTQGWSLGSKHGPQEPDRREAAGRAGM

SEQ ID NO: 260950 - protein, 436 aa, Glycine max
  unsure (1)..(436): unsure at all Xaa locations
  Clone ID: PAT_MRT3847_77660C.1.pep
METASDYGAFTEKFTLPPNSAPALPLKSLTFAVKEIFDTEGYVTGFGNPDWARTHPVATSTAPTALALLRAGATCVGKTVMDEMAYSINGENIHYGTPRNPCAPDRVPGGSSSGSAVAVGAKLVDFSLGTDTGGSVRVPASYCGIXGFRPSHGAVSESGVIPMSXSFDTDPRVRFARDPMILSRVGGVILQLPDVAPPIRPTSIIIAEDCFQLSSTPFDVVTGTVIKAVEKLYGGDVLKPEILGDYVKTNVPSLKHFMSKDNTDQIYNIPSLAALSSAMRLLQRFEFXNNHGEWISAVKPDLGPGISERVSDALRTTGENIDICYSIKKELHDALAALLGDFGALMIPTVPGPPPKLQTNTSDLEIFRARAFSLLSIAGVSGFCQVVSIPLGMYNNLPLSISLVARHGADRFLLHLVESLYDSIKDSHQLIILHEV

SEQ ID NO: 260951 - protein, 340 aa, Glycine max
  Clone ID: PAT_MRT3847_77661C.1.pep
MESSEGIRCKVCVTGGASYIGSCLVKKLLQKGYTVHSTLRNFKDESKIGLLRGLPHANDERLVLFEADIYKPDEYEPAIQGCEIVFHVATPYEHQSDSLLFKNTSEAAIAGVKSIAKYCIKSGTVRRLIYTASVVAASPLKDDGSGFKDFIDETCWTPLNLSMGTLHQWYTDSKTQAERELLSYGSGENGGGLEVVSLACGLVGGDTLLSYTPLSVTLLSSQVQDNEAAYQSLKFLEELDGKIPIVHVEDVCEAHIFCAENPSINGRFLVASSYASSAEIANYYLQAYPEFNLNHKYLEGPKRDIKWASRKLTDNGFVYKNDLKMILDDCIRCARRMGDL

SEQ ID NO: 260952 - protein, 102 aa, Glycine max
  Clone ID: PAT_MRT3847_77662C.1.pep
MESSEGIRCKVCVTGGASYIGSCLVKKLLQKGYTVHSTLRNFKDESKIGLLRGLPHANDERLVLFEADIYKPDEYEPAIQGCEIVFHVATPYEHQSDSLLVG

SEQ ID NO: 260953 - protein, 213 aa, Glycine max
  Clone ID: PAT_MRT3847_77663C.1.pep
MGDTNHASTVDDDLLLKNFFAEVSEVERDNEVLRILSCFKLNPFEYLNLSFDSSIDDVKKQYRKLSLMVHPDKCKHPQAKEAFGALAKAQQLLLDQNERDYILSQVNSAKEELRAKRKKQLKKDTASKMKSLVEEGKYDKQYEQSEEFRQELKVKVRELLTEQEWRRRKMQMRISEEEGRLKRDEEEQKEMWKRKREHEEEWEGTREKRVSFL

SEQ ID NO: 260954 - protein, 77 aa, Glycine max
  Clone ID: PAT_MRT3847_77664C.1.pep
AKPYARVPSGETILSSPGSESEKFNALLLLLEKDPEEEEEEEPHSPPMSNIRRCQRILILSLFFLSVVAPLVFVSHR

SEQ ID NO: 260955 - protein, 71 aa, Glycine max
  Clone ID: PAT_MRT3847_77665C.1.pep
IRFGISIRKATTIAASNAQHHIIRHHIFYPLFLARFPQCLFPLIVPPNLNHYLFLLGVVRDGIRVNKNVHM

SEQ ID NO: 260956 - protein, 92 aa, Glycine max
  unsure (1)..(92): unsure at all Xaa locations
  Clone ID: PAT_MRT3847_77666C.1.pep
KPPSEQXXTEPXTSAKXXAEAAQXXXKSDSDKGDKAKGXDXAGXXXDAAGKXGKRGDKQGKGQXXDKXXXXXXXXQXXXTTXXPQPAEKGEE

SEQ ID NO: 260957 - protein, 265 aa, Glycine max
  Clone ID: PAT_MRT3847_77667C.1.pep
MNVLALGRFLTSPLYKSSPLTPSPIQFTPIFLHPPKFQSLYSIHPFSLSMATCVDAPTPLSRKPNGSQSDDHSFNYMKFCRPTFSDRVPCIPICKNRDTAFTRVEEFDTCVEDNDDIEVEVVEGVDLWLKIQEEARLDVDQEPILSSYYFSSILSHKSLESALANHLSTNLSSLSLPSSTLFDLFMGVLVDDGDDDIVGAVKDDLIAVKERDPACISYVHCLLNFKGFLACQAHRIAHKLWLQGRKVLALLIQNRVSDVFAVDIT

SEQ ID NO: 260958 - protein, 132 aa, Glycine max
  Clone ID: PAT_MRT3847_77668C.1.pep
HASGGLRFKKKKKKKKKKKKKKKKKKKKKKKKKKKKKKKKKKKKKKKKKKKKKKKKGGAVFKGPIFPSGAWQKHPFFLGPPNFISWPGVYPHWTGKTPGFPHLNPFGDHPLFAGGHKNKGPPPGPLSKLSPS

SEQ ID NO: 260959 - protein, 96 aa, Glycine max
  Clone ID: PAT_MRT3847_77669C.1.pep
RLDKSCSLGIFALCLRLSGKIKWRPLSVHHKQHQSQSPIVCPFPVTRCIGLPAVAPMSAIMSITPVFHLATSLDFHRLKQCCHDKAPAKFNACVRV

SEQ ID NO: 260960 - protein, 72 aa, Glycine max
  Clone ID: PAT_MRT3847_7766C.1.pep
TDIDENGSRDQTTLSRNREMVRLSSVPWTDECIHLLLEKHGPVIVCIHGLVTLTDIITHTYAIREVMYLKLL

SEQ ID NO: 260961 - protein, 229 aa, Glycine max
  Clone ID: PAT_MRT3847_77670C.1.pep
MSMQKESPLIRLHSFDQGHAWLALLHLLIHISPAVTGQPVTPPVQPDSNKSVIAIMAIVVIMFLISAFLSLYSRKCSDRPVQTRGILDLAGPTGAAGNPLQAESNGLNQATIETFPTFLYADVKGLKIGKDTLACAVCLNEFEDNDTLRMIPKCCHVYHPDCIGAWLASHSTCPVCRANLVPQPEDMNTNTNTNMPSILSIQIPNEEEREHEHEHEYEAVIVGEHIRGC

SEQ ID NO: 260962 - protein, 53 aa, Glycine max
  unsure (1)..(53): unsure at all Xaa locations
  Clone ID: PAT_MRT3847_77671C.1.pep
ARTDTIDYKSLTNEQCHKPLTNEHFYITLQKGTXTAFTVEYWNTKTPVIYHCI

SEQ ID NO: 260963 - protein, 52 aa, Glycine max
  unsure (1)..(52): unsure at all Xaa locations
  Clone ID: PAT_MRT3847_77672C.1.pep
VSFRVTLRSYPGLGFKLFSIPEAAPFIAFLRFTTHXFNFSPHISAFITNYGV

SEQ ID NO: 260964 - protein, 71 aa, Glycine max
  Clone ID: PAT_MRT3847_77673C.1.pep
ARAKKDPGLVKQTLLGWAGTFHTQPLASLIGETVKFFFLAFKKNLKTLLKGIYRPGLQNIEKGGPRFQPGT

SEQ ID NO: 260965 - protein, 113 aa, Glycine max
  Clone ID: PAT_MRT3847_77674C.1.pep
PYVVANLSFEQVPQLPKSRFFTISREIFPLALRGKSFLTFLPGVNLNLPPGPPLKALVLDPKKGPYAGGFPKSARSPLRIAPTLAPQSFGWGKLLHIIPPKKATSVELDQFFC

SEQ ID NO: 260966 - protein, 396 aa, Glycine max
  unsure (1)..(396): unsure at all Xaa locations
  Clone ID: PAT_MRT3847_77675C.1.pep
MVTQQQPQPQLQVQPTPPSSQDEALKRNTDCVYFLASPLTCKKGNECEYRHSEYARVNPRDCRYWLSGNCLNPKCPFRHPPLDGLLGTQATAAGGPSVPPSQIPTASAAHAPYNSSKQAVPCFFFQKGLCLKGDRCAFLHGPPTPTSSTGNKVAAQVPVTIQGVENPCFKKPFVSNEKYTQERKTSQGNFAKSGGISEAKPSPKIETAPQRNMFELEKKVPPPSAEFNNEASRFKTISPPVTNGPIVARSNRLHQARVPDDHNFQSGKDSDEFLRESSPGFDVLVADELRNSDYYHGEDEFGKARGQDERNLDSLNEYDLGHSGDYSLAADIDRERFRGPQGYESYDHMQEPYAWEQHRKPSSHLGRRTRRRSDSPENAEVSDLRHHLSKRXKGYG

SEQ ID NO: 260967 - protein, 56 aa, Glycine max
  Clone ID: PAT_MRT3847_77676C.1.pep
RSVLVCYMHLQSYILTSNIQGSTNNHISLRYTICGRYLDRGSIHLHMMSSRIADLS

SEQ ID NO: 260968 - protein, 250 aa, Glycine max
  unsure (1)..(250): unsure at all Xaa locations
  Clone ID: PAT_MRT3847_77677C.1.pep
MSEQEKNQHHYRNSSQKRHTFPWIKTIIVAIIAGIIGALLVLGIGKLLNKNGFNNESATVHQVSNSHGGNQLDGKSNQYKSVHDMIKDVSPAIVGVINMQKSTNLDDLFNGKASKSKEAGIGSGVIYQISEGSAYIVTNNHVVDGASEIKVQLHNSKQVDAKLIGKDALTDIAVLKIKDTKGIKAIQFANSSKVQTGDSVFAMGNPLGLEFANSVTSGIISASERTIDANTSAGNTKXVMVYKTDAGINP

SEQ ID NO: 260969 - protein, 43 aa, Glycine max
  Clone ID: PAT_MRT3847_77678C.1.pep
KASPIKKLIRQVYHIVGFIGGQWKDFLGGPRGENRTLKIPNPL

SEQ ID NO: 260970 - protein, 58 aa, Glycine max
  Clone ID: PAT_MRT3847_77679C.1.pep
TPWEIKECESEYKMRFDMPGMNKEDVKVWVEEKMLVVKAEKAQKKKPENEIVELQQEK

SEQ ID NO: 260971 - protein, 131 aa, Glycine max
  unsure (1)..(131): unsure at all Xaa locations
  Clone ID: PAT_MRT3847_7767C.1.pep
MYDLPDGEVTXISYKRFLCSYALLLTSSLVMDADAIQYTTYNSFLKCDAQMRKDLYENVDLSDGTTMFPGIAVDMQKEIIAICPSTVKILILDPPERSTHDWILGSMLNSFYXLEQMWISTEDYDETGASI

SEQ ID NO: 260972 - protein, 59 aa, Glycine max
  unsure (1)..(59): unsure at all Xaa locations
  Clone ID: PAT_MRT3847_77680C.1.pep
SSQTDVLKVGMSCQGSAGPQNRVLEQMHGGETFDIDLKEQNVTMKXNVEPDEVLQAVSK

SEQ ID NO: 260973 - protein, 62 aa, Glycine max
  Clone ID: PAT_MRT3847_77681C.1.pep
KVSRHHITLALVNRPSVQHRTFQPPSNQHSIMPPFFSPTTKPRFGANPSGSTSQACLIPALC

SEQ ID NO: 260974 - protein, 87 aa, Glycine max
  Clone ID: PAT_MRT3847_77682C.1.pep
SRSRRRSSKAVAGGGFFGHFGARPPPKKFFPTNRGHARHDSSQPDWIPMGPGPLFLFPSGPGPLKRHLPFPPADLGGPPPSLPPWLK

SEQ ID NO: 260975 - protein, 50 aa, Glycine max
  unsure (1)..(50): unsure at all Xaa locations
  Clone ID: PAT_MRT3847_77683C.1.pep
GGDPPLGLSNSSRGGPTLGMLFPPWELSVESFRGCHIXKDPPPLDKRYSX

SEQ ID NO: 260976 - protein, 81 aa, Glycine max
  unsure (1)..(81): unsure at all Xaa locations
  Clone ID: PAT_MRT3847_77684C.1.pep
FVFFLILLFAYLILMPXWLATYYKPIKKPPLYKFXCYKPTVYKSPFYXSNSPFYNPXSFVYNLLYKMPLYNKPSYGKYPYI

SEQ ID NO: 260977 - protein, 232 aa, Glycine max
  Clone ID: PAT_MRT3847_77685C.1.pep
MVGDFQVTMEKQSSFRASTMEKQKSFRGFMEKQKSFRIVMEKQLSFMGSERKKNKESPGKRGDLPIHLAARAGNLSRVKEIIQNYSNNETKDLLAKQNLEGETPLYVASENGHALVVSEILNYLDLQTASIAARNGYDPFHIAAKQGHLDSFVLRELLHSFPNLAMTTDLSNSTALHTAATQGHIDVVNLLLESDSNLAKIARNNGKTVLHSAARMGHLEVVKALLKDRTLD

SEQ ID NO: 260978 - protein, 102 aa, Glycine max
  Clone ID: PAT_MRT3847_77686C.1.pep
FLLFFFFFFFGAIPFTPPFFASPKRKLWLKTTRKRWLPSLQHKNLLGKRGPILYLKADTCASCVKKLGRGTPSGNENLGTFLPLKGTFELFPEEPMTEQTSS

SEQ ID NO: 260979 - protein, 49 aa, Glycine max
  Clone ID: PAT_MRT3847_77687C.1.pep
VHFAQSYKFKFFFSCDPPLHNSRCYIKTTLLSLDRGKAGNPPPCFKILL

SEQ ID NO: 260980 - protein, 88 aa, Glycine max
  Clone ID: PAT_MRT3847_77688C.1.pep
LLHHPSTHNVGAQASPLRSLPPPISGDPRHQPPPEDPVPSLRAANVGCYTGGQRRRQEPDDIDDDDVSFVGQQREEREEFSGIIWLWH

SEQ ID NO: 260981 - protein, 64 aa, Glycine max
  Clone ID: PAT_MRT3847_77689C.1.pep
DRSFSICYNNYTFHWCCLEGFYMIIGCILWPDIQAFIDNTYCILSMDTGLLNIAHIWIYPHYVI

SEQ ID NO: 260982 - protein, 84 aa, Glycine max
  Clone ID: PAT_MRT3847_7768C.1.pep
GRFSWDPESKTPTIDEIEFNVKRGMKVAVCGSVGSGKSSLLSGILGEIYKQSGTVKTSGTKAYVPQAAWILTGNIRDNITFGKE

SEQ ID NO: 260983 - protein, 110 aa, Glycine max
  Clone ID: PAT_MRT3847_77690C.1.pep
LEAEQDAKFILTGHSLGGALAILFAAVLTMHDEEWLLEKLEGVYTFGQPRVGDNKFGEFMKDKLRKYDVRYMTYVYCNDVVPRVPYDDQTLFFKHFGSCLYFNSLYHGQV

SEQ ID NO: 260984 - protein, 224 aa, Glycine max
  Clone ID: PAT_MRT3847_77691C.1.pep
MGILYGMVARGQVVLAEFSATQSNASVVAKQILSKINQGSDNNNDSNVSFSHDRYVFHVKRTDGLTVLCMADDAFGRIAPFAFLEDIHKKFVKTYARAILSAPAYAMNDEFSRVLNQQMEYYSNDPNADRLNRLKGEMTQVRTVMIDNIDKVLERGGRLELLVEKTSAMNSNSIRFKRQSRRYKNNLWWSNVRLTVALVIIFVIVVYIILAFICHGPLLSSCWR

SEQ ID NO: 260985 - protein, 409 aa, Glycine max
  Clone ID: PAT_MRT3847_77692C.1.pep
MMTMKRLVRVNRDAIAACMTCPLCKKFLKEATAISLCLHTFCRKCIYDKITDEELENCPVCNIDLGIVPLEKMRPDNILQDLRNKIFPFKKRKEKAPVSVSSVLLPARRKERSLSSLVVSTPRVCTQSTMTGRRTKPARKASGLQGSSLSIEKFIKKEEELLSFIQNLLMKKLGLNSEDEVEIKCMGHPVLPSLQVQNLVDSWLDMAASGHRIPATMGSSGKDFVMILTYVLKAKIKEKKRKAKVEEEKISTDHASSDTSKPNKLRRVRQKKEPVFGESRISPQAVLDATDRNLLWNDSIWFSLAASENQEGDAPLPQIPSNYVRIKNGSIPVSFIQKLLMKKLGLKSEDEVEIKCMGHPVLPSLQVQNLVDLWGVDTASLGHRISATIGSSGKDFVMILTYGRKVLHP

SEQ ID NO: 260986 - protein, 46 aa, Glycine max
  Clone ID: PAT_MRT3847_77693C.1.pep
FQVPCTVRAAPALIFRCPRLGRYLGNKKLSHSLLYNTLSYVKLVWI

SEQ ID NO: 260987 - protein, 102 aa, Glycine max
  Clone ID: PAT_MRT3847_77694C.1.pep
EQWLGRKADKYWDDNFDSLTLDKQNCVFKPDHEWVQCDKCRKWRILPSDFDSRKLPVQWFCYMDPFKGQCADAEQKMEPGIVNVSTKRSGYDCLLKDSDNEK

SEQ ID NO: 260988 - protein, 94 aa, Glycine max
  Clone ID: PAT_MRT3847_77695C.1.pep
KHTNSKLGTTIFIITCRSSSLLPRRSIKHLNLCNGRNGRFAHHYNHALRRPYQVLRHNFSAVTPDRRYVFSLCGRALDPKNGVGYRGRSMETKD

SEQ ID NO: 260989 - protein, 99 aa, Glycine max
  unsure (1)..(99): unsure at all Xaa locations
  Clone ID: PAT_MRT3847_77696C.1.pep
MWSMEYGCWCEQLGGPSIEMKTGRKDSKESYAMEVEDLIPNHNDSMSSVLSRXQAIGIDVEATVALLGAHSVGRSHXQNLVHRLYPTIDSTLDPAHAEY

SEQ ID NO: 260990 - protein, 329 aa, Glycine max
  Clone ID: PAT_MRT3847_77697C.1.pep
MATTTTQPPSNICFFLLLLLLAHFHLGISQLELNYYSKSCPKAEEIIKEQVTQLYNKHGNTAVSWVRNLFHDCVVKSCDASLLLATVSDVVSEQTSDRSFGMRNFKYVNTIKAAVEKECPFTVSCADIVALSARDAIALLGGPSIEMKTGRKDSKESYAMEVEDLIPNHNDSMSSVLSRFQAIGIDVEATVALLGAHSVGRVHCKNLVHRLYPTIDSTLDPAHAEYLRRRCPTPNPDPKAVLYSRNDLKTPMIIDNNYYKNILQHKGLLTVDEELATDPRTASYVQKMANDNEYFNQQFSRAIILLSETNPLTGDEGEIRKDCRYLNAN

SEQ ID NO: 260991 - protein, 49 aa, Glycine max
  Clone ID: PAT_MRT3847_77698C.1.pep
SPTDHIKGKHAYYCPKMSTLLCATKHNTNTLSQPPPNKIERRDDDYLTT

SEQ ID NO: 260992 - protein, 89 aa, Glycine max
  unsure (1)..(89): unsure at all Xaa locations
  Clone ID: PAT_MRT3847_77699C.1.pep
DEGEEKGSSLVLKEEKKEELDEETELXDVGDEEEDKGSETDYILIEERIEEEEESCMLSTEELNKKFEDFIRKMKEDLRIEAQRQLVMV

SEQ ID NO: 260993 - protein, 111 aa, Glycine max
  Clone ID: PAT_MRT3847_7769C.1.pep
LCERLSEAQSIVQAKLQAQADHHAQQTPAMASTAVSMAFSMNYDMNNYKALFKALFIPLPIRTLLTTLVTTNAKANFNAYMNAYANAKVTAGLTTASMTASEVAHAAGYAV

SEQ ID NO: 260994 - protein, 45 aa, Glycine max
  Clone ID: PAT_MRT3847_776C.1.pep
IFFFQILQQQALRFRDGDPPPNRSHSSRIKTKYNEKRHTYIELAY

SEQ ID NO: 260995 - protein, 167 aa, Glycine max
  unsure (1)..(167): unsure at all Xaa locations
  Clone ID: PAT_MRT3847_77700C.1.pep
QSRKSCGESQGQLGIGSVVTGSVQXAXNXYGAFIDIGGISGLLHVSQISHDRITDIXTVLQPGDILKVMILSHDRERGRVSLSTKKLEPTPGDMIRNPKLVFEKAEEMAQTFRQRIAQAEAMARADMLRFQPESGLTLSGEGILGPLTSDLPPEGVDLSEVPPAEDS

SEQ ID NO: 260996 - protein, 109 aa, Glycine max
  unsure (1)..(109): unsure at all Xaa locations
  Clone ID: PAT_MRT3847_77701C.1.pep
IRIWETDLGWISQCCLTKHAFKINRQCLANGALKINVKMGGRNTVLLDALRRRIPLASDIPTIIFGADATHPKSGEDSCTSIGADVAFQDWSEVTXYAGLVCAQPHREE

SEQ ID NO: 260997 - protein, 57 aa, Glycine max
  Clone ID: PAT_MRT3847_77702C.1.pep
CGLIRFIGQSLVFDFVVQASVLKCLPDRRRKVSTCSLIHSLSIQSPVWYFLVPSDCL

SEQ ID NO: 260998 - protein, 31 aa, Glycine max
  Clone ID: PAT_MRT3847_77703C.1.pep
PFQQLQRYYRHITTPRPQHPASQRHPLLQND

SEQ ID NO: 260999 - protein, 54 aa, Glycine max
  Clone ID: PAT_MRT3847_77704C.1.pep
IILLSYIYYIEVNETITRMAGVFFLSTSCKDDGLVSFSFNRSPTVFIPCLSSRR

SEQ ID NO: 261000 - protein, 82 aa, Glycine max
  unsure (1)..(82): unsure at all Xaa locations
  Clone ID: PAT_MRT3847_77705C.1.pep
REKQNHXXXAIEAVXSRXFGDRXGRGXMXPIXXXXAQLELHRFWCERXDNGXNGFVTLHFVTHSLICXLSFYLFXVXLXLVX

SEQ ID NO: 261001 - protein, 134 aa, Glycine max
  unsure (1)..(134): unsure at all Xaa locations
  Clone ID: PAT_MRT3847_77706C.1.pep
IGLRDFSLLWNGVLXEDMXDVKELGRELFYLPEVLTNENSIDFGTTQMGGKLDTVKLPAWAENPIDFIHKHRKALESEYVSAHLHEWIDLIFGYKQRGKEAVTANNVFFYTTYEGTVDLDKISDPVQQRAIQDQ

SEQ ID NO: 261002 - protein, 198 aa, Glycine max
  unsure (1)..(198): unsure at all Xaa locations
  Clone ID: PAT_MRT3847_77707C.1.pep
PRVRDKAQSTRPKGHCVAVRVTSEDPDDGFKPTSGKVQELNFKSKPNVWAYFSVKSGGGIHEFSESQFGHVFAFGESRALAIANMVLGLKEIQIRGEIRTNVDYTIDLLNASDYRENKIHTGWLDSRIAMRVRAERPAWYLSVVGGALYKASASSAAXVSDYVGYLEKGQIPPKHISLVHSQVSLNIEGXSKYTIDMI

SEQ ID NO: 261003 - protein, 87 aa, Glycine max
  Clone ID: PAT_MRT3847_77708C.1.pep
IPLCHNISLSHVQVDLRLNHEDFSVTIEGEAASTGKTGVEMEAMTAVSIAGLTVYDMCKAASKDIAITDVRLMHKSGGKSGEYWWTQ

SEQ ID NO: 261004 - protein, 126 aa, Glycine max
  unsure (1)..(126): unsure at all Xaa locations
  Clone ID: PAT_MRT3847_77709C.1.pep
STFPNLIYLLCHDXPKLKDRXLYLGMIGIGXXIMIFIYTTTLXWSARRFDEKWGLKKWEITSISVLPFATVFGIISFCLFSFALWPIWSFLTLPLLFTLFMACMVVIPCLIFGTLRPQYYDELRTD

SEQ ID NO: 261005 - protein, 120 aa, Glycine max
  unsure (1)..(120): unsure at all Xaa locations
  Clone ID: PAT_MRT3847_7770C.1.pep
WCGLALCLFWRCWGVLALGLDPVSGLRCPFRASFGVCGVGQGSRFLVLPWCSPGSCLVPSLCLFWGLSPCVSPFCACVVVCLCSCRCLAGFFFARAPFPCXVLAFLKRGVGARALGLRAC

SEQ ID NO: 261006 - protein, 209 aa, Glycine max
  unsure (1)..(209): unsure at all Xaa locations
  Clone ID: PAT_MRT3847_77710C.1.pep
IFLGFIASSQGVQVDPSKVKAIQDWPTPKNISEVRSFHGLASFYRRFVRIFCTLATPLNEIVKKNVVFEWGDQQEKAFIALKEKLTNAHVLALPNFAKFFELECDASGVGIGVMLMQKRHPIAYFSEKLNGTALSYSTYDKELYALIRALHTGQHYLLPKEFVIHRDHEXLKYLNGQGKLNKRHAKWVEFLEQFPYVIRHKKGKNNMGL

SEQ ID NO: 261007 - protein, 149 aa, Glycine max
  unsure (1)..(149): unsure at all Xaa locations
  Clone ID: PAT_MRT3847_77711C.1.pep
MTSQLRNGSGSSSSSLNSIFLETEDDQTIASILAEDENLRAENKLGKRLSHLDSIPHTPRVNGQIPDVNDATADHERLSERLVTYGLAELQMEGDGNCQFRALADQLFGNPDYHXHVRRQGYKQLKHYKKLYEGYVPMXYKSYLKKMKN

SEQ ID NO: 261008 - protein, 73 aa, Glycine max
  Clone ID: PAT_MRT3847_77712C.1.pep
VVHSLRGQCRSGAPSPRMHSEQVFLALIPTKVKMERHVYLRAPKAAHKESGYIVNVELHIMFGTLEPCWICGF

SEQ ID NO: 261009 - protein, 178 aa, Glycine max
  unsure (1)..(178): unsure at all Xaa locations
  Clone ID: PAT_MRT3847_77713C.1.pep
FGTRIATTDLAQHTLEQIEPIRNLFAALFLACIRLLIHVHFLWXHVDILVASVILVIVIKTIIIASVVKGFGYNNKTSILVGMSMAQIGEFAFVLLSRASNLHLVEGKLYLLLLGTTALSLVTTPLLFKLIPAVVHLGVLLRWFSTDSSMEIGYKLDNLRSDSGKQRIILMDQESHDS

SEQ ID NO: 261010 - protein, 30 aa, Glycine max
  Clone ID: PAT_MRT3847_77714C.1.pep
MMSDLDLQIEHLQGVSLCATVCLRMDIHES

SEQ ID NO: 261011 - protein, 48 aa, Glycine max
  Clone ID: PAT_MRT3847_77715C.1.pep
FFSRAHRIIGHPICPQFSLDQTPTDTDDVTGCCCWGYHMTFLHACFFS

SEQ ID NO: 261012 - protein, 62 aa, Glycine max
  unsure (1)..(62): unsure at all Xaa locations
  Clone ID: PAT_MRT3847_77716C.1.pep
CKCRRYSCRSKVCHARWSLXRVDNDEWDERGMSRPRPRPQQTGSDPMCPGEKDEDDDEGRRP

SEQ ID NO: 261013 - protein, 90 aa, Glycine max
  Clone ID: PAT_MRT3847_77717C.1.pep
IISSTSVVQDAEAVHSLSALPLLARLDMCTHDVYHKEFSTNAGSGIPTRLVSAHSIESACSSEHDGVATVRSLLWIRRQVLRPRLIRIGR

SEQ ID NO: 261014 - protein, 47 aa, Glycine max
  Clone ID: PAT_MRT3847_77718C.1.pep
YYCQIKILHLKINSTPHYKLHYLKANVYIYLLYRLTAVKMKKPISFL

SEQ ID NO: 261015 - protein, 95 aa, Glycine max
  Clone ID: PAT_MRT3847_77719C.1.pep
LEQLNSLQDKNGEDVSNINVQAEKSLVKDYLVDHNARSQKRIIPVPSPASIEDMRATIIENSLKLIQTESKITRLAASPNRTPFADVNSVNDDCS

SEQ ID NO: 261016 - protein, 82 aa, Glycine max
  unsure (1)..(82): unsure at all Xaa locations
  Clone ID: PAT_MRT3847_7771C.1.pep
TYASXNFRESQRLGRGGDVEEXQQEVLLLLAKRRLGETLRWGLNRFTIHFVWAEPIRSSSLLIAIKGGGCXIXSSPCFGFIC

SEQ ID NO: 261017 - protein, 113 aa, Glycine max
  unsure (1)..(113): unsure at all Xaa locations
  Clone ID: PAT_MRT3847_77720C.1.pep
FWVFLDLPFGVVFYVKFEPAPIISYLRVFPLGELVCSRGDFFQFRGDILFDRKVFPPRIFFGRELINVIELRKRSLEYPPQFGGSVFLLXFLGVYSPMYLLKRQVLKVIALQD

SEQ ID NO: 261018 - protein, 70 aa, Glycine max
  Clone ID: PAT_MRT3847_77721C.1.pep
SNLYITPGALMLDHENKKAVDSMTTRWLEQLNSLQDKNGEDVSNINVQAEKSLVKDYLVKFSLWSFFMIP

SEQ ID NO: 261019 - protein, 48 aa, Glycine max
  Clone ID: PAT_MRT3847_77722C.1.pep
HVDNKPSRIHISMCYNRTCVHTIRRTYDDKLVTCSGPNNTLFDSLATH

SEQ ID NO: 261020 - protein, 177 aa, Glycine max
  unsure (1)..(177): unsure at all Xaa locations
  Clone ID: PAT_MRT3847_77723C.1.pep
PEEISREECAAFYNSLTNDWXEHLSVYHFSVKGQMECKAILFDPKRAPCDLFDTRKMPIDIKLCVRRVFIMDICEESIPECLGFVKGMVDSEDLPLDIARYMLQQNKILNVIRTNLVENGLALFLEIAXNTEDYNAFYDAXSKNLELGIHDDSQNRAKIDELLTHHSTKSGYELSNL

SEQ ID NO: 261021 - protein, 48 aa, Glycine max
  Clone ID: PAT_MRT3847_77724C.1.pep
LLLFGNPTSSDVQFMLSDTRNMFFDSLSSTSFTLSSNRSDAQSAPPEL

SEQ ID NO: 261022 - protein, 47 aa, Glycine max
  Clone ID: PAT_MRT3847_77725C.1.pep
FYWDKFECMCEKESSMREIFLSPHTLFRISQRWGCAKMSFEPDVQIS

SEQ ID NO: 261023 - protein, 87 aa, Glycine max
  Clone ID: PAT_MRT3847_77726C.1.pep
CMLAAAEACTSYSASVMTTETVRASSFTTEGSYSISRVDGFLLVRHEPLILRGPPHPARTHGPWLPLSAISCLSLSFSFSTVIGIMI

SEQ ID NO: 261024 - protein, 69 aa, Glycine max
  Clone ID: PAT_MRT3847_77727C.1.pep
WGFFFFFKKKKTTFLFFGKNKISIANFPFFFSPRGFKRLFLPPGFKKPGLHASLTFPNFYSYPPSLKKW

SEQ ID NO: 261025 - protein, 49 aa, Glycine max
  Clone ID: PAT_MRT3847_77728C.1.pep
SSVFWLSLESPLTQLMSKNSKSWNSRSHAKLTLRIELTDYTTLLTYTIH

SEQ ID NO: 261026 - protein, 66 aa, Glycine max
  Clone ID: PAT_MRT3847_77729C.1.pep
HQHGMCRVYSNVAEISRRTQRLNCLRDIDSLNPLDTNQRTFNINIIRTLNSDIFEPWVNSNITQKP

SEQ ID NO: 261027 - protein, 105 aa, Glycine max
  unsure (1)..(105): unsure at all Xaa locations
  Clone ID: PAT_MRT3847_7772C.1.pep
CGYGLGAMAGSVMLFNVMFNAALETLDPFVEPHATTAAEESPNEATRAVVESPLIXRLGRGASAGESSHGKKHGMILGLEPHSMTYDETVDSVDISQDMKQQGVQ

SEQ ID NO: 261028 - protein, 71 aa, Glycine max
  unsure (1)..(71): unsure at all Xaa locations
  Clone ID: PAT_MRT3847_77730C.1.pep
CLLRSLNVKVLSFKAMEIXLVEKSNVKRANAPVNICGDIYGQFYDKKELFKVXGIVPKQTYLFLGDYGDKG

SEQ ID NO: 261029 - protein, 86 aa, Glycine max
  unsure (1)..(86): unsure at all Xaa locations
  Clone ID: PAT_MRT3847_77731C.1.pep
VVTQLYHIGGRTMENEHTLAVADREMWLNSDQYXFLEINDASMFYSNFPPLPDFPCMALYIFYSLALPFPVNTITFFIKTTSTSTT

SEQ ID NO: 261030 - protein, 355 aa, Glycine max
  Clone ID: PAT_MRT3847_77732C.1.pep
ARVRKLGIRLEFHSLFPFFGRPEDANIPLKGPQDDLQNVPQQAADQKPQKLSPDFYIKTCPNAQKIVADALADIVKKNPGALGNLLRLQFHDCFVNGCDASILLDYSPSGDTVEKSSMVNGLLLKGADMIDDIKLKLEEQCPQTVSCADTLAFTANEVMTMAGLPPRKPLGGRRDALVSLSSAADADNLPLPDWTMDQMVKLFTKKGFNIEEMVILLGAHSIGMAHCDLFIQRAYNFQNTGKPDPTLTVEAVEEFKKACPNVNTPKYRNPPVNFDATPTVLDNLFYMEMVERNRTFLITDSHLLTDQRTLPLVQQFAHDPSLFPRRFPEVMLKLGSLNVLTGNEGEIRKICRSPN

SEQ ID NO: 261031 - protein, 171 aa, Glycine max
  Clone ID: PAT_MRT3847_77733C.1.pep
GAKDTITTVDHITTPLDVKTNLKSEDMTQDNGQKGYGGAKGTIGSVDHITTPLAVKANLKSEDGSRDNDQKGYGGAKDTIGSVDHITTPLVVKANLKSEDVTQDNGHKGYGGAKDTIGYVDHITTPLAVKANLKSEDVTQDNGPKGYGGAKDTIGSVDHITTPLAVKANLK

SEQ ID NO: 261032 - protein, 63 aa, Glycine max
  unsure (1)..(63): unsure at all Xaa locations
  Clone ID: PAT_MRT3847_77734C.1.pep
FQENSGGLYNITEFQLSVSSSCSGHXXMTXXDTCSTIASPASLSYPIIXHSIVVXITTNDLCI

SEQ ID NO: 261033 - protein, 50 aa, Glycine max
  Clone ID: PAT_MRT3847_77735C.1.pep
NSVYIANFLGILTKSHLATIPCAFTFSTYNPIQPDIKLQTDASISYLWSV

SEQ ID NO: 261034 - protein, 54 aa, Glycine max
  Clone ID: PAT_MRT3847_77736C.1.pep
GRIPVIGMIPMMTFEGSPKGTRGFASATAPVFKGGNLTFLYSVPERGEKKKIFF

SEQ ID NO: 261035 - protein, 216 aa, Glycine max
  unsure (1)..(216): unsure at all Xaa locations
  Clone ID: PAT_MRT3847_77737C.1.pep
TDLTKHFMCTSNLDCAYSQLSTYPNGRCACGFAMTTLVFVDDKVYKGFVNGGATFIVTDDLVVLPNTMYTGLSFFQSCGVKCLSSVQTITLTVTKKKVLDLLKCSLLSKSTLTDLFLVKKPFLENSSFSPAVVENSSTIQIKIKLVMRKSXKILFAEGEEDFADFLLSFLTLPLGGVVRMLGGYSSMGSVDGLYKSIADLNENKYLISEKVKNRLC

SEQ ID NO: 261036 - protein, 159 aa, Glycine max
  Clone ID: PAT_MRT3847_77738C.1.pep
MLQNSSMSSLLLHRINGGGGATTATNCHDTVFMLEPNRLELSVTEMVARHHAHAVGPNQCCSFVIQAIDAPVSAVWPVVRRFDNPQAYKHFVKSDHRLRNYRSVTTLHGDGSNGGTVVIESYVVDIPAGNTKEETCVFVDTIVRCNLQSLAQMAENMGS

SEQ ID NO: 261037 - protein, 214 aa, Glycine max
  Clone ID: PAT_MRT3847_77739C.1.pep
MTCPLQLHRFSPATDTSTAIANGVNCPKPAQTAPSTRRLLAKVGLSVTEMVARHHAHAVGPNQCCSFVIQAIDAPVSAVWPVVRRFDNPQAYKHFVKSCHVVAAGLAGGDGGIHVGALREVRVVSGLPAVSSTERLEILDDERHVMSFSVVGGDHRLRNYRSVTTLHGDGNGGTVVIESYVVDVPPGNTKEETCVFVDTIVRCNLQSLAQIAET

SEQ ID NO: 261038 - protein, 52 aa, Glycine max
  unsure (1)..(52): unsure at all Xaa locations
  Clone ID: PAT_MRT3847_7773C.1.pep
MLVNLTLIDXLPGLTKVSVKGHPDSIVKDIDDLDRSYIEKPNWGNLAISPPN

SEQ ID NO: 261039 - protein, 196 aa, Glycine max
  Clone ID: PAT_MRT3847_77740C.1.pep
MTCPLQLHRFSPATDTSTAIANGVNCPKPAQTAPSTRRLLAKVGLSVTEMVARHHAHAVGPNQCCSFVIQAIDAPVSAVWPVVRRFDNPQAYKHFVKSCHVVSGLPAVSSTERLEILDDERHVMSFSVVGGDHRLRNYRSVTTLHGDGSNGGTVVIESYVVDIPAGNTKEETCVFVDTIVRCNLQSLAQMAENMGS

SEQ ID NO: 261040 - protein, 61 aa, Glycine max
  unsure (1)..(61): unsure at all Xaa locations
  Clone ID: PAT_MRT3847_77741C.1.pep
RTIVPFLFRSPPPLLXIFLTGTFSCVNHGVFIRRIPLLLSRSFLCLLKPIIIIIRLSLGSS

SEQ ID NO: 261041 - protein, 102 aa, Glycine max
  Clone ID: PAT_MRT3847_77742C.1.pep
MKKISKSSCKLASHRLFKDKARNHVDDLQVMFLDLQFARKESRTIDAALLEEQVHQMLREWKAELNEPSPASSLQQGGSLGSFSTDVYRLLQLCEEEDDATS

SEQ ID NO: 261042 - protein, 165 aa, Glycine max
  Clone ID: PAT_MRT3847_77743C.1.pep
MDVLRSFQLPGGTAIALFFAAVAVYTISRIFYNIFLHPIRAVPGPWWWRASSLPIDYHNFRGTAMHRILELHRIYGKEVRIAPDHVSFASGQVWKEIYSARPEFPKDPKQIELGLEPVKSIFLADQENHARFRRLLAYAFSAKGIKEQEPRFTGYINLLIQRLHE

SEQ ID NO: 261043 - protein, 306 aa, Glycine max
  Clone ID: PAT_MRT3847_77744C.1.pep
MDNNTISDLIQFNDLIPKLPSELGLECLTRLPHSAHRVALRVCSQWHCLLQSDAFYSHRKKTSHTRKVTCLVQAREDQPLQEKNNASVASVYGISVFGPESMTWDRVDPVPDYPSGLPLFCQLASCDGKLVLMGGWDPASYEPLTAVFVYDFRTSEWRRGKDMPEKRSFFAIGAGVGRVYVAGGHDENKNALSTAWAYDPRSDEWAGLDPMGRERDECQGVVIGGGCWVVSGYSTERQGMFDGSAEVLDIGSGGWREENGFWEEGQCPRSCVGVGKDGRLVNWRGWDPGLRVGVCVVAVGSRVVLS

SEQ ID NO: 261044 - protein, 77 aa, Glycine max
  Clone ID: PAT_MRT3847_77745C.1.pep
RSVGTEHVGYDPFLGGMPKHATPMRPLDEEILSKVAQDMVEAWFDCAGAAEFLEHLGPHILGVELPTVDQLYSTKGN

SEQ ID NO: 261045 - protein, 357 aa, Glycine max
  unsure (1)..(357): unsure at all Xaa locations
  Clone ID: PAT_MRT3847_77746C.1.pep
AVAHIRRLLDIVACTTSFASASAAAAAKPPAGKSKDPNEPGSENGPETNPKPKPVDPNSDLVNAKSDKADADISMCPPPRLGQFYDFFSFWHLTPPFQYIRRSNRPFLEDKTEDDFFQIDVRVCSGKPTTIVASRIGFYPAGKRPLVTHTLVGLLQQISRVFDAAYKALMKTFTEHNKFGNLPYGFRANTWVVPPVVSDNPSVFPPLPMEDETWGGXXGGQGRDGKHENRQWARDFAILAAMPCQTAEERQIRDRKAFLLHSLFVDVSVFKAVSAIKHLPRVRQNSFSNSALPTSYEERIGDLTIKVTRDVSDASLKLDCKNDGNRVLGLSDEELAQRNLLKXITADESATVHDTPT

SEQ ID NO: 261046 - protein, 135 aa, Glycine max
  unsure (1)..(135): unsure at all Xaa locations
  Clone ID: PAT_MRT3847_77747C.1.pep
MSDHLVVFVDRLARPVPVDPVAQPPSEPSPPPAPVNADASGSSGTAPVEDCDGEGGGEEEPLIQMAECRICQEEDGVSNLETPCACSGSLKYAHRKCVQHWCDEKGDITCEICHQPYQPXYTAPPPRPNPEETTI

SEQ ID NO: 261047 - protein, 229 aa, Glycine max
  Clone ID: PAT_MRT3847_77748C.1.pep
MSDHLVVFVDRLARPVPVDPVAQTAQVPSEPSPPPAAVDADAAGSSGTSPSEDCDGEGGDEEEPLIQMAECRICQEEDGVSNLETPCACSGSLKYAHRKCVQHWCDEKGDITCEICHQPYQPGYTAPPPRPNPEETTIDIGGGWTISGTPLDLRDPRLLAIAEAERQFLDAEYDEYAASNASGAAFCRSAALILMALLLLRHALSVSNGDNSDDDPSSFFSLFLLRAAG

SEQ ID NO: 261048 - protein, 60 aa, Glycine max
  unsure (1)..(60): unsure at all Xaa locations
  Clone ID: PAT_MRT3847_77749C.1.pep
TPSXHXXHTFXSTSTHLRGHRGSHLPFKSYLLFLCTHQGHAKHVMDKCHKRHCIIQTQGV

SEQ ID NO: 261049 - protein, 99 aa, Glycine max
  Clone ID: PAT_MRT3847_7774C.1.pep
FASACKLSGICSSFFIFCYTHSFFFCSPESLSLSFSHLRPYNYSTMHLRPLPSVVVSSSSSSIESHWIPLTKPATAICATSSATDNYPKGTVSNRIANL

SEQ ID NO: 261050 - protein, 103 aa, Glycine max
  unsure (1)..(103): unsure at all Xaa locations
  Clone ID: PAT_MRT3847_77750C.1.pep
XTGYGLLFLVFFLAXEISFNSLKLIFLSALFVSWVLTTFXKCSASASSLTSPQAFKCEKFPKHLXPPQKKNCLYFNYISICFCFFXFLSSCIFGLQYSDFNEN

SEQ ID NO: 261051 - protein, 127 aa, Glycine max
  Clone ID: PAT_MRT3847_77751C.1.pep
VFLVPDRTHLLLARSSRIPIGKRDVGRVECGIPSGCPLTVICNSFFNEMLIRYSHEKFLCQAKAPSVLLQSFKNYGSFRVYGDHHLVRGHEYVKPYFRGSKYNSILARHDITITDGVDKTSAPMQLR

SEQ ID NO: 261052 - protein, 296 aa, Glycine max
  Clone ID: PAT_MRT3847_77752C.1.pep
FDGAKGANAKNMTYYFSNWFSMVKELQSSINIFSDAGPDVRWVGDETGSAGYTCWSTINRTSLSIGSPDIIQYINTGDPKGTDWLPAECDVSIRNGWFWHKSESPKKLSELLDIYYNSVGRNCVLLLNVPPNTSGLITEVDANRLKEFRSAIKTIFHQNLAEDCFVKVSSQRGGFGPEKMLDSDHLWSYWAPRDDDDEKDHWVEIWAKEGRLRFNVVRIQEAIGLGQRIKRHEIYVDGKLIIKATTVGYKRLHRLDGGEVHARGVRIRIRKARGVPLISSIGLHYDPFWHSKFTVS

SEQ ID NO: 261053 - protein, 140 aa, Glycine max
  Clone ID: PAT_MRT3847_77753C.1.pep
LEMSISRTMLMYYSQGKLLLLFSVQLKNLISTSLLSYFADELFMNDDASSQSSMNSFKCFNFNCCDPGNEDEHDPTLVLGAEHLYYTPKGNEKCIRFCPREEVMDADFTKQLCNMRMDSHRPFCRLLAAVLEPLEPIRLE

SEQ ID NO: 261054 - protein, 235 aa, Glycine max
  Clone ID: PAT_MRT3847_77754C.1.pep
QVKKEKRALEPLEIAKMIEEEISALVPKWRDWGSAEYQKQHSFSYEEEYDMSNHHPFFSTSSRSSSHASLPVFGSSYKNNSHYRGNHYPFAQARAQDELFMNDDASSQSSMNSFKCFNFNCCDPGNEDEHDPTLVLGAEHLYYTPKGNEKCIRFCPREEVMDADFTKQLCNMRMDSHRCHGMHRLTRIRSFVDLRRQQLQRSLMEEIHKRRMFKTVGAVENIGFQNPEGGGCFSY

SEQ ID NO: 261055 - protein, 141 aa, Glycine max
  Clone ID: PAT_MRT3847_77755C.1.pep
PKALLINTNMASQFARDVKCKRLMHCAASYGERGSHCSLSRRQNYGYHPIQPEEENFNEHHNHNNNNLGCENGAKRGTNRGRQQAQKLHRLGFSYLASSFLYLVIKVKAFYNGFLGDVTGEAKMGIEAPTEAYFSVPVLPN

SEQ ID NO: 261056 - protein, 90 aa, Glycine max
  Clone ID: PAT_MRT3847_77756C.1.pep
MASSSLRCIAFAHVEVAEEELVDEEGNAMAKVKENGLTLLGLVGIKDPCRQGVKNAVEACQNAGVNIKMITGDNVFTAKAIATECGILRP

SEQ ID NO: 261057 - protein, 133 aa, Glycine max
  unsure (1)..(133): unsure at all Xaa locations
  Clone ID: PAT_MRT3847_77757C.1.pep
PPGGEIFPPKRKPFISGFKQAFEPFCIPLGGRFVFYXLQKNFQLFFEPVGGFKKPLPGFGDPLFFSGGVGAPPLGSQGGIKKGDRXGQKGLGGAFKAPGLGGRAPKAFNXPVYGPWADCLFCFPGDFPGIVKL

SEQ ID NO: 261058 - protein, 292 aa, Glycine max
  unsure (1)..(292): unsure at all Xaa locations
  Clone ID: PAT_MRT3847_77758C.1.pep
NSFTRNPNFLNPGFGSLQFPETLISSILVLEFDNGAEEEQSKMYNLFVKHLDGKTLTLLFPSPILYASSIKDRLFQLTGIPAHHQRLVTGCRHLNDDKSAIQCLPEDGNMFPSVRLLLRLKGGKGGFGSLLRGAATKAGQKKTNNFDACRDMSGRRLRHVNAEKRLEEWKAGEQERKLEKVAEEFLKKQMKKGKGKGEGDGGAQKYVAKYREESERCVAEVALSVKEALTAKRKSPSQPHHDAKKLKIWMGKRKLNESDSDDSDEEGEIEKSDLXNGPNESGSNKLRAVWGR

SEQ ID NO: 261059 - protein, 36 aa, Glycine max
  Clone ID: PAT_MRT3847_77759C.1.pep
RCFQSRTILITIVYPAQDSVGHSLHLVPRVPRAPHR

SEQ ID NO: 261060 - protein, 103 aa, Glycine max
  unsure (1)..(103): unsure at all Xaa locations
  Clone ID: PAT_MRT3847_7775C.1.pep
HLCXRAXATCLPXXXRIPIXERXKTLVKXXRCKXXXKKRRXCGAHLSMDSXRXLLSXLSFVXTXPXSSLHXRKHRCHXILICITYANPCFFLHXTTIXSTIRQ

SEQ ID NO: 261061 - protein, 67 aa, Glycine max
  Clone ID: PAT_MRT3847_77760C.1.pep
YGCEKTTEGGTKIQYETKLSKERVCEKLNQKSEQQWRHLRFSASSPRCQMILATPKRPSQVGELTRS

SEQ ID NO: 261062 - protein, 132 aa, Glycine max
  unsure (1)..(132): unsure at all Xaa locations
  Clone ID: PAT_MRT3847_77761C.1.pep
KSKPGPNKKGDGAPSDKGGAPRQAGGNPHRKGEIQKAQTRGKKKTPWGRNTPPGKPKLGGGTKLGGKTPQGPPRPGXKGEKKPGVDKKRLALIDQGNGTGPQKTGGSKQTRGFNPLVGKSKIKNPPTPGNPP

SEQ ID NO: 261063 - protein, 252 aa, Glycine max
  Clone ID: PAT_MRT3847_77762C.1.pep
GQGNGLGLKYSFLNTEAPKSMILDVHHQPTQNISSTRTSVISASWKNSEEEEYTWDEMNSGLTVHGASTVSNLSKNSWTADDENLEAEDCLEIRNPFRANVDREMSIDSQATEKKQLPSSHHHPSLSWQLQEQQSIDELNRKAGHSDRFVSTHGAIPANANSSAARMVNQPFLSNATIGLPGIAGQFHSLGAENPSGQSPLQQRSPSPPVSVHPSHPLQNLAEQDLPQNHKASQFLGGLQVDSRGSPGTELE

SEQ ID NO: 261064 - protein, 82 aa, Glycine max
  unsure (1)..(82): unsure at all Xaa locations
  Clone ID: PAT_MRT3847_77763C.1.pep
PEPLTCGPSWLACSXSALRVCILLNSIHAKHGRLLQAHKPPPLYGRRPPGLLSFHHVMNSLLRGTLHYLDWETVYICDPCLD

SEQ ID NO: 261065 - protein, 71 aa, Glycine max
  Clone ID: PAT_MRT3847_77764C.1.pep
WCNAVEIFPLNPSLIIFIFILPFFFKLIIGSFTYYVTACFLWYSGAINIFLHLFFIWWVTRWFLSGRLPLN

SEQ ID NO: 261066 - protein, 183 aa, Glycine max
  Clone ID: PAT_MRT3847_77765C.1.pep
MDIHSNHGATSEGILENVWAKIMSSDRADGRKGDAAECSNSWEELPNLDGREGSMEILQRLPSLGRWISMGADFWEEVLEGIILPNTSNTEYSGSNNNLEIGSANETHNKVGDAVRIEKSVTKHYRGVRRRPWGKYAAEIRDSSKKGARVWLGTFDTAEEAALSYDKAALRIRGPKAYLNFPL

SEQ ID NO: 261067 - protein, 154 aa, Glycine max
  unsure (1)..(154): unsure at all Xaa locations
  Clone ID: PAT_MRT3847_77766C.1.pep
LSASATELLQDYMLTLRTKLSSQESQQFAALLHEYRNGASIHEFCINLRQLYGDSRKFLLLGLRPFIPEKDSQHFXNFLETIGVKDGRGIITDSFGRHRRALSTTSSSTTNGNRATGSSDDRSAPSEGDEWDRMIXDISSDIEAXGXRMDXDSA

SEQ ID NO: 261068 - protein, 277 aa, Glycine max
  unsure (1)..(277): unsure at all Xaa locations
  Clone ID: PAT_MRT3847_77767C.1.pep
GFLKAIVSFVTMQFQLCTVFFTFSLGTRTHYFGRTILHGGARYQATGRGFVVRHIKFSENYRLYSRSHFVKGLEVALLLIVYLAYGYNEGGALSYILLSISSWFMALSWLFAPYLFNPSGFEWQKVVEDFRDWTNWLLYRCGIGVKGEESWEAWWEEELAHIRSLGSRIAETILSLRFFIFQYGIVYKLNVXGTSLTVYGLSWVVLILLAXIIKVFTFSQKISANFQLLLRFIQGISLLVALAGLVVAGISTELSLPDIYASMLAVIPTGWRILSIA

SEQ ID NO: 261069 - protein, 62 aa, Glycine max
  Clone ID: PAT_MRT3847_77768C.1.pep
MAMELDQNQEHQLRFPFWKSLRRRFRAQSPFLAHSNLERELLAKQPALELTQDRQQPQTWMQ

SEQ ID NO: 261070 - protein, 101 aa, Glycine max
  Clone ID: PAT_MRT3847_77769C.1.pep
QNNKTTTRVEFRSVVFNFPVPSSVSLRLRSTFLFSSLISPSRVAASSSSSNRQGCWVEGFSLVLPLRCHANLCVVVIVAASGVWLTLDVCRLLDKCVLPAI

SEQ ID NO: 261071 - protein, 231 aa, Glycine max
  Clone ID: PAT_MRT3847_7776C.1.pep
MTLLYSLSLLQGRSLIIRCTLLFLSASRLREDDRRGCKEHSKTYSSEEEKLYRLKVFEDNYAFVAQHNQNANNNNNNPSYTLSLNAFADLTHHEFKTTRLGLPPTLLRFKRPQNQQSRDLLHIPSQIDWRQSGAVTPVKDQASCGACWAFSATGAIEGINKIVTGSLVSLSEQELIDCDTSYNSGCGGGLMDFAYQFVIYNKWIDTEDDYPYQARQRSFIKDNLKRLAVTI

SEQ ID NO: 261072 - protein, 60 aa, Glycine max
  Clone ID: PAT_MRT3847_77770C.1.pep
ICKSIQIYVRCSVYFQCKVMIVFHDESEQLRFRQVCDNHSPLYGSDLHHGRPQLRMRTRT

SEQ ID NO: 261073 - protein, 55 aa, Glycine max
  Clone ID: PAT_MRT3847_77771C.1.pep
SSDDDTFSSMRVSKESIERVRGLLPMLWRCIASSNSKSNSCRIFALLAVAEIEIT

SEQ ID NO: 261074 - protein, 57 aa, Glycine max
  Clone ID: PAT_MRT3847_77772C.1.pep
GGGFASIASFWASTNLIAVIDKLPVFPTVLELIGIYYSVWFTYRYFIFKPDQQELFQ

SEQ ID NO: 261075 - protein, 68 aa, Glycine max
  Clone ID: PAT_MRT3847_77773C.1.pep
EKVLLTQKALYLLNLITVDSNGLLFIEDNLYLSTYSQIKFGHNLAYVYLTHFHFLTTVKFSFPICTHF

SEQ ID NO: 261076 - protein, 71 aa, Glycine max
  Clone ID: PAT_MRT3847_77774C.1.pep
VININYVEVRANFQNTKKKIILHVYNKNKYKRFNFNRSRFIWLIILCNIILCWKNRVCYAEFHFSFLVSIP

SEQ ID NO: 261077 - protein, 116 aa, Glycine max
  Clone ID: PAT_MRT3847_77775C.1.pep
MSNVNIAGGSRGSTSSSNGLLTVTITSTSHPDDPPTDDNDDDDLLADPDDPFDITHTKNAPPEALKRWRQAAFVLNASRRFRYTLDLKKEEEKEQKKSMIRSHAQVIRAALLFKLA

SEQ ID NO: 261078 - protein, 105 aa, Glycine max
  Clone ID: PAT_MRT3847_77776C.1.pep
KKAPPGGIPLKPGPIKKRGFKKNRVLFGPFPPPQKGVFVPQIAGRRASPPSFPKVWVPNPLQLGFIRKRFLRSFFLRNPQAQKTWFLKAFQQRPKRKSKLLGVFF

SEQ ID NO: 261079 - protein, 40 aa, Glycine max
  Clone ID: PAT_MRT3847_77777C.1.pep
IFFLVNICDDYRLERILSVKKGTCFTLVSINPFIITTPIK

SEQ ID NO: 261080 - protein, 71 aa, Glycine max
  Clone ID: PAT_MRT3847_77778C.1.pep
MAGGAPKQLFGFGVVALLATLILPLFMPAAVQAQSAAPAPAPTSDGSSLDQGIAYVLMLLALVLTYIIHSA

SEQ ID NO: 261081 - protein, 56 aa, Glycine max
  Clone ID: PAT_MRT3847_77779C.1.pep
PYRLSNHFYVTNLALQLFDILLGISEDFEIAGNTLRPAFSVLQVTTRSSENLESSA

SEQ ID NO: 261082 - protein, 126 aa, Glycine max
  Clone ID: PAT_MRT3847_7777C.1.pep
ERCEINGYEIPAKSKVIVNAWAIGRDPNYWIEAEKFSPERFIDCSIDYKGGEFQFIPFGAGRRICPGINLGIVNVEFSLANLLFHFDWKMAPGNSPQELDMTESFGLSLKRKQDLQLIPITYHTAA

SEQ ID NO: 261083 - protein, 71 aa, Glycine max
  Clone ID: PAT_MRT3847_77780C.1.pep
MAGAAPKQLFGFGVVAMLATLILALFMPAAVQAQSASPAPAPTSDGTSLDQGIAYVLMLLALVLTYIIHSP

SEQ ID NO: 261084 - protein, 97 aa, Glycine max
  Clone ID: PAT_MRT3847_77781C.1.pep
RKLNYLTVTCPNIYFTVSLVSQFLKFPYKGHCYAVFYILKYIKDTPRKGLLHEDKGHTKNCGMQMQIGQILLLTCQIFAKLEGATFRPRNVQKGLDL

SEQ ID NO: 261085 - protein, 68 aa, Glycine max
  Clone ID: PAT_MRT3847_77782C.1.pep
LVLRPSIRKGIYLLYDLEILMVFGKQQFLESFLIKTVAMAFNVLLYRALKPNGVCYTPVLLYLNRLII

SEQ ID NO: 261086 - protein, 59 aa, Glycine max
  unsure (1)..(59): unsure at all Xaa locations
  Clone ID: PAT_MRT3847_77783C.1.pep
NXPXXXFXRGXHIPIAXXLPMRTXXLIAXXXXDMGPXIXHXHCFLXRARNSRSFTXACV

SEQ ID NO: 261087 - protein, 117 aa, Glycine max
  unsure (1)..(117): unsure at all Xaa locations
  Clone ID: PAT_MRT3847_77784C.1.pep
ASRKKMERRLLSRNXGREDGIIEAIRDRLKVFLESSLPVVSGYDSRARVPRAPPAILLGGVFVSVMSLFLPVFSKVVFACFSCLLGVWPQVFAVVGPFGGECFFVINVWFPEGFFWF

SEQ ID NO: 261088 - protein, 30 aa, Glycine max
  Clone ID: PAT_MRT3847_77785C.1.pep
NGYKTKLRFPAFKKERCFSSNFFKFFKGLT

SEQ ID NO: 261089 - protein, 72 aa, Glycine max
  unsure (1)..(72): unsure at all Xaa locations
  Clone ID: PAT_MRT3847_77786C.1.pep
PWYETTVXGXXXXXPFXGLKSMAXXPTRKTNNDITSIASNGGKSXNAWQVWPPVGQEEIEILSYLPDLMMHG

SEQ ID NO: 261090 - protein, 130 aa, Glycine max
  unsure (1)..(130): unsure at all Xaa locations
  Clone ID: PAT_MRT3847_77787C.1.pep
XXLSISXXIXXXXXQXXSXXSXXSXXXXXHXXLXSXTPXXXXXXXLXXSTXYXXFXXLXXXXXAXRXXXPXXYXXXXNXXXPXLTXPSAXLXXXXXXXXXXXLXXPVXSXLXXQVMXXXXXXIXSXXXXR

SEQ ID NO: 261091 - protein, 42 aa, Glycine max
  Clone ID: PAT_MRT3847_77788C.1.pep
MATIALSSRYRSKLAYDTGIWGLMAHLGMAFVDDWVRGTVIG

SEQ ID NO: 261092 - protein, 192 aa, Glycine max
  unsure (1)..(192): unsure at all Xaa locations
  Clone ID: PAT_MRT3847_77789C.1.pep
MFPGQSQQRKVGGGCTTMDFDLDLETSWPLDHMAFGSNPMSPFLVSTSSDQPYSPLWAFSDGEDPKLPASAFSDCHKIFSCDSNSIAEKPVENDDNKKNLPPLVPMPPVENLDGYCVIKERMTQALRYFKELTELNVLAQVWAPVRNGNXXCLQLSGQPFVLDPHSNGLHQYRTVSLMYMFSVDGGDDGIFG

SEQ ID NO: 261093 - protein, 89 aa, Glycine max
  Clone ID: PAT_MRT3847_7778C.1.pep
QSFSIQRNSSKNRRMSLYVTATRYSLVKGERIVRFVAITRLRNFERLEAFFFIPSIVIFLSVHYTMWALIRSIDKHTRLVLVVSFFPHC

SEQ ID NO: 261094 - protein, 58 aa, Glycine max
  Clone ID: PAT_MRT3847_77790C.1.pep
MEAILVDCVQKSLRHFMHSNAVFLCQRLCAEFPTEVVFNFLQFSSPSFDSSETSRKWN

SEQ ID NO: 261095 - protein, 268 aa, Glycine max
  unsure (1)..(268): unsure at all Xaa locations
  Clone ID: PAT_MRT3847_77791C.1.pep
IRFLFDFCLQRLGVEIMISGFVFEDDDFIRPWEGLDDNLEXVRYALKWESKNLFALSTAIQDWLTSRIATELMKQGAMMTVLHALLTALAWPAALLAATEFIDSTWTIAIDRSDKAGKLLAEVLLGGLQGNRPVTLVGYSLGARVIFKCLEFLAETENSAELVERVVLLGAPIAIKDENWEAARKMVAGRFVNAYSRNDWMLGVAFRASLLSQGLAGIQPVDIPGIQNVDVTDHIEGHSSYLWATQQVLDELELDTYYPVYNKFLSRQ

SEQ ID NO: 261096 - protein, 82 aa, Glycine max
  Clone ID: PAT_MRT3847_77792C.1.pep
NPFFNVLFRLEQRTKMYGKRKDKSVFLSLKHVYMDVISHVVFVVQGKRLCCIKCNSEWKITCYVSKNIYYCIKKKKKGGLAI

SEQ ID NO: 261097 - protein, 52 aa, Glycine max
  Clone ID: PAT_MRT3847_77793C.1.pep
RIFFPKLFSKDFIQRNLFVLRVCINISMQNECLILGNNYLFILPGKFTYFIH

SEQ ID NO: 261098 - protein, 101 aa, Glycine max
  unsure (1)..(101): unsure at all Xaa locations
  Clone ID: PAT_MRT3847_77794C.1.pep
PIADRLAFTVLASDHKTTPGTGVRDYIYVFHSLHAHIXALRHLHDFKIGCQVYNLAIAKGNSVLEMVNAFDSAFGKKILFAMAGRRPGDAQIVYVSNRKSG

SEQ ID NO: 261099 - protein, 183 aa, Glycine max
  Clone ID: PAT_MRT3847_77795C.1.pep
MELALSLGDTPKPFSLPAKNDSVSFKIALGDDKRVSSDPPVQLDLLPSTPVLPSSRLRIPWLSDALGMERVTSEIPVRAVDDTDDGAALSSPNSAVSSFQMDFCFRNSRKSCEGASDEDDENGSTRKKLRLSKQQSVFLEESFKEHTTLNPKQKLALAKQLNLRPRQVEVWFQNRRARTKLKQ

SEQ ID NO: 261100 - protein, 139 aa, Glycine max
  unsure (1)..(139): unsure at all Xaa locations
  Clone ID: PAT_MRT3847_77796C.1.pep
SGEPPSYLTGEFPGDYXWDTAGLFADPKTFAKNRELEVIHSRWAMLGALGCAFPELLPPNGAKFGQTVCFKAGSHIFIEGGLALLSNPRLIHAQSILALWPTQVILMGAPQGYRIDPGPHGEETDLIYPRAHARTWGPC

SEQ ID NO: 261101 - protein, 65 aa, Glycine max
  Clone ID: PAT_MRT3847_77797C.1.pep
DASDRFQKTTEGAATHTAISASVGRYLDRIIAMGHSSVWSPHPTYSWPGLNTRLTRANSHGLIMR

SEQ ID NO: 261102 - protein, 45 aa, Glycine max
  Clone ID: PAT_MRT3847_77798C.1.pep
HYPNLIPLALNHPFKQIGVITEKATLRLELPNYLCNFEWQIKPAL

SEQ ID NO: 261103 - protein, 243 aa, Glycine max
  Clone ID: PAT_MRT3847_77799C.1.pep
MKTFLLSGKLCCSWFLLGLLALIGSLASATEIHFHEFVIQARPVRRLCKTQNIITVNGQFPGPTVEARNGDFIVIKVVNAAQYNISIHWHGLRMLRNPWADGPSYVTQCPIQPGGSYTYRFRIIDHEGTLWRHAHTGFLRATVYGAFIIYPRLGSPYPFSMPKQEVPLLLGEWFDTDLVLLQRQADFAGLPPNTSVAYTINGQPGDLYRCSSQETVRVPVNAGETIMLSIISRALDHKLCFSL

SEQ ID NO: 261104 - protein, 87 aa, Glycine max
  unsure (1)..(87): unsure at all Xaa locations
  Clone ID: PAT_MRT3847_7779C.1.pep
ENRCHCXDAGPPPPNLXRDSTGLGARPEQGRXGRPLSLXFCGQXXXAGRQTESSPSSRXKXRGCXXKXTGEXRFGEMEGTGHQAQKR

SEQ ID NO: 261105 - protein, 44 aa, Glycine max
  Clone ID: PAT_MRT3847_777C.1.pep
AIDIKRTAYTILRPSIHVACMSYYIICINLYTKSPYLLLAKPLN

SEQ ID NO: 261106 - protein, 54 aa, Glycine max
  Clone ID: PAT_MRT3847_77800C.1.pep
TKPQIICAEYFLPLSILQGGVCTDLIHYFLLHITPTHFFEDLLLNGENLCCLNS

SEQ ID NO: 261107 - protein, 76 aa, Glycine max
  Clone ID: PAT_MRT3847_77801C.1.pep
SKGSKALYIAYSWKRLSVIERIRFIIRVFFPFESYGSLGVELCFLKFNKRLRCHLGHQIRIAKSNCPIPIGYSKSG

SEQ ID NO: 261108 - protein, 123 aa, Glycine max
  Clone ID: PAT_MRT3847_77802C.1.pep
MARIKVYELRYKTKAELLNQLKDLKAELALLRVAKVTGGAPNKLSKIKVVRLSIARVLTVISQKQKAALREAYKKKKYLPLDLRPKKTRAIRRRLTKHQASLKTQREKKKELYFPMRKYAIKV

SEQ ID NO: 261109 - protein, 123 aa, Glycine max
  Clone ID: PAT_MRT3847_77803C.1.pep
MARIKVYELRNKTKAELLNQLKDLKAELALLRVAKVTGGAPNKLSKIKVVRLSIAQVLTVISQKQKAALREAYKKKKYLPLDLRPKKTRAIRRRLTKHQASLKTEREKKKELYFPLRKYAIKV

SEQ ID NO: 261110 - protein, 60 aa, Glycine max
  Clone ID: PAT_MRT3847_77804C.1.pep
KIQGFIDVHTLCKSIGFPPTNIKNLSSPTLKHWPQNLNFCYCKPLGATPKQVQKWDLLHL

SEQ ID NO: 261111 - protein, 54 aa, Glycine max
  Clone ID: PAT_MRT3847_77805C.1.pep
TSTLAHHAAVILHSRICKALQLAESVHSIRVEVVCVLRALTLPRLSDALRTRLR

SEQ ID NO: 261112 - protein, 185 aa, Glycine max
  Clone ID: PAT_MRT3847_77806C.1.pep
SLSLFKRWDIGSLNGSGRYEDDIYDRIWSPFNSSSWESVSTSTPINVNDDGFRPPFEVIRTAARPRKGSDTLEFSWTPDDPSWKFYVYLYFAEVEQLEKTQLRKFNISWNGSPLFDDSLVPRHLFATTLSNSKSLVANEHRISIHKTKDSTLPPILNAVEIFVARQLDALATFEQDGMMCFHCGT

SEQ ID NO: 261113 - protein, 69 aa, Glycine max
  Clone ID: PAT_MRT3847_77807C.1.pep
LFFDAVKIENCTSVLISTCASTHACDELARQNALLIYTPEQCFQGYNSIPFVRTMPVKCSPYTAHLTTV

SEQ ID NO: 261114 - protein, 100 aa, Glycine max
  unsure (1)..(100): unsure at all Xaa locations
  Clone ID: PAT_MRT3847_77808C.1.pep
MLERFTRFVTNGHLLLDGVPGVSKXTINSLGKRSAKLAVTVTPDLXASDLIXSMIYXQQTNEFILRNGPIFANFVMVHEINRATAQVHIALLEAMHLSQL

SEQ ID NO: 261115 - protein, 116 aa, Glycine max
  Clone ID: PAT_MRT3847_77809C.1.pep
AWARPLLTSKEGCEAMIDQSLGTDVPFDSVAKVAAIASMCVQPEVSNRPFMSEVVQALKLVCSECDEAKEESGSSSFSLEDLSVDLALGISTVSGQLSDNFQSQLSGTNFDSGVDI

SEQ ID NO: 261116 - protein, 180 aa, Glycine max
  Clone ID: PAT_MRT3847_7780C.1.pep
MMANSCVSMDNNNILGLLKLRIKRGVNLAIRDARTSDPYVVVNMGDQKLKTRVVKNNCNPDWNEELTLSVKDVKTPIHLTVYDKDTFSVDDKMGEAEIDLKPYVQCKQMGLGKLPNGCSLKRIQPDRTNYLAEESSCIWQNGKIVQEMFLRLRNVESGEILVEIEWVDVVGCKGLSEVEL

SEQ ID NO: 261117 - protein, 46 aa, Glycine max
  unsure (1)..(46): unsure at all Xaa locations
  Clone ID: PAT_MRT3847_77810C.1.pep
KCDPNPPRFCPTKIPSHRERVKXENWTKASACLEIKIQMVFSLLPI

SEQ ID NO: 261118 - protein, 64 aa, Glycine max
  Clone ID: PAT_MRT3847_77811C.1.pep
CLMLDYWINSRSCFLHPKNPQYLLMLNMLNLSCSHHQDNFVQFFISCKDCLIGKISNMRSCLIA

SEQ ID NO: 261119 - protein, 86 aa, Glycine max
  Clone ID: PAT_MRT3847_77812C.1.pep
GLKIYFNKAPQLPFVLGGAPPPFSTCFPVGDPGSLPPPKREGPSIAPGAFSPLKTNVGNPASSPNFVFNPQGGVGPFSQEVFSPPF

SEQ ID NO: 261120 - protein, 138 aa, Glycine max
  unsure (1)..(138): unsure at all Xaa locations
  Clone ID: PAT_MRT3847_77813C.1.pep
EEHTVIECVFGLLGTGFAIVAADSSAVHSILVHKYNEDTIMLLYFHKLIDVRDQLGYRVQFTEYIQKNVCLYQIRNGIYITTVDYANFTQGELATALRKNPYSVNIRFAGHDKHTGPXLHYIDYIATLQMLEKGAHGY

SEQ ID NO: 261121 - protein, 55 aa, Glycine max
  Clone ID: PAT_MRT3847_77814C.1.pep
KKKKKKRKKKKRKKKKKKKKKKKKKKKKKKKKKKKKKKKKKKGGGPLLRGSSPRN

SEQ ID NO: 261122 - protein, 113 aa, Glycine max
  Clone ID: PAT_MRT3847_77815C.1.pep
TNSHSLSHHKIHPKLDPKPSSTPPLTLNTPLHILPPLLSPQSFLLPLPHLQIYHHSPLPLLHHPHHHQLQSPHQHHHPLPLQYPSSYSTYPFTYHTHDILSLSIPLLPYHTYT

SEQ ID NO: 261123 - protein, 68 aa, Glycine max
  unsure (1)..(68): unsure at all Xaa locations
  Clone ID: PAT_MRT3847_77816C.1.pep
DAAAVGVRQHCYRQRGQVHAHAQVLIASWVVIDRLXASAILIIRNLETISGISQKIWTMFMNSLETCA

SEQ ID NO: 261124 - protein, 50 aa, Glycine max
  Clone ID: PAT_MRT3847_77817C.1.pep
TNVILLAISIHKRALFLSRILRTQFMRSFVGIYVYDAYDILWVISIFPAQ

SEQ ID NO: 261125 - protein, 66 aa, Glycine max
  unsure (1)..(66): unsure at all Xaa locations
  Clone ID: PAT_MRT3847_77818C.1.pep
HSRLESDXIKSMIRNRQQSHKKKAPTLFFKCHAKIXXXVERTCPSRRLLFTSNLLLGRLADTRLVN

SEQ ID NO: 261126 - protein, 67 aa, Glycine max
  Clone ID: PAT_MRT3847_77819C.1.pep
KRREKEIENPFFFFSINIFNLFHLRHVPLSIPFFLRPILELACASCYPSKVVLRRLNPRISLRFALR

SEQ ID NO: 261127 - protein, 54 aa, Glycine max
  Clone ID: PAT_MRT3847_7781C.1.pep
KSHCLKKNYCFKISSLCVVKKKNKWGVLFRVGPKKETTVGFKKIIFRFRGFFSP

SEQ ID NO: 261128 - protein, 29 aa, Glycine max
  Clone ID: PAT_MRT3847_77820C.1.pep
LLVSDSDLTLCCYVIRTMNSKLVLLSRAM

SEQ ID NO: 261129 - protein, 45 aa, Glycine max
  unsure (1)..(45): unsure at all Xaa locations
  Clone ID: PAT_MRT3847_77821C.1.pep
QGNKYIASSFLRLTAEQWRSRNSITCQVTHEGNTVEXSLSPAECV

SEQ ID NO: 261130 - protein, 62 aa, Glycine max
  Clone ID: PAT_MRT3847_77822C.1.pep
MPVKNIVRRRPQEATHPDTLTDDLADYIATFIDMIAGSGSRIVYNKAHLHGATAPAGLMFVF

SEQ ID NO: 261131 - protein, 83 aa, Glycine max
  Clone ID: PAT_MRT3847_77823C.1.pep
LGLSLKINFVELAQFLSFFLGTRSLQNGTMDPLVPIFGAIKGTVLKPQINLGADQKFSLGRLKTLKGAPPKNWGYKKKEKNMN

SEQ ID NO: 261132 - protein, 218 aa, Glycine max
  unsure (1)..(218): unsure at all Xaa locations
  Clone ID: PAT_MRT3847_77824C.1.pep
HASECVYLIVYVDDFVIQGMMLSXSQLKQHLFSHFQTKDLGCLKYFLGIEVAQSKEGVVXQRKYALDILEETSMTNCRPIDSPMDPNQKLMLDQGDPFLDLERYRSLVGKLIYLTITRLDLSFLVGVVSQFMQDPHIDHWNTVICILRYIKRTRGQGLLHKDNGKTQICGYWDANXAGCPIDKRSTTRYWGILWRKYWLFGKTRNRGVLPGSGAKAEI

SEQ ID NO: 261133 - protein, 59 aa, Glycine max
  Clone ID: PAT_MRT3847_77825C.1.pep
GKIKFWVNIQFVTYFKSQPLSGTGKSCTLVDLLGPWISNPETSLLESKFFFYPLLLIWK

SEQ ID NO: 261134 - protein, 357 aa, Glycine max
  Clone ID: PAT_MRT3847_77826C.1.pep
MEQTTLEAIQFNEEIQGLMAAPAPDTVNYFKALLELPSTQAVELLHSPERARKPLRLTPPPNAALIERAAKFSVFAGENSPPPPDLACPSPAAPGARAAWVSVFAGPNATANSNSPEVKRELPETDANPSSTHGGGGAGSVSDLAVENQNLKTAKRKEREKKVKASSKKSKSVAAADEISGDGEKLPYVHVRVRRGQATDSHSLAERARREKINARMKLLQELVPGCNKISGTALVLDKIINHVQSLQNEVEILSMKLAAVNPVIDFNLDSLLATEGVTPMDCNFPPTVAPVMWPEIPQNGNRQQYQQPWPFDALHQPLWGREEDNTNFMTPENSLLSYDSSANSVSLHSNQLKMEL

SEQ ID NO: 261135 - protein, 90 aa, Glycine max
  unsure (1)..(90): unsure at all Xaa locations
  Clone ID: PAT_MRT3847_77827C.1.pep
VYHLSHRLKGAFIRNNYDTRSGVLSQLKVLLTGYKNKPPKTADTPFAVLEKTKARDIYEYALXLXVKNEDQDAFERHLLQKKTYYTDAWK

SEQ ID NO: 261136 - protein, 154 aa, Glycine max
  unsure (1)..(154): unsure at all Xaa locations
  Clone ID: PAT_MRT3847_77828C.1.pep
SYADSEGEDLHHADQPIQRPDESSTGSNESYGKGNAKATGDFSGMAXAFHISSTTARAISIVIAFSALTLPIFMKSLGQGLALKTKLFSYATLLFGFYMAWNIGANDVANAMGTSVGSGALTIRQAVMTAAILEFSGASFXMDTHVTSTMQKGI

SEQ ID NO: 261137 - protein, 41 aa, Glycine max
  Clone ID: PAT_MRT3847_77829C.1.pep
MPSSEAMHTLLTMYENLRMDYQRLIYHSEHYHQMGYCQWTS

SEQ ID NO: 261138 - protein, 90 aa, Glycine max
  unsure (1)..(90): unsure at all Xaa locations
  Clone ID: PAT_MRT3847_7782C.1.pep
PRVRTHVLHADWSKDSREVYVGDIIKVRVENIEDYGGSXHMRLLDXLYHFTGLIHVXQVSWDLMHDVSDMLTAGDEMRAKVVGVARGKYK

SEQ ID NO: 261139 - protein, 84 aa, Glycine max
  Clone ID: PAT_MRT3847_77830C.1.pep
DRADLAVRAVTPSLPLDAGEGCTLRLSQFHGGHKWLCHCPRPARRVISDLACSRQRVCAVAKHHNPARNPHNEELFNADLGQSD

SEQ ID NO: 261140 - protein, 453 aa, Glycine max
  unsure (1)..(453): unsure at all Xaa locations
  Clone ID: PAT_MRT3847_77831C.1.pep
MDYLLLLPLIITIVWINIHVFISSFKPLKSSKNPPGPRPFPIIGNILELGNQPHQALAKLSQIYGPIMSLKLGKTTTIVISSPQVAKEVLQKHDQIFANRMVPDTLRALDHHILSVAWMPPLPQWRTLRRVCATKVFSSQQLDSTQVFRQRKVQDLMDYVKERCETGEALDIGEASFTTHLNSISNICALNGIGSLQLLASRTLQVVLASLLYSYEWKLTDGLKXMTWIDLKNMRRRMNGYFGKLIAFFDGLIEERLRLRASENESKACNDVLDTVLELMLEENSQVTRPHVLHLFLDLFVAGIDTTSSTIEWAMAELLRNPEKLEIVRKELQQVLAKGEQLEESHISNLAYLQAVVKETFRLHPPIPMLVPHKSEVDVELCGFMVPKSAQILVNVWATGRDSSIWTNPNQFTPERFLESDIDFKGQDFELIPFGAGRRICPGLPLASRTVLA

SEQ ID NO: 261141 - protein, 145 aa, Glycine max
  Clone ID: PAT_MRT3847_77832C.1.pep
QAVVKETFRLHPPTPMLLPHKSEVDIELCGFMVPKSAQILVNLWARGKDSSIWTNPDEFTPERFLESDIDFKGHDFELIPFGAGRRICPGLPLASRTLHVVLASLLYNYDWKLTDGQKPEDMDVSEKYGITLHKAQPLLVIPIQA

SEQ ID NO: 261142 - protein, 169 aa, Glycine max
  Clone ID: PAT_MRT3847_77833C.1.pep
ISNLAYLQAVVKETFRLHPPIPMLVPHKSEVDVELCGFMVPKSAQILVNVWATGRDSSIWTNPNQFTPERFLESDIDFKGQDFELIPFGAGRRICPGLPLASRTVHIVLASLLYNYNWKLTDGQKPEDMDMSEKYGITLHKAQPLLVIPIQAYYQGRLHACNQILNKLS

SEQ ID NO: 261143 - protein, 101 aa, Glycine max
  unsure (1)..(101): unsure at all Xaa locations
  Clone ID: PAT_MRT3847_77834C.1.pep
IIHKILTSLSNKQIFSFYTTXQQWDPIHKLGGAILSYQHTHPNLSFQPLNPFPLPNTSIIPSHSLNPQTNFLPPKFHPNHFNNLPSSLPLPSYHSHPNYTP

SEQ ID NO: 261144 - protein, 119 aa, Glycine max
  unsure (1)..(119): unsure at all Xaa locations
  Clone ID: PAT_MRT3847_77835C.1.pep
VGAGQKALVFLHGFPEIWYTWRHQMXAAANAGYRAIAFDFRGYGLSEHPAEPEKANLLDLVDDVVGLLDSLSITKAVLVGKDFGAFPAYIVAALHPDKVDSVIMLGVPFMLPGPSAIQN

SEQ ID NO: 261145 - protein, 77 aa, Glycine max
  unsure (1)..(77): unsure at all Xaa locations
  Clone ID: PAT_MRT3847_77836C.1.pep
QHVLEHGKSKDRYIIIXKTHAILVXMSQQKFASNVEEKXVTFGGPSERQLLRRPKRGITDENEPLQAMMKDQFAYYV

SEQ ID NO: 261146 - protein, 241 aa, Glycine max
  Clone ID: PAT_MRT3847_77837C.1.pep
HASADIIYTLQWIATKEGLEIDKDALKLIASRSDGSLRDAEMTLEQLSLLGQRISVPLIQELVGLISDEKLVDLLDLALSADTVNTVKNLRVIMETGVEPLALMSQLATVITDILAGTYDFTKERRRRKFFRRQPLSKEDMEKLRQALKTLSEAEKQLRMSNDKLTWLTAALLQLAPDQQYVLPTSSDNSFNHSPFALKDADAREAARLTGNPVDIPNKGRRLSMDARIENFHAGSSADGM

SEQ ID NO: 261147 - protein, 92 aa, Glycine max
  Clone ID: PAT_MRT3847_77838C.1.pep
THEAAFLLPQGDRPNMRLFCSSTESGWATCCLFVRAAPTVILLPVRAVTPAMWKDIYTLLTSSSNSGAVWILGDSRSGSPVVNQHVGRRANP

SEQ ID NO: 261148 - protein, 134 aa, Glycine max
  unsure (1)..(134): unsure at all Xaa locations
  Clone ID: PAT_MRT3847_77839C.1.pep
LSLGGRLGYASLIPYVEPGVQAQSAEVYFDLFPVXADSKEGVSITSGELKLVDYVPLSTKSXLEETSKEWPLALPCDTIRSVLTSTDERLVVTKHEGYESFIWXIQEYSTPMMPLDEEIISKAGHDIGEECFEC

SEQ ID NO: 261149 - protein, 116 aa, Glycine max
  Clone ID: PAT_MRT3847_7783C.1.pep
MVLSNGKTEAPLPSSNGGGAEIDNNEKKPFKIFVLIVPREDLAYEVCRHSILKRSSIPVEIIPIMTPCLANYQGWAMFVDCDFLYLADIKELKDLLEDKDATVRVQHDYARLEDHL

SEQ ID NO: 261150 - protein, 55 aa, Glycine max
  Clone ID: PAT_MRT3847_77840C.1.pep
IVLFICQSHRCLFSLELEGIVTKRLLANMTPNKLTFLIYGVVAKLCKNTCFVTLT

SEQ ID NO: 261151 - protein, 189 aa, Glycine max
  Clone ID: PAT_MRT3847_77841C.1.pep
NKGKKKKDKKRLGTKTTMEEKRTAITNRQGLKKKMHPLISSLSIGGDGGIAGLFVFGGALALAGFMAVGSFASKKHKAKGTHDDHQPKPKPKPQQLLLEEHGCKTDHEEDRDTTQSLTSLIQHGDAACCWASNMRINQVSDSSELLSAQSLILEDKSELKPRSVEESPTDFHHQEIVFSDSSHPESAAS

SEQ ID NO: 261152 - protein, 59 aa, Glycine max
  Clone ID: PAT_MRT3847_77842C.1.pep
ESNSELEMRVSRLASMSCRNLRPVVLIGAAAAVIADLSLGCGGEVSASGVRSSSIMLSS

SEQ ID NO: 261153 - protein, 56 aa, Glycine max
  Clone ID: PAT_MRT3847_77843C.1.pep
NGLYLSFMFFFLYMHIKNTPKKAETIPLHLEIQYMKGRYWYQAWIRFNFPIIPKSR

SEQ ID NO: 261154 - protein, 190 aa, Glycine max
  unsure (1)..(190): unsure at all Xaa locations
  Clone ID: PAT_MRT3847_77844C.1.pep
MEIQQSLKLTIHKKWPSSPKKPPKESEPITPTPNTPKLKWKKIFFQTKTKTQIQTPPEEFLCPISRSLMFDPXIVSSGHSYERSSVEACKNVNFTPQLPDGTTPDFSTLIPNLALKSAILKWGQSTHTPXPHPHNNPVQTLISSHPNLPTLNPSTNLGPPNPNPPPEKISDQEKVLDLPGRKPTTTPAPQ

SEQ ID NO: 261155 - protein, 62 aa, Glycine max
  Clone ID: PAT_MRT3847_77845C.1.pep
IHSNDGFTTNYFSLIVFLITYHNNITNLLYNYHWFYTITTNNITNKMPNSDKLKESLINTLK

SEQ ID NO: 261156 - protein, 34 aa, Glycine max
  Clone ID: PAT_MRT3847_77846C.1.pep
LSLDNDHCNSVQSSAPMISNVSTPVFHMNLNYNH

SEQ ID NO: 261157 - protein, 81 aa, Glycine max
  unsure (1)..(81): unsure at all Xaa locations
  Clone ID: PAT_MRT3847_77847C.1.pep
GFCILPDCSEFNTLDCHRLFAYIQXHAFVFEGSVIVHADKQXHIGFYSFSVGNLVDPWLKTMHASELSSSLIQCPARPVKC

SEQ ID NO: 261158 - protein, 70 aa, Glycine max
  Clone ID: PAT_MRT3847_77848C.1.pep
YHVSRSDSSFIRIYADLVTDDLSMDLMCDCILNLICLGMLYKFMLVGLKCIILSCYSFCVSCIQTYARLL

SEQ ID NO: 261159 - protein, 63 aa, Glycine max
  Clone ID: PAT_MRT3847_77849C.1.pep
KFIHISLKDSEHVIYGVTIKGNIVGVGNIGTNLSTSTEDVLLIDGLKHNLSSLYQLCDPGLLI

SEQ ID NO: 261160 - protein, 112 aa, Glycine max
  Clone ID: PAT_MRT3847_7784C.1.pep
AQHWRRACALPLNPRFIFPSLHLRFKIISSSLSLFETSPTPATHCFNLNRVPFSFSLHLLMFFVSVFLEKLTRLFFDIALHQLGDLGCGKRLDFCPCFSMVLFRAKWVCVCL

SEQ ID NO: 261161 - protein, 39 aa, Glycine max
  Clone ID: PAT_MRT3847_77850C.1.pep
NRVHDNPNQCNTQSHAGSAGNKLDSASNLTDFLEAQKSV

SEQ ID NO: 261162 - protein, 73 aa, Glycine max
  Clone ID: PAT_MRT3847_77851C.1.pep
SPKLFSSNQCLTQKIIIQVRKFTYESILVINPLSHYHTCNPVLIRTNSSKCGESLCGTFNALSCVTRSSLEKP

SEQ ID NO: 261163 - protein, 138 aa, Glycine max
  Clone ID: PAT_MRT3847_77852C.1.pep
LHDALVSLKDGAVSAARHWTRWLLASLSDYVRIIGAAWSPRSEANSHAFGWGRPKKVAMAFIVRTGALCLSNSKNGDGVQVRFVSNKKKMETSAYFFADGLRSRVPLGTVLWAFMNTKLRKNKGRVVSVLIKKININN

SEQ ID NO: 261164 - protein, 41 aa, Glycine max
  Clone ID: PAT_MRT3847_77853C.1.pep
FLTYRNLIIDQGGRGVMDNILCVATLVDSIDTLTCHAVYGQ

SEQ ID NO: 261165 - protein, 187 aa, Glycine max
  unsure (1)..(187): unsure at all Xaa locations
  Clone ID: PAT_MRT3847_77854C.1.pep
MEVLSKFLVGPLHSITSKCMVLLVTVLILRALLFPSFPGFDGIEWGNLVCIRTPLLNSDFGIQQDKFLEVPQLVWGLNNQKIAFARACLTARMLNRTLLMPSLSASLFYKEIDLLQPISFDKVFQFEKFNALCRGFVRLGCYSDVLNRQEVLKMEKGXSGRKVDSWRKIWHQWKEHSKGSFDEYEVI

SEQ ID NO: 261166 - protein, 42 aa, Glycine max
  unsure (1)..(42): unsure at all Xaa locations
  Clone ID: PAT_MRT3847_77855C.1.pep
HSQYXAASNLHIEQELFIIXTINYVFDXQLENYXAEFXLLNX

SEQ ID NO: 261167 - protein, 353 aa, Glycine max
  Clone ID: PAT_MRT3847_77856C.1.pep
DFDAKPMVMLLGQYSTGKTTFIKHLLRCDYPGAHIGPEPTTDRFVVVMSGPDERSIPGNTIAVDADMPFSGLTTFGGSFLSKFQCSQMPHPLLDEITFVDTPGVLSGEKQRTQRSYDFTGVISWFAAKCDLILLLFDPHKLDISDEFKRVIGSLRGHDDKIRVVLNKADQIDTQQLMRVYGALMWSLGKVLNTPEVVRVYIGSFNVKPINEGFVGPLGQDLFEKEQNDLLADLMDIPKKACDRRINEFVKRARSAKIHAYIISHLKKEMPAIMGKAKAQQRLLDNLEEEFAKVQREFHLPAGDFPNVEHFREVLSGYSIDKFEKLKPKMIQAVDDMLGYEIPELLKKFRNPYD

SEQ ID NO: 261168 - protein, 79 aa, Glycine max
  Clone ID: PAT_MRT3847_77857C.1.pep
MGSVLGEGHFVVLLLVMVSLTVSTVNGQPKSILLNCGSDSSVNVDGRRWVGDMATDNNVTLSSPSVVVSTSTSSGSSIY

SEQ ID NO: 261169 - protein, 107 aa, Glycine max
  unsure (1)..(107): unsure at all Xaa locations
  Clone ID: PAT_MRT3847_77858C.1.pep
NTGSTARPLKLFIPSLLAVVAVLEEEIVRLEEQGVHVXQDLYHEAVYMSSSMRKLENSVSAPSNMSNPTMDSPNLDKLISLTQTTGYSSATFASNPTTTLPDDYIQG

SEQ ID NO: 261170 - protein, 62 aa, Glycine max
  Clone ID: PAT_MRT3847_77859C.1.pep
HTLFCFLSFRDKSGTMTNVGCPSACFLRRTAFDNPLAFYYLGPKPTPLVRASQSYCLLKFNG

SEQ ID NO: 261171 - protein, 190 aa, Glycine max
  unsure (1)..(190): unsure at all Xaa locations
  Clone ID: PAT_MRT3847_7785C.1.pep
MSLSNGKTEAPLPISNGDEKKPFKIFVGYDPREDLAYEVCRHSILKRSSIPVEIIPIKQSDLRKSGLYWRERGQFESTEFSFSRFLTPCLANYQGWAMFVDCDFLYLADIKELKNLIEDKYAIMCVQHDYAPKETTKMDGAVQTVYPRKNWSSMVLYNCAHPXNRXLTPDTVNTQKGAFPYRFQWLEDDQ

SEQ ID NO: 261172 - protein, 34 aa, Glycine max
  Clone ID: PAT_MRT3847_77860C.1.pep
EYSVGEEKLLHGTRLPHVHGLRLVFRQHGTEYSN

SEQ ID NO: 261173 - protein, 89 aa, Glycine max
  Clone ID: PAT_MRT3847_77861C.1.pep
CFVLNRKAKLITLVFTPHRSSHKGTSILYTLRGAIMLVGSCYRAQISRTSGQVILSSAFSFLFHLFYASHAISHSNFHQIMIVILCDSE

SEQ ID NO: 261174 - protein, 60 aa, Glycine max
  Clone ID: PAT_MRT3847_77862C.1.pep
LIYKPRSPGAEPGNLIHNHSIPAHMKLPLPSYITGHDGTRESYILSALATDDTKYKRIQC

SEQ ID NO: 261175 - protein, 160 aa, Glycine max
  unsure (1)..(160): unsure at all Xaa locations
  Clone ID: PAT_MRT3847_77863C.1.pep
KEKNQCIVFFQKKKKKKKKKKKKKKKKKKKKKRVSFFKKQNILPPPADDKVFLLWGQQKINCRPLYNNSAWKKHPVANQISLVEKHPSFTSGSNKKEGPNDLSPQXPSLMKEENAPPCGALLTAGVVVATSRTTSFVITLTPPPFSXFPPFFITTSGVPP

SEQ ID NO: 261176 - protein, 172 aa, Glycine max
  unsure (1)..(172): unsure at all Xaa locations
  Clone ID: PAT_MRT3847_77864C.1.pep
MGSFQTPIGMRSSTLLETSCGFLLQELQIIWDEVGEDKFEREKVLLDLEQECLEVYRRKVDRANISRAHLHQELAEAEAEFTHLLLSLGERSLPVRPEKRAGSLKEQLDSITPALREMRLRKEERLNQFRTVQGQIQKISAEIAGNSDNEPSSIXVNENDLSLKRLEEYQNE

SEQ ID NO: 261177 - protein, 30 aa, Glycine max
  Clone ID: PAT_MRT3847_77865C.1.pep
TTRTSRWEKTIDGDTYRELILQFNYALTLC

SEQ ID NO: 261178 - protein, 90 aa, Glycine max
  unsure (1)..(90): unsure at all Xaa locations
  Clone ID: PAT_MRT3847_77866C.1.pep
MGFRLPAVRRASFTASQAASKSVQVPKGYLAVYVGEKQXRVVVPVSYLNQPSFEDLLCQAEEEFGYDHPLGGLTIPCSEDVFQHITSHLN

SEQ ID NO: 261179 - protein, 65 aa, Glycine max
  Clone ID: PAT_MRT3847_77867C.1.pep
SFFFPVPKTRGLRVPAKRNFKIKPLLKTFFQKTRFRRVFVTQGGPLLWHKRPNFWLQELNAHPHE

SEQ ID NO: 261180 - protein, 42 aa, Glycine max
  Clone ID: PAT_MRT3847_77868C.1.pep
KTGAPCRSERLAKYNQLLRIEEELGSAAVYAGAKFRAPVEPY

SEQ ID NO: 261181 - protein, 80 aa, Glycine max
  Clone ID: PAT_MRT3847_77869C.1.pep
KRGLGDKNFNKKGPLKKLLKPFVVFQPPKYLGCFFLPPGGFCFNPPPPKKKGVFFPPTKLKVFGLLWGCLRQKSPFFFYI

SEQ ID NO: 261182 - protein, 268 aa, Glycine max
  unsure (1)..(268): unsure at all Xaa locations
  Clone ID: PAT_MRT3847_7786C.1.pep
MVLSNGKTEAPLPSSNGGGAEIDNNEKKPFKIFVRGYDPREDLAYEVCRHSILKRSSIPVEIIPIKQSXLRKSGLYWREXRGQFESTEFSFSRFLTPCLANYQGWAMFVDCDFLYLADIKELKDLIEDKYAIMCVQHDYAPKDTTXEWMGAVQTVYPRKNWSSMVLYNCAHPKXNRVLTPDTVNTQTGAFLHRFQWLEDDLIGSIPFVWNFLEGHNRVVDNDPTTSPKAIHYTRGGPWFEAWKNCEFADLWLNEMEDYMKQAKKESAN

SEQ ID NO: 261183 - protein, 51 aa, Glycine max
  Clone ID: PAT_MRT3847_77870C.1.pep
AGCLILSTKHRRKGPSLFFHKCNYSKHEHGFLRKTPPSPLIFSSNKTLLLD

SEQ ID NO: 261184 - protein, 447 aa, Glycine max
  unsure (1)..(447): unsure at all Xaa locations
  Clone ID: PAT_MRT3847_77872C.1.pep
MATIKAVKARQIFDSRGNPTVEVDVILSDGTFHRAAVPSGASTGVYEALELRDGGSDYLGKGVLKAVENVNSIIAPALLGKDPTKQTEIDNFMVQQLDGTVNEWGWCKQKLGANAILAVSLAVCKAGAAVKKIPLYKHIANLAGNKTLVLPVPSFNVINGGSHAGNKLAMQEFMILPVGASSFKEAMKMGVXEVYHHLKAVIKKKYGQDATNVGDEGGFAPNIQENQEGLELLKTAIAKAGYTGKVVIGMDVAASEFYDNKDKTYDLNFKEXNNDGSQXKIPXVSLKNVYKSYVTDYPIVSIEDPFDQDDWEHYAKLTAEVGQQVQIVGDDLLVTNPKRVEKAIKEKACNALLLKVNQIGSVTESIEAVRMSKQAGWGVMASHRSGETEDTFIADLSVGLATGQIKTGAPCRSERLAKYNQLLRIEEELGSAAVYAGAKFRAPVEPY

SEQ ID NO: 261185 - protein, 62 aa, Glycine max
  Clone ID: PAT_MRT3847_77873C.1.pep
RGSLWRWLGVTDLLDLKIVLLRSPATNPLLSRLLDSCQGLIFLFAVPSLSSVSFHVIPHSLK

SEQ ID NO: 261186 - protein, 483 aa, Glycine max
  Clone ID: PAT_MRT3847_77874C.1.pep
CASFIGRYRPCPKVVRICKGLPLAVKVIGRSLSHQPSELWLKMVEELSQHSILDSNTELLTCLQKILNVLEDDPVIKECFMDLGLFPEDQRIPVTSLIDMWAESHSLDDDGPEAMAIINKLDFMNLANVLVARKNASDTDNYYYNNHFIVLHDLLRELAIYQSTQEPTEEGKRLIIEINQNKPRWWLGEKSTLLKHQQATAQTLSILTDENCTSDWPQMQLAEVEVLIFNIRTKQYFFPDFIEEMNKLKVLIVTNYSFYPSVMNNFELIGSLSNLKRIRLERIFVPPFVTLKNLKKLSLFLCNMKQAFENGDMLISYAFPSLEELNIDYSKDMVGLPKEVCDITSLKMLSITNCHKLSALPQQFGNLENLKLLRLSSCTDLQEIPNSIGRLSNLRHMDISNCISLPNLPEDFGNLFNLQNLYMTSCARCELPPSIANLENLKEVVCDEETAASWEDFKPMLPNLKIDVPQVDVNLNWLHTISS

SEQ ID NO: 261187 - protein, 80 aa, Glycine max
  Clone ID: PAT_MRT3847_77875C.1.pep
CGSPQRSKGLGNSFPVVPRWGVKCWGMGFLRALGPLAQSMWARNLGFLSDPPGFLWGYLLSGPLPGFFQGGFLHRGFTFP

SEQ ID NO: 261188 - protein, 88 aa, Glycine max
  Clone ID: PAT_MRT3847_77876C.1.pep
NSARAQVCRAYKDVLVGKGGSGLAFTVAVPWVCNTSLIVCRGFGRDSKYFNRDFAINTLISKSLELEHVMGLPFSCLEYIKRGFIVVG

SEQ ID NO: 261189 - protein, 127 aa, Glycine max
  Clone ID: PAT_MRT3847_77877C.1.pep
GSRVHRVENFSRVRDEIITEGDIESAKEENVLESSSEPVDLSAGKEDQNYGISETSDCARSSQCSKQDVTEVNKPTSPLSSPSHSSPTKKIEELSVTEVSGRPSPVSVLDTPFLEDDINPGYSRFQP

SEQ ID NO: 261190 - protein, 55 aa, Glycine max
  Clone ID: PAT_MRT3847_77878C.1.pep
MFSSHFNMLVICYVYVFSRYVLFSAFTLTTAINEWSSTLYSMLSQDTSSIAILVL

SEQ ID NO: 261191 - protein, 113 aa, Glycine max
  unsure (1)..(113): unsure at all Xaa locations
  Clone ID: PAT_MRT3847_77879C.1.pep
NPPVKRRDWGSFGQVFLSPRICSEPFSACRGVXSKPPSGGWVFPIKGGGPHNGFXIWGFEWGNQNSGVLGFLVYNSKQSPPFDVFFGVFQNFEIGGNPLMPAFFVSRAKAKFF

SEQ ID NO: 261192 - protein, 65 aa, Glycine max
  Clone ID: PAT_MRT3847_7787C.1.pep
FKAYFLHFSFTAIKAFGGEQVHELRPYPFQKNEHTLFKNKTKKKVSPHSKYKKKKDSSSEPYASL

SEQ ID NO: 261193 - protein, 110 aa, Glycine max
  unsure (1)..(110): unsure at all Xaa locations
  Clone ID: PAT_MRT3847_77880C.1.pep
KNKNRPPPLQNTNQTKHLLSLLTHSSITPPLTPPPPLFFPPPPQIKFPPPPSILPIFPNTLLYYISPITSPSPFPFXKLLPPPNPPHLLLPKPYNFTPPPPPHLSLPPLS

SEQ ID NO: 261194 - protein, 86 aa, Glycine max
  Clone ID: PAT_MRT3847_77881C.1.pep
GIRHNNKIPLLIGGLTFTCLLLGFLFFGLMVYYSVIHIRILSPPNALTRINYPTLPILDTFSFRWLAFFIRWPPPPPPQRQEDVIQ

SEQ ID NO: 261195 - protein, 137 aa, Glycine max
  unsure (1)..(137): unsure at all Xaa locations
  Clone ID: PAT_MRT3847_77882C.1.pep
KXHLFPGVQPSFXXLSPFGTXXVVPXXQXVSRVHPLXXXXNLFSXXFREFPFXTPLALVGXFSPKWEFGGSINVPVPIVDTPSSPLECVKPELRVLLFVYKTWSLGSKPISVVDLPLVFKFKTWKKFDHHLRPWEPW

SEQ ID NO: 261196 - protein, 44 aa, Glycine max
  Clone ID: PAT_MRT3847_77883C.1.pep
FLLVLPLICSIVINFNLFKASSLIVFKKKDKGRLLNSQLVNKFL

SEQ ID NO: 261197 - protein, 144 aa, Glycine max
  unsure (1)..(144): unsure at all Xaa locations
  Clone ID: PAT_MRT3847_77884C.1.pep
HQEGQTEXEGRXEXPXGQRXQXXRLXGTQNKPXEREKXDGXAXKKPLFFFKXXXGMXXQIYDPPPXMKKGKTEELRNTGTITKSLLPEYKGILSYVPPRRLNTSKLKKKSEDFQKKLVDTIHFMEILNLKDNVEKDTFFRKLQN

SEQ ID NO: 261198 - protein, 48 aa, Glycine max
  Clone ID: PAT_MRT3847_77885C.1.pep
ETHCLRSDLIPTPMLKSKVFSRSPQRVKHYHSPCLWLAHREILYPLRD

SEQ ID NO: 261199 - protein, 143 aa, Glycine max
  Clone ID: PAT_MRT3847_77886C.1.pep
MGSVCSAEKNKNKEVGGKTLGKKLKKLKSIAKGKGDCYSNSRTSDRGRKQKERNSGFSSEFNLSNPSRKEGKEDFQRGSFWGRASERAVEVLDTLGSSVPKLSNSNGFGFGSGMAPRGNRISILAFEVANTINKGAILFQSLS

SEQ ID NO: 261200 - protein, 71 aa, Glycine max
  unsure (1)..(71): unsure at all Xaa locations
  Clone ID: PAT_MRT3847_77887C.1.pep
SDSNIIFPSMAGTGSVILFRRLVSIEVFLATHYMPDSLVRFMPNARLWVLSTLLQQIFFFTHGXXXRSAQL

SEQ ID NO: 261201 - protein, 93 aa, Glycine max
  unsure (1)..(93): unsure at all Xaa locations
  Clone ID: PAT_MRT3847_77888C.1.pep
MTACGTISSLLVGRDLHAQIISSNIHTIIVVRSTLVWYYCSCEEYSDAFVVLQXMPIKDVVSRTAITAGCTILRHDHDAQELLQEMMEEGVLP

SEQ ID NO: 261202 - protein, 91 aa, Glycine max
  Clone ID: PAT_MRT3847_77889C.1.pep
ITRYIIIQHELQIIPGGTFLQLVLLCIKSTTNTNSKIIYSTIPHRLQHHTHTPHQYLLLLLRLFYIVHLHTYNITYVPNHIVTGPWTVRSR

SEQ ID NO: 261203 - protein, 76 aa, Glycine max
  Clone ID: PAT_MRT3847_7788C.1.pep
RKQNQTRARHLAFIKPEPFSTTGKQKKKRGSLSQSPLKNLFKGGEKNYWDLKKLFWGGGKYPPNSLPQKPPKKNTL

SEQ ID NO: 261204 - protein, 153 aa, Glycine max
  Clone ID: PAT_MRT3847_77890C.1.pep
NPWLYICTLHSLYMPANHLTEDLPSILHNLSSGCVRHSLQDLVLSFNQITGSLPDLSVFSSLKILVLDMNQLSGNIPEGIRLPIHLESLSIQSNTLEGGIPKSFGNACALRSLYMSGNNLNKELSVIIHQLSGCARFSLQELNIRGNQINEKF

SEQ ID NO: 261205 - protein, 76 aa, Glycine max
  Clone ID: PAT_MRT3847_77891C.1.pep
GRRIMANGGRFGGDDGYEGRWGGDYVCGFVVLTSWSLGVLRDWLSRPRAGLPLWSFILPLRLSTSLGGSSLHTSTR

SEQ ID NO: 261206 - protein, 311 aa, Glycine max
  Clone ID: PAT_MRT3847_77892C.1.pep
ERRKSIWSPVTDPRSGFNRESRTFHSLKPPLRLPPPNAAVSAAAFALFLRRNSQFPDSSTAFIDSATGHRLSYGELLHRAKTLASNLATILKLTKGDTALVLSPNILQETDEAFKAKFPNVLVMQGYGLTESAVTRTTPEEANQVGATGKLIPNIEAKIVNPETGEAMFPGYSGDPKATSATLVDGWLRTGDLCYFDSKGFLYVVDRLKELIKYKGYQVAPAELEELLLSHSEINDAAVIPYPDEVAGQVPMAFVVRQPQSSLGAAEVIDFVAKQVSPYKKIRRVAFVNSIPKNAAGKILRKDLKLALSRL

SEQ ID NO: 261207 - protein, 457 aa, Glycine max
  unsure (1)..(457): unsure at all Xaa locations
  Clone ID: PAT_MRT3847_77893C.1.pep
MRLYGDQWRGPHLPPVGGIPSILGVGXMGSEXAPPSGLSFIDAYTGKELNSLSLAHTVAQVIPLPYTDSTEQRLHLIIDTNQHAYLYPRTPEAIGILQREFSNVYWYSVDADNGVIRGHALKSNCIHKVVDEYCFDFRDLWSIVFPSESEKIIATVTRKSNEVVHTQAKVMTDHDVMYKYVSKNVLFVANAAPKARGEIGTATPEEALLVIYIIDTVTGRVLHRMAHHGCQGPVHAVFSENWVVYHYFNLRAHRYEMSVVEVYDQSRADNKDVWKFVLGKHNLTSPISSYYRAEVVTKSQSYFFTHSVKAIEVTSTAKGITSKQLLIGTIGDQVLALDKRFLDPRRTLNPSQAEKEEGIIPLTDSLPIISQSYITHSLKVEGLRGIVTVPAKLESTSLVFAYGVDLFFTQIAPSRTYDSLTEDFSYALLLLTIVALVAAIFVTWVLSQRKDLQEKWR

SEQ ID NO: 261208 - protein, 77 aa, Glycine max
  Clone ID: PAT_MRT3847_77894C.1.pep
MEPPMEHPMGPPMIPLAACNNPPSRQAVKFITAASIGITLLRLSGLSLTGTVISLIIATPLLVIFSPIRVPAACVLF

SEQ ID NO: 261209 - protein, 808 aa, Glycine max
  Clone ID: PAT_MRT3847_77895C.1.pep
MTASTSSRAVCQVEDCRADLSNAKDYHRRHKVCDMHSKATQELVGNVMQRFCQQCSRFHVLQEFDEGKRSCRRRLAGHNKRRRKTLPDATVVNGGSLNEEKGSSYLLMSLLRILSNMHSNGSDNMRNQDVLSHLLRNLASLTGTINGRNIVSLLEGSQDLVKAGTSGAAQNVPNTNSDGPEPSRPLDSSIKMDDGLIHRDPPESMVQRETTPANDMAKKCIASGSDGVGSLKSPSVPQSSNVLLSRDGLPPQSVAAQTTVGRIGIMLRTRGILVLLCLQGMGLLIILNWLSHSPTEIESYIRPGCIILTIYLRLENSAWEELCYNLESSLRKLAAPNDSFWRTGWIYTRVQHSVAFLYNGQVVLDAPLRLKSPQSCQILCVKPLAVSASSCAQFVLKGFNFLLSNSRLLCALEGKYLVQDSCYDLIDSADAVNGHQELQHLSFSCHVPNVTGRGFIEVEDNGLSSCSFPFIVAEQEICLEICKLENVIEAAETADDNQIKTNLMEEKTQALYFIQEMGWLLHRSRVKVRLGPMAPVQDRFHFNRFIWLVGFSMDHDWCAVMKKLLNIIFEGTVDTGDHASVELALLEMGLLHKAVKRNCRPMVEILLKFVPKQVNKSPDRFIFRPDTVGPVGLTPLHVAASMHGSENVLDALTDDPGMVGTEAWKSAQDATGLTPYDYASMRGYYSYIQLVQSKTSNTCKSQHVLDIPGTLVDSNTKQKQSDRHRSSKVSSLQTEKIETTAMPRRCGLCQQKLAYGGMRRALVYRPAMLSMVAIAAVCVCVALLFKSSPKVYYVFQPFSWESLEYGSI

SEQ ID NO: 261210 - protein, 198 aa, Glycine max
  Clone ID: PAT_MRT3847_77896C.1.pep
MDSLPPQSIAAQTTVGRIGLSNIDLNNVYDDVQDYVENTRNSCPPLPSGNGSLDHPLWIQCDSLKSSPPQTSRNSDSTSTQSPSSSSGEAQSRTDRIVFKLFGKAPNDFPHALRSQILNWLSHSPTEIESYIRPGCIILTIYLRLENSAWEELCYNLESSLRKLAAPNDSFWRTGWIYTRVQHSVAFLYNGQVVLDAP

SEQ ID NO: 261211 - protein, 60 aa, Glycine max
  Clone ID: PAT_MRT3847_77897C.1.pep
KCSKSYKLNIFVFCSCKSLTNLTSLFNYIILLLKISLEILAITCPSVVFSPVRTRGRTRG

SEQ ID NO: 261212 - protein, 77 aa, Glycine max
  unsure (1)..(77): unsure at all Xaa locations
  Clone ID: PAT_MRT3847_77898C.1.pep
QLFYPTYDHHVLYNKSVEEDVSHQTTIDLRXVILPVVSSYTYERNEVYLTLAKNEATLLHKKISNQAFYDDNFIMIF

SEQ ID NO: 261213 - protein, 55 aa, Glycine max
  Clone ID: PAT_MRT3847_77899C.1.pep
DRAHWNHNFDFINKVFYFFQRITLGHLFLKIYLNRGWWIYNHGEVNGKEDLIGLT

SEQ ID NO: 261214 - protein, 214 aa, Glycine max
  Clone ID: PAT_MRT3847_7789C.1.pep
KKRVQFLAFVAAIIALSITAEKCRQLVGEKASSQSGKFTFLNCFDMSSGTLACSVKESVKLYFYNIRAAHVEGARHDALQSALVDALKQGMSQSASAKYAKKEGDKAAKLASRKARRIIGPIISSGWDFFEAVYYGGTLTEGFLRGSGTLFGTYAGGFLGEQRLGRFGYLVGSHLGSWIGGRIGLMLYDVANGVHFLLHSVQSLGSDPSSRNLG

SEQ ID NO: 261215 - protein, 113 aa, Glycine max
  Clone ID: PAT_MRT3847_778C.1.pep
PFWLYKSMDKLTSHVAYDSISYSLDSLSFSGLVAIQDHQPKLPSPNRAKDYQVSKHDSEFEFTSTKANLNSAGRVGERVAADQLISNGRLQPQALAIQTNQSLIRNLPSSSSS

SEQ ID NO: 261216 - protein, 41 aa, Glycine max
  Clone ID: PAT_MRT3847_77900C.1.pep
IHKVMLFWVTFKGYLPKIDIISQRVLWFLTKNKISCLTEII

SEQ ID NO: 261217 - protein, 39 aa, Glycine max
  Clone ID: PAT_MRT3847_77901C.1.pep
IRQGFIRIHFGEGCNPSSNGPEFISGLEELIIGRRFWRT

SEQ ID NO: 261218 - protein, 46 aa, Glycine max
  Clone ID: PAT_MRT3847_77902C.1.pep
TIHTICCLFTLLRGEFVPLCHYGIRGIIFLCRPYGPHTYEKDRSWE

SEQ ID NO: 261219 - protein, 70 aa, Glycine max
  Clone ID: PAT_MRT3847_77903C.1.pep
CGPAGSSVYNRPPVFVRGYLWICSSASSCVFGARSLLVLWLGFLARNRRGSFAVALRLRLVLGRFVGAAH

SEQ ID NO: 261220 - protein, 52 aa, Glycine max
  Clone ID: PAT_MRT3847_77904C.1.pep
AKANSMFLGYAAIISIVTRTQGAICQWKLANPNQSLIAMIKVRRLLNLIYNT

SEQ ID NO: 261221 - protein, 109 aa, Glycine max
  Clone ID: PAT_MRT3847_77905C.1.pep
QFLERAYNNAKTILTTHNKELHALANALLEHETLSGTQIKALLAQVRSQMQQQQPQTLEAQNSSQSNTVPPSSSNPASAAAAAAAAAATTAAATATAAAAKAKSAPVGS

SEQ ID NO: 261222 - protein, 96 aa, Glycine max
  Clone ID: PAT_MRT3847_77906C.1.pep
PMNRWLVGWLNWNGMGERPDQMEKGAGAKEPEFPRFGFWHPFLASSGFWSFTSILGALEEIIAIERLGIIIKVILVTQPYQQHLVLCRYEPPPTHQ

SEQ ID NO: 261223 - protein, 93 aa, Glycine max
  Clone ID: PAT_MRT3847_77907C.1.pep
FTHSHTILANWYFPPSSAIIMSYKRRERMGRRFRHFSTLAHKFPNKKVRRFLTARIKISNSMLFHIIGYSLPVTFTSKYTERLSRPHRNVIRE

SEQ ID NO: 261224 - protein, 75 aa, Glycine max
  Clone ID: PAT_MRT3847_77908C.1.pep
EEYTLPSYIPINKINIIIPDCLFLKDNHMRVFPFKTFVKPKTYFFFKGPNGYKWQKTCWAKKKKTHPHINPGVTL

SEQ ID NO: 261225 - protein, 92 aa, Glycine max
  unsure (1)..(92): unsure at all Xaa locations
  Clone ID: PAT_MRT3847_77909C.1.pep
MRIAMEESSSRAAQAISSISALMELHGATALDLNRLSRDSENITIYYLSEKGSLVRTDVEKLAXSLTLRLTTLMMSGVRDAALIRYIIRGIG

SEQ ID NO: 261226 - protein, 88 aa, Glycine max
  unsure (1)..(88): unsure at all Xaa locations
  Clone ID: PAT_MRT3847_7790C.1.pep
HASGFLFVSSLCIAWVLLKRCSLVCVDNLDSPLTARDLEDEFRVYGAISNAXIARLPPGYAFIDYDDRIHSHDALLESDGMSRTIMSL

SEQ ID NO: 261227 - protein, 74 aa, Glycine max
  unsure (1)..(74): unsure at all Xaa locations
  Clone ID: PAT_MRT3847_77910C.1.pep
WCRSSILRFLAXAXXXEDVXEAXTPLWMLYSARVRXSSSCLPANIRRCXLRRXXLXVMXLXNXXXRXVXXXLYX

SEQ ID NO: 261228 - protein, 108 aa, Glycine max
  unsure (1)..(108): unsure at all Xaa locations
  Clone ID: PAT_MRT3847_77911C.1.pep
IDQLESCRNQIVCSERSQIFTADVVTMISSFYHRLSGLXTRLVPRQMRTHSILKALEKIYRTLQSWDAILXSYDNIXQAGTLMGEGPHYYVKNYFGSIEQLRKNIVFF

SEQ ID NO: 261229 - protein, 77 aa, Glycine max
  Clone ID: PAT_MRT3847_77912C.1.pep
RLDCTFFCRDLRFLYQLQSNSNSCWVSFWILFKNPFVIMDGISRQVRKILGLVPKQHRVRTIVGSLHLRTLCYQFKT

SEQ ID NO: 261230 - protein, 40 aa, Glycine max
  unsure (1)..(40): unsure at all Xaa locations
  Clone ID: PAT_MRT3847_77913C.1.pep
PPNLNCRLERKGXTSRXXXWFKEVLGXXWKELXRXRKXXP

SEQ ID NO: 261231 - protein, 82 aa, Glycine max
  Clone ID: PAT_MRT3847_77914C.1.pep
NPSLWPKFPKTTYTCPQNMGLFPPKARDLPHNSPIVSGHGGIPAALNLLDKILGPWEPNGPAYALCLGSYTCGDVSCKLLGV

SEQ ID NO: 261232 - protein, 42 aa, Glycine max
  Clone ID: PAT_MRT3847_77915C.1.pep
EGHHGEPLLYHEVCHVFGLAKEPQVAWFHSNVIGLYSGAYLT

SEQ ID NO: 261233 - protein, 35 aa, Glycine max
  unsure (1)..(35): unsure at all Xaa locations
  Clone ID: PAT_MRT3847_77916C.1.pep
RCXHNSPQYVNLQSQGWIHVGLVTQSFCSKALAFV

SEQ ID NO: 261234 - protein, 48 aa, Glycine max
  Clone ID: PAT_MRT3847_77917C.1.pep
DIRCVINKWGPEAIEISYLQVQNEVSISLKSHFKNHPETIFVPVPGNC

SEQ ID NO: 261235 - protein, 395 aa, Glycine max
  unsure (1)..(395): unsure at all Xaa locations
  Clone ID: PAT_MRT3847_77918C.1.pep
MPLFGIFQIPSFMDIITDLAMFITPLWIAVIVGVVVGWAWKPKWAFHPKDALLKFRSPRPPNPQNDTAFTYSATSSSAREKDASGSPVVTEDDLLHLWKLVEEKDGGRAWIQMMDRSTPTMTYQAWRRDPESGPPQYRSRTVFEDASPELVRDFFWDDDFRLKWDDMLIHAATINECGLTRRMMVHWVRKLNMFWSDRENIIGSGIWDEVRIYYCVTNGLPCHAMAVSTRSNGDDLVNSKACIPTVKSRKXDDQLTSCKVYIFRHKDMAIHWEITKCRCRQGMWGAVKKFDPXIREHIEKQRVSGTPLSPCARAAKINTKXVTMDYVRSLENTTSDLLETENQDSSDKPGGRNIPKLLIVGGAIALACTLDQGLLTKAVIFGVARRFAKMGGRRL

SEQ ID NO: 261236 - protein, 157 aa, Glycine max
  Clone ID: PAT_MRT3847_77919C.1.pep
TYNNIFSQLSAIVDGEPPDLPEEGYSDAARNFVRGCLNKIPNLRPTYAMLLQHAWLAPLAKPDTITEEDEEEVEAAHAADGGEAASDQGPAQPIEAVFDKEVADWVKGAIEKRRRGQMKGVEKPALHAAPLDAVQSPSATATKNFETEAPAEAEAAA

SEQ ID NO: 261237 - protein, 40 aa, Glycine max
  Clone ID: PAT_MRT3847_7791C.1.pep
TDAIKDVHNSWIFMTHIHAYILNSVLSYLLFLALCKACNT

SEQ ID NO: 261238 - protein, 252 aa, Glycine max
  unsure (1)..(252): unsure at all Xaa locations
  Clone ID: PAT_MRT3847_77920C.1.pep
QYRSRTVFEDASPELVRDFFWDDEFRLKWDDMLIHASTIQECVLTGTMMVHWVRKXDREYIIGRRIWDAGRIYYCVTKGVPCPSMPRHNKPKRVDLFYSSWCIRAVKSRKDDQLTSCEVLLFHHEDMGIPWEIAKLGVRQGMWGAVKKFDPGLRTYEKQRVSGTPLSPCARAAKINTKVTMDYVRSLENTTSDLLETENQDSSDKPGGRNIPKLLIVGGAIALACTLDQGLLTKAVIFGVARRFAKMGGRRL

SEQ ID NO: 261239 - protein, 92 aa, Glycine max
  Clone ID: PAT_MRT3847_77921C.1.pep
HIIGSINPFPVNMECFRHIILEEAKTSLSPHESILNPSSYSILCCFAIKLELFYFPCLYSLLSLLCLEKKSGKQNTILLWTLLMCKEYLCIS

SEQ ID NO: 261240 - protein, 196 aa, Glycine max
  Clone ID: PAT_MRT3847_77922C.1.pep
MSTARFIKCVTVGDGAVGKTCMLISYTSNTFPTDYVPTVFDNFSANVVIDGSTVNLGLWDTAGQEDYNRLRPLSYRGADVFLLAFSLLSRASYENISKKWIPELRHYAPIVPIVLVGTKLDLREDRQYLIDHPAATPITTAQGEELKKEIGAAVYIECSSKTQQNVKAVFDAAIKVVLQPSKPKKKRKKNRTCVFL

SEQ ID NO: 261241 - protein, 69 aa, Glycine max
  Clone ID: PAT_MRT3847_77923C.1.pep
MADWGPVVIAVVLFVLLSPGLLFQLPGRSRVVEFGNMQTSAISILVHTIIFFGLITIFLIAIGVHIYTG

SEQ ID NO: 261242 - protein, 62 aa, Glycine max
  Clone ID: PAT_MRT3847_77924C.1.pep
GFKCFLSWRLNCSNEKFAHRMRYAPIDMEEMEMAPSFHMNSLSQPKSDESDFDYEATDEDDE

SEQ ID NO: 261243 - protein, 78 aa, Glycine max
  unsure (1)..(78): unsure at all Xaa locations
  Clone ID: PAT_MRT3847_77925C.1.pep
XTXFVKEKXXTKMNSTMAXEVLPTAAAXTIXXXKXSXIKFAAXHRDPXXXLXXNRGKXXRRXKKXDGGAXXFQNXRXQ

SEQ ID NO: 261244 - protein, 35 aa, Glycine max
  Clone ID: PAT_MRT3847_77926C.1.pep
LTSPSAKLIPLMHRALEASSAYTLIVTYTRAMKSS

SEQ ID NO: 261245 - protein, 66 aa, Glycine max
  Clone ID: PAT_MRT3847_77927C.1.pep
IFFYLVLFVLDRQYLNEASWNWRLMKIIMTVCHVYDKEQNYVAFDELAPEDSRPITFLKETMPDYA

SEQ ID NO: 261246 - protein, 501 aa, Glycine max
  unsure (1)..(501): unsure at all Xaa locations
  Clone ID: PAT_MRT3847_77928C.1.pep
ACPRVRDDQTHPLLTRRHHTPDSSAVVFTATSDDIAPIGGAGDFAREFFAESKKLWYLAGPAIFTSVCQYSLGGVTQVFSGHVNTLALAAVSVENSVIAGFSLGITFGMGSALETLCGQAYGAGQVHMLGVYMQRSWVILNATAILLSLLYIFAGHMLRAIGQTEAISAAAGEFALWMIPQLFAYAVNYPAQKFLQAQSRIMVMAWIAAAALVLHTVFSWLLMLELGWGLVGAAVVLNASWWFIDLAQLXYIMSGACGEAXWSGFTFKAFHNLWGFVRLSLASTVMLCLEVWYFMALVLFAGYLKNAEVSVDALSICMNILGWTIMVSFGMNAAVSVRVSNELGASHPRTAKFSLLVAMITSTLIGVMLSMVLIIFRNHYPFFFSNDSEVRAMVVELTPMLALCIVINNVQPVLSGVAVGAGWQALVAYVNIACYYLFGIPLGLVLGYKLDMGVMGIWSGMLSGTILQTCVLFFLVYRTDWNKEASLAEDRIKQWGGHEDS

SEQ ID NO: 261247 - protein, 63 aa, Glycine max
  unsure (1)..(63): unsure at all Xaa locations
  Clone ID: PAT_MRT3847_77929C.1.pep
DRREYRRFLLFYFDVEGNFLKVFYGCWIGTLLACYMEFGLSCSCCLLVWLVVQLLAXGFILFG

SEQ ID NO: 261248 - protein, 114 aa, Glycine max
  unsure (1)..(114): unsure at all Xaa locations
  Clone ID: PAT_MRT3847_7792C.1.pep
LWSCCGENXIIIFPTNHKERLDPALLRPGRMDMHIHLSYCTFSAFKQLVLNYLGISQHKLFEQIEGLLGEVNVTPAEVAGELTKSSDTRDPLQDLVNFLHSKKMVESDTIIDQC

SEQ ID NO: 261249 - protein, 48 aa, Glycine max
  Clone ID: PAT_MRT3847_77930C.1.pep
RAFMLWELNSTVPTSYYHWMPFLVLHIAILSCNKNKQYYYVHPTFTIP

SEQ ID NO: 261250 - protein, 83 aa, Glycine max
  Clone ID: PAT_MRT3847_77931C.1.pep
KLLFRLNFFMSPHLATPLVVYKLILSHGRSLIHFTSLILLVFFFFKCLFKSLSKLSCLAKMARNYILVCSHSFYDAPFLFCPP

SEQ ID NO: 261251 - protein, 170 aa, Glycine max
  Clone ID: PAT_MRT3847_77932C.1.pep
GTWEKGKFDKAFYPLCRLRNHKIQATRDMYYAYKLLEVKQAERPGKSLWKEFFTGRGNRGAAQSSFFVMFMQQFCGGRVLPLAHSLFTLHRVFNRPQVNVIAYYSSSIFKQAGFSRSEALLTSMGTGITNFLFAIPAIYTIDTLGRRNLLLTTFPLMGLCLLWCGMSFYL

SEQ ID NO: 261252 - protein, 232 aa, Glycine max
  Clone ID: PAT_MRT3847_77933C.1.pep
MEQYWSGSAINENKGMVDNLHRYGVITSRKVAEVMETIDRALFVPSGGGLQPYVDSPMPIGYNATISAPHMHATCLQLLEKNLQPGMRVLDVGSGTGYLTACFALMVGPQGRAIGVEHIPELVSFSIENIQKSAAAAQLKDGSLSVHAGDGRQGWPEFAPYDAIHVGAAAPEIPQPLIDQLKPGGRMVIPVGNIFQDLKVVDKNSDGSISVRTETSVRYVPLTSREAQLRGY

SEQ ID NO: 261253 - protein, 325 aa, Glycine max
  Clone ID: PAT_MRT3847_77934C.1.pep
MTRACEEKSLKRKSEKKKKMRVQYHYYPFPSLAYGCSYCYAYATTKLKPTHSLSLTLSNHRRISASQPHSSTFSIITNLFFFQNPNFITGNTLFLRMQRFCSVSGLSKNKALVERLQRYGVITSSKVAEVMETVDRALFVPDGAAPYDDSPMAIGYNATISAPHMHAMCLQLLEENLQPGMHALDVGSGTGYLTACFALMVGPQGRAVGVEHIPELVSFSIENIQKSAAAAQLKDGSLSVHAGDGRQGWPEFAPYDAIHVGAAAPEIPQPLIDQLKPGGRMVIPVGNIFQDLKVVDKNSDGSISIRTETSVRYVPLTSKEAQLRG

SEQ ID NO: 261254 - protein, 155 aa, Glycine max
  Clone ID: PAT_MRT3847_77935C.1.pep
MASPERKESEEKLVVKMNEGLNLSKDDRDKISEMPDNILLHMMNFMDTREAVQTCVLSKRWNNLWKRLTSLLFNSSKFGSVVKIINFLYMFLSDRDDSISLSTVYLDLSQRPRDSTSCLGFLITHAYDWECLNRLMKYAVVAQLSAPFNQNTFLL

SEQ ID NO: 261255 - protein, 61 aa, Glycine max
  Clone ID: PAT_MRT3847_77936C.1.pep
LSSLSRPSARFLEAAARLVAQQACSPVFTHRARHPTSIIASALAVSTCVSRQSVVALSMSV

SEQ ID NO: 261256 - protein, 57 aa, Glycine max
  Clone ID: PAT_MRT3847_77937C.1.pep
VSLAKRRWANSPLNLGSKLTFGCLLLGFPSMLGSPKFKDPGQTSILRVIISFLAPPD

SEQ ID NO: 261257 - protein, 76 aa, Glycine max
  Clone ID: PAT_MRT3847_77938C.1.pep
IKLNMLLLHGYVYNLIIQCKDGLIQITVLTHTHQAQTHLQQNHHFYTTHIIIYLRIHPIYPTLILHNHHHTLIPYY

SEQ ID NO: 261258 - protein, 93 aa, Glycine max
  Clone ID: PAT_MRT3847_77939C.1.pep
PFSKSTLKSRRFNPGGVAPNKVVFHNLSTLSAERTALFSLLLLFLSSRAVVISSEKVPYLELVDFLSYLVFSCKINMLLRITSRQVPTSVTRA

SEQ ID NO: 261259 - protein, 41 aa, Glycine max
  Clone ID: PAT_MRT3847_7793C.1.pep
NHEKGIIHNHGMENDERSIEDFKPKPRPLPIRCLHTSPPHR

SEQ ID NO: 261260 - protein, 63 aa, Glycine max
  unsure (1)..(63): unsure at all Xaa locations
  Clone ID: PAT_MRT3847_77940C.1.pep
PTRPLGVRILFYKKDTLYSNWAPXTTSFRVLYYLSSLIIHTLIFSSLPYPFPTSYPCSSSLAF

SEQ ID NO: 261261 - protein, 67 aa, Glycine max
  Clone ID: PAT_MRT3847_77941C.1.pep
LRSFLLALLSQFHVFNLPLCLRPMSPLLPFLASPNNSSSFFVIAFAFVGGCFKFLNYNPKWGLPWVL

SEQ ID NO: 261262 - protein, 41 aa, Glycine max
  Clone ID: PAT_MRT3847_77942C.1.pep
GSRKHEHTRYACFSTGRTIFNGRLKCLRLLFIHGHNKDIML

SEQ ID NO: 261263 - protein, 71 aa, Glycine max
  Clone ID: PAT_MRT3847_77943C.1.pep
VVGVEVNVPLGYVHLQAGDFRVPTTRSRYRVVLVPDFTGHQLYFLCSFISRNMLRSNLGSGVPGSVFACSC

SEQ ID NO: 261264 - protein, 242 aa, Glycine max
  Clone ID: PAT_MRT3847_77944C.1.pep
SNSSPPIQQHRSVSWYCCFFCLKPKAIRPRCFSLLPHTRKRLSENQNFEAESPKGHRSYKSPSHVRDHIIAERKRREKLSQSLIALAALIPGLKKMDKASVLGDAIKYVKELQERMRMLEEEDKNRDVESVVMVKKQRLSCCDDGSASHEDEENSERLPRVEARVLEKDVLLRIHCQKQKGLLLNILVEIQNLHLFVVNSSVLPFGDSVLDITIVAQMGTGYNLTINDLVKNLRVATLKSMS

SEQ ID NO: 261265 - protein, 62 aa, Glycine max
  unsure (1)..(62): unsure at all Xaa locations
  Clone ID: PAT_MRT3847_77945C.1.pep
TSMKLGPPNYTLILVTLGXNGIRYYTKNFRTSANSFHVNTVVTSDARDSFISALLYKIVCKP

SEQ ID NO: 261266 - protein, 49 aa, Glycine max
  Clone ID: PAT_MRT3847_77946C.1.pep
CIIRAYQCISTKTIDVYQETHLSSDHIEYLLLVPRLHKFLDLSISNPPF

SEQ ID NO: 261267 - protein, 62 aa, Glycine max
  Clone ID: PAT_MRT3847_77947C.1.pep
ITWISDLMTVQLTTFYHNECIKKKILILLLLDKSSQLMMVDSKWLVIYYILIYEYNYEQNQI

SEQ ID NO: 261268 - protein, 94 aa, Glycine max
  unsure (1)..(94): unsure at all Xaa locations
  Clone ID: PAT_MRT3847_77948C.1.pep
PXLGIDXFVNDTVCXXTRTSRLRYLSATXLDRSXXGHFXLEIGXEDEMXLPXXNEIQQQNWEFXXGSSSXWXGVSGGGNRNLPIEXKXXLNNWE

SEQ ID NO: 261269 - protein, 272 aa, Glycine max
  Clone ID: PAT_MRT3847_77949C.1.pep
DDLDWSCKLAVEISWISTHKRHSSHASYAIKNYRVLVEQLERVNVSQMDSDAQIAFWINVHNALVMHAYLAYGIPQGSLRRLALFHKAAYNIGGHIVSANAIEQMIFCFRTPRIGRWLESIVSAALRKKSGEERQLLSSKLGLTNSQPLVCFALCTGALSDPVLKVYSASNISEELNIAKREFLQANVIVKKSRKVFLPKLVERFSREASISVDDLFGWVMESVDRKLRDSMQKCLNPKSSQKPSQIIEWLPYSSRFRYVFSKDVIDKPWWV

SEQ ID NO: 261270 - protein, 289 aa, Glycine max
  unsure (1)..(289): unsure at all Xaa locations
  Clone ID: PAT_MRT3847_7794C.1.pep
MEGVLLPVCPSPSSCSATPKPRIPIPLRSSFPSPLLHNRFFSQNAAFSLRNSLRTSTFALAQHEAPVLGKPDNNNNSSPYLPKIDKTGRFCSPRAARELALSIIYAACLEGMDPVRLFEKRMNARREAGYKFNEEKLLEYNHMSFGGPPVTVGSDEEANELLRHIEEESAIEAEVLTAPSKLVYNKLILRFTKKLLVAVRDTWDSHVLVINKIAPQNWKNGPAASILXLSRPHLDMYEXEVLDTRHLIVIKDLVKLXKRFWARAAPRIINGCLRTFFRELELEASNNRV

SEQ ID NO: 261271 - protein, 122 aa, Glycine max
  unsure (1)..(122): unsure at all Xaa locations
  Clone ID: PAT_MRT3847_77950C.1.pep
HSNRPQDREGGSPARTKAGTTTTNPNPRTDARSPEXAKRTGPQGDTTRDTGRTATPTQDAQDTNERPSTTQEREPRTDGGTKPQNPTGPNRRPGKQTGPQSTPRSAKRPPPTKGGGARANNA

SEQ ID NO: 261272 - protein, 61 aa, Glycine max
  unsure (1)..(61): unsure at all Xaa locations
  Clone ID: PAT_MRT3847_77951C.1.pep
KLEISKLVSGTLYLGNIKIVSKPFFGLRGTNGFXASFWFVPKINPSVKIALFQAPIKKNGG

SEQ ID NO: 261273 - protein, 649 aa, Glycine max
  unsure (1)..(649): unsure at all Xaa locations
  Clone ID: PAT_MRT3847_77952C.1.pep
GWHPFQHPLDPLTKQEISLVQTIVQNKYPSSSNRLSFHYIGLDEPKKDTILKWKSIKPTVITVPHKALAIVIINSQTHKILIDLKAKHIVSNNIHSKNGFPTLSINKQVITIKLPLKYSPFIKSVNKRRLNLSKVIYSTFTMGWFGETKDRRTVRVECFMKESSPNIXIKPISKLTIIINLKLIKIIQYHNDNIIPVPTTNNTKYHFSHQNPPFNPRQHSLATHQPQGPGFQINGHSISWANWKFHIGFDPRAGIVISLASIYDLEKHKSRRVLYKGYISELFVPYQDPTDDFYYKTFFDAGEFGFGLSTVSLVPNRDCPSNAQFLDTYVHAADGTPLLIKNAICVFEQYGSIMWRHTETGIPNESFEETRTEVNLVVRTVVTVGNYDNIIDWEFKTSGSIKPSIALSGILEIKGVDIKHKSEIKSDQHGILVSANSIGVYHDHFYIYHLDLDIDGVANSFEKTSLKTVRVTDGSSKRKSYWTTEVETAKTENDAKIILGLSPGELSVVNPNKKTSVGNDVGYRLIPAIPAHPLLTDDDYPQIRGAFTNFNVWVTPYNRTEKWAGGLYVDHSHGDDTLAVWTKKNRDINNKDIVLWHVVGIHHVPAQEDFPIMPLLSTAFELRPTNFFERNPVLKTLSPPDVQWPGCPK

SEQ ID NO: 261274 - protein, 196 aa, Glycine max
  Clone ID: PAT_MRT3847_77953C.1.pep
MFPSIINSNQSRDQQQQKQKGEWLAGSFKAENFIPGLVIGFIFGLLLDLSKPGRNHLSKKICSSARPQQQQISVSSNADQELKMVLVVRQDLKMKSGKIASQCAHAATGMYAELMQSDRYLLRRWEQCGQPKIVVTCRNQQEMNKLAEAAESIGLPTFVVADAGRTQVSAGSKTVLAVGPGPKSSVDSVTGRLPLL

SEQ ID NO: 261275 - protein, 50 aa, Glycine max
  Clone ID: PAT_MRT3847_77954C.1.pep
NSCAKQTHLEYLGEAGVLKFIPFLPKIKTPDKFPTASLGKRTATVMGKEP

SEQ ID NO: 261276 - protein, 61 aa, Glycine max
  Clone ID: PAT_MRT3847_77955C.1.pep
GGETLKPGLPKTSYCKTRNPLNFPGIYTLRPLKKSLVGPNPNFPTFIGKIPPQVFSQKGNP

SEQ ID NO: 261277 - protein, 76 aa, Glycine max
  Clone ID: PAT_MRT3847_77956C.1.pep
NHLQATCGKTTCVVINGIVIHIQNHNIEMKTCKFVKQTVSLDTRIDDGTGQHRTERDWCISISPTRQRTRGLIRGS

SEQ ID NO: 261278 - protein, 62 aa, Glycine max
  Clone ID: PAT_MRT3847_77957C.1.pep
REPQNQTLSQGNNPPPVPPAVCFNGAVSVIGGHISRFFGRISGGLKIIRRGINRLFFFFSLF

SEQ ID NO: 261279 - protein, 41 aa, Glycine max
  Clone ID: PAT_MRT3847_77958C.1.pep
KHYVNTRLQINTKVRPKFLIIYIILDSLRYIISEIDLTGVC

SEQ ID NO: 261280 - protein, 91 aa, Glycine max
  Clone ID: PAT_MRT3847_77959C.1.pep
TSLPLALSLPPFSSREFLLLFYITSTQDFDFYLRVYTNYLANCKKGFGGYERTLGISLKAEFDLSEVSKALLTCSCIQTGPNAVNSSFCTR

SEQ ID NO: 261281 - protein, 126 aa, Glycine max
  Clone ID: PAT_MRT3847_7795C.1.pep
RGGTKKTPFSLFFLERENFKPPGPGGVFFLKGETNFLKPHRGGEIFFFKIFLKKGFFAHNPASVIFFYPQFFFHGAKKAGTFLTKFFVLKSCPPKKRGPQKKAFFPKKCQKRLFPQPPPIWGRTFW

SEQ ID NO: 261282 - protein, 57 aa, Glycine max
  Clone ID: PAT_MRT3847_77960C.1.pep
IISCQCILRMELILHISYLYLALAQAFHQMGCRQVGKLKTKTLQDHITRSHHVINTT

SEQ ID NO: 261283 - protein, 56 aa, Glycine max
  Clone ID: PAT_MRT3847_77961C.1.pep
MADRQEPCTGASINCTGCMESDPTPGKWVTRLVGKDAQPLENVKLVYFPGLTGHEP

SEQ ID NO: 261284 - protein, 78 aa, Glycine max
  unsure (1)..(78): unsure at all Xaa locations
  Clone ID: PAT_MRT3847_77962C.1.pep
CLSXGKTXXXXXXXPXXHXXGXSTFXXXTXLHEGCXXXINXAAPLXKXAXVXXGXCTXXGAXVNXXXPXPNXTXXXFG

SEQ ID NO: 261285 - protein, 194 aa, Glycine max
  Clone ID: PAT_MRT3847_77963C.1.pep
KLAMWDFGQCDAKKCTGRKLSRLGMLKELRVSNGFGGIVLSPAGNQCVSREDYSLIQKKGLAVVGLVAANPVNYGRPCQLSCVEALSAALTICGEEKTANLLLDKFKWGHAFMSLNGELLRAYSKCQNSAEIISVQNAWLSQESQIPRAPTDSEVTTPESEDKIQNSSDSEDGLPPLEKNMNHLSIVNSDEESE

SEQ ID NO: 261286 - protein, 116 aa, Glycine max
  unsure (1)..(116): unsure at all Xaa locations
  Clone ID: PAT_MRT3847_77964C.1.pep
MGNNRQRRLRTHRAQSSRHHHQQLLLEDDSQSSLPAQNGEGEEEEEELTEPKIKLAMWDFGQCDAKKCTGRKLSRLGMLKXPAGNQCVSREDYSLIHKKGLAGVDXSWARLDDVPF

SEQ ID NO: 261287 - protein, 279 aa, Glycine max
  Clone ID: PAT_MRT3847_77965C.1.pep
MLFLTAENGEGEEEEEELTEPKIKLAMWELRVSNGFGGIVLSPAGNQCVSREDYSLIQKKGLAVVDCSWARLDDVPFVRLRCTAPRLLPWLVAANPVNYGRPCQLSCVEALSAALTICGEEKTANLLLDKFKWGHAFMSLNGEFKGFVRKYKFIFNCFTSIPDTELLRAYSKCQNSAEIISVQNAWLSQESQIPRAPTDSEVFLAVLPSTLVAALVQVCKRLLACDLGCPFWKKPPCKKVTTPESEDKIQNSSDSEDGLPPLEKNMNHLSIVNSDEESE

SEQ ID NO: 261288 - protein, 68 aa, Glycine max
  Clone ID: PAT_MRT3847_77966C.1.pep
AASYCKKFILFPRLEAIFLSYTYNIDEYTQITIFLIYNAMLTKFFLSKTLLVIGLPQGIQNPISMPMV

SEQ ID NO: 261289 - protein, 240 aa, Glycine max
  unsure (1)..(240): unsure at all Xaa locations
  Clone ID: PAT_MRT3847_77967C.1.pep
MGNNRQRRFRTHRAQSSRHHHQQLLLEDDSQSSLPDGEGEEEEEELTEPKIKLAMWDFGQCDAKRCTGRKLSRLGMLKELRVSNGFGGVVLSPAGNQCVSREDYSLIQKKGLAVVDCSWARLDDVPFMRLRFAAPRLLPWLVAANPVNYGRPCQLSCVEALSAALTICGEEKTANLLLDKFKWGHAFMSLNGELLRAYSKCQNSAEIIXSVQNAXXLSQESQIPRAPTDSEITTPESEDK

SEQ ID NO: 261290 - protein, 93 aa, Glycine max
  Clone ID: PAT_MRT3847_77968C.1.pep
KVALLERHSYHGLTITPPYYPVVQYSYPESPVKSYIHPSTKPYSTFPDLNASKSLPSTFIKKSDIDTWECVPYHKAPYYTNKTCCAIHNHQNC

SEQ ID NO: 261291 - protein, 49 aa, Glycine max
  Clone ID: PAT_MRT3847_77969C.1.pep
VPLLIFHWVWFSCYQSPCVKKPRQGANIVKGSEIWQCKPTMFCSLSDLS

SEQ ID NO: 261292 - protein, 70 aa, Glycine max
  Clone ID: PAT_MRT3847_7796C.1.pep
SPILVFQMNEIESTLLPFPPNVSSHSLHRYLQLCPETTVISDGVAPSTTQDKMAFIALVTPPTLDIGLLC

SEQ ID NO: 261293 - protein, 70 aa, Glycine max
  Clone ID: PAT_MRT3847_77970C.1.pep
FSGILIAVLLPVTEVLAVIFYKEKFQAEKGVSLLLSLWGMVSYFYGEIKHSKKMKMKNSDTEAELAQQYS

SEQ ID NO: 261294 - protein, 60 aa, Glycine max
  Clone ID: PAT_MRT3847_77971C.1.pep
SGTQSSSASLCTAHSVLFVSSSNGTQRCSTIIRNCTCLVSNAFVFRSNVSPPMNANHPSP

SEQ ID NO: 261295 - protein, 61 aa, Glycine max
  Clone ID: PAT_MRT3847_77972C.1.pep
FCNETLSLIFLLLNFLVLTICLNFQKKKGFLIKKIYVQIYNNYIRFSKKNESLKKIVKYKH

SEQ ID NO: 261296 - protein, 112 aa, Glycine max
  Clone ID: PAT_MRT3847_77973C.1.pep
PPNPPCKKPSTAWSGSNFSRANWWWKGATRTRVCITPSFPQWTSSSAFNPPPPRGLLTFLASGSRGGEGPTRSWVRGGFRPKRFSPRKKRETHIFLVGQNWIFPKADRPSLD

SEQ ID NO: 261297 - protein, 64 aa, Glycine max
  Clone ID: PAT_MRT3847_77974C.1.pep
RGFHHFWQGSFALQRASYNLVGRVFSMFPSLELKSVYFLGKILRKVPHFFGNSNGVLSGHVYVI

SEQ ID NO: 261298 - protein, 226 aa, Glycine max
  Clone ID: PAT_MRT3847_77975C.1.pep
MARKPFKFNEDVLEQLRNGTAKFEVVSSPVPSVAAPPNRNTSLFGIGNSSTVLFARIGSSFGGHSPAMKKLEHFSVQKVTGDGRCLFRALVKGMAYNKGTTLNQREERENADELRMAVKEAICENEGERKLYEEALIAITVDEPIKRYCQRIVRPDFWGGESELLVLSKLCKQPIIVYIPEHEHRSGGFGSGFIPIAEYGSDFRKGSSRKAVRLLYSGKNHYDLLV

SEQ ID NO: 261299 - protein, 133 aa, Glycine max
  Clone ID: PAT_MRT3847_77976C.1.pep
PRGVGIWLSRLLRGALRALSRRLPMQPAVVFVLRVRFASSTLMSRSKGDSTRSTGGDGITTDPARVRLRILSNDTPVLCRLILIYFRSSPRLLFSSPGPFSSLLFASSSPPLLPLYHLLTTKHINKHINQPKG

SEQ ID NO: 261300 - protein, 37 aa, Glycine max
  Clone ID: PAT_MRT3847_77977C.1.pep
NQKLLYWAPIRGRSRHMLVQGIKGAPLQFARWRILQV

SEQ ID NO: 261301 - protein, 81 aa, Glycine max
  Clone ID: PAT_MRT3847_77978C.1.pep
VRFGYYMFLGPDINLSDIRLSGIIQCSVGFIHGDNLSVIGANGKLVKKTTNFKVVGYCVCERYTFHTSVYCILVFHRFLVH

SEQ ID NO: 261302 - protein, 171 aa, Glycine max
  Clone ID: PAT_MRT3847_77979C.1.pep
MDFPFLEKLKIWKKKAEQEEEGPPLVWFETSATVSRRFQFEPNGQLSVTLVGDSRPLYHRIVDSFLNKFFPSGYPYSVNEGYLRYTQFRALQHTASAALSVLSTQSLLFAAGLRPTPAQATAVSWVLKDGMQHLGNIICSKLGARMDSEPKRWRILADVLYDLRTGLEVLS

SEQ ID NO: 261303 - protein, 146 aa, Glycine max
  Clone ID: PAT_MRT3847_7797C.1.pep
MEEYYYQRHHVPAFGSWDWNDNLPFTQCFESARQAGLLRYGYSESEDRDLYVTGDLYENDFVKPAVIVVPRRREKVRCQNEKDEKKQSWRSNVKELPSPTSPIQRPKPKPVDEDLYKISPELLYAKNRKKRGLCFFPSCLIPTCIA

SEQ ID NO: 261304 - protein, 72 aa, Glycine max
  unsure (1)..(72): unsure at all Xaa locations
  Clone ID: PAT_MRT3847_77980C.1.pep
ASGLLHCSPKLRYSAVGAMALPFFAGFRGPSARLPDGRPLPPLFCFXQELDGAPPELLPGLIPGRVGRHPQV

SEQ ID NO: 261305 - protein, 69 aa, Glycine max
  Clone ID: PAT_MRT3847_77981C.1.pep
ILPLPFNIESANTCHLSMNITNLCLNLRLELMLIKLYSLLVDADILTKNDKKKPSCAFGSFNFENLITC

SEQ ID NO: 261306 - protein, 103 aa, Glycine max
  Clone ID: PAT_MRT3847_77982C.1.pep
MAPLTIRTIMDTSAIQHSGFTGQTALNHLSHFVRNTGGARKGLTNIRRTLNSAHHSNWYGPDRPNYLGPVAEQIPSVLSGQFPGDHRWDTAEYPADPETLSRN

SEQ ID NO: 261307 - protein, 66 aa, Glycine max
  Clone ID: PAT_MRT3847_77983C.1.pep
AFWYLQLKMESSCILAFLFLLILHSSTTKAAFSVGGGVGVGDGVGICVGVHDSSGNGKPIRRGTTR

SEQ ID NO: 261308 - protein, 46 aa, Glycine max
  Clone ID: PAT_MRT3847_77984C.1.pep
FLAEFYVTWTKKGKSPIKRQWNVWLSPARGMNLCYTHTMSLNRRFI

SEQ ID NO: 261309 - protein, 81 aa, Glycine max
  Clone ID: PAT_MRT3847_77985C.1.pep
SNSALAFFPFTVTHITQRPFSSLPFFPGLYSTLHCSFPSSLSLKLSPIYLYFFSIHSPTPYHNSQQITTNFFYTIHLFFFF

SEQ ID NO: 261310 - protein, 48 aa, Glycine max
  Clone ID: PAT_MRT3847_77986C.1.pep
RGGTAKKRTGKCGPIFRNRLVNMGVYRFWKDGKKCWGYKILFGAGKKI

SEQ ID NO: 261311 - protein, 58 aa, Glycine max
  Clone ID: PAT_MRT3847_77987C.1.pep
THHHHLSLFLLERIFLGSFFLFMILCSCFSPPLAISHLNGVWFSYMGYIPRYSEISWV

SEQ ID NO: 261312 - protein, 106 aa, Glycine max
  unsure (1)..(106): unsure at all Xaa locations
  Clone ID: PAT_MRT3847_77988C.1.pep
NHLISATISGATCXRRLPGLLNYDIXKWGGHLIPSPPLHLYIARWAPVTSGGYKXYVSDTVIELTEQMSDARCMKSAVDPTNRRYLTWSAMIMGKMSTMXVDEQMI

SEQ ID NO: 261313 - protein, 67 aa, Glycine max
  Clone ID: PAT_MRT3847_77989C.1.pep
FWTKPSLVWGAPNLTWGLMNILPFHPTQEVLHIELRPRLNMLSLLLVIRTHKTGIYSLPCPSFQSPA

SEQ ID NO: 261314 - protein, 66 aa, Glycine max
  Clone ID: PAT_MRT3847_7798C.1.pep
ITIRGLSTTRSAMNELWLLIFTLVTIHIILESHHRGCIPVVVYIHVEFTILENGLNCNIEFTFFTT

SEQ ID NO: 261315 - protein, 178 aa, Glycine max
  unsure (1)..(178): unsure at all Xaa locations
  Clone ID: PAT_MRT3847_77990C.1.pep
MSKVLGFSGVDDFCPMGSIYANPKEASFFLPLGPQVDVYFPPRKRSRVNTPFVFDGEWFEQKPKTSVEALPDECLFEIFRRLPSGEDRSACACVSKRWLMLLSSICKNEICVNKNATVETIEKEGDDVEFGRXGYLSRSLEGKKXTDVRLAALAVGTSSRXGLXXKLSIRGSNMGSWG

SEQ ID NO: 261316 - protein, 97 aa, Glycine max
  unsure (1)..(97): unsure at all Xaa locations
  Clone ID: PAT_MRT3847_77991C.1.pep
KTRPDPRIRPPLRTPASLLHKAPQITFVGYITKNSRLKINLLFFFSATIFLALHSHAYDIFPLRINTIYGTLTPYVKCSNFILAFXSHNIFFFYTIP

SEQ ID NO: 261317 - protein, 679 aa, Glycine max
  unsure (1)..(679): unsure at all Xaa locations
  Clone ID: PAT_MRT3847_77992C.1.pep
MRSCSQQQSHTAIEAFVLFFFVLLFALVRGFFRGEHCRFHHPGLIHPCPCPKFSAFPELTIFALWDQYTPTPRKQVSSCPLALKLMYTFLLGRDRVSMLHSFLMENGSSKSRXTSIEALPDECLFEIFRRLPAGEDRSACACVSKRWLMLLSSICKSEISVNKNTTVENPEKEGDDVEFGGKGYLSRSLEGKKATDVRLAAIAVGTSSRGGLGKLSIRGSNIVCGVTSHGLKAVARGCPSLKALSLWNVATVGDEGLIEIANGCHQLEKLDLCKCPAITDKALVAIAKNCQNLTELSFESCPNIGNEGLRAIGKLCSNLKAIVVKDCTGVSDHGIAGLLSSTSLVLSKVKLQALTVSDLSLAGIGHYGKSVTDLVLNCLPNVSERGFWVMGNGNGLQKLKSLTVASCKAVTDIGLEAVGKGCPNLKIAHLHKCAFLSDNGLMSFAKAASSLESLRLEECHRITQLGFFGVLFNCGAKLKAISLVSCYGIKDLNLVLPTVSPCESLRSLSISNCSGFGNASLSVLGKLCPQLQHVELSGLEGVTDAGLLPLLESSEAGLVKVNLSGCTNVTNKVVSSLANLHGWTLENLNLDGCKNISDASLMAIAENCALLCDLDVSKCAITDAGIEALAHAKQINLQVLSLSGCXFGLRQELACVERIGSHPFGTKHPALQCNQQQYG

SEQ ID NO: 261318 - protein, 84 aa, Glycine max
  unsure (1)..(84): unsure at all Xaa locations
  Clone ID: PAT_MRT3847_77993C.1.pep
VGXHDNTYFLRNLXMRVEWHRPLCLSRXDXSELKRXFXXXXXXXAFKXAKFXXHRGXQDYXHXXKMXNSXXXLGHLXGAXXRVX

SEQ ID NO: 261319 - protein, 83 aa, Glycine max
  Clone ID: PAT_MRT3847_77994C.1.pep
YVCESCCLDNFVSRSFDIYYFGSPYDIYAYDSRHVIVGTRRHRDLIPNSFLWHSIPYIPLCPPLTPPSYSSPLTPPYNSSISS

SEQ ID NO: 261320 - protein, 115 aa, Glycine max
  Clone ID: PAT_MRT3847_77995C.1.pep
SKDAYQRYHAHHYTNGTRCDVTNQPRETEVRFVCSKPPRAILNCITELSTGKYALTARCPTLCKHMLFEEERPVWYIINCNELPDDYKETERSEESTDEIVMVTDIKYPKNESED

SEQ ID NO: 261321 - protein, 60 aa, Glycine max
  unsure (1)..(60): unsure at all Xaa locations
  Clone ID: PAT_MRT3847_77996C.1.pep
FIYKIVFTFIXXSXXXXXXPLYXXFKQRMQXKXHKLNGTTESHNIRISRSHPLFKELIKR

SEQ ID NO: 261322 - protein, 107 aa, Glycine max
  unsure (1)..(107): unsure at all Xaa locations
  Clone ID: PAT_MRT3847_77997C.1.pep
LXDPLXXXTIXKXCXXXHXIHDICXXXXXXXPXXXHXWXXXXXXXXXXLLQXXXDPRTLXXXXFXTXPXXVTXXVXXXXVXXSXCXHVXXIXXNXVXANSEXXXXXT

SEQ ID NO: 261323 - protein, 63 aa, Glycine max
  Clone ID: PAT_MRT3847_77998C.1.pep
VKKCFTIALLNVPINRVLITQNWNKKPHRMPKPLCLRQFCLKQTPFWKHQRIPLGTFWTSLIA

SEQ ID NO: 261324 - protein, 94 aa, Glycine max
  Clone ID: PAT_MRT3847_77999C.1.pep
TPAARLPQDEDHNKPHRHQPRSGVTRFCWDLLHSNHNNNNITQSQGKSSITGSNNNNDSLLARRCANCDTTSTPLWRNGPRGPKVYHHIQSSYL

SEQ ID NO: 261325 - protein, 140 aa, Glycine max
  Clone ID: PAT_MRT3847_7799C.1.pep
MVGSFLSLCDLKVTNCKSMEKIFDLKSVGKRRAWNMITSLQNVHVKALPKLEHVWNEDPGGILRFTYLKKIWVQECLKLKHIFPVSIAMNLKNLEYLEVWNCAQLKEIVFRGETIKESSVLFEFPKLTTARFSKLPNLES

SEQ ID NO: 261326 - protein, 68 aa, Glycine max
  unsure (1)..(68): unsure at all Xaa locations
  Clone ID: PAT_MRT3847_779C.1.pep
DSPVKLVAFASNFFRSLYQTYLQTVMCAIICDTELRDDVEADAKTDLQTYLRDYXRDHEMSHELEGDL

SEQ ID NO: 261327 - protein, 225 aa, Glycine max
  unsure (1)..(225): unsure at all Xaa locations
  Clone ID: PAT_MRT3847_77C.1.pep
MELLDFGNGDRHSVNLLDSMASSSSRKNIHADATDDEQEQEEEELEHFDDFTLASSWERFISEIEAVLRVWMSDGPNNLLEKGAVLLEDAGNLYKVKSEMKYAMKSYCMEFYFKTDPDVDAGKLADWNFDLHDLQLCFGVKEFLVIAPQSASGVVLDAPESSKLLSAIAIALSNCSSLWPAFVPVHDPSRKAYIGIQSMGTVFTRRFEADRIGSQVPVXLMHLEG

SEQ ID NO: 261328 - protein, 90 aa, Glycine max
  Clone ID: PAT_MRT3847_78000C.1.pep
MAAPPPEAEKKVSYDVKLCQLLEDYTQILVVAADNVGSNQLENIRKDLRGDSVCNLKEVSEEVARYKDVIAVKDDKGNPDTHKYICKWNG

SEQ ID NO: 261329 - protein, 58 aa, Glycine max
  Clone ID: PAT_MRT3847_78001C.1.pep
GSRMIMATLLTGRSTLTLRATIERMEEHPAHCPRIMEVELTMVRTHYYLHDRHWIVDA

SEQ ID NO: 261330 - protein, 283 aa, Glycine max
  Clone ID: PAT_MRT3847_78002C.1.pep
ISRSEVEPMDCTAARKTQKADREKLRRDRFNVQFVELGNILDPDRPKNDKATILGDTIQLLKDLTSEVSKLKDEYATLNEESCELAQEKNELREEKASLKSDILKLNNQYQQQLRTVSPWTATDRSIMLAPPSYPYPVPMPIPPAPIAMQPYPFYANQHSAIIPNPCSTFVPYLVPNTLTEQRSTQYMSPPVHPGFRSHVSGKQESRNKSSKESKAEKHEDSNDVTLTPGSSADQDLSSGQRKSSKLSRKESSCTEVSSLDRCSLSCSVQDSSSSSVVHKHKG

SEQ ID NO: 261331 - protein, 193 aa, Glycine max
  unsure (1)..(193): unsure at all Xaa locations
  Clone ID: PAT_MRT3847_78003C.1.pep
FVLSINATVLYYIPYYTAHEFAEEQFLYALYDVWVDKVYVTAPTDSRIFYNELVSLGFKIIFLSERTLLKQSVSKAFLDKPGYHACXKXIRKDPRDPXTPNPVSFMRADRXGVIRQGLSIVGIIGYQWSDLLEDHIVESRTFKLPNXPCHTFSSSFTSQQFSLXPIYLYVIKCVLIGARASLYVVSAVCQRVM

SEQ ID NO: 261332 - protein, 120 aa, Glycine max
  Clone ID: PAT_MRT3847_78004C.1.pep
DAWGLNVNIWAIGRDPDVWNNPLEFMPERFLSGKNAKIDPRGNDFELIPFGAGRRICAGTRMGIVLVHYILGTLVHSFDWKLPNGVRELDMEESFGLALQKKVPLAALVTPRLNPSAYIS

SEQ ID NO: 261333 - protein, 70 aa, Glycine max
  Clone ID: PAT_MRT3847_78005C.1.pep
QGPKGFHLRLFLQTFYYSFFLGLQGLPPLVFFFPPAENFSNGAAPPSLFVEKPPPRAAFRGYTPPPKPPL

SEQ ID NO: 261334 - protein, 82 aa, Glycine max
  Clone ID: PAT_MRT3847_78006C.1.pep
NGLKITLIKIHHKLYCPMLVKDVFFLKYIVYFLNNFKSSFKLKKLFLILKLDLKFIQKKFKLIFLQNMNLKFKFNPFNWIWI

SEQ ID NO: 261335 - protein, 52 aa, Glycine max
  Clone ID: PAT_MRT3847_78007C.1.pep
FPTILYQGFSSYYISPKAKDDLLYSKLDNKTQKTVNCIIKTRDAPSVVFSQP

SEQ ID NO: 261336 - protein, 56 aa, Glycine max
  Clone ID: PAT_MRT3847_78008C.1.pep
AVSVLLCVIFQRSIVLPFNRSVCVVVRCNEPMSCQAIHSVSNYIENEVKIKKTNNK

SEQ ID NO: 261337 - protein, 107 aa, Glycine max
  Clone ID: PAT_MRT3847_78009C.1.pep
LHSIIFNLCAKNIEYKIIPYIVSNTIVFVFKLPNMILIVFKIIHIVLVSLLKPVFPSIISFNRFHSYHKNGYLSTFILNSLNPLRACAIFSYNVVHNLPPPSLHSSE

SEQ ID NO: 261338 - protein, 51 aa, Glycine max
  Clone ID: PAT_MRT3847_7800C.1.pep
YIQRHIDGQVYHQRTFTFHCRTYPFFHSQQVLIKVKYVYFLALYKVATLGY

SEQ ID NO: 261339 - protein, 65 aa, Glycine max
  Clone ID: PAT_MRT3847_78010C.1.pep
SSRFRSLDFGERNGYLKGVVADVIHDPGRGALARSRVALPTNPIPDDEGTQETSSSLPPRALHGQ

SEQ ID NO: 261340 - protein, 45 aa, Glycine max
  Clone ID: PAT_MRT3847_78011C.1.pep
FSPLSSSSSHMKFLGASSLAPEEPRVMDEVVQSLRTVCWDSFLEP

SEQ ID NO: 261341 - protein, 104 aa, Glycine max
  unsure (1)..(104): unsure at all Xaa locations
  Clone ID: PAT_MRT3847_78012C.1.pep
MSLVAIEDFQHILRVLNTNXDGKQKIMLAMTSIKGIGRRFFNIGCQKADVDMNKMAGELTAAELDSGITVVANPMQLMXPNWFFDIKNDFKDGKYSQVVPNALD

SEQ ID NO: 261342 - protein, 50 aa, Glycine max
  Clone ID: PAT_MRT3847_78013C.1.pep
SALPLYSRVRLQAVQLHQCLNHMQQSLNRETQDHQVRIPFHQHLTSITHL

SEQ ID NO: 261343 - protein, 146 aa, Glycine max
  unsure (1)..(146): unsure at all Xaa locations
  Clone ID: PAT_MRT3847_78014C.1.pep
RDKFDFVACMGAFFGVVFASVEIGLIIADSISYAEILLQVAGPRTALLGKILMTTVYTLIQQFPEATRVPGVPIIRVHTLLYXYNSNYVQERIFTQLVYEEHLVNGYYHTRIQFVMGEMSIVTDIDTSGIHTLEELSRSLQKRNVQ

SEQ ID NO: 261344 - protein, 83 aa, Glycine max
  Clone ID: PAT_MRT3847_78015C.1.pep
AHVLYSAIEYGALTAAPCTDETSSELCLPYLLWNSLLTRVSVCGGNNIQTGMPDRSNGAMAAKEGAAASGLIRTRKSGHQNGT

SEQ ID NO: 261345 - protein, 209 aa, Glycine max
  Clone ID: PAT_MRT3847_78016C.1.pep
MLTPTTGVPKRRPRSGRTPLQLKNTPADPIHPSAKPKPKPKPYFEISLIDKENNPVAAVAVLVAQPPETSLAEELSAVKKKLERMRADKEKTEKMLNEKHAILDAKMKEMEERGEIQKNLEIEVDRLFRLKELKYRCMRVSPMRTLREKEQGKIVNEAPSQSEVKTEETVASESESESESESVGGECQVLQSPGSACSQTHTPHTKSDS

SEQ ID NO: 261346 - protein, 153 aa, Glycine max
  Clone ID: PAT_MRT3847_78017C.1.pep
MLTPTTGVPKRRPRSGRTPLQLKNTPADPIHPSAKPKPKPKPYFEISLIDKENNPVAAVAVLVAQPPETSLAEELSAVKKKLERMRADKEKTEKMLNEKHAILDAKMKEMEERGEIQKNLVIERVSPMRTLREKELGKIVNEVAFESGGEKRR

SEQ ID NO: 261347 - protein, 79 aa, Glycine max
  Clone ID: PAT_MRT3847_78018C.1.pep
SHVGGVDSVDTTMAPADGADASRTFDAAVLFFGLVFVGYFYYPLLSCSNAHAHLSSSDDHDAHNQAHKHAHKSAQRFQA

SEQ ID NO: 261348 - protein, 79 aa, Glycine max
  unsure (1)..(79): unsure at all Xaa locations
  Clone ID: PAT_MRT3847_78019C.1.pep
FLFFYFFFFFXXKANXNYIKKDRIVKHLMKDWNSLEHLQYDPNFSTHYSKLGDRQCERQLCFLNLPVRLCQPITYLRYM

SEQ ID NO: 261349 - protein, 99 aa, Glycine max
  Clone ID: PAT_MRT3847_7801C.1.pep
MFLCVADSVLCVGSEWHRFPSSFFIPDYVGQVRWIDDGFRGLLPIPFNSTLGGTASAPPYFNNKNMASDKQYLHDVDACTFLVELQVDSRGSPGTELEF

SEQ ID NO: 261350 - protein, 95 aa, Glycine max
  Clone ID: PAT_MRT3847_78020C.1.pep
PCLNAVSALLSLARPIALSSASPCLHPRHITRRSTFRQPWHIRPISPSLPPSLIARGNPASWNHPAHTLSRYIPLCWDAAHSFPTPVPASHPLHL

SEQ ID NO: 261351 - protein, 481 aa, Glycine max
  unsure (1)..(481): unsure at all Xaa locations
  Clone ID: PAT_MRT3847_78021C.1.pep
MGKNEQQQQHVQEEGQVEAPPCCWVLLRPFSFKCLFLLLLSLSALLSALFWVLPRHTITYSFDAKDVIKQSASVQTSFRLEKPVSQLIPYIETLQHDIRDEIALPNTEVALLSMHQSITPNCTDVVFGVLSDPMNASINPVSLSVLKSSLIELFLKQINLTLTSSIFGNASIFEILKFPGGLTVIPVQSAYIWQMPEILFNFTLNNSISEVLESFDDFKDELKFGLHLNSDENVYVQITNANGSTITPPVVVQASVMAGFGEPLASXRLKQLAQTITGSAGKNLGLDNSVFGRVKEVRLSSFLKNTLHASSPSPAPAPSPQLIDHSEPSTSPHRASPYTPISPAAAEQPPCFDCEVPSPAPSMVPAHPPDPCLYSGFLHHPIPSPKSYSKPSFPPDYSPAAAPTSNSASHTSEEASDLSRVAEVSHGSKLPQGEETSNKLVSQLLAPSSLSSAGGHFCGEILLMGFCMLLISFVFLNHTMF

SEQ ID NO: 261352 - protein, 148 aa, Glycine max
  Clone ID: PAT_MRT3847_78022C.1.pep
EIPCIFSLADKKQPSSRWFKKNNQYGKGASPILEDYISGTKAQNRSPRTVLDGLEGQSNSTEDDTFSTRVSSTTNTPSSDSKRRSKIRKPQFPFRFIVSFLASPFRSKNFSISKNEKRQPLLKCFSYEQISNATKDFHQGMLVFLDKT

SEQ ID NO: 261353 - protein, 84 aa, Glycine max
  unsure (1)..(84): unsure at all Xaa locations
  Clone ID: PAT_MRT3847_78023C.1.pep
MASTVSSALSKPGAWALYSXEHESELLQQNNDKPLSDFPFLSPVVFNPNKKKAQTYSLSEFTVKPHTFFSHQNPVVLPTGPRHL

SEQ ID NO: 261354 - protein, 98 aa, Glycine max
  Clone ID: PAT_MRT3847_78024C.1.pep
CSQTEENALSDVEVLRLAAAVESNSVHPVGQAIVNAAQAANCHDAKVKDGTFLEEPGSGAVATIDNKKVSVGTLEWITRHGVINSIHQEVEKSYNQSF

SEQ ID NO: 261355 - protein, 93 aa, Glycine max
  unsure (1)..(93): unsure at all Xaa locations
  Clone ID: PAT_MRT3847_78025C.1.pep
IWTTRCSPIPNCNILSLANLHQQMGGDIHDQQLGLDPPHTMKSCRHLSVFNYRXLHHIVLALKYVNRALFLLHFTCRLPHPSQLRTHIPVALM

SEQ ID NO: 261356 - protein, 135 aa, Glycine max
  Clone ID: PAT_MRT3847_78026C.1.pep
DKVGELISNIVCKMILGRSRDDRFDLKGLTHDYLHLLGLFNVADYVPWAGVFDLQGLKRQFKQTSKAFDQVFEEIIKDHEHPSDNNKENVHSKDFVDILLSLMHQPSEHHVIDRINIKAILLDMIAGAYDTSAIG

SEQ ID NO: 261357 - protein, 64 aa, Glycine max
  Clone ID: PAT_MRT3847_78027C.1.pep
YIANISTQRTQTTGNAYSHYHDQFILFFSYSASILIHHNFYATYSTLSCITLFTNTTFTSSSTS

SEQ ID NO: 261358 - protein, 59 aa, Glycine max
  Clone ID: PAT_MRT3847_78028C.1.pep
RCKPLMYGFEFFVVTYQLQKLKVEPVLLHYLSEIKILQGIISTIQVQYLDRDYSYLILT

SEQ ID NO: 261359 - protein, 45 aa, Glycine max
  Clone ID: PAT_MRT3847_78029C.1.pep
ITRTLRNSNSTDHGQTIPLQPTQTPKPNSRTSKSSRKLEPHRIII

SEQ ID NO: 261360 - protein, 79 aa, Glycine max
  Clone ID: PAT_MRT3847_7802C.1.pep
SPAKITCRLILRRFPQTFRKKLTLKYNGSRKILETGLFTLYHTSMQNAFTIKVMMKIWNVKASKRGHGNPVSVIWINLS

SEQ ID NO: 261361 - protein, 70 aa, Glycine max
  Clone ID: PAT_MRT3847_78030C.1.pep
SRKGREVLYSCLVTSVSCKTSYHMASIHQSGAGSCLHRSLASDYSLPNIIHPDLATVHKSKPAREAVNTT

SEQ ID NO: 261362 - protein, 134 aa, Glycine max
  unsure (1)..(134): unsure at all Xaa locations
  Clone ID: PAT_MRT3847_78031C.1.pep
DEMKLVALQEFVAGIRMKAGXFSTGASMYRXFTKHHLTRXWRLRIGIVARNXDLYLGTFSTEKQAAXTYNVTGIKLXCLNAGTYFHMNRYDLKALLSSHTLPIRRGASKQLKESHALXSSRNREEMICLCSSSF

SEQ ID NO: 261363 - protein, 48 aa, Glycine max
  Clone ID: PAT_MRT3847_78032C.1.pep
NNNSSEKKIKNPALLNSSNFTLLYRLLTYNIPSFSSPSCIGVFITMPY

SEQ ID NO: 261364 - protein, 116 aa, Glycine max
  unsure (1)..(116): unsure at all Xaa locations
  Clone ID: PAT_MRT3847_78033C.1.pep
MPLDHHLFLEEIKMAHRCPKPLLDTRYCLKDHIHWEEEQVEDDEYSSSTTTTITNTNTDTXSVVFLEHDLFWDREELSSLLAKEHQNQLSNTLQKNLVLASSRQEAVEWILKVNAH

SEQ ID NO: 261365 - protein, 42 aa, Glycine max
  Clone ID: PAT_MRT3847_78034C.1.pep
NFEVNLITSFCIGSDGLCGLVCVSSQLNICLVLPQELTYLTG

SEQ ID NO: 261366 - protein, 50 aa, Glycine max
  Clone ID: PAT_MRT3847_78035C.1.pep
YSMDELILKQIIGSGSFGAVIRAHWRGYDVAVKILIVQGFDPGRFEVFRK

SEQ ID NO: 261367 - protein, 75 aa, Glycine max
  Clone ID: PAT_MRT3847_78036C.1.pep
AGILYSPLTRVDVDVEDYLHVLMNIGGFLTTMECVGSSDWLLSTPTFEKRKRVILLKAASLFQGASKGPLIDLAI

SEQ ID NO: 261368 - protein, 79 aa, Glycine max
  unsure (1)..(79): unsure at all Xaa locations
  Clone ID: PAT_MRT3847_78037C.1.pep
GVYPRXRKELFSQGCCQGFDTKSRYSSCWDPTSIIDIDKIELIEACAISPHDRVIPSPKFESSHPCTFLVKFQELPHFW

SEQ ID NO: 261369 - protein, 68 aa, Glycine max
  Clone ID: PAT_MRT3847_78038C.1.pep
RAVENCIFHYHHHTLLTLPSISHKPHFRFFTRPDLGGGGGGVLLLLLLLLVGNPIGDDPLSDKLWNHP

SEQ ID NO: 261370 - protein, 80 aa, Glycine max
  Clone ID: PAT_MRT3847_78039C.1.pep
FFFFFFFFFFFFFFFFFFFLTKQSRNLYCLVKLFGQKLCNLNRNNNKSSSAQHVFFSPKKFRKKKMIYRCLSKEVARGFV

SEQ ID NO: 261371 - protein, 48 aa, Glycine max
  Clone ID: PAT_MRT3847_7803C.1.pep
NPKCKKKPVSCWSLRSTPEMPLLFASGQIQSVLHLVFKYLMIRQMSKA

SEQ ID NO: 261372 - protein, 59 aa, Glycine max
  Clone ID: PAT_MRT3847_78040C.1.pep
QTFPTQTHKSNPSLPPSFPHTVSTYFRIFSPNTRYNHMFLMNLSQRSGSTLRTCRNILE

SEQ ID NO: 261373 - protein, 160 aa, Glycine max
  unsure (1)..(160): unsure at all Xaa locations
  Clone ID: PAT_MRT3847_78041C.1.pep
HASGSSYAPGDSRFTRLLKECDECIAEESSQAPAKNVEAPVAATVEDKEDVANMDNTPPVVEPPSKPKYTHDYYNSATEVVLTIYAKGVPADSVVIDCGDQMLSVSIEVPGEEPYHFXPRLLSKIIPEKCKYHVLSTKVEIRLAKAEQVTWTTLDYSGRP

SEQ ID NO: 261374 - protein, 228 aa, Glycine max
  unsure (1)..(228): unsure at all Xaa locations
  Clone ID: PAT_MRT3847_78042C.1.pep
KTQEAGFSHSVVYSKSKELCSWIMYVDVDEFVFSPSWGHETENSVVVPSLKKLLAREIIKGGTRVGQVSMRCMEFGPSGQRRHPEEGVTQGYTCRRRGEQRHKSMVLVEAVDPSLRNVIHHFQVNERKGFMSKQVSVEEGLVNHYKYQAWDEFKSKFRRRVSAYVVDWKQEINPNSKDRTPGLGFQAIEPKDWTHXFCEVRDHRLKSLTRAWFRSVTSNGYRMAWQTN

SEQ ID NO: 261375 - protein, 212 aa, Glycine max
  Clone ID: PAT_MRT3847_78043C.1.pep
MVSLKLQKRLAASVLKCGRGKVWLDPNEVNEISMANSRQNIRKLVKDGFIIRKPTKIHSRSRARRMKEAKRKGRHSGYGKRKGTREARLPTKILWMRRMRVLRRLLRKYRESKKIDKHMYHDMYMKVKGNVFKNKRVLMESIHKSKAEKAREKTLSDQFEAKRAKNKASRERKNARREERLAQGPGERPPAAQTATPATASQPPQASKKSKK

SEQ ID NO: 261376 - protein, 212 aa, Glycine max
  Clone ID: PAT_MRT3847_78044C.1.pep
MVSLKLQKRLAASVLKCGKGKVWLDPNEVNEISMANSRQNIRKLVKDGFIIRKPTKIHSRSRARRMKEAKRKGRHSGYGKRKGTREARLPTKILWMRRMRVLRRLLRKYRESKKIDKHMYHDMYMKVKGNVFKNKRVLMESIHKSKAEKAREKTLSDQFEAKRAKNKASRERKNARREERLAQGPGERPSAAQTTTPATASQPAQALKKSKK

SEQ ID NO: 261377 - protein, 565 aa, Glycine max
  Clone ID: PAT_MRT3847_78045C.1.pep
ARAARGLSGAIPPEISNMASLQVLQLGDNQLVGNIPTQMGSLKQLSTLALQYNKLTGQIPLSLGNLEKLSRLNLSFNNFSGTVPATLAYIEHLEVLDIQNNSLSGIVPSALKRLGEGFQGANNPGLCGVGFSTLRACNKDQDLNVNHIDTSDGDQPKNSNSSKALPEPAYVQLHCGQTHCSKSRRFPQTVITAGVVIVTLTFICAGFLTFFRYRRQKQRISNTLSSSSEGKVSLDQPKEFYTKSPSALVNIDYYSGWDQLSNGQNADAGGLSNEYLNQFRFNVDEVESATHYFSEANLLNRSKFAAGYKGVLRDGSLVAIRSISVTCCKTEEAEFVKGLNLLTSLRHENLVRLRGFCCSRSRGECFLIYDFATMGNLSQYLDIEDGSSHVLEWSKRVSIIKGIANGIGYLHSNEESKPTIVHQNISVENVLLDYQFNPLIRDAGLPMLLADDVVFSALKVSAAMGYLAPEYITTGRFTEKSDIYAFGVIILQVLSGKTTIGSSIRTAVESFRFDDSVDTNLKGIYSKSEAATLSKLAIQCTHELPDQRPTMVDVIQELSVSSAHI

SEQ ID NO: 261378 - protein, 207 aa, Glycine max
  Clone ID: PAT_MRT3847_78046C.1.pep
MKSTTSLALFLLCALTSSYQPSATADIVFDTEGNPIRNGGTYYVLPVIRGKGGGIEFAKTETETCPLTVVQSPFEVSKGLPLIISSPFKILDITEGLILSLSFTYVPPCASTPSRWTVILKGLPEELHVKLTGYKNTIDGWFRIQRASSESNYYKLVFCTSNDDSSCGDIVAPIDREGNRPLIVTHDQNHPLLVQFQKVEAYESSTA

SEQ ID NO: 261379 - protein, 92 aa, Glycine max
  Clone ID: PAT_MRT3847_78047C.1.pep
MNYLMHHVFLFSCNFNVRLIIIKKKKKKLETGCGGCKMYPDLSYTESTTTETLVMGVAPVKAQFEGAEMGVPAENDGCKCGPNCSCNPCTCN

SEQ ID NO: 261380 - protein, 79 aa, Glycine max
  Clone ID: PAT_MRT3847_78048C.1.pep
MSCCGGNCGCGSSCKCGNGCGGCKMYPDLSYTESTTTETLVMGVAPVKAQFEGAEMGVPAENDGCKCGPNCSCNPCTCN

SEQ ID NO: 261381 - protein, 73 aa, Glycine max
  Clone ID: PAT_MRT3847_78049C.1.pep
ARAQILLTSKILLNPPNDLCLLDALNLSLLLLISFLSITTTHHPVTSRRDNNCSTLTWMAQPNHLQHPRRGGI

SEQ ID NO: 261382 - protein, 79 aa, Glycine max
  Clone ID: PAT_MRT3847_7804C.1.pep
KKTYNIHFNSSFKVLECIIFQGEWTAEWKVEGATKKDYQRFVKAELDVFGRATFGWCYWTLKNVNNHWSLEWMIKNGYI

SEQ ID NO: 261383 - protein, 82 aa, Glycine max
  unsure (1)..(82): unsure at all Xaa locations
  Clone ID: PAT_MRT3847_78050C.1.pep
MDLESSKCWDTSKDSWKTILLLCYQSLGVEYGDLSIFSLYVYTSTFVEDIEHSKTXEEILGPFLCFLTLTLAPSSVPFVVFS

SEQ ID NO: 261384 - protein, 82 aa, Glycine max
  unsure (1)..(82): unsure at all Xaa locations
  Clone ID: PAT_MRT3847_78051C.1.pep
MSCCGGNXCGCGSSCKCGNXGCGGCKMYPDLSYTESTTTETLVMGVAPVKAQFEGAEMGXVPAENDGCKCGPNCSCNPCTCK

SEQ ID NO: 261385 - protein, 33 aa, Glycine max
  Clone ID: PAT_MRT3847_78052C.1.pep
QTGVRRLKGFDRRGNFSRLFGHMPSSVDQRLTF

SEQ ID NO: 261386 - protein, 79 aa, Glycine max
  Clone ID: PAT_MRT3847_78053C.1.pep
MSCCGGNCGCGSSCKCGNGCGGCKMYPDLSYTESTTTETLVMGVAPVKAQFEGAEMGVPAENDGCKCGPNCSCNPCTCK

SEQ ID NO: 261387 - protein, 79 aa, Glycine max
  Clone ID: PAT_MRT3847_78054C.1.pep
MSCCGGNCGCGSACKCGNGCGGCKMYPDLSYTESTTTETLVMGVAPVKAQFESAEMGVPAENDGCKCGANCTCNPCTCK

SEQ ID NO: 261388 - protein, 85 aa, Glycine max
  Clone ID: PAT_MRT3847_78055C.1.pep
GSPIQGGLRFPGFLFMGPKWHPLVLKLNPLALGNLIGVFRVNLRGGANFKKGSFLPPDLFFCKGVQVVKVGIQFLSNETFFSPFF

SEQ ID NO: 261389 - protein, 104 aa, Glycine max
  unsure (1)..(104): unsure at all Xaa locations
  Clone ID: PAT_MRT3847_78056C.1.pep
SLKCINHRTPTKSSCFCRGHPFTVLGVVFHYGWGTKCRGKKNLTTSFWFXRNVETNSTTSSTTTTTTTTDTHTDESRVKVKAIVKVKVTAGXFLFKSEVRQRNR

SEQ ID NO: 261390 - protein, 127 aa, Glycine max
  Clone ID: PAT_MRT3847_78057C.1.pep
VMRPPQLLPDGMKKTVFANFTDLCNTMLRLPDRVMAFSLAELGSSGSLDGQHTLAVKGGYAPKNFEGIVRQCVNESVISLGCNSPDTILAKDNRLFFLRCEKCGSGRSTAPINAGFVARVGRRNTGT

SEQ ID NO: 261391 - protein, 607 aa, Glycine max
  Clone ID: PAT_MRT3847_78058C.1.pep
MTEIPFVLRLHILLILLLIKSGSSNNECGEWSCGSGQPPIRFPFKLIKGIKDECGYPGFCLYCTQKHETMLALSSVKLQVSYINYENHEIVLNDPENCLPHKFLQINDSLIHPYKFDDEAKTSKLSFFNCSSVEHQHLRNYQQSLSDSQDMISCPIYVSDLDDSVLSLDLTSCTKMFDIVTPVSAYGMQRNSLDLRWSEANCSQCKAKGKKCKWKNNRGDIECFDCKDKRKTIHVPKSFIYSAPGSILLGFVVIVVFKIIYHFRQKQEDQARVEKFLEEYRAEKPARFTYADVKRITGGFKEKLGEGAHGAVFRGKLSNEILVAVKILNNTEGEGKEFINEVEIMGKIHHINVVRLLGYCAEGIHRALVYNFFPNGSLQSFIFPPDDKQNFLGWEKLQNIALGIAKGIGYLHQGCNHPIIHFDINPHNVLLDDNFTPKISDFGLAKLCSKNPSLVSMTAARGTLGYIAPEVFSRNFGNVSYKSDIYSYGMLLLEMVGGRKNVDTSSPEDFHVLYPDWMHDLVHGDVHIHVEDEGDVKIARKLAIVGLWCIQWQPLNRPSIKSVIQMLESKEEDLLTVPPNPFHSSTSTIPSGFTSARLPLELEVIQE

SEQ ID NO: 261392 - protein, 35 aa, Glycine max
  Clone ID: PAT_MRT3847_78059C.1.pep
ETFQVGFRIMGVALSGLQIDKLDLKTVPYRFYKGF

SEQ ID NO: 261393 - protein, 118 aa, Glycine max
  unsure (1)..(118): unsure at all Xaa locations
  Clone ID: PAT_MRT3847_7805C.1.pep
SRTHSTWGRFELVGAPKAPDPQPMPGLPPGPPKEGXLYLERASPLAPAKSPQGATRGPTRYAXRSPPKLYWSSKLGGPVGGSPGGPPIGLTGGLACFFRVSRTLGEGRLRLLVINWMP

SEQ ID NO: 261394 - protein, 32 aa, Glycine max
  Clone ID: PAT_MRT3847_78060C.1.pep
IIAVVFNLTSPVDVSWHFKTIQVWGSSRQTLN

SEQ ID NO: 261395 - protein, 72 aa, Glycine max
  Clone ID: PAT_MRT3847_78061C.1.pep
LKKTRGGVFNLQQSHQYMVFPHQKYKCSYYSFYQEPPHTQSTSEWCKKCPTINNLFLTKNPQKHILACLPCF

SEQ ID NO: 261396 - protein, 32 aa, Glycine max
  Clone ID: PAT_MRT3847_78062C.1.pep
MSRFINNDSSSFFVGELIVHPIKRKKSWGFDF

SEQ ID NO: 261397 - protein, 173 aa, Glycine max
  Clone ID: PAT_MRT3847_78063C.1.pep
RLTKKDKNKPLIERISRQVDNINWLLEIMLDGQIAEDFVNIWTDQHQLIKMHENASPMVRYELSRVSAILFVAMATRKLQCRLEARSGLLQAWFRPMLLNLGWLQRCRKGLDIKVLQEAMGQTLFTLPLNQQYMLFMEWFRYFSSHGTECPNLSKAFQIWWRRSFLRGSETDA

SEQ ID NO: 261398 - protein, 63 aa, Glycine max
  unsure (1)..(63): unsure at all Xaa locations
  Clone ID: PAT_MRT3847_78064C.1.pep
GFXXXDDXFXQMCKPEXYMCITHRSEXMXSVSIHSTSVLSXIDSMVAXGTYYLDEATXWGWXY

SEQ ID NO: 261399 - protein, 80 aa, Glycine max
  Clone ID: PAT_MRT3847_78065C.1.pep
MPDTVFEQIMCHTPLFSTASYTVRTFEISINATMASDITVISKTALQLMESGSTVTEYSLLMKNFSETGCHGCDMQVHTE

SEQ ID NO: 261400 - protein, 32 aa, Glycine max
  Clone ID: PAT_MRT3847_78066C.1.pep
HNLIYFYYKTLNPFNLIHNIHIHIILSHRFSS

SEQ ID NO: 261401 - protein, 39 aa, Glycine max
  Clone ID: PAT_MRT3847_78067C.1.pep
LPRLERPKPEPTVLLHYAINTVDTAFTSKTVVTGRCHLT

SEQ ID NO: 261402 - protein, 37 aa, Glycine max
  Clone ID: PAT_MRT3847_78068C.1.pep
KVNLRSKVEIPLYCITFCVPKYLLILISNYTPLNLLT

SEQ ID NO: 261403 - protein, 94 aa, Glycine max
  Clone ID: PAT_MRT3847_78069C.1.pep
KFPPNFGVPNPFGPGYPNFFGDFLVLTGQGLSFYSPGKNLSGKPPCGKLIFFSPPRAGPPPPPPPPPPPPPPPPPPPTSEGASTTRVERQIPAA

SEQ ID NO: 261404 - protein, 80 aa, Glycine max
  unsure (1)..(80): unsure at all Xaa locations
  Clone ID: PAT_MRT3847_7806C.1.pep
RDRHNVQNYLASHPGHLCYAPSLYIHTQKHGMGGEXNSTCMMMGNKGNEPXLPETLKNYNKLVSLGFKIIFLSGXTLDKQ

SEQ ID NO: 261405 - protein, 93 aa, Glycine max
  Clone ID: PAT_MRT3847_78070C.1.pep
QKANSVGKETQLMKQNLFANQGASNLQALLWPRFVTALTHWRCQNAACNIPRSPKLTNDLKMQPSAISAKRVLACTKERKVQNSTGKSSFRGI

SEQ ID NO: 261406 - protein, 129 aa, Glycine max
  Clone ID: PAT_MRT3847_78071C.1.pep
GRIFCPKCGNGGTLRKVAVPVNENGIVLAARRPRVTLRGPKFSLPFPQGGRDAVSKNLIFREDQLPHRGLYPKTKKAHKQDDGFFTPDSVFSPPPDKKAPFQPPVRKTMAVFGGRRNPNGHPHSRSKHK

SEQ ID NO: 261407 - protein, 45 aa, Glycine max
  Clone ID: PAT_MRT3847_78072C.1.pep
FLLVCNLWNYRLNNALFHNLFYFTVSSRGYVIIESPLNMRLIICD

SEQ ID NO: 261408 - protein, 82 aa, Glycine max
  unsure (1)..(82): unsure at all Xaa locations
  Clone ID: PAT_MRT3847_78073C.1.pep
KQLYEELKRTERDKRVCEMDVEKMPYIHAMLXELVIKHTATHCVLTHAGTEPTTFGXLDIPTYACGVSGTPCIAGDPLNCSN

SEQ ID NO: 261409 - protein, 47 aa, Glycine max
  Clone ID: PAT_MRT3847_78074C.1.pep
LELEPNLSKQSEDSSLPLLRHRQAALNRVKGSLDCAHLEIIWHLDPL

SEQ ID NO: 261410 - protein, 101 aa, Glycine max
  Clone ID: PAT_MRT3847_78075C.1.pep
VVDFESGFDLILALVAESCMVNTKQMVHMAASRGGVHKLVSSSRIEKLVSLLYSKQYLPPWLETVRHFSFTDDRSGRSQQPVGESDDFFREQSDSSFKTMV

SEQ ID NO: 261411 - protein, 126 aa, Glycine max
  Clone ID: PAT_MRT3847_78076C.1.pep
IATFTLCFVLVRVVDFESGFDLILALVAESCMVNTKQMVHMAASRGGVHKLVSSSRIEKLVSLLYSKQYLPPWLETVRHFSFTDDRSGTSKQTCGESDDFFREQSDSSFKDNGSNRTQESYNVEQS

SEQ ID NO: 261412 - protein, 50 aa, Glycine max
  Clone ID: PAT_MRT3847_78077C.1.pep
MHNIYCGEARYPNVTTMTVLLLMIPFTAFSGVKLSLSHIDILNINQLNYL

SEQ ID NO: 261413 - protein, 68 aa, Glycine max
  Clone ID: PAT_MRT3847_78079C.1.pep
NSLILLSLKFNILLIMYNQLQLPINDIIWLTCKTSLTKLYKPTQHFRQDSIIGQRRTRTMYKATLPNS

SEQ ID NO: 261414 - protein, 53 aa, Glycine max
  Clone ID: PAT_MRT3847_7807C.1.pep
TPNPRNSRGPNKFYPKGKGLLKKKWIKKPGAVFSHMTPINIYYYGESQITRGM

SEQ ID NO: 261415 - protein, 64 aa, Glycine max
  Clone ID: PAT_MRT3847_78080C.1.pep
SLAFAVAFSALPLTLYIPPIRSFNLFVHTLQIFLQDSSIFSFRAFLRMRLAISRIFNSIIHVTW

SEQ ID NO: 261416 - protein, 407 aa, Glycine max
  Clone ID: PAT_MRT3847_78081C.1.pep
MAAEMKKMKSEKLWKKRNGEEEVEEASSKQRKKRKEKTTQKVVVSHFTPKTETETMLGRMRVEEQRDKERGIVLLPSKKHSGMVAFSLFILCSLILLVQPSSSSTQQPPNLDPDSIYLLGDAHVVTAADADSHVRLTRPAPSSSGILRRREPLAFADPTSLSTEFSFSVTGHGHGLLLVLAAGGNLSNYVGVEFDTSKDDNVGDPNANHVGIDVGSHVSVAVANVSDVHLVLNNGEKLNAWVDYEASSKVLEVRLSKWGAQKPSDPIVSHDIDFSKIWGANPVIAGISSSNGAHSVQVVSVYSWKLSLKKVSVSNGLHSLPADPHGNNNNKFEDEHKKLCPLTVLAGVIFGTGCVAMVTFVVLFMWVIFFQKGEEESLVKIPNHPSSDVRYERIDVAVDKNAHGDES

SEQ ID NO: 261417 - protein, 64 aa, Glycine max
  Clone ID: PAT_MRT3847_78082C.1.pep
YSFLWGPSQCFANWYASITMCFSGELLKPILVFACFDNVIWLIHIRELTNRIRANNHSLVYVLI

SEQ ID NO: 261418 - protein, 135 aa, Glycine max
  Clone ID: PAT_MRT3847_78083C.1.pep
MKKMWVSDHRLFLLCILCGLCFCLQFTTGHADSNAGRTLNQEGGDHQIHCSRERSRTAWKIIQEYLMPFVEKEKYHISKRCMLHPDNDIYRDQEQHKFHIDINEWQCGFCKKSFYEEKHLDQHFDNRHSNLLNLI

SEQ ID NO: 261419 - protein, 70 aa, Glycine max
  unsure (1)..(70): unsure at all Xaa locations
  Clone ID: PAT_MRT3847_78084C.1.pep
TMLHSSTCELPSYLHPPHNLAFQPFTSHIHPSIDPSSIIXACGPCAKHPSGDKASWSSYLKFRSSYSPSQ

SEQ ID NO: 261420 - protein, 88 aa, Glycine max
  unsure (1)..(88): unsure at all Xaa locations
  Clone ID: PAT_MRT3847_78085C.1.pep
VCGCFNXNXXKFQRLQDSXFWPKFXSVTGLPFXXRFYPDETIAKAXKHHQNDXQDNNDXNHFSSNXSSTXNHXWXXXSRMLIKRIRLI

SEQ ID NO: 261421 - protein, 302 aa, Glycine max
  Clone ID: PAT_MRT3847_78086C.1.pep
MGPTSMAAGRVTRFLARHYPLEHHRDNADVEFDFLDDIGEALLAQSASSDECGHPNEMEEQFDQDEDHRDTVEENRTFWDKQHQLLQASICRTSSSESRIRHATKEALQEIQSAETVCGCGRQVAVITTCRNCLMREVSRRLQKAGYDSAICKTKWRSSPDIPSGEHNFLDVIDSTKKGEVRVIVELNFRGEFEMARGSEDYNRLVRRLPEVFVGKVERLSNLIKILCMGAKRCMKEKKMHMGPWRKHRYMQAKWLGPCERNTSTTSLSVRYNSERILPRPKASMLTVDLLEKPSQYALHCC

SEQ ID NO: 261422 - protein, 124 aa, Glycine max
  unsure (1)..(124): unsure at all Xaa locations
  Clone ID: PAT_MRT3847_78087C.1.pep
LAGPDGRVLGGEVVGALTAATAVQVLLSNXVLGSFIADGKKSSSSYLKSGRSLTPSSQMLAFGASRTPTTPTSQGPSTESSEDNENSHFSQGPGGPGLYDNNASQPIHTMPMYQHQLWAGHTQQ

SEQ ID NO: 261423 - protein, 163 aa, Glycine max
  Clone ID: PAT_MRT3847_78088C.1.pep
MGGTSVAAGRRVTRFLASHHRDVTCVVADVEFDFLDDIGETLLAQSASSDEMDRFDEDEDHRDTVEENRTFWDNQHQLLQTSICRTSSLESRIRHATKEALQEIQSAETVCGCGRQMAVASCRNCLMREVSWRLQKAGYNSAICKTKWRSSPDIPSGEHNFLD

SEQ ID NO: 261424 - protein, 75 aa, Glycine max
  Clone ID: PAT_MRT3847_78089C.1.pep
TLVVWPLFRSFVAEFSPTNQLTFLSGLSDINHCFALLPPSHQLPLRHASPSHWRLMPYYFRAWKTVTGPWTVRSR

SEQ ID NO: 261425 - protein, 68 aa, Glycine max
  Clone ID: PAT_MRT3847_7808C.1.pep
VSGSSFPPPGPGLSEGQYGFEGRNRPLKGPMVHQNFLQRPKKLKPPWGKFKRSQPQLKSAILWQKGFF

SEQ ID NO: 261426 - protein, 45 aa, Glycine max
  Clone ID: PAT_MRT3847_78090C.1.pep
QWLVVRMPGLNEPTLDSMRLSGLRAVCFWILLSLCCEALSERISL

SEQ ID NO: 261427 - protein, 69 aa, Glycine max
  unsure (1)..(69): unsure at all Xaa locations
  Clone ID: PAT_MRT3847_78091C.1.pep
TIKIXDAGPXIDTMVVLLENMSNITVMARTLIAAVYRTAQIVASIPNLSYQNKAXPEALFHQLLLAMVH

SEQ ID NO: 261428 - protein, 116 aa, Glycine max
  Clone ID: PAT_MRT3847_78092C.1.pep
QHVYCQPDYIILRGVIWPFQIVDRPSNESSITLFCRNQMRSPFHPLHRPLQARSDTKEINQESCCVSAISFSCFSSSIMLVISSSYNIEIISLNEYVTHFKRSMPRCHKRNLSSKW

SEQ ID NO: 261429 - protein, 471 aa, Glycine max
  Clone ID: PAT_MRT3847_78093C.1.pep
MTTTPVVQRISECFVKPHGLTQVSNQICHLTQWDIVMLSKHYIQKGLLFKKPTPLVDQHDFIENLLEKLKHSLSLTLSHFYPLAGRLVTQKSQDPPSYAVSVDSKNSDGARFIYATLDMTISDILSPVDVPLVVQSLFDHHKAVNHDGHTMPLLSIQVTEIVDGVFLGCSMNHAVGDGTSYWNFFNTWSQIFQSHAQGHEYNVPISHPPILNRWFPSDCDPSVNLPFKHHDEFICNFEAPFLRERVFHFSAESIAKLKAKANSESNTTKISSFQSLSALVWRSITLARSVPYEQKTSCKMAINNRSRMEPPMPEEYFGNLVQVVSAETTTRELLENDLGWAAWKLHVAVTNHNDRVVLQSLKEWLQSPLIYQLGQPMDPYVVLISSSPRFNMYGNEFGMGKAVAVRSGYANKFDGKVTSYPGREGGGSIDLEVGLLPHIMSALESDEEFMNVEFRFPIPYASLLLFPLFDR

SEQ ID NO: 261430 - protein, 334 aa, Glycine max
  unsure (1)..(334): unsure at all Xaa locations
  Clone ID: PAT_MRT3847_78094C.1.pep
MMTGKSDLLSIRVPYKNLHHDSSALELELVDVNHRNLPPSXPPTHHSPSPPNNTNINAPLLHLVLSCTVAAGVQFGWALQLSLLTPYIQTLGIGHAFSSFIWLCGPITGLVVQPCVGIWSDKCTSRFGRRRPFILAGSLMICLAVILIGFSADIGYVLGDTHEHCRTFKGTRTRAALVFILGFWMLDLANNTVQGPARALLADLSGPDQRNVANAIFCSWMAVGNILGYSSGASGKWNKWFPFLTTRACCEACGNLKAAFLVAVVFLTLCTLVTLYFADEVPLTTASQHHHLSDSSPLLDEQQQNGVDFSKLKPLSVMDESNSKRTENHIEKDT

SEQ ID NO: 261431 - protein, 41 aa, Glycine max
  Clone ID: PAT_MRT3847_78095C.1.pep
RENASKSTAACKTCMATTLVIVIGQITANAIVDDAFTVCDT

SEQ ID NO: 261432 - protein, 68 aa, Glycine max
  Clone ID: PAT_MRT3847_78096C.1.pep
SISIHFSIFRTSLYYFSLTIFNFYFIFYFLFIFTHQLCFHPCYFSSLSNKFIMFTSTLYRHVIILLSC

SEQ ID NO: 261433 - protein, 45 aa, Glycine max
  unsure (1)..(45): unsure at all Xaa locations
  Clone ID: PAT_MRT3847_78097C.1.pep
TSTSTTPKSGGDISILIIFFLYRSNALIPIRLPXSSHGFYRYDAY

SEQ ID NO: 261434 - protein, 170 aa, Glycine max
  unsure (1)..(170): unsure at all Xaa locations
  Clone ID: PAT_MRT3847_78098C.1.pep
ARGEIFSSGHAVNLLEAPHSFHVGLNSVQFSGPTVETPAPAPAPAPAPAPAPVPVIAPVMNSGSTEGKKKRGRPRKYGPDGKVALSPMPISASIPFTGDFSAWKRGRGKPLESIKKTFKFYEAGGAGSGDGIAYSVGANFTPDILTVNDGEDVTMKIMSFSXQGYRAICI

SEQ ID NO: 261435 - protein, 70 aa, Glycine max
  Clone ID: PAT_MRT3847_78099C.1.pep
YGHPLSGSLPIRPSTLSPPPSSTLVSKSHPLWLKLEGVHKSYAPPATNGNNTHIPIVRNSKRVLEAKKST

SEQ ID NO: 261436 - protein, 74 aa, Glycine max
  Clone ID: PAT_MRT3847_7809C.1.pep
FTGHLCPYNFQFFIIISSNSYGYHLPTLRRKIDASITNNFLFLNFISFQLHNQGSYQYEIRLGKLFSSFFRIEW

SEQ ID NO: 261437 - protein, 68 aa, Glycine max
  Clone ID: PAT_MRT3847_780C.1.pep
SELENPLVRSNLNGGHTQIRREFVFVSFLKFVSPLPEFASSKFFISLLLIAFNKREGHPPLPKPAKGA

SEQ ID NO: 261438 - protein, 234 aa, Glycine max
  unsure (1)..(234): unsure at all Xaa locations
  Clone ID: PAT_MRT3847_78100C.1.pep
MVWFVVDYGACGRALQLEAPSLSPAAAPVVAVDDLPLPTNAHGLKHLPAPIPSRANFTKGRGELQPPVSGFKNIAPMHPIADAIPSALAQPPLSPYVSDCCKQDMVWKRGSEVCHCAYPIKLDLLLLNVSENPDQNAFLNGLATQLELQTTQIEIIKFYLLSLSTLNISMDITPHKGISFSAEEAAKINSLLLLHKVQLDRRFVGDYKVINITWFKPXPHSSAPTISTXPMKAP

SEQ ID NO: 261439 - protein, 70 aa, Glycine max
  unsure (1)..(70): unsure at all Xaa locations
  Clone ID: PAT_MRT3847_78101C.1.pep
YIEHDLTYYRTLLQEMNXIHNKTPVHIHHVTPIXYSLINVAYIDIILIQPKYFASLSFLPKSSNQPYELI

SEQ ID NO: 261440 - protein, 78 aa, Glycine max
  Clone ID: PAT_MRT3847_78102C.1.pep
TYFFLMVHDNSKSGVLFNFVIPVKLTTINNMCAYVLNPYLSSSRNLFTIPYSISHQTVLNQISTLKTPFNYHTTKQNF

SEQ ID NO: 261441 - protein, 531 aa, Glycine max
  Clone ID: PAT_MRT3847_78103C.1.pep
MKPQKSRIPVLEKHLINQLSSDEQNSINSKFQEATEADKKVEELEKEIMESREKIEFYRAKMQELVLYKSRCDNRLNEVIERIAADKHEVEILAKKYEDKYKQVGDLSSKLTTEEATFRDIQEKKIELYQAIVKMEQDGKGDATLQAHVDRIQTDLDELVKSLNERCKKYGLRAKPTTLLELPFGWQPGIQEGAADWDEDWDKLEDKEFVFVKELTLDVQNIIVPPKQKLPSAVNTKAVNVEAVNTEAVNVEAVNTEAVNTDSPTFAASPKSDDKSEKPRTTNEQGVGNGSVYNKSEDGSVKSAPNSPFASSAIGSPHGDFDSDIRKTAGEDSSLRDQDTIQETQSDHGGVKSVFSGDKIFDEPNWGTFDTNDDIDSVWGFNASSFTKEERDLDRAGNNYFFDSGELGLNPIKTGSPQAGDFFQRSSGFGFDDSVPSTPLYSSSSSPQRPKEWLETAFDFSRFDSFRTHDSVSLPARETTEQYDSVRNSVDFDHAHGFPAFDDSDPFGSGPFRTSSDNQTPRRGSDNWSAF

SEQ ID NO: 261442 - protein, 121 aa, Glycine max
  unsure (1)..(121): unsure at all Xaa locations
  Clone ID: PAT_MRT3847_78104C.1.pep
ELHYLFIEPMCKRMAAKSSWALSMCIRLCCMARTAIINLRGIXEIIIGGIEHXIGAYEAIXSAVLAVIDLLGSALAITYXLTIAVTCXLTAXSGGRQGLAXGVCNHAIVIPEMIICLASVS

SEQ ID NO: 261443 - protein, 362 aa, Glycine max
  Clone ID: PAT_MRT3847_78105C.1.pep
MASSQPEMEHPKKVFGWAARDSSGLLSPFNFSRRETGEKDLVFKVQYCGICHSDLHMLKNEWGNTTYPLVPGHEIAGVVTEVGSKVQKFKVGDRVGVGCMIGSCRSCESCDENLENYCPKMILTYGVKYFDGTITHGGYSDLMVADEHFVVRIPDNLPLDAAAPLLCAGITVYSPLRYYGLDKPGLNLGVVGLGGLGHMAVKFAKALGANVTVISTSPNKKKEAIENIGADSFVVSREQDQMQAVMGTMDGIIDTVSAVHPLVPLIGLLKPHGKLVMVGAPEKPLELPVFSLLMGRKMVGGSSIGGMKETQEMIDFAAKHGVKPDIEVIPIDYVNTAIERLAKADVKYRFVIDIGNTLKPSS

SEQ ID NO: 261444 - protein, 238 aa, Glycine max
  Clone ID: PAT_MRT3847_78106C.1.pep
FVPADIQGVYEHTTLASPPTKELHSASHNQLDADDIEERRVGSVQRGLGGSLSGGTEAAVAREAFEGMIETLSRTKESIGRATRLAIDCAKYGIANEVVELLIRKLETETSFHRKVDLFFLVDSITQCSHNQKGIAGASYIPTVQAALPRLLGAAAPPGASARENRRQCLKVLRLWLERKIFPESVLRHYMDDIGVSNDDMTVSLSLRRPSRAERSVDDPIREMESMLGDEYGSNATF

SEQ ID NO: 261445 - protein, 81 aa, Glycine max
  Clone ID: PAT_MRT3847_78107C.1.pep
IRINNLRKTKGVCVQTINLQTKDRHIKSIRKRRHFECVLQGVSNNDSTSTQTVKQALQNQTQKSLCIGEIPKDNHHSLQKC

SEQ ID NO: 261446 - protein, 58 aa, Glycine max
  Clone ID: PAT_MRT3847_78108C.1.pep
AHSLLGNNVTHSNISAFIISSKPKTSHYAFTVPLGGRVGPPVNPGQCPRGLPASPIFI

SEQ ID NO: 261447 - protein, 136 aa, Glycine max
  Clone ID: PAT_MRT3847_78109C.1.pep
SWGPCCLCSGTKLGFASLKPPRIRGVPFGNFFLTKKEGPILKLGGPIRAFWHKNWENLGPGEFNLFRGRGGIQPPGFLGFLIFSHPLGKNEFFFFLPAPFGGGPPTKWGSFWVGKHLFYFRGGLWNKITGKGSGGG

SEQ ID NO: 261448 - protein, 151 aa, Glycine max
  Clone ID: PAT_MRT3847_7810C.1.pep
MGNQYHQATDGLLSLFTKANHDLSMVHHRLEKEFQQVYPDNANPMKLVSRIKKVQEDISILKGQCHELLAAKQDLIDKAQRVLVENRNLVQRMQPSLGISPSGEDDAAFTNFKQVIEEWTAQVRSKTGNETHDADSGDINKLLFSAIVQSN

SEQ ID NO: 261449 - protein, 58 aa, Glycine max
  unsure (1)..(58): unsure at all Xaa locations
  Clone ID: PAT_MRT3847_78110C.1.pep
RXFSXEXXNXXTMQNSVXQFXTLTRQLXLAHXLTLSNXLXLXPPXXSVFXYTENQTQS

SEQ ID NO: 261450 - protein, 337 aa, Glycine max
  unsure (1)..(337): unsure at all Xaa locations
  Clone ID: PAT_MRT3847_78111C.1.pep
MGKVAVGAAVVCAAAVCATAALVVRHRMISSRKWSRAMAILKEFEDKCGTPIVKLRQVADAMDVEMHAGLASEGGSKLNMLISFVDNLPTGDEKGLFYALDLGGTNFRTLRVHLGGKEKGVVKIESEEVSIPPHLMTGSSQELFDFIASKLAKFVSSEPEELHPPPGRQRELGFTFSFPVKQTSIASGTLIKWTKGFNIEDAVGEDVVGGLTKSLEKIGLDMRVAALVNDTVGTVARARFSNQDVIAGVILGTGTNAAYVECAHAIPKWQGLLPKSGEMVINMEWGNFCSSHLPXTEYDQALDAESLNPGEQIFEKIVSGMYLGDIVRRVLLKMAEE

SEQ ID NO: 261451 - protein, 74 aa, Glycine max
  Clone ID: PAT_MRT3847_78112C.1.pep
NKNTQNGTKSMKDKSKEPFPVPTHDYKKLSPIPNPFPSMCGFAASSISTNLSTKPSHFSPSRSPTSSLSVILYL

SEQ ID NO: 261452 - protein, 458 aa, Glycine max
  Clone ID: PAT_MRT3847_78113C.1.pep
MPPFAGSEPVGFPKPDSNIVSIDVGGQLFQTTKQTLTSAGPKTFFSRIAAESSGLHTPFVDRDPELFSLLLSLLRTGNLPSKAKAFDLQDLIIESKFYGIESLLVNSLSNPSQLEPFNLQKSLLLPLNGRDSPSALAATASGALQVAHGSKITSFDWSLRRKSTVLTQFTAVDSLLALSPALAAAGANDFSGLQILDLEKGRVRETINWENVTKSGSTVQAIGSSPENMFVSFESSRRNSNSIMVYDLHTLTPVTEISHNEIFGANIDSAIPATKLQWIEGYNLLMASGSHSGPSGVSGNIRLWDVRSGNVVWEVSEKVDCFADVAVCDSLSVIFKVGVNSGEASYVDLRNLSSGESAWVCLGDKRKILNGKKEGFGCKIETQGNQVFCTKGGDMELWSEVVMGSGNSGRIFKKNLMGRVRDMGGAKITNLAFGGSPMFLTRKDQQCVEVWQSSSREF

SEQ ID NO: 261453 - protein, 496 aa, Glycine max
  Clone ID: PAT_MRT3847_78114C.1.pep
MGKVAVGTAVVCAAAACVAAALVVRHRTRSSGKWGRATAIAKELEEQCWTFFSKLRQVADALDVEMHAGLASEGGCKLKMLITYVDNLPSGDEKGLFYALDLGGTNFRTLRVHLGGKEKGVVKIESDEVSIPPHLMTGSSQELFDFIASKLAKFVSSEPEELHPPPGRQRELGFTFSFPVRQTSIASGNIIKWTKGFNIEDAVGEDVVGELTKSLEKIGLDMRVAALVNDTVGTVARARFSNQDVIAGVILGTGTNAAYVECAHAIPKWHGLLPKSGEMVINMEWGNFRSSHLPLTEYDHALDAESLNPGEQIFEKIISGMYLGEIVRRVLLKLAEEVDFFGDTVPPKLRIPFVLRTPDMSAIHQDTSSDLKVVGNKLKDILEINNTSLKMRKIVVELCDIVANRGARLSAAGIFGILKKIGRDTVKDGKKSVVALDGGLFEHYTKFRSSLESTLKELLGDEAAETIGIEQSNDGSGIGAALLAASHSQYLEVQES

SEQ ID NO: 261454 - protein, 79 aa, Glycine max
  Clone ID: PAT_MRT3847_78115C.1.pep
KKFEKKKNKKGLNWFPLPLPKNKLNPILNNHLSKDFFIPHSIISVFISLFDILVIAESATTKILFSDVIFVLLLIDSVV

SEQ ID NO: 261455 - protein, 283 aa, Glycine max
  Clone ID: PAT_MRT3847_78116C.1.pep
TCHTSLVVASRFKVERNKQTKQSQASPNTPSSSSSSKPSTTMALKRASWLLLLPLLSAVAAAATNTNSVYHPCSDARIQRSDGFTFGIAFSSRDSFFYNQNQSLQLSPCDRRLSLSSSNAQLALFRPRVDEISLLTINTSSFFPDNYGGYMVAFAGKKYAARSPLAFVANSTYTVTSFTLVLEFQRGRLHNLYWKRDGCSSCKGKSNLVCLNKQDCAIRTSSCKGRGGAVDCSLGIQLAFSGTDRHLRVLNSWFEVENLRQYSLYGLYSNLRDSLTSQYNKFF

SEQ ID NO: 261456 - protein, 219 aa, Glycine max
  Clone ID: PAT_MRT3847_78117C.1.pep
VSFMEVAPESEKRDGDTDCSAFSMEIIALEREKRDGETECSVFMDTHCDVHEDGVKTEVPTESSVSEEIDSDIREDGMSRGIEEKGSSFMNSDTDNYVTHDNNREIERETQELGFMETDSDVHEDGKRNDEDETENSVFVENDSDLHRRIMEREEEEIKEHVSAEIDTVVHEEFKKIDENETGSGVLMENVSSETVNDDGAETDENDEGFVHGEDTKIE

SEQ ID NO: 261457 - protein, 46 aa, Glycine max
  Clone ID: PAT_MRT3847_78118C.1.pep
RSFVYVLPTWNTPLRGLHRFARTNNLKMIIKSFISSLSLTATAANT

SEQ ID NO: 261458 - protein, 374 aa, Glycine max
  unsure (1)..(374): unsure at all Xaa locations
  Clone ID: PAT_MRT3847_78119C.1.pep
MNHSYANQSAQEVNIVTEDTRRSANYKPNIWKYDFLQSLDSKYDEEEFVMQLNKRVTEVKGLFVQEASVLQKLELADWIQKLGLANYFQKDINEFLESILVYVKNSNINPSIEHSLHVSALCFRLLRQHGYPVLPDTLSNFLDEKGKVIRKSSYVCYGKDVVELLEASHLSLEGEKILDEAKNCAINSLKFGFSPSSININRSLQSXVEKMVHALELPSHWRVQWFEVKWHVEQYKQQKNVDPILLELTKLNFNMIQAKLQIEVKDLSRWWENLGIKKELSFARNRLVESFMCAAGVAFEPKYKAVRKWLTKVIIFVLIIDDVYDIHASFEELKPFTLAFERWDDKELEELPQYMKICVHALKDVTNEIAYEIA

SEQ ID NO: 261459 - protein, 89 aa, Glycine max
  Clone ID: PAT_MRT3847_7811C.1.pep
LGKKLGNFLLFAPPDGVVRVWAFGRYWVRLFSVFRSYFVSEFSFKFNSCWAVELIFLLYFPWPSALLKKKKTLVLDNYMNKKNIKLNIF

SEQ ID NO: 261460 - protein, 68 aa, Glycine max
  Clone ID: PAT_MRT3847_78120C.1.pep
FIARLSPPPWVVLFSPHPLIFRQSPLSGEVFVRGFFVTSPRPRFLGVLGVLVLRGPLFLLRHSGLFYK

SEQ ID NO: 261461 - protein, 51 aa, Glycine max
  Clone ID: PAT_MRT3847_78121C.1.pep
ILDPRGRILFIFLKVSTNWSRFHNFAPKISPRALHWNLCRKAAPICGFKKE

SEQ ID NO: 261462 - protein, 121 aa, Glycine max
  Clone ID: PAT_MRT3847_78122C.1.pep
MGLFRSKGVIYRPVKDVNLGPDSTEFYLQANVKAPRMTGILVKIFTWFLESPILGPLLLYILKGNNLIHKLITNADLEESPLYVPSHHFEDHKEQEVKCLDSALTPEEQVQLAIECLPTSS

SEQ ID NO: 261463 - protein, 139 aa, Glycine max
  unsure (1)..(139): unsure at all Xaa locations
  Clone ID: PAT_MRT3847_78123C.1.pep
MAISLLTEHYGACRYPPVEQVTMSTVRAIARIIDRCLDCTLTDLQATHKITPCQLTAYMANPLYYTGAMIIAGDTLESDELXHDLESTDKHFFETCEDLDYTWLHYTLKXYFATPLEHIILRFPNXIAYSTGSPFWSAP

SEQ ID NO: 261464 - protein, 104 aa, Glycine max
  Clone ID: PAT_MRT3847_78124C.1.pep
TREKTQKEGRFSISQSQTPDWAHGMPQWKVKVTNKCACAQSQVKLNCSEFQTNFVENPSILNISGNVCLLKNGLPIGIGETVEFLYAWLPKFPFQPISSIGDCN

SEQ ID NO: 261465 - protein, 110 aa, Glycine max
  unsure (1)..(110): unsure at all Xaa locations
  Clone ID: PAT_MRT3847_78125C.1.pep
KNLGLTKLNRFEKNPLFASWVKKKKARTNRLSKNLPTLNGKWNPPLIGQXSAGVLVFTPKLTVKFARALTPVLLVFFLSFLASFAGFPRKVLNXGVPLRVPIKCLTELEP

SEQ ID NO: 261466 - protein, 73 aa, Glycine max
  Clone ID: PAT_MRT3847_78126C.1.pep
RPRVRSRTRAIYALFEPLEDIKASRSSNSNVNTSLHGCAVQFIEGETWTIIMAAVNMKSRVPPSKKEAPTPVS

SEQ ID NO: 261467 - protein, 104 aa, Glycine max
  unsure (1)..(104): unsure at all Xaa locations
  Clone ID: PAT_MRT3847_78127C.1.pep
KARDLVSLYGANAYPFPEERIKEIKPAQEEPPKGWPEKFKLXFHEHDLVFTPPRVYYFDPSNEKGQIWSSPCGDCAFDPPPKCALEKGAKKGTKVFPKEKKSKN

SEQ ID NO: 261468 - protein, 140 aa, Glycine max
  unsure (1)..(140): unsure at all Xaa locations
  Clone ID: PAT_MRT3847_78128C.1.pep
MPDDRDSCNHQHQTLWVITNAXLNHDALAANRRLNVPHPIDKLXLPQYRDTVDITVTLRHALIKASRALICHSFVAVPLSEDMNTERYKMTFLTVEALPGLLMKIGTGDYDASSAYDLYACDHDYPYAVDGLKIWRAIQT

SEQ ID NO: 261469 - protein, 43 aa, Glycine max
  Clone ID: PAT_MRT3847_78129C.1.pep
KKKIKKNKKKKKKKKKKKKKKKKKKKKKKRGSCLKWNCSSEPY

SEQ ID NO: 261470 - protein, 73 aa, Glycine max
  Clone ID: PAT_MRT3847_7812C.1.pep
QNPEWSIVHPRALSGSVSAKKWNQIIYKGQRSVGHVCDGSVFPLPSTHQQHVYVYVLCSVVCVCVRSYAEQRP

SEQ ID NO: 261471 - protein, 82 aa, Glycine max
  Clone ID: PAT_MRT3847_78130C.1.pep
MRMMSGRVSGKVTWFNDQKGFGFITHDNGTEELFTHQSDIKSDGFRRLAEGASVKFTIAFKSAWTLHDVDVTGPDGSRVQWT

SEQ ID NO: 261472 - protein, 139 aa, Glycine max
  Clone ID: PAT_MRT3847_78131C.1.pep
RARPVSILFFFFFFFFFFLGFFFFFFFLFIVLFNLVIVMVISCFLREIVFRSKFPEKKRKNPFLGGRGGPRENPTALIAGHSLPYMQGGKRPGKRQKKTAPGEKKDARKKPQKKGAPKKKEDGRGGPKGDPPPLEGGGK

SEQ ID NO: 261473 - protein, 129 aa, Glycine max
  Clone ID: PAT_MRT3847_78132C.1.pep
RSRPRDSFCRPFRKKGTIALTTYLRTYHVGDYVDVQVNGDVRQGMLHKVYRGTTGHVWNVSESVVGDQVNNHVGDSIITETIHVRLEHVMPSMCTEDLRLMKIKSDQLMAEAYVKGERISTWRQSMGGK

SEQ ID NO: 261474 - protein, 72 aa, Glycine max
  Clone ID: PAT_MRT3847_78133C.1.pep
KSFAEYGLFSVRPGDRMYIVYASRTRALFTIHVFSRSSALVFDQYASFVQQVFFTYFFSREKPAHFGYQGLS

SEQ ID NO: 261475 - protein, 74 aa, Glycine max
  Clone ID: PAT_MRT3847_78134C.1.pep
MERKTFGFLFLLLLVLASDVTVKRAEAKDCLTRRHGFQGRCLFDRQCAHVCRSDGFIGGQCRGPLRKCFCSRPC

SEQ ID NO: 261476 - protein, 62 aa, Glycine max
  Clone ID: PAT_MRT3847_78135C.1.pep
SDGVKIDVTVKRAEAKDCLTRRHGFQGRCLFDRQCAHVCRSDGFIGGQCRGPLRKCFCSRPC

SEQ ID NO: 261477 - protein, 164 aa, Glycine max
  Clone ID: PAT_MRT3847_78136C.1.pep
EGGITHVQFSRDGNYLYTGGRKDPYILCWDVRKSVDCVYKLYRSSKNTNQRILFDIDPSGKYLGTGGQDGLVHIYNLQTGQWVSSFEAALDTVNGFSFHPFLPHAVSSSGHRRFVIPDDGNEEFCLTGRENCLSMWTFCCDSMMETDLKNDGSFNNQSESRCLD

SEQ ID NO: 261478 - protein, 94 aa, Glycine max
  unsure (1)..(94): unsure at all Xaa locations
  Clone ID: PAT_MRT3847_78137C.1.pep
AILNNITFNTAGEPKPWEWAHYYIRGDYTQQKKRRKKITLRNCIRKQTNLFLQGLRTSCEIFKSHVHNWRXTVLDKLESKLACHTYPCLGRYTQ

SEQ ID NO: 261479 - protein, 79 aa, Glycine max
  unsure (1)..(79): unsure at all Xaa locations
  Clone ID: PAT_MRT3847_78138C.1.pep
FGFHRDNXGGTGRTATPTQEXQETKDXAKXSQERXARTQRXXXPQKPXAGKRXKGKPXXPQGTXRSGKRTPHTIGGGXG

SEQ ID NO: 261480 - protein, 63 aa, Glycine max
  Clone ID: PAT_MRT3847_78139C.1.pep
IIFLGVRFQNVAGGFPLDQISIGNPSFFGMMHSLNTLLQFRALIQQKKAGVYSIQAPLRAWTS

SEQ ID NO: 261481 - protein, 49 aa, Glycine max
  Clone ID: PAT_MRT3847_7813C.1.pep
LKNDPSHCYANRVWNWCDCMDHPPVELDGKCTIVKGASYISQEPKEPQS

SEQ ID NO: 261482 - protein, 108 aa, Glycine max
  Clone ID: PAT_MRT3847_78140C.1.pep
RGRPQASATPVRLQGPKPIPQPFFFSSIRPPFLLLHTATSASPSPWGGQLTSSFRARPLGRLGLAGGDPLFPASVPPPVPPVKEEGKAPRGGGFNAKKNRGGPGPRRT

SEQ ID NO: 261483 - protein, 308 aa, Glycine max
  unsure (1)..(308): unsure at all Xaa locations
  Clone ID: PAT_MRT3847_78141C.1.pep
KSVHGSDFVKTDEKLFELLNAIVEEVAQENVVQVVTDNGSNYVLAGKLLEEKRKHFYWTPCAAHCIDLMLEDIGKLPLIRKTIRRAINLVGFIYAHSSTLSLLRNFTNKRELVRHAITRFATSYLTLERLHKEKANIRKMFTSDEWTLNKLSKEPKGKEATKVVLMPSFWNSVVYTLKVMAPLVKVLRLVDGERKPAMGYIYEAMDKAKETIIKSFNNNESKYKDVFAIIDXVWNGQLHRPLHAAAHFLKPEFLYDNTDLEFDFEVTNGLFECIKKLIPQFDVQQKILTELHLYKIGADHFGSDFAMA

SEQ ID NO: 261484 - protein, 94 aa, Glycine max
  unsure (1)..(94): unsure at all Xaa locations
  Clone ID: PAT_MRT3847_78142C.1.pep
LPATTGGGIQRSGQLTRQDGQIFYSLLNENNSQVXLNGFMIQDNKNTFGLAAVGPSKDPQMXNVEEARTLYPMEMYHNRKXGRSSKFLQVAVKN

SEQ ID NO: 261485 - protein, 112 aa, Glycine max
  unsure (1)..(112): unsure at all Xaa locations
  Clone ID: PAT_MRT3847_78143C.1.pep
TEYHRGIILPNAAFADPDGIHIHQSIYWDSSARFNCPYCAYTVLTTARSVPSLAAFVGCXMPMTLADRFLCPSMDCLCHLYHYCAKCLDKAADTEKSDPCVVMDPAHWTDVS

SEQ ID NO: 261486 - protein, 293 aa, Glycine max
  unsure (1)..(293): unsure at all Xaa locations
  Clone ID: PAT_MRT3847_78144C.1.pep
MVFPSSSLSLFFPIPTLLPNNLIFRNNTRAILNQHKCPFSEERPRFSCCALKPTSQNRIFRRDLMLLGLTSLSPTMPLSVTLAEEEPKMASFLDEINAYSYMYPVELPSDNFTFKWIESRKPERYSXSAAPLSPDARXRIVSERLDFIDNVIISVTIGPPNSSYIKSKXDRSKWNXKNVADSVLADXSSLRVTSSQRLEESSVLNTHSSEIDGEMYWYYEYLVRKAPLRLTDESSTYRHYLASTAERDGYLYSISASTVSPLWEKLGPFLDKAKIMFLRTKIPGDFGEISIYF

SEQ ID NO: 261487 - protein, 73 aa, Glycine max
  unsure (1)..(73): unsure at all Xaa locations
  Clone ID: PAT_MRT3847_78145C.1.pep
LIIIFSSITILFPFETTFFLLLLFPFIHCVQGDDXSDNSTSRDIPDPPGFSRTSLDQDDSTLSRQKKDAESNW

SEQ ID NO: 261488 - protein, 220 aa, Glycine max
  unsure (1)..(220): unsure at all Xaa locations
  Clone ID: PAT_MRT3847_78146C.1.pep
QNRIFRRDLMLLGLTSLSPTMPLSVTLAEEEPKMASFLDEINAYSYMYPVELPSDNFTFKWIESRKPERYSSAAPLSPDARLRIVSERLDFIDNVIISVTIGPPNSSYIKSKDKSKWTAKAFAXCYLADLLSFFHGTNVAVMITFNLQIIIVQTDESSTFRHYFASTAEKDGYLYSISASTVSPRWEKLGPFLDKTGSSFRFFSPTENYVPPYKDPWRFW

SEQ ID NO: 261489 - protein, 72 aa, Glycine max
  Clone ID: PAT_MRT3847_78147C.1.pep
LINLVLEAGMIRLWQRQPPQRKKRTFPRKKRRKLIVLVFFYPFEKIFQGIPKRVEFSGGGLVFFPLLLPIGI

SEQ ID NO: 261490 - protein, 59 aa, Glycine max
  Clone ID: PAT_MRT3847_78148C.1.pep
YTRVSEYIVIIIFWVSSESVRAHPHMAHPGDSFSTPEFFRSLMVGASSGCTRAHTTLLI

SEQ ID NO: 261491 - protein, 71 aa, Glycine max
  Clone ID: PAT_MRT3847_78149C.1.pep
HFTYFAFYRVSFLTHPPPRILPTTPLTHVVYFTTNISFYPHWAAYSLYPVLSAGYRSSLRTFNILIAPYHN

SEQ ID NO: 261492 - protein, 101 aa, Glycine max
  Clone ID: PAT_MRT3847_7814C.1.pep
PVIFCFVSTICVINYVVCDDWSGFVCVLHTHLYVVMLNIGMALGFASPKWSLYYFLPDVVTTCAHRRVIYFGIFRVSQRESPRPLARLFDRYSKGHAGGVL

SEQ ID NO: 261493 - protein, 37 aa, Glycine max
  Clone ID: PAT_MRT3847_78150C.1.pep
MLEAYEYEPRLVTLCTDLSALRKSFQQCYMPLLILVL

SEQ ID NO: 261494 - protein, 71 aa, Glycine max
  Clone ID: PAT_MRT3847_78151C.1.pep
NYHYNYISSYFLDFNYISNYFLIHFSNIFSFPTCLCLPGWNGMFFLWGVFRGQKANNSASTPVSNSLKVLT

SEQ ID NO: 261495 - protein, 55 aa, Glycine max
  Clone ID: PAT_MRT3847_78152C.1.pep
GYCFFPLKYIYKHGGSMFFFIKKSNNANWLSFQLYGRHQLKEFQCGGALVLVPIF

SEQ ID NO: 261496 - protein, 106 aa, Glycine max
  unsure (1)..(106): unsure at all Xaa locations
  Clone ID: PAT_MRT3847_78153C.1.pep
XRDCXLXFVXWLXFVSXXXCCXXXSLXXXXXFXXXXLXXRXXIIXXXXLCFXXXXMFXXVCXGGXXXLXXXCXFXXFCGSVXXFVXVXSXXXGXAXXXCFRXXXCV

SEQ ID NO: 261497 - protein, 35 aa, Glycine max
  Clone ID: PAT_MRT3847_78154C.1.pep
GVCSQRQSKLYVPFGNIWSRFLVYDATTYLFSSRI

SEQ ID NO: 261498 - protein, 42 aa, Glycine max
  Clone ID: PAT_MRT3847_78155C.1.pep
IGNDHAESNAREYTSRVSGSKTSSHMKTRPLCSFVVSYVSSK

SEQ ID NO: 261499 - protein, 106 aa, Glycine max
  Clone ID: PAT_MRT3847_78156C.1.pep
RYYDDSACVLRKMLLDAKAPHLSSAIPPTLPWKVNELVQPSEPLTRQGSGINGSFGDSEELRCVIAVIRHGDRTPIRLELLVSCITDYIVLILIVCVIVIRLHDIG

SEQ ID NO: 261500 - protein, 106 aa, Glycine max
  Clone ID: PAT_MRT3847_78157C.1.pep
PSIFPSPPPFLFILSLSPLGLGSPSPPTPHLLLLKHNLFSQIKLNRQTYSIKSTLAKLNSPPSLETSLAKPHSPYPPDQLLKFYPPSYPFFPNPAPVLSIPAPLPY

SEQ ID NO: 261501 - protein, 51 aa, Glycine max
  Clone ID: PAT_MRT3847_78158C.1.pep
PNHHCNARRQCFSSSHLFNYFRPGSFINLIQQAVVAYYKLGSYQGRPTLTV

SEQ ID NO: 261502 - protein, 400 aa, Glycine max
  Clone ID: PAT_MRT3847_78159C.1.pep
MEERTRSILILMTLLSISIAGGNAGGLQHHKGRHGKHGRHMSARNVTYDGKSLFINGRREILFSGSVHYTRSTPDMWPDILDKARRGGLNVIQTYVFWNAHEPEPGKFNFQGNYDLVKFIRLVQAKGMFVTLRVGPFIQAEWNHGGLPYWLREVPGIIFRSDNEPYKFHMKAFVSKIIQMMKDEKLFAPQGGPIILAQIENEYNHIQLAYEEKGDSYVQWAANMAVATDIGVPWLMCKQRDAPDPVINACNGRHCGDTFAGPNKPYKPAIWTENWTAQYRVHGDPPSQRSAEDIAFSVARFFSKNGNLVNYYMYHGGTNFGRTSSVFSTTRYYDEAPLDEYGLPREPKWSHLRDVHKALLLCRRAILGGVPSVQKLNHFHEVRTFERVGTNLGAGFITNN

SEQ ID NO: 261503 - protein, 163 aa, Glycine max
  Clone ID: PAT_MRT3847_7815C.1.pep
VWVKCSRYALWRVVLLGRRVKVGLCAEHVGELSYECILCRHCPGVCVMFAFWGHEMWACGSSSFRVIDSRQLMACEWGVTQDNRQLIWFILGPYASALGLISFCCESETTDPSVFLLFVNKKGYSGCSRECFSYSVSGHQVWLICEHVVFSLDIISFRLKILV

SEQ ID NO: 261504 - protein, 42 aa, Glycine max
  Clone ID: PAT_MRT3847_78160C.1.pep
GLPDQADSGPISILNNCLDWSVIVYLYASLLIISSIFLIVRF

SEQ ID NO: 261505 - protein, 62 aa, Glycine max
  Clone ID: PAT_MRT3847_78161C.1.pep
KEFIYNKILKDVKKEFCCNGTVVHDPQLRHVIQLQRDHTNNVSTFLIHTDILNNDHIKIHCF

SEQ ID NO: 261506 - protein, 38 aa, Glycine max
  Clone ID: PAT_MRT3847_78162C.1.pep
NCSQQLYFLGKRTNLIYILGLKSMSITVMHKLIKCPTG

SEQ ID NO: 261507 - protein, 325 aa, Glycine max
  Clone ID: PAT_MRT3847_78163C.1.pep
MALNSPNSSNFSTALSLGLASNTNEALTVKGMGQLGLNQRITKVRKSSLTAKERSCLVHGGSENNTESIIRASQIVRAQLVHAVSSTPSPVSSNNVVVVVADKKKAIEILQAKLLCASAFAPKTSPTSLRPISLSHRLTSTPPLKTRRGFLNDDDFAYSLCPSPLSVCFPHETSTLQNHVRGGDTKYDGRMHSYPYKKNGPYTCPKCGHVFETSQRFAAHVSSSHYKYETKSERKKRLMAKIRKRNLRIARGSGGLTVVPDDAPPTSAFAYSARNNNNVAPPPPVRVVKVEGQSGMELQLAPPPGWEKLTAGGGAVKIKLEPVAS

SEQ ID NO: 261508 - protein, 54 aa, Glycine max
  Clone ID: PAT_MRT3847_78164C.1.pep
AHLSTIIFLECKCVSRVEIECEVVQSGCAVLEVPVNGLTCRTSYSGRSEYHSMT

SEQ ID NO: 261509 - protein, 58 aa, Glycine max
  unsure (1)..(58): unsure at all Xaa locations
  Clone ID: PAT_MRT3847_78165C.1.pep
KSMFPPPKNGMAKKVLFFAREKPKFEFFANRPPLDVFLAFKDDXDNPPHIPQIPLFFR

SEQ ID NO: 261510 - protein, 571 aa, Glycine max
  Clone ID: PAT_MRT3847_78166C.1.pep
ARAGDESSFNMSDHEYTAGNFSDLEVMSPSPRHSWDYVNRCGSPFSSSSFSRASCSPESSVCREAKKRLSERWAMMSSSKGSQEQRHVRRSSTLGEMLALSDIKKSVISEFEGIHKEQEPSESVSCSRNFKAETCMDGSPRNLSRSKSVPTSSTVYENGLNVEVCDNDAGKAHGSGELTKSKSMKSSFKGKVTSFFFSRNKKPSREKSCLSQSVDESQSTAIETSDSPVNSSRVLRDDVSQSFDSGSIGECSLPAPYESSGKILSDSISNGQGAVPLEAGLTLSKSMVPGISSENQDQPSPISVLEPPFEDDNAVVESLGCVRGGQLGSRVSLKSNLIDKSPPIESIARTLSWDDSCAEVASPYPLRPSSASLDTKQDWLVFVKKLLSAAGIDDQVQPGSFYSRWHSLESPLDPSLRDKYANLNDKEPQQQLHEAKRRQRRSNQKLVFDCVNVSLIEITGYGSEKNYLMGSRLCSGSHSRVQVPEAASPPLVDLIVAQMKELISSAMSSVWVVDCGDSNSLVVESVVRKEVVGKGWVELMGLEMDILVKEVEGKLLEELVEDAVVDLTGRA

SEQ ID NO: 261511 - protein, 136 aa, Glycine max
  Clone ID: PAT_MRT3847_78167C.1.pep
MASRLKEDEKNERIIRGLLKLTPNRRCINCNSLGPQYVCSNFWTFVCINCSGIHREFTHRVKSVSMAKFSAQEVSALQEGGNQRAQEIYLKEWDPQRHSLPDSSYVDRLQDFFKNCCCSLKNKRRVDARQTSKSTS

SEQ ID NO: 261512 - protein, 46 aa, Glycine max
  Clone ID: PAT_MRT3847_78168C.1.pep
KYFQAWLHIHSLIYMPCHIRGEQGVACGCLVIQWHRIFSRQYTTMA

SEQ ID NO: 261513 - protein, 74 aa, Glycine max
  Clone ID: PAT_MRT3847_78169C.1.pep
TDLDYTAGQCPKDRATSAELVTVNRMGRDALYTAAAIEAYAGVPALVCEAAMTSSATPEGSLLGPRGGVMRRMA

SEQ ID NO: 261514 - protein, 117 aa, Glycine max
  Clone ID: PAT_MRT3847_7816C.1.pep
FSPRFFQKSGINRARCCLFATVAVAFVKAVFILVAAFTLVRVGRRPLLLSSVGGMVLSLLSLSISLSIIGHSERTLLWSAALSIAMVLAYGPSFSIGAGPIAWIYRNQILMIRQRAQ

SEQ ID NO: 261515 - protein, 70 aa, Glycine max
  unsure (1)..(70): unsure at all Xaa locations
  Clone ID: PAT_MRT3847_78170C.1.pep
MDFDEYEYLEKTVEEDIDKDSSKKKKDIADKSDFFYRKPRDVDDDLDADDXXSMRSRGDDENGGSMKDRD

SEQ ID NO: 261516 - protein, 46 aa, Glycine max
  Clone ID: PAT_MRT3847_78171C.1.pep
SRLRERSLPIHSPHPDGRHRYRPTCLPSPLPQELECSAIVSQIVIV

SEQ ID NO: 261517 - protein, 124 aa, Glycine max
  unsure (1)..(124): unsure at all Xaa locations
  Clone ID: PAT_MRT3847_78172C.1.pep
RKTVTNQGECVIPWYGPYRVKYLGPFSVYPACYLTGECPGDYCWDTAGLCGDPXTFSINRDLELIHSKXPCSGPEAASCPXLLSTIGVKFEQPWLFKARSDIFIXGXLYYFCHPNLFHAQSILS

SEQ ID NO: 261518 - protein, 141 aa, Glycine max
  Clone ID: PAT_MRT3847_78173C.1.pep
MSDERSKPWNIYPSSNTGPSQTGTGVDEEAPWKSLGTSMSAISFGFVATAILISMFLIMAIFEHLFKPTPPESMLRRYQIQDQPGKQGNAQSVPASNYASDFSVLMPGQQYPTYIAQPAPLLPSQREGVYWPSHEHHFVFN

SEQ ID NO: 261519 - protein, 154 aa, Glycine max
  Clone ID: PAT_MRT3847_78174C.1.pep
MEQRLANTWRMPLNDKKFIETALLSDLRLDGRRPSDYRKLTVKLAKQDGSAEVHLGQTHVMTFVTAQLVRPYRDRPNEGSLSIFTEFSPMADPSFDPGRPSDAVVELGRVVDRGLRESRAIDTESLCVLSGKLVWAIRVDIHILDNAGNLVDAA

SEQ ID NO: 261520 - protein, 179 aa, Glycine max
  Clone ID: PAT_MRT3847_78175C.1.pep
MNQNQLDLRAHHSGSTQSEESALDLERSYYGHPNPSSPSPLQPFAGGAQHSESNAAYFSWPTLSRWNDAAEDRANYFGNLQKGVLPETLGRLPTGQQATTLLELMTIRAFHSKILRRFSLGTAIGFRIRGGVLTDITAILVFVARKVLRQWLNHVQCLPALDGPGGDWSDADVEAYHPS

SEQ ID NO: 261521 - protein, 106 aa, Glycine max
  Clone ID: PAT_MRT3847_78176C.1.pep
MNQNRLDLRAHHSGSTQSEESALDLERSYYGHPNPSCPSPLQPFAGGAQHSESNAAYFSWPTLSRWNDAAEDRANYFGNLEKGVLTETLARLPTGAGATTLLGLVT

SEQ ID NO: 261522 - protein, 75 aa, Glycine max
  unsure (1)..(75): unsure at all Xaa locations
  Clone ID: PAT_MRT3847_78177C.1.pep
NXQYYEISAKSHYHFDKPFLFLARKLAGDPYLALGEAPALASPKVXIDLTXHNNHEASLLAVVYQPLPGQEEKSF

SEQ ID NO: 261523 - protein, 129 aa, Glycine max
  Clone ID: PAT_MRT3847_78178C.1.pep
FPHASDGCEKTTEGDSEKAVVSLERVSFFLLQRFLLRISRKFLSQPPQRKKEKAYSYMDNKSPSKESKEVTRESLIAISNSLPDKTLESTSALESKKSDGVMIPNRDQDDKFRSELISISYAESPDDKI

SEQ ID NO: 261524 - protein, 106 aa, Glycine max
  Clone ID: PAT_MRT3847_78179C.1.pep
MHYLDHPAAAGHVCLVPGQCSGDYMEWFFEISHLFITPTQATDQPKHPPVPQHEIYVEPDISEVPVAAGVGPSQVANPPRHAVIRLVALMFYKMLFILNAVINVFF

SEQ ID NO: 261525 - protein, 66 aa, Glycine max
  Clone ID: PAT_MRT3847_7817C.1.pep
VQEPEGPPRGESKYLSQMVSQKLKSTFAARAIMRGGKKAKYFLLDNWQKSWGPALWNGVRSVLGAQ

SEQ ID NO: 261526 - protein, 230 aa, Glycine max
  Clone ID: PAT_MRT3847_78180C.1.pep
MESSAEKYAAFKQKVSRTVYLDNMSPQVTESVIRTALDQFATVKNVKFIPNYIGPSNQPQCALVELDSAKKAKEILSMIAGYPFMMSGQPRPVRARPAVMEMFDDQPIKPNRKIKIRWLEPSDPDFELAKEVKNLTRKHAAEVEFLDKVSSFLEINLFSIGVLFLLLFQFSNFLSMLLGVDVKLAKQQEETLKVHYKKFKMIEGIMADKTAHRLARKYNLHVANDWARLD

SEQ ID NO: 261527 - protein, 114 aa, Glycine max
  Clone ID: PAT_MRT3847_78181C.1.pep
PNKPVNFPSHYVNSKNQFYYSYSANKYYTTHSDQMFCQCSFFSRSYEYDLALLDTIMHHLLGEAQCICTSPQFKVRWELQLQHFVLRADRLSWRAFGVGGRLIRHGVQGRSTTR

SEQ ID NO: 261528 - protein, 99 aa, Glycine max
  unsure (1)..(99): unsure at all Xaa locations
  Clone ID: PAT_MRT3847_78182C.1.pep
RNXVGGAXRXXRNXXPRWSTXLLXTXTNXYIYAFXPXRVXHXGYXXXXSYFNPCMACLSXXXXXXXXXGASWLSSPDEMLQXCPLXXHHRRXRDDDAEP

SEQ ID NO: 261529 - protein, 87 aa, Glycine max
  Clone ID: PAT_MRT3847_78183C.1.pep
SDPVISRSFKKRNKNFGNRHPFRENESQAFETLKTYSDATTDKEFYFKFDRRRPGLASAPRTPLDMSQRLRANQSFTGDPGVGRGRG

SEQ ID NO: 261530 - protein, 302 aa, Glycine max
  Clone ID: PAT_MRT3847_78184C.1.pep
LFGIPLVTRWSSISCGYDDVEREFLKLINPFLMRTEGVLDEYDKNDGVKKRVSEHDELGDATNSAAIGNDADSNSGTEDDIHSSTDFEFYLQGIERAKIIVKKPLPQVTTLPGKLPAVVVLWSDKMLKMYDTYLLDSLPEVFKPQLFAKRMQESVSIYKWLEAFLKEEPLGPEDMWYCPHCKEPQQAYKKLDLWRLPEILVVHLKRFSYSRYFKNKLETFVDFPINDLDLSTYVAHGNSQSSNRYVLYAISCHYGGLGGGHYTAFVRYGYDKWYDFDDSRVESVSEDMIKTPAAYVLFYRKI

SEQ ID NO: 261531 - protein, 117 aa, Glycine max
  Clone ID: PAT_MRT3847_78185C.1.pep
MAEEGQVIGVHSVEEWEEHLKKGQESKKLIVVDFTASWCGPCRFIAPILADMAKKLPNVTFLKVDVDELATVSREWEVEAMPTFLFLKEGKLVKKLVGARKEELQDIIVKLAAIDAA

SEQ ID NO: 261532 - protein, 122 aa, Glycine max
  Clone ID: PAT_MRT3847_78186C.1.pep
KQEWGIIFRGPSSGGGGGFIIILIYSHNLTPSFSGVLSLVLYRTLITLFPALVVQSYFARSFYLGVVANLWATAATALFETLSLSAEVRTPSNPLSGSLLKLWTPPLWPLVIRGFPFGEGET

SEQ ID NO: 261533 - protein, 65 aa, Glycine max
  Clone ID: PAT_MRT3847_78187C.1.pep
GISARGNYILSLSSLECLNLSGCSKLNNIGPLHSIHCWFPPCMRQCDISFCNLLQIHDAIGDLPC

SEQ ID NO: 261534 - protein, 80 aa, Glycine max
  Clone ID: PAT_MRT3847_78188C.1.pep
ITGIYHRWPDMNEDTTLWKLGTLPPGLITFYNLTYPLNRGWHVLGLGYDPALNLTEIENGAVIHYNGNYKPWLNLAVSKY

SEQ ID NO: 261535 - protein, 89 aa, Glycine max
  unsure (1)..(89): unsure at all Xaa locations
  Clone ID: PAT_MRT3847_78189C.1.pep
KIVEFMIELKEVKEVKEVIENRVESLGNSSNDINNKGLQSKLDVPKAGXTPDSQSKSXIGDFIFRTSSRIIMAXIFLQTCFGNSKEIPV

SEQ ID NO: 261536 - protein, 45 aa, Glycine max
  Clone ID: PAT_MRT3847_7818C.1.pep
LFCLVLPRNFFTGKKNPCFPKKKKKKKKKKKKKKKKKKKKKKKKR

SEQ ID NO: 261537 - protein, 204 aa, Glycine max
  unsure (1)..(204): unsure at all Xaa locations
  Clone ID: PAT_MRT3847_78190C.1.pep
IFHFARNFSSQLSLMHPADLCVKLPGFVKWGKWLSLNCLLLETSCQYQYSVLMESFGFAASPLNSGSLATNKAGLIRVVPWNTLQHSVTCAFIAVLYRDYKLTSQTKALYCSKNQLYNPVDLVNYPLLRYSCFRKWDQQFSILIIGSQNFCQLLNCRFTVWNKAYFAVLVCLFYLYIIYALRSTIKGQLLHQCFNFNLNXDRNL

SEQ ID NO: 261538 - protein, 186 aa, Glycine max
  unsure (1)..(186): unsure at all Xaa locations
  Clone ID: PAT_MRT3847_78191C.1.pep
EVYVDQPPVRKNSEKPNHVFKLKKVLYGLKQALRAWYELLSKFLLDKGFSKGKVDTNLFIXKKLNDILLVQIYVDDIIFGSTNDSLCKKFSQDMQNEFEMSMMRELNFFLGLQIKQTKNGIFISQSKYCKDLIHRFGMENDKHMATPISIVCYLKXDETRQSIDIKKYTRKIRSPGYLSARRPEIM

SEQ ID NO: 261539 - protein, 65 aa, Glycine max
  Clone ID: PAT_MRT3847_78192C.1.pep
KKTSRTLYRSDQLPNIYLYVYIEKKGNHDLNTPITGPKHLNLLKGKKRPLYFKGGWLDTKHRRAT

SEQ ID NO: 261540 - protein, 74 aa, Glycine max
  Clone ID: PAT_MRT3847_78193C.1.pep
MQKQCYNFLRGSVYMSKIVYGVPPSPLLHGLPTLAKQTLMPPNPFSPTLLTRWAKKLLYGKQNGGIWATQPDAW

SEQ ID NO: 261541 - protein, 51 aa, Glycine max
  Clone ID: PAT_MRT3847_78194C.1.pep
SKDAAYNMTLNFKNPVNDYHAAKDSTDCHELYADIVLALCKLVDRKNYTTD

SEQ ID NO: 261542 - protein, 298 aa, Glycine max
  Clone ID: PAT_MRT3847_78195C.1.pep
GCEKTTEGATTVVVKRLKEVAVGKKDFEQLMEVVGNLKHENVVELKGYYYSKDEKLMVYDYYTQGSLSAFLHGKRGEDRVPLDWDTRMKIALGAARGLACIHCENGGKLVHGNIRSSNIFLNSKQYGCVSDLGLATIMSSVAIPISRAAGYRAPEVTDTRKAAQPSDVYSFGVVLLELLTGKSPIHTTGGDEIIHLVRWVHSVVREEWTAEVFDLELMRYPNIEEEMVEMLQIAMSCVVRMPDQRPKMSEVVKMIENVRQTDAQTHSSSGNQAEQLKFSQRDNGNSPSTPSYFQRGSE

SEQ ID NO: 261543 - protein, 129 aa, Glycine max
  unsure (1)..(129): unsure at all Xaa locations
  Clone ID: PAT_MRT3847_78196C.1.pep
AXLLRAYPIWSSHGPSTSYSLLFRNYRYLSLCYAAVYPYGLNRVVNLSRQMVSLSHLTPHSWPAVYLLIFVPPAFAFQQTNTVWNLQLPTNSQMGLTFNPSRSRYCLRYLTVCSSFLILVILFSSHKCR

SEQ ID NO: 261544 - protein, 64 aa, Glycine max
  Clone ID: PAT_MRT3847_78197C.1.pep
PLETAARRRQKGICIFLPFGVLINICILYNNITFSFFLGNIYIDTIGACISKWVQLCFLKGMCH

SEQ ID NO: 261545 - protein, 52 aa, Glycine max
  Clone ID: PAT_MRT3847_78198C.1.pep
LKIIKGGFVNGGNSKKLAAQPHVEGFLVGGAPPKAEFLGIKNPASLKKNLNL

SEQ ID NO: 261546 - protein, 103 aa, Glycine max
  unsure (1)..(103): unsure at all Xaa locations
  Clone ID: PAT_MRT3847_78199C.1.pep
RLEKKFSRHHGPTITAKLYGRAPQLXRETLLQDFRVVAQGVGIPEDSIFTMADRGECVPGEQEPEPILIPRVRRAVLPQEEEGSGGGQLVXTEVTKKEDSCQL

SEQ ID NO: 261547 - protein, 56 aa, Glycine max
  Clone ID: PAT_MRT3847_7819C.1.pep
WCPSRYLWVIPRWRPGVLPCSRPQGCRFMSLRLHTMFQFSKADIESLLIHAIGLPQ

SEQ ID NO: 261548 - protein, 81 aa, Glycine max
  Clone ID: PAT_MRT3847_781C.1.pep
LPHPSCVDDGSVFTLFIWPLAGSYCYKAQRFSVSSQGVLLHFSSSYDPFHTGDYSLLFIIFFPLSILRYALKHDPPLVISL

SEQ ID NO: 261549 - protein, 195 aa, Glycine max
  Clone ID: PAT_MRT3847_78200C.1.pep
MNPWNMRTSKLLSQQLAYPPYRLVEEIPNMGNSSCVSKEPRGSQMTIFYGGQVLVLDDIQADKAKDIMSFAGKGMSQNQNDCAYTFPATTSATPSRPFPFLMNIIPTTANNSVQDHPQTPSKPVICDLPLARKASLHRFLEKRKDRIAARAPYQTSNHMAALNKPAESMTWLTLAPKSPQQDESDSDSSSSFVLF

SEQ ID NO: 261550 - protein, 72 aa, Glycine max
  Clone ID: PAT_MRT3847_78201C.1.pep
VISTLAQHFPDLRERIILRKQASRMVELKRSTLRARSSINSAKASQSTASEKTSYLVRKYSLNMGFYLICSP

SEQ ID NO: 261551 - protein, 41 aa, Glycine max
  Clone ID: PAT_MRT3847_78202C.1.pep
NSIVSLTYHFDIHLIISIKIFRKPKTINLFCSTSTKMLSIK

SEQ ID NO: 261552 - protein, 65 aa, Glycine max
  Clone ID: PAT_MRT3847_78203C.1.pep
LVLGLFFSMSQNPWAKLLETWGKAPGKLGGPKNAAPPKVFLKQNKKRFRKAKIKNFFPFPDQWSS

SEQ ID NO: 261553 - protein, 71 aa, Glycine max
  Clone ID: PAT_MRT3847_78204C.1.pep
FVTLSGCEEYTLLSHVINLRCYETPSLIKARKLITEPEKHSAYNLMLAISVCDSYIDGYQPRQYNQPGRNT

SEQ ID NO: 261554 - protein, 134 aa, Glycine max
  Clone ID: PAT_MRT3847_78205C.1.pep
MSINKATVGVIGLSGATLLLCLFGIASVYNEIQSIWTELDLEMDRFMLETDDMWRDMLAMGAGTPSNRARRQAVGGGYNAPQPAVAPVPVCKCKSKNACPAGPRGPIGDVGPVGLAGLSRQDGIPGITAENWHN

SEQ ID NO: 261555 - protein, 81 aa, Glycine max
  Clone ID: PAT_MRT3847_78206C.1.pep
RGKNKNKKKTKNNISKINYKKGRPPPFNLVTPGFISGPYPPGFPPFLIMIRITPSRNHGHNCFLFKIVTPSHFPTSSYPKP

SEQ ID NO: 261556 - protein, 95 aa, Glycine max
  Clone ID: PAT_MRT3847_78207C.1.pep
KTNLLHKKKPALAIWDGGPAQRPPNLIMKQMGGQAYSKKCFSRKNMRDSPSFPKKLDSRPPLVLTKRGNRADTVSLNWPFKFQKFGGPMSHIGTR

SEQ ID NO: 261557 - protein, 57 aa, Glycine max
  unsure (1)..(57): unsure at all Xaa locations
  Clone ID: PAT_MRT3847_78208C.1.pep
EWGRTIPKPTDATXSFILLVRDLRSTAMNLNHDLASEKNFQIHTTAAKLVLLRSTTL

SEQ ID NO: 261558 - protein, 177 aa, Glycine max
  Clone ID: PAT_MRT3847_78209C.1.pep
MSSMDLKKSNKIREIVRLQQILKKWRKLANSSKTTMVTTTATATVTSSASKSMKYLKRTLSLSEREGGSSNVVPKGYLAVCVGEELKRFTIPTEYLGHQAFQILLREAEEEFGFQQTGVLRIPCEVAVFESILKMVEGKEDKFSSQECRLSIEEMMMGYRSENQLAYSHHPQSPLCR

SEQ ID NO: 261559 - protein, 63 aa, Glycine max
  Clone ID: PAT_MRT3847_7820C.1.pep
LSLSLFLQFQALFLMSFRGLSRVNILLGFYFCFFAPLSYLLCKFWFLNVPFACECLNSKSCFG

SEQ ID NO: 261560 - protein, 58 aa, Glycine max
  Clone ID: PAT_MRT3847_78210C.1.pep
SRVGDLWKFSGIMRDHCLRKPQYGRRKNGKCGYFFLSHLLLVPLVFVQQHIPILVVVS

SEQ ID NO: 261561 - protein, 303 aa, Glycine max
  Clone ID: PAT_MRT3847_78211C.1.pep
MSNHHRSSSKNGLPPQELLDDLCSRFVLNVPKEDLQSFERILFLVEYAHWFYEDNSVENNPSLKSLNLKEFTSLHDIFKDFTSYKVRVPVTGAIILDETYERCLLVKGWKGSSWSFPRGKKSKDEEDHACAIREVMEETGFDVSKLLNKDEYLEVIFGQQRVRLYIIAGVKDDTAFAPLTKKEISEIAWHRLDELQPASDEVISRSITGLKLYMVAPFLASLKSWISTHQPAMAPRPDLPLKGICVWKAKPGSIGSSSTVMDIQPTKPEPDSHTPDLGPGKSFRNFRFDTASILQAMETSFSS

SEQ ID NO: 261562 - protein, 192 aa, Glycine max
  unsure (1)..(192): unsure at all Xaa locations
  Clone ID: PAT_MRT3847_78212C.1.pep
EALAQFLLAGHLLLGGCQLTRGYFMHSENPSRDMPSQHLLALSLPYAENLTHDGTTYRVYQALQGKERRTLVIINXTTSCARNQLHFILKRFGRTTXESASNVRTTMHRWVESRSLPRLXIGTKPIYYNTXPDKLQQLAPQDCGWKRWTEISYAGYQCVKRAKAAHSLVRSWMADIFPALNHRILSHITGLD

SEQ ID NO: 261563 - protein, 318 aa, Glycine max
  Clone ID: PAT_MRT3847_78213C.1.pep
MSNHHRSSSKNGLPPQELLDDLCSRFVLNVPKEDLQSFERILFLVENAHWFYEDNSVENNPSLKSLNLKEFTSLLFNSCDVFQPYVAHIDDIFKDFTSYKVRVPVTGAIILDETYERCLLVKGWKGTSWSFPRGKKSKDEEDHACSIREVMEETGFDVSKLLNKDEYLEVIFGQQRVRLYIIAGVKDDTAFAPLTKKEISEIAWHRLDDLQPASDEVISRSITGLKLYMVAPFLASLKSWISIHHPAMAPRPDLPLKGICVWKAKPGSIGSSSTVMDIQPTKPEPDSHTLDMGPGKSFRNFRFDTALILQAMEASFSS

SEQ ID NO: 261564 - protein, 45 aa, Glycine max
  Clone ID: PAT_MRT3847_78214C.1.pep
MGKTNCEKSFTAPKTLEVSPDNEFEKRIMPEVILSNDIDVTFSDI

SEQ ID NO: 261565 - protein, 49 aa, Glycine max
  Clone ID: PAT_MRT3847_78215C.1.pep
WMLQCRTGERTGKRASKTSVDMDNEGLVDKPSAVQTVKPQPINELTPPQ

SEQ ID NO: 261566 - protein, 347 aa, Glycine max
  unsure (1)..(347): unsure at all Xaa locations
  Clone ID: PAT_MRT3847_78216C.1.pep
CRNYVKDGHIRDEVGLNEKLNSISKTTXRGTFSVDGLGLRDIHKNVDEEQLQDYLLEAGALGPTEXSSMRDRTGIKKEVLYKKSGKNSIINQRIEQLKQLENQVQXEESELDTYHRLVDDKDKSSRRLENLKQNLNQLSKMHEQKQKEVALHDQTQEWKRLEQSRNIEPINFPEKGIDRYETAKSHKQSLERDKSLREERLSILNKEAESINPVDQKYIDSFNSLYQQETEIKQKEFELRSIEKDIADKQRELEALQSNIGWQEVFYDTDSTEAMKSHMSDLVLGKPEQIAYINQLERGLEENKIERNSISNEINQVENELVPDETFEKKKXFTQQVLELXEKENLF

SEQ ID NO: 261567 - protein, 106 aa, Glycine max
  Clone ID: PAT_MRT3847_78217C.1.pep
TRPHSCLPNLTGGAFTGIDADTPPDLLNGRDPQSRIPHTPRYKPHAYYNPTRAPAARPSGGINRGVHMRWWWSRVELRLLHLSDPRRILVPVPPRTGEVLAALFRR

SEQ ID NO: 261568 - protein, 49 aa, Glycine max
  unsure (1)..(49): unsure at all Xaa locations
  Clone ID: PAT_MRT3847_78218C.1.pep
IKFIYVSRRHLSSLYMFHNXCCMKXRLREPIRNTLHVPCTSINFNFKNK

SEQ ID NO: 261569 - protein, 35 aa, Glycine max
  Clone ID: PAT_MRT3847_78219C.1.pep
SSQVPFYMFYLNLTPKVSVFELRYHTLLVPFSQKY

SEQ ID NO: 261570 - protein, 46 aa, Glycine max
  Clone ID: PAT_MRT3847_7821C.1.pep
MTRQGYGESTGKIILMGEHAVTFGQPAIAIPFNAGKIKVLIESLDE

SEQ ID NO: 261571 - protein, 289 aa, Glycine max
  unsure (1)..(289): unsure at all Xaa locations
  Clone ID: PAT_MRT3847_78220C.1.pep
SFSNNTNLSRTREEALDFGALSVSNGGKXLLDNILCINMSGLTGPIQFGLHRSPLNPSYDILNVIATGYRRIGYWSSYSDLSLITPEKLHAEPANRSISSQHLNCVIWPGNTTEKPRGWVFPNNGRXLRIGIPNRVSYXDMISQINGTNAIQGYCIDIFLAAFKLLPYAVQYKFILFGDGHKNPSYCDLVNMITSDVFDAAVGDIAIVSVRTKIVDFTRPYIESGLVVVAPVKXLKSNAWAFLXPFTPHMWGVTAFFFLFVGAVVWILEHRTNDEFRGSPREHIVTVLW

SEQ ID NO: 261572 - protein, 75 aa, Glycine max
  Clone ID: PAT_MRT3847_78221C.1.pep
LVTFTLLLFCLLSIKIMSNGSAELGHTMGRLTVPYKHKHHLFHPARTDTLPKGLFQRPKSVKESQDWVAGTHEII

SEQ ID NO: 261573 - protein, 113 aa, Glycine max
  Clone ID: PAT_MRT3847_78222C.1.pep
TKNKQRKRLKKHLTKPKLIQLETHTTFNKWRGGPFGGSDLSFPRVRSLIVFWGAPLYLFMARVFRGGYGKNPRFPRLCPCARSFLFLPWLYSQGGRLYRLCSNWGPPFGVGAP

SEQ ID NO: 261574 - protein, 102 aa, Glycine max
  unsure (1)..(102): unsure at all Xaa locations
  Clone ID: PAT_MRT3847_78223C.1.pep
VAASSGSFVLXRWMGXLTXPXGXSRXVXRXXLSXGGGAGXXXAXLXXXPXAVLXMWRXFVGDLVFXVSXMTSPYXXCTVSFFXXFXXLAXDXXXFXAFPXKL

SEQ ID NO: 261575 - protein, 84 aa, Glycine max
  Clone ID: PAT_MRT3847_78224C.1.pep
FIFNKLYQLSLLRNPHIPLFSSHHIINVSPTVTASNLLVDKEGVRAPSKMLCKSMYVGGGYVVTLDCRERGFGCEGLSSAANSQ

SEQ ID NO: 261576 - protein, 67 aa, Glycine max
  unsure (1)..(67): unsure at all Xaa locations
  Clone ID: PAT_MRT3847_78225C.1.pep
FHNVSQLRSNYCYQYVHVINIITQFTPRKIPAELSAPIISVTTKKXPSEGSLMYEACMKRHMHKHNM

SEQ ID NO: 261577 - protein, 288 aa, Glycine max
  Clone ID: PAT_MRT3847_78226C.1.pep
MNSVEEQLEGENSVDPGELSWENHSYSYLTKESTTLLSNSSSLEEINTGFDMTSLKQDASPQKPKSCILSFEDSTLVPINPKKTCQIYDHGEHSKETQEKPHNRKPLKRGRRFSQTLDHILAERKRRENISRMFIALSALIPDLKKMDKASVLSNAIEYVKYLQQHVKDLEQENKKRKTESLGCFKINKTCDDKPIKKCPKVEARVSGKDVLIRVTCEKQKDIVLKLLAKLEAHNLCIVCSNVLPFGNSALSITSIAMMDHEFSMTVDTYDLVKMLTEELLECCKLQR

SEQ ID NO: 261578 - protein, 70 aa, Glycine max
  Clone ID: PAT_MRT3847_78227C.1.pep
TFTLFSYALVSFYYLSLIPRVFDLKEVCSSKQVLSSFLSKMEERNKRVVKLDDKRFVPKNVTKHYMYHLN

SEQ ID NO: 261579 - protein, 121 aa, Glycine max
  Clone ID: PAT_MRT3847_78228C.1.pep
FGSLRRVRYNQVQESSLCSLNIGNAVTALLVYVDDIIPAGDSSDEFPTIKNVLDLSFKIKGLGKLKYFFGLVVSHCRLGSGMSQRKYCLDLVQDSGLLGCKPARTPLVTLIKLPSSAGTPY

SEQ ID NO: 261580 - protein, 94 aa, Glycine max
  Clone ID: PAT_MRT3847_78229C.1.pep
ILSSVGIEGDAAQVKALVAELNGKNLDEIIAKGQAKLSTVSVAAAPAPAAGGAAPAKGDDKKPAAGKKEEKKEEKKKEPEPDAAEEDMGFGLFD

SEQ ID NO: 261581 - protein, 283 aa, Glycine max
  Clone ID: PAT_MRT3847_7822C.1.pep
MSTKFKVFREFTSDDSFLNQVIPENITEFQVTLSLARDYDGNNSTNGKFIPYWDTEKVTPEVIKKFKKKYEPTALRVKVLVSIGNKNKQFPFTIGSDSNSEAWVSEATASLKSIIKTYNLDGIDVSYEDIAANEADFVNSVGGLVRNLKQNKLITVASFATSADAANNKFYNLLYAEYATFFDTVVFLSWVGFTPSRANPVASLEEKILAVANEYKAVKAFLVAYSTVAEDWANFSPPIFFITLHGLLGNSAVKGASIKVISDATASFPAKWIPEILLLAASK

SEQ ID NO: 261582 - protein, 66 aa, Glycine max
  Clone ID: PAT_MRT3847_78230C.1.pep
SPLIHRILLFPHHFLFNKNTFDGNVVKSHLLIIIQGKLILIVYLKKYHEDTNKNTILLCMPQDVHL

SEQ ID NO: 261583 - protein, 60 aa, Glycine max
  unsure (1)..(60): unsure at all Xaa locations
  Clone ID: PAT_MRT3847_78231C.1.pep
HWRESLDDPDTKILRPHLVHLGDWLRCYTLYNVRTTSXYADKLGEVSISIASKRLLAGSG

SEQ ID NO: 261584 - protein, 78 aa, Glycine max
  unsure (1)..(78): unsure at all Xaa locations
  Clone ID: PAT_MRT3847_78232C.1.pep
TWPQISNALGVAPEDKDSQLAQLHDAWCNSLQMHEAXLPYVEPVVREXGAHSPYDACHLRGEALSGVERLRKADVPTI

SEQ ID NO: 261585 - protein, 56 aa, Glycine max
  Clone ID: PAT_MRT3847_78233C.1.pep
LAGGALRCGEYVTLRKVGDASQKGGGSGAQQIVIEGPLCEDYYKIRDYLYSQFYLL

SEQ ID NO: 261586 - protein, 270 aa, Glycine max
  Clone ID: PAT_MRT3847_78234C.1.pep
MKISVKDISASLTKGASQPYEAIFVSSKTKKSDALDPLIVVLHGGPHTVSLSSFSKPLAYLSSLGYSLLIVNYRGSLGFGEEALQSLPGKAGSQDVNDVLTAIDHVINLGLASPSKIAVLGGSHGGFLTTHLIGQAPEKFVAAAARNPVCNLALMVGTTDIPDWCYVETYGTKGRDKFTEAPSAEDLTLFYSKSPIAHLSKVKTPTIFLLGAQDLRVPISTGLQYARALREKGGQVKVIVFPNDVHGIERPQSDFESYLNIAMWFNKYCK

SEQ ID NO: 261587 - protein, 127 aa, Glycine max
  unsure (1)..(127): unsure at all Xaa locations
  Clone ID: PAT_MRT3847_78235C.1.pep
LTGLKSMAGFPTRKTNRQLPTLLATXGRVQCMQVWPPIDKKKVETLSYLPDLVDAQLAKEVEYLLRKGWNPCLEFELKHGFRDREHNMAPGYYDGRYWTMWKLPMYSCTDTSQVXLKKLQEANTDTP

SEQ ID NO: 261588 - protein, 117 aa, Glycine max
  Clone ID: PAT_MRT3847_78236C.1.pep
ASDYDTRKTRGAGYTLKDPDPKIVRQALELTETATTDIPATKNAILTAARNTKAKTQDNDNNHKKHTDRDKNQDKQHNNHKHRQRHQSKNNGNETNPYIHTPHDSRTRPLTKHNDKQ

SEQ ID NO: 261589 - protein, 107 aa, Glycine max
  unsure (1)..(107): unsure at all Xaa locations
  Clone ID: PAT_MRT3847_78237C.1.pep
MASSMISSPAVTTVNRAGAGMVAPFTGLKSMAGFPTRKTNNDITSIASNGGRVQCMQVWPPLDMKKFQTLSYXLPNLDDAHLAKEVAYXLLWKGWXPCLEIRVGARF

SEQ ID NO: 261590 - protein, 135 aa, Glycine max
  unsure (1)..(135): unsure at all Xaa locations
  Clone ID: PAT_MRT3847_78238C.1.pep
MAASMISCPAVTTVNRAGAGMAAPFTGLKSMAGFPTRKTNTDITYIASNGGRVQGMQAWPPMGXNEDRTLYYLPELDDAPLAXEGAYLLRKGWIPCLEFQVEHGFVYREHIKTSGYYDGRYWTMWKLPMFGCTDA

SEQ ID NO: 261591 - protein, 118 aa, Glycine max
  Clone ID: PAT_MRT3847_78239C.1.pep
MAISMISSRADTTVNRAGAGMVATFTGLKFMAGLPTRKTNNDITSIASNGGRVQCMQVWPPIVKNKFETLSYLPDLDDSQLAKEVEYLIMKRWIPCLEFELEHGFEYREHNRSPGYYD

SEQ ID NO: 261592 - protein, 176 aa, Glycine max
  Clone ID: PAT_MRT3847_7823C.1.pep
VKAAAQNPMRELRIEKLVINISVGESGDRLTRAAKVLEQLTGQTPVTSKARYTVRTFGIRRNEKIAVHVTIRGPKAEEILERGLKVKEFELKKKNFSATGNFGFGINEHIDMGIKYDPGIGIFGMDFYTVMGRPGARVSRRKHKTGRVGFSHRVKREETMAWFKTRFDGILLGRKD

SEQ ID NO: 261593 - protein, 130 aa, Glycine max
  Clone ID: PAT_MRT3847_78240C.1.pep
MSSQTVVLKVGMSCQGCAGAVNRVLGKMEGVESFDIDLKEQKVTVKGNVEPDEVLQAVSKSGKKTAFWVDEAPQSKNKPLESAPVASENKPSEAATVASAEPENKPSEAAIVDSAEPENKPSDTVVETVA

SEQ ID NO: 261594 - protein, 138 aa, Glycine max
  unsure (1)..(138): unsure at all Xaa locations
  Clone ID: PAT_MRT3847_78241C.1.pep
LLLSICLATVLIEVQMQCRVVAHHVGNEERLRTLSYLPXDLDDAQLAKEVEYLLRKGWIPCLEFELEHGFVYREHNRSPXYYDGRYWTMWKLPMFGCTDASHVLKELQEAKTAYPIGFIRIIGYDNVRQVQCISFIAY

SEQ ID NO: 261595 - protein, 114 aa, Glycine max
  Clone ID: PAT_MRT3847_78242C.1.pep
TCHGGPAEIIVHGVYGLHIDPYLSDKAADILVNFFDKCKADPSYWDKISQGGLQRIYEKYTWKLYSERLMTLTGVYGFWKYVSNLERRETRRYIEMFYALKYRSLASQVPLSFD

SEQ ID NO: 261596 - protein, 96 aa, Glycine max
  Clone ID: PAT_MRT3847_78243C.1.pep
VSPRVSPSRVVAPPHCFCVPPVFPRLMASLISRFSLGLGRRQFLHLSSVSASLLSRRFGWSAPVLGGRPRSPSRVPPLSSLLFRSCSFSRRVFVVV

SEQ ID NO: 261597 - protein, 176 aa, Glycine max
  Clone ID: PAT_MRT3847_78244C.1.pep
VSSMISSPAVTTVNRAGAGMVAPFTGLKSMVGFPTRKTNNDITSIASNGGRVQCMQVWPPIGKKKLETLSYLPDLDDAQLAKDVDYLPRNGWISCLQSELDHGFVYREHNRSPGYYDGRYWTMWKLPMVGCSEALQVMNELLAVKTVYPTGFILLIVSDNVRQVLCIIFIYYNSAS

SEQ ID NO: 261598 - protein, 164 aa, Glycine max
  unsure (1)..(164): unsure at all Xaa locations
  Clone ID: PAT_MRT3847_78245C.1.pep
MRTTKKEVAYSMISCPVVTXVNRAGAGMXVPFTGLKCMAGLPTRKTNNDITSIASNGGRXQCMQVXWPPIGKKKIETLSYLPDLDDAQLAKEVEYLIRKGWIPXLEFELEHGFEYREHNGSPGYYDGRYCTMWKLPMLGCTDASQVLKEHQEAKTAYPNGFIRI

SEQ ID NO: 261599 - protein, 47 aa, Glycine max
  Clone ID: PAT_MRT3847_78246C.1.pep
LVRVNIAIVIYQNIFNISYKASHTFIYAVIMGYKPSFLTSTHLSGRL

SEQ ID NO: 261600 - protein, 128 aa, Glycine max
  unsure (1)..(128): unsure at all Xaa locations
  Clone ID: PAT_MRT3847_78247C.1.pep
ASSMISSPPVTTINRAXAGMAATFTGLTSMAGSPTRNTNNDITYIASNSGRVHCMHVWPPDDKKNFETISYLPDLDDAQLAKEVKYLLRKGWIPCLEFELEHGFVFREHNKSPEYYDGHYCTMWKPPI

SEQ ID NO: 261601 - protein, 49 aa, Glycine max
  Clone ID: PAT_MRT3847_78248C.1.pep
YSGTDLMESSNQLNEPFTHWLTAGYVFAASFALMLYMDSGLPAQIIKNR

SEQ ID NO: 261602 - protein, 106 aa, Glycine max
  unsure (1)..(106): unsure at all Xaa locations
  Clone ID: PAT_MRT3847_78249C.1.pep
LRANKNEVGDSMISFTAVTTVYRACAGMVAPFTGLKYMAGFPTWKTNNDITSIACNRGXVQCMHVWPPIGKKKFETLSYLPDLDDAQLANEVEYLLRKRWIACLEF

SEQ ID NO: 261603 - protein, 61 aa, Glycine max
  Clone ID: PAT_MRT3847_7824C.1.pep
LMNKPHLRLIAACNMFAMHLQIKNSYAFHARQPTIIRSPVCVYKYNPCGCLVFSIHLSFPK

SEQ ID NO: 261604 - protein, 37 aa, Glycine max
  Clone ID: PAT_MRT3847_78250C.1.pep
RIDKNIKNHSAISPSRVKCCDPAMYVWIHLQTSMLTF

SEQ ID NO: 261605 - protein, 280 aa, Glycine max
  unsure (1)..(280): unsure at all Xaa locations
  Clone ID: PAT_MRT3847_78251C.1.pep
MGSASVTKAPPSSSSSPNSSSTESLDGLKFGQKIYFEEVSVAAAAATTTQGGNKTRGGVSASKKGRGGSVQAPRCQVAGCKVDLSGAKAYYSRHKVCAMHSKSPTVTVAGLEQRFCQQCSRFHLLSEFDQGKRSCRKRLAGHNERRRKPPPSSILTSRYGRLSXPIFDNNGRDDGFLMEFASYPKLTLRNTLPTQRSTEPAPGNHAATLTWQGGSDTPSEFFLQGSGSSGGTSFLNSKHPLVESYTGVTDSNCALSLLSSQTLGFRNTAPATKFELNNNL

SEQ ID NO: 261606 - protein, 77 aa, Glycine max
  Clone ID: PAT_MRT3847_78252C.1.pep
MVWPLGKNGGFPPVLSPGFSQPHVNSAALIPVFGKTAFLLSPGWVFLPGFPVFILPLSCKIGSLLFFGKCPPGVGGS

SEQ ID NO: 261607 - protein, 133 aa, Glycine max
  unsure (1)..(133): unsure at all Xaa locations
  Clone ID: PAT_MRT3847_78253C.1.pep
IMLHPASELGSRYRGCXKEMSQLFNTIKSVSPNGDTSSLGHSLDQNNTVSSKRIDVSLVNPSVTQSSEDEKFYSMESIDGCILQSMESQEDLMQNTFESLDDIMSEITKQEQNAIMLMDGEMEFDAYHVGSCI

SEQ ID NO: 261608 - protein, 45 aa, Glycine max
  Clone ID: PAT_MRT3847_78254C.1.pep
EIYLNEAHWYVICNFKYHFKWLMLCHKLGMQQFFLPINFHVPKSP

SEQ ID NO: 261609 - protein, 111 aa, Glycine max
  Clone ID: PAT_MRT3847_78255C.1.pep
ISRFSHCLQQEDPQKGIVYHDNGYGGEDAYDDYDGKTKDFSKLELKPDHPNRPLWACGNGRIFLETFSPLYKHAYDFLIAIAEPVCRPETMHEFNLTPHSLFAGVPVGLET

SEQ ID NO: 261610 - protein, 83 aa, Glycine max
  unsure (1)..(83): unsure at all Xaa locations
  Clone ID: PAT_MRT3847_78256C.1.pep
THAAHAATAAATEPKAATEDXKSXLXEDXDEXEEXEXNEEXDDKEEGKEXTQQXEXXXXDXDXXDDXXLQXRREXESNTEKNT

SEQ ID NO: 261611 - protein, 81 aa, Glycine max
  Clone ID: PAT_MRT3847_78257C.1.pep
HAAMLCNHIICLLPTSPFKVPLCTLYPPLFKVGLPATNQMFSHIVHTRHPPLPLHSYVALPFMCFAPPPSLSPCLSPPPPP

SEQ ID NO: 261612 - protein, 76 aa, Glycine max
  unsure (1)..(76): unsure at all Xaa locations
  Clone ID: PAT_MRT3847_78258C.1.pep
MGKPFTLSLSSLCLLLLXSSACFAISSSKLNECQLNNLNALEPDXRVESECGMILTWNSQYPELTCAVVTDSSLTL

SEQ ID NO: 261613 - protein, 45 aa, Glycine max
  Clone ID: PAT_MRT3847_78259C.1.pep
LIIRFMFTHSQVYVTGQNRSNSKQAPNSSKDIFLETYSQSHTTVG

SEQ ID NO: 261614 - protein, 83 aa, Glycine max
  Clone ID: PAT_MRT3847_7825C.1.pep
ARDFGLRFIFYVFDNLMHLNLNMGTCRVSSKFKEKIAKLRTQLLEPPKVCCYLYYLYHIVILNLLMIDASFCYMSVFSNLLIE

SEQ ID NO: 261615 - protein, 149 aa, Glycine max
  unsure (1)..(149): unsure at all Xaa locations
  Clone ID: PAT_MRT3847_78260C.1.pep
YVISERALVLSNVWRVARGTTYSDXPSQFRTIRLLDNXAESQAGPLNLRVQLFQLQPYRSGRIMSPGVNLXMSEMATLLASLIQCFNLQVLGPPVRIVHGKDARVSMEXKAGLPVPRAHSLVCVPLARLGDSIFTPFSIQIIVIYNSSV

SEQ ID NO: 261616 - protein, 66 aa, Glycine max
  Clone ID: PAT_MRT3847_78261C.1.pep
NFPLEGFRGLASPLNINRSLEPGDGLPSFHTGFFRLCFPAYSFMAVMKDRLEVLPQKPLGCSFGTW

SEQ ID NO: 261617 - protein, 55 aa, Glycine max
  unsure (1)..(55): unsure at all Xaa locations
  Clone ID: PAT_MRT3847_78262C.1.pep
LLFSYLYMKGSNNRTLKXSATYLIQGRLEGPQTEYANISTLPLLNTNLDENQTYT

SEQ ID NO: 261618 - protein, 57 aa, Glycine max
  Clone ID: PAT_MRT3847_78263C.1.pep
SPVNWSYPIWIIARTISCRHRSLPTGSARLVSPHSQRRRPLSPSDGKAPNLVIVPRA

SEQ ID NO: 261619 - protein, 42 aa, Glycine max
  Clone ID: PAT_MRT3847_78264C.1.pep
SNRRGSRAHKRQLQDSQHKIRHLSEGDVLLIPAAVAYWTYNS

SEQ ID NO: 261620 - protein, 315 aa, Glycine max
  Clone ID: PAT_MRT3847_78265C.1.pep
RKSFTLSFDEKHRDVVMNKYINHVLSTYQDMQTEQKTIKIHSIGGRCWQKSDLTHPASFDSLALEPEQKQAIIDDLNRFLRRKELYKKVGKPWKRGYLLYGPPGTGKSSLIAAIANYLKFDVYDLELSSMFSNSELMRVMRETTNRSIIVIEDIDCNKEVHARPTTKPFSDSDSDFDRKRVKVKPYRFTLSGLLNNMDGLWSSGGEERIIIFTTNHRERIDPALLRPGRMDMHIHLSFLKGKAFRVLASNYLGIEDHSLFEEIDGLLEKLEVTPAVVAEQLMRNEDPEVALEGLVEFLKEKDKESLLRFMNETAD

SEQ ID NO: 261621 - protein, 56 aa, Glycine max
  Clone ID: PAT_MRT3847_78266C.1.pep
TRAALKCFNQYRHGTSIYSSGQSTRCLSDNEVDRGSVGLNILEHVCKSGFENSDAW

SEQ ID NO: 261622 - protein, 70 aa, Glycine max
  unsure (1)..(70): unsure at all Xaa locations
  Clone ID: PAT_MRT3847_78267C.1.pep
AFGDPILVLNXXASCWSHKSISSPTFKKRGPQFNIWTLTPVFFSRLFTSWPTNFWWGGCFYFLGSSLPCL

SEQ ID NO: 261623 - protein, 48 aa, Glycine max
  Clone ID: PAT_MRT3847_78268C.1.pep
THVAILLAWTCYASSSFLSVMIFRIYHNPLSQSTCYFIVRPFSTLDKT

SEQ ID NO: 261624 - protein, 122 aa, Glycine max
  Clone ID: PAT_MRT3847_78269C.1.pep
NARDTLLNDPIQGSVAIEQAESAGSTVGSAFLSSILCCTCKKIPQEPCHMQDQTTFYETDSKSKTNMNHTPRYRRSEPLRTRSGQNHHRRVDLDQIHTDPVTKSVTEKRAERDLDYSEEKDE

SEQ ID NO: 261625 - protein, 183 aa, Glycine max
  unsure (1)..(183): unsure at all Xaa locations
  Clone ID: PAT_MRT3847_7826C.1.pep
SSIPLPGSSPSPPASSDTNPIPKFYKPPLFTTTSSREPLLNAPCNQFLIGDSEYPLLPWLMVPYANPAPASAEENFNSAHEIMRLPALRAAXSLRNWGVLSRPXCEELKTAVAYIGACSILHNSLLMREDFSALASEFEDCNQGCYGEPCNAMLHGEAVSSKALALRDNLAAVAKKIRDSKNS

SEQ ID NO: 261626 - protein, 105 aa, Glycine max
  Clone ID: PAT_MRT3847_78270C.1.pep
VILSSDLCHDRCACMAGQKMLIKKVLLVWGEIARGLPGVSSSCVVWCLLCSPFRYAFYYYLSVAPLRITTLDQRIHQRIRSNPYRKMLGGVHQYSGRYNIFMNLI

SEQ ID NO: 261627 - protein, 86 aa, Glycine max
  Clone ID: PAT_MRT3847_78271C.1.pep
PRLQSFLYSLIHPSLLNNPDLFLPFSPSRFSCPDLYGFDPDLHADGGFGRVQQRIDDKNADPTVDPADSACSIATDPCIGSLSSVS

SEQ ID NO: 261628 - protein, 55 aa, Glycine max
  Clone ID: PAT_MRT3847_78272C.1.pep
ERKYVALSDEKNNVKKATLCCLNSQLTNSDLRAKICIALSDAKKQPKNITVIKRN

SEQ ID NO: 261629 - protein, 145 aa, Glycine max
  Clone ID: PAT_MRT3847_78273C.1.pep
MESELKDLNSKPPNCNGNANSVCDDRPLLKPEPPASSDSIAEMEKKFAAYVRRDVYGTMGRGELPAKEKLLLGFALVTLLPIRVVLAVTILLFYYLICRVCTLFSAPTGEEEQKDYAHMSGLRRTIIVSCGHTLSRVTLFIFGFN

SEQ ID NO: 261630 - protein, 81 aa, Glycine max
  Clone ID: PAT_MRT3847_78274C.1.pep
SDTGVCSDRTSGIGWIYRRICVLVIDSLLYLYKAKYDRRFVVPGQNHHRRVDLDQIHTDPVTKSVTEKRAERDLDYSEEKD

SEQ ID NO: 261631 - protein, 377 aa, Glycine max
  unsure (1)..(377): unsure at all Xaa locations
  Clone ID: PAT_MRT3847_78275C.1.pep
MESELKDLNSKPPNGNGNSVRDDRPLLKPEPPVSADSIADMEKKFAAYVRRDVYGTMGRGELPPKEKLLLGFALVTLLPIRVVLAVTILLFYYLICRVCTLFSAPTGEEEQEDYAHMSGWRRTIIVSCGRALSRLMLFIFGFYWIPESNSASQEDKNLQPEDLRISGVMISNHMSYLDILYHMSXSFPSFFAKXSEAKLPLVGLISTCLGGIXVQRESRSSDFKGVSAVVTDRIREAHQNESAPLMMLFPEGTTTNGEFLLPFKTGGFLAKAPVLPVILRYHYQRFSPAWDSISGVRHVIFLLCQFVNYMEVIRLPVYHPSQQEMDDPKLYANNVRRLMATEGNLILSDIGLAEKRIYHAALNGNNSLPSVLHQKDE

SEQ ID NO: 261632 - protein, 51 aa, Glycine max
  unsure (1)..(51): unsure at all Xaa locations
  Clone ID: PAT_MRT3847_78276C.1.pep
YSDCRVTPAQXLTLKRLEXXTRDKVVXRRRLLNXEGGKPYPDSGDPEEXVF

SEQ ID NO: 261633 - protein, 25 aa, Glycine max
  Clone ID: PAT_MRT3847_78277C.1.pep
FLHLQNLALWVHENNLISVSPKIYL

SEQ ID NO: 261634 - protein, 97 aa, Glycine max
  Clone ID: PAT_MRT3847_78278C.1.pep
VILSSDLCHDRCACMAGQKMLIKKVLLVWGEIARGLPGVSSSCVVWCLLCSPFRYAFYYYLSVAPLRITTLDQRIHQRIRSNPYRVRYYLSIYIRKG

SEQ ID NO: 261635 - protein, 104 aa, Glycine max
  Clone ID: PAT_MRT3847_78279C.1.pep
QVRLHGRSKNVNKKSFIGLGRDRTGVARGLFLLCGVVFAVLSFSLCLLLLPICRSTPYYDSGSEDTSEDSLQPLSSKFWQSYWQKMLGGVHQYSGRYNIFMNLI

SEQ ID NO: 261636 - protein, 56 aa, Glycine max
  unsure (1)..(56): unsure at all Xaa locations
  Clone ID: PAT_MRT3847_7827C.1.pep
EMAHDLALDLEELCDXRIISGRRSTLSLLSYEIRILAKLSPEVASAHIPAPISTVS

SEQ ID NO: 261637 - protein, 177 aa, Glycine max
  Clone ID: PAT_MRT3847_78280C.1.pep
MGKASSSSSSSISSCRNPSNSTASSLTHQHSQDHLRTDLRLGLSLSATQHVGSSSSGGHWQPMQPHLISSFSQATEVNDCSDHTSFFVKVYMEGIPIGRKLNLLAHDGYHELVKTLEQMFDTTILWGTEMDGVQPERCHVLTYEDGEGDLIMVGDVPWEMFLSAVKRLKITRVEAFG

SEQ ID NO: 261638 - protein, 284 aa, Glycine max
  Clone ID: PAT_MRT3847_78281C.1.pep
CRVPGRPTETANSNDNRGPTNSTRSGNVSNNNISGGRPKVPSRVFAMSGSEAAASDDLIRGKCLIADKLLDVLYDSGATHSFISHACVERLGLCATELPYDMVVSTPTSEPVTTSRVCLKCPIIVEGRSFMADLICLPLAHLDVILGMDWLSTNHIFLDCKEKMLVFGGDVVPREPLKEDAANEGTGDVRTYMVLFSMYVEEDAEVSCIPVVSEFPEVFPDDVCELPPEREVEFIIDVVPGANPVSIAPYRMSPVELAEVKAQVQDLLSKQFVRPSASPWGAPR

SEQ ID NO: 261639 - protein, 99 aa, Glycine max
  Clone ID: PAT_MRT3847_78282C.1.pep
LSYSAYIQLFSTLLFSIHNYSLYIYSYSVVYIVILYSINGFFCFLYSYFAAICILIKLMHVLFKFLPVYLKCLLRTYSKQKPRVVSSIWPSYFECGSVF

SEQ ID NO: 261640 - protein, 57 aa, Glycine max
  Clone ID: PAT_MRT3847_78283C.1.pep
FNPPIDKSMYVTMQIATHSISLIQPSYLSLSLFFSPVFFRIPLLSSSRSRTNAWANA

SEQ ID NO: 261641 - protein, 113 aa, Glycine max
  Clone ID: PAT_MRT3847_78284C.1.pep
GREKKDLFIDPEGRPKEAHKRRNRETRFSNYYYYFFRLCILQPKLAFIFLFFFSSSKHSSFCSCCFISCLRFLGLQTTETFSEKLDKARLIELNSNKKIKKNKEKFGNAEKKN

SEQ ID NO: 261642 - protein, 58 aa, Glycine max
  Clone ID: PAT_MRT3847_78285C.1.pep
VILINAVLTSIPIYLLSFVRVPRQVISKITRLQRNFLWGGAADQNKIPWIKWEKVCLP

SEQ ID NO: 261643 - protein, 70 aa, Glycine max
  Clone ID: PAT_MRT3847_78286C.1.pep
QTSKDNTLFLLHLNSLSLSLSVKDDKQLTKIFFQIKRSSQNIVFNPLYLSPPRRAEEQQNLYLWFCLFLW

SEQ ID NO: 261644 - protein, 318 aa, Glycine max
  unsure (1)..(318): unsure at all Xaa locations
  Clone ID: PAT_MRT3847_78287C.1.pep
MGSSVRVKEASVITPSEPTPSSVLALSALDSQLFLRFTKEYLLVYNPCPGLDQAATTARLKAALARALVLYYPFAGRVRPRPDGPGLEVVCGAQGAVFIEASADCYNVNDFEKAPKTVTHWRSLLSLHVADVLKGSPPLVVQMTWLRDGAAXLGVGINHCICDGIGSAEFLNHFAELANEKRELLLLALRPKHKPVWERHLLNPPRGKQTRVDSASHPEFNRVPDLCNFMSKVSTGLKPTSVTFDKRRLNELKRLARCTSQPGESVCYTSFEVLAAHVWRSWARAIGFPPNQKLKLVFSVNVRTRVKPGLPDGYYGNA

SEQ ID NO: 261645 - protein, 51 aa, Glycine max
  Clone ID: PAT_MRT3847_78288C.1.pep
MERLNSELYYQNCHIMKENERLRKKAQLLNQENQQLLSELKKKLSKGNAKT

SEQ ID NO: 261646 - protein, 59 aa, Glycine max
  Clone ID: PAT_MRT3847_78289C.1.pep
HASWDRVFFFFSDAWLDPLSGACFFSWGGENKPKRPPTGFPTHSPTGSPTRPPTYSGTG

SEQ ID NO: 261647 - protein, 120 aa, Glycine max
  unsure (1)..(120): unsure at all Xaa locations
  Clone ID: PAT_MRT3847_7828C.1.pep
MKTTQLGGYHIPAGREIAXNIYGCNMDSNRWENPYEWMPERFLDEKYDPVDLFKTMAFGAGKRVCAGSLQAMLIACTAIGRLVQEFEWELGQGEEENVNTQCFTTRKLHPLLVKLKPRIK

SEQ ID NO: 261648 - protein, 85 aa, Glycine max
  unsure (1)..(85): unsure at all Xaa locations
  Clone ID: PAT_MRT3847_78290C.1.pep
RLCNINLLSAEDLGVSKEERQLVDSLXETCFNDPSSRREKRLLMLPGDDVRPPDVAITYFETPRTSSNAXLSSKNERDKNEIPLR

SEQ ID NO: 261649 - protein, 78 aa, Glycine max
  Clone ID: PAT_MRT3847_78291C.1.pep
LIIVNALYFKNNSVTARISKWKQKSSGRLEPFTRHSIDRMVSNRVCEEDIGCFSIEWCTLCFPAPRSFWNRFFLPQQL

SEQ ID NO: 261650 - protein, 88 aa, Glycine max
  unsure (1)..(88): unsure at all Xaa locations
  Clone ID: PAT_MRT3847_78292C.1.pep
ILGFLPFKNSVFVKNSTTDXXFLRPXQISKWVRRNKRTRNXPXXPTPFQPLPAFSANSSPTRRNRXXXPPLPXLFSDDIPFEENPXHF

SEQ ID NO: 261651 - protein, 87 aa, Glycine max
  Clone ID: PAT_MRT3847_78293C.1.pep
FTNDIQLAQPNRLQCFLYTIAPCLFLSDSIPCHAILTTADLERPVHRTCASTLKQPSYRQRQAYLRSVPPPTQHLRQIGIVITVCPR

SEQ ID NO: 261652 - protein, 63 aa, Glycine max
  Clone ID: PAT_MRT3847_78294C.1.pep
RNRCRGQVKKQCPLDLKTDSVLLRYNKGQYASKVNLAGTSPIVLHWHKKGTARVKGRAQVSAP

SEQ ID NO: 261653 - protein, 132 aa, Glycine max
  Clone ID: PAT_MRT3847_78295C.1.pep
GGGGLIAPVFFFFPRPPPESAASGRGLSPPFYRGGGESVFGGRPPLPAGGVVVAVLFSVSGGACFEVGGPRRGAFRGALWRAGLVFFPPFKSAGPPPLVVSPVFLFSDTKHFVSFFPFSIIKYLSMLSETAL

SEQ ID NO: 261654 - protein, 36 aa, Glycine max
  Clone ID: PAT_MRT3847_78296C.1.pep
INFVAGVIKLRIPSCFLNHDLQIILNSKFKDALKKA

SEQ ID NO: 261655 - protein, 98 aa, Glycine max
  unsure (1)..(98): unsure at all Xaa locations
  Clone ID: PAT_MRT3847_78297C.1.pep
NAKRKQTVLDGRQHPTVMDMDAEHFHLRSGVNGIRSYECSLXHSTVFHRHFFGNYSNAAQXLTVKPSCKANMDHNGVETADMADIAAASAEKGQFFID

SEQ ID NO: 261656 - protein, 54 aa, Glycine max
  Clone ID: PAT_MRT3847_78298C.1.pep
YVYPPARFVFVFKLTTDYAIYRVRAMRGVLKKPFPICIAYCKRTNHCGTQLKFH

SEQ ID NO: 261657 - protein, 62 aa, Glycine max
  Clone ID: PAT_MRT3847_78299C.1.pep
CPLHKHQGLLRLLLLEAVEVDQSHYQGPGEVVPGVASQKRTSNWLYNLPYIRHAHTFINAKL

SEQ ID NO: 261658 - protein, 60 aa, Glycine max
  unsure (1)..(60): unsure at all Xaa locations
  Clone ID: PAT_MRT3847_7829C.1.pep
RASRGPXRQAGEDXGRDEAESSAGGTGSRXEGEXXXEKGASXGXTXXXRPRPKRRRKERI

SEQ ID NO: 261659 - protein, 67 aa, Glycine max
  Clone ID: PAT_MRT3847_782C.1.pep
IVAIFNGGNALEELIQLGINVVLHSAIVLLIRSQLGNGLFNSINGSFGASRLSHGSAQCKHQICYDL

SEQ ID NO: 261660 - protein, 78 aa, Glycine max
  Clone ID: PAT_MRT3847_78300C.1.pep
KLWVLRTQILHLSDLLRQHSLFILQSPLFSLLFESNNGFFKTFFKKKKKKLQLDIYENVIKKLASHDSVSHLTSDSKA

SEQ ID NO: 261661 - protein, 53 aa, Glycine max
  Clone ID: PAT_MRT3847_78301C.1.pep
VQFSFTYTSVCLCNLYTSFVTKIEQHCCAACASILFLKIDLVLLMIINNWMTV

SEQ ID NO: 261662 - protein, 464 aa, Glycine max
  unsure (1)..(464): unsure at all Xaa locations
  Clone ID: PAT_MRT3847_78302C.1.pep
MGVVEGLLALALVLSVCVMCNGGSSSPFIRKVEKTVDMPLDSDVFAVPPGYNAPQQVHITQGDLVGKALIVSWVTVDEPGSSEVHYWSENSDLKKKAXDHVMSDCGLNYSSGFIHHTTVRNLEYKTKYYYEVGLGNTTRQFWFVTPPEIGPDVPYTFGLIGDLGQSFDSNKTLSHYELNPRKGQTVLFVGDLSYADNYPNHDNIRWDSWGRFTERSVAYQPWIWTAGNHEIDFAPEIGETVPFKPYTHRYHVPYKASQSTSPFWYSIKRASAHIIVLASYSAYGKYTPQYKWLEKELPKVNRTETPWLIVLMHSPWYNSYNYHYMEGETMRVMYEPWFVQYKVDVVFAGHVHAYERSERVSNVAYNIVNGLCAPVNDKSAPVYITIGDGGNLEGLATNMTEPQPKYSAFREASFGHAIFDITNRTHAHYSWHRNQDGVAVEADSLWFFNRYWHPVDDSTAHVSH

SEQ ID NO: 261663 - protein, 77 aa, Glycine max
  Clone ID: PAT_MRT3847_78303C.1.pep
RKPPLTHNSLTYCHKGDVMVGRVSMCSIAEAGGTDRRATHKNHILRGTLLKNNPSVNQYVLANKIIHSLSLYKYPSL

SEQ ID NO: 261664 - protein, 74 aa, Glycine max
  Clone ID: PAT_MRT3847_78304C.1.pep
GETVPFKPYTHRYHVPYKASQSTSPFWYSIKRASAHIIVLASYSAYGKYTPQYKWLEMDVPKAHVTESTDSLVL

SEQ ID NO: 261665 - protein, 118 aa, Glycine max
  Clone ID: PAT_MRT3847_78305C.1.pep
MELFPAQPDLSLQISPPNAKPTSSWRRSTEEDMDLGFWKRALDSRNSIQSMAKQDSCFDLSLSNPKASDNNNNHHSNTTTCNLIHHHHLQNGATPTNATTTTTNPLQLPFQKNHYFHQ

SEQ ID NO: 261666 - protein, 91 aa, Glycine max
  Clone ID: PAT_MRT3847_78306C.1.pep
SVSLYVCNIKHSEDAIEVFHYMSMKRCSLHSLSFYKLIKCLWQLAYFCGMSCCIATHTTIMHELSKSRRAEDLLAFLSQMSMVGSNLDLEA

SEQ ID NO: 261667 - protein, 239 aa, Glycine max
  unsure (1)..(239): unsure at all Xaa locations
  Clone ID: PAT_MRT3847_78307C.1.pep
MGVVEGLLALGLILNVCVVCNGGTSSPFVRKVEKAVDMPLDSDVFAIPPGYNAPQQVHITQGDLVGKAVIVSWVTVDEPGSSEVRYWSENSDQKKIVEGKLVTYRFFNYTSGFIHHTTIRNLEYNTKYYYEVGLGNTTRQFWFVTPPEIGPDVPYTFGLIGDLGQSFDSNKTLSHYELNPRKGQTVLFVGDLSYADNYPNHDNIRWDSWGRFTERSVAYQPWIWTAXNHEIDFAPEMVK

SEQ ID NO: 261668 - protein, 110 aa, Glycine max
  Clone ID: PAT_MRT3847_78308C.1.pep
MYQERVSNVAYNIVNGLCAPVNDKSAPVYITIGDGGNLEGLATNMTEPQPKYFAFREASFGHAIFDITNRTHAHYSWHRNQDGVAVEADSLWFFNRYWHPVDDSTAHVSH

SEQ ID NO: 261669 - protein, 46 aa, Glycine max
  Clone ID: PAT_MRT3847_78309C.1.pep
ADGDESAHRATSVATALYPTHSCVAYLVSQITWLTIMCYFAVDSSK

SEQ ID NO: 261670 - protein, 153 aa, Glycine max
  unsure (1)..(153): unsure at all Xaa locations
  Clone ID: PAT_MRT3847_7830C.1.pep
YMDTMNKVVSAHLRAYIPASEKLQLDIASYYDXLERDFSIRLCIRPRELLENRCAAFAIGDRINILQDIDEPALIPHIXAEAXSNRYPYEVLFTSLQKLLMDTATXNXKLCDDFFGEESIFDEHVSGPSGVIDEHXNAILPNCYDAICLMLMS

SEQ ID NO: 261671 - protein, 338 aa, Glycine max
  unsure (1)..(338): unsure at all Xaa locations
  Clone ID: PAT_MRT3847_78310C.1.pep
MFFLSSPFSSCFRASQRTNHDPTNLTTYIYHTEYGTVSLTWSRSLLGRSLHVNLHNRSSFHLLLKPWKKNGSKKLSHNTVFLWNLSNARFESGLEPRSRFYLAIEVEHGLSLLIGDLSPRSSKAKKPSKTNQLLXLKRDNVHVAPHRSRVYQTKAKLGGKVREIEIDCDGYNCNGGGYENXNESSLRLLFGVDGDKVLEVTRLKWKFRGNERVEIDGVHVQISWDVHDWLFEKDKDNNHCSANNNSNNFGNEGHAVFVFKFQKDKVRGGGGKEEEHQWSLGSGGEWRNGKSWSSSSLSVSSSVGSFGGSSSVMEWSSAEENELVVPLGFSLVVYAWRR

SEQ ID NO: 261672 - protein, 65 aa, Glycine max
  Clone ID: PAT_MRT3847_78311C.1.pep
IWDAIKSWVQEYVSFYYKSDAAIQQDPELQAWWKELVQVGHGDLKDKPWRQKTQTCEEMNEATAT

SEQ ID NO: 261673 - protein, 67 aa, Glycine max
  Clone ID: PAT_MRT3847_78312C.1.pep
QGYMLMRWGNMTMSVLGDSKNVKWVGPIQSLNLIHHLFGVCLKKSTILSVLSALSILTLLSIEVFFT

SEQ ID NO: 261674 - protein, 77 aa, Glycine max
  Clone ID: PAT_MRT3847_78313C.1.pep
SRSEPLGSTMGVLLLLMVATEMMGPTMVAEARTCESHSHRFKGPYMINTNYSCMYLTKHFTRKHYHNFHHIFFYTKH

SEQ ID NO: 261675 - protein, 221 aa, Glycine max
  Clone ID: PAT_MRT3847_78314C.1.pep
HASAHASEKKLYGLTPLRRSQRINNLTPPPFQPSTPIKQEKKVTVCEEKEEEQRPANAPFINLSNADLLLSAESSARRCDSKGRGSVYNPVLGICCHFCRQKKLCGEEDCKRCGNFDVNEPCLGKTDCSVCHSSTGVFCRACLKIRYGEEIEEVRKNKGWTCPHCIEAKGINPHWICNSSICLRKRKMPPTGIAVYRAREMGYKSVAHLLMEELKRGKCKI

SEQ ID NO: 261676 - protein, 68 aa, Glycine max
  Clone ID: PAT_MRT3847_78315C.1.pep
IPRWTHSSAKLLLLPHYFITKTKGHLVCLSSGTAAYYYFSLHYLIPFDANYSHKSLQITSINFLNSVQ

SEQ ID NO: 261677 - protein, 97 aa, Glycine max
  Clone ID: PAT_MRT3847_78316C.1.pep
MVTQQQPQPQLQVQPQQSTPPSSQDEALKRNTDCVYFLASPLTCKKGNECEYRHSEYARVNPRDCRYWLSGNCLNPKCPFRHPPLDGLLGTQAAVTG

SEQ ID NO: 261678 - protein, 45 aa, Glycine max
  Clone ID: PAT_MRT3847_78317C.1.pep
MRHCMSFLSGSGFMAQSMVVPSFATGNPWYHERKTVFTHSLRPRP

SEQ ID NO: 261679 - protein, 84 aa, Glycine max
  unsure (1)..(84): unsure at all Xaa locations
  Clone ID: PAT_MRT3847_78318C.1.pep
GVSASDMFIRQELVKNXKANLQSPIYHSSRTXSLISTYPXSMHEKELKKLCIDSCISRASKHKPVIRHIKPLKNEKYGNVSQER

SEQ ID NO: 261680 - protein, 54 aa, Glycine max
  Clone ID: PAT_MRT3847_78319C.1.pep
SCYFGSSSPFFFRLPWCPRLLPVSLGVFLLPVLPFRGVLVSILAFPRCGRSRSG

SEQ ID NO: 261681 - protein, 51 aa, Glycine max
  Clone ID: PAT_MRT3847_78320C.1.pep
QKMGVIFNNNDQGFKNLPPKLLKLIFTGQGLPQSLGDDAPKPIFLIKQAIT

SEQ ID NO: 261682 - protein, 100 aa, Glycine max
  Clone ID: PAT_MRT3847_78321C.1.pep
MAVKSQSPPLHHQFLSTTPNDYTSDIESIDQEGPESLSNPTPFMENAEQHHHEDQKSMKNKRYKFLLFRNYVLLFVGSVSSSLLTKYYFNHKGSNKWVST

SEQ ID NO: 261683 - protein, 89 aa, Glycine max
  unsure (1)..(89): unsure at all Xaa locations
  Clone ID: PAT_MRT3847_78322C.1.pep
NDADIHMMLAADVHIVTKDCDFQKERYIFKRLIDGIYINNXLGKTWDMLQLAIRDTRATENPDEIIVQSLRPYDRRADVKYAKDTEAHA

SEQ ID NO: 261684 - protein, 75 aa, Glycine max
  unsure (1)..(75): unsure at all Xaa locations
  Clone ID: PAT_MRT3847_78323C.1.pep
XXVSVEKRPQYATKKKRNYHKLKVIQSKVKNTKPTFPTPTKMVFNTNFPHQKNKHLLSLVGQKKNPHLLLRLALL

SEQ ID NO: 261685 - protein, 83 aa, Glycine max
  unsure (1)..(83): unsure at all Xaa locations
  Clone ID: PAT_MRT3847_78324C.1.pep
PKQNEEXPPSLYFLYXFLASSAXXTXXXXNIXRMLAAXFGFXTFKHYVXVIHLVRRDXPXXDXHRLGLXNVAMSSLLXKHLSX

SEQ ID NO: 261686 - protein, 58 aa, Glycine max
  Clone ID: PAT_MRT3847_78325C.1.pep
QLICLDSIFLLLQKITYPHPIELAVCIARHIRNSFIFLVAVVHLPLYFMEILQRHKLP

SEQ ID NO: 261687 - protein, 168 aa, Glycine max
  Clone ID: PAT_MRT3847_78326C.1.pep
IRIKHGRNCYVETDPTGRCGRFGDVLGKRAMKTVYKAVEEALGIEVAWNQVRLNEALRTPDDLQRLYSEVHLLSTLKHQSIIRFYTSWIDIDNRAFNFITELFTSGSLREYRKNYKRVNIQAIKNWACQILQGLVYLHCHDPPVIHKDLKCDNIFVNGHLGQVKIGDL

SEQ ID NO: 261688 - protein, 604 aa, Glycine max
  Clone ID: PAT_MRT3847_78327C.1.pep
MGENCYVETDPTGRYGRFGDVLGKGAMKTVYKAIDEVLGIEVAWNQVRLNEALRTPDDLQRLYSEVHLLSTLKHQSIIRFYTSWIDIDNRAFNFITELFTSGYRKNYKRVSIQAIKNWARQILQGLVYLHGHDPPVIHRDLKCDNIFVNGHLGQVKIGDLGLAAILRGSQLAHSVIGTPEFMAPELYEEEYNELADVYSFGMCVLEMLTSEYPYSECSNPAQIYKKVTSGKLPMAFFRIEDMEAQRFIGRCLVPAEKRPSAKELLLDPFLVSDDPSSTMKFAIQKPFLNVNEMEKLQLSDDLPRTGMKVIGKLNPEDGTIFLKVQISDKDGSARNVFFPFDILSDTPIDVATEMVKELEIADWEPFEIANMIDREISALLPHRRQSSCSDAFHTFNYLDDDCDDDEPHHHFRSFSSSSSFQESMSDLVGKAEEISSGYYWLHDDLHDDTSSRCSSQGTYSNLNYYSVDDHHQEYNVPSLRKDKLPITKSHNKGKKVSSGEDLSNFNQYKLMVGSQVPLTSKSKMMMNNHHRLTRNRSLIDIRSQLLHRSLVEEVNKRRLFKTVGAVENIGFQAPCDVSTKRSQHVCVAPNENSPRSGKEGKIKR

SEQ ID NO: 261689 - protein, 79 aa, Glycine max
  unsure (1)..(79): unsure at all Xaa locations
  Clone ID: PAT_MRT3847_78328C.1.pep
XPPLPRXXXHAXXXLHXXXXIKXXXXXXXLHXXEETXSSXLXXXRXXXPEGXXDXGXRVDXMXQAXXXQGXXXXXGGQX

SEQ ID NO: 261690 - protein, 70 aa, Glycine max
  Clone ID: PAT_MRT3847_78329C.1.pep
WVVCPVFACISWIRLFLYYTHAGLGLWVCSYSISTFIDIMRPNLSSVECTNLASRQGGIGMPKNRVCSPK

SEQ ID NO: 261691 - protein, 76 aa, Glycine max
  unsure (1)..(76): unsure at all Xaa locations
  Clone ID: PAT_MRT3847_7832C.1.pep
RLQILDLVSMSTATAVGVXLECKRFFXASGLRGSXRSLXVSFSQFSTLSFVSLPASSADILAELISXXXFQGVHNV

SEQ ID NO: 261692 - protein, 138 aa, Glycine max
  Clone ID: PAT_MRT3847_78330C.1.pep
SYKISGMDGVDFNEARELLLTICLLHGSSSNLETFTIKCNSMAVELQQILDVFDYSNCYFNLLQDVKITVKTSYKPALDLIRLVLARSPALKILTFRVGLGLNRSDASVLLSISCDLLQMDRASPRAKVKFLYDDLSE

SEQ ID NO: 261693 - protein, 60 aa, Glycine max
  Clone ID: PAT_MRT3847_78331C.1.pep
IMFVYFDQVSLQRVQRLVVKGNDRTVCRWSLLLRRWEFGEGSLVVVELFVSIYRCRLNSA

SEQ ID NO: 261694 - protein, 95 aa, Glycine max
  Clone ID: PAT_MRT3847_78332C.1.pep
APRGRVGWFTPPCQVPPALEGRGGLPRSPKNKGQPLGLFGKGGPQVGGYSPLFCLLGEIDFFGVFSLPPLGLEGDLAPPGAPLPLKNLPGKGFCF

SEQ ID NO: 261695 - protein, 275 aa, Glycine max
  Clone ID: PAT_MRT3847_78333C.1.pep
SGFPRRPTRPLAAVEYIDDIYKFYKLVENESHPHDYIDSQPEINERMRAILVDWLIDVHTKFELSLETLYLTINIIDRFLAVKTVPRRELQLVGISAMLMASKYEEIWPPEVNDFVCLSDRAYTHEQILAMEKTILNKLEWTLTVPTPFVFLVRFIKAAVPDQELENMAHFMSELGMMNYATLMYCPSMVAASAVFAARCTLNKAPLWNETLKLHTGYSQEQLMDCARLLVGFHSTLGNGKLRVVYRKYSDPQKGAVAVLPPAKLLPEGSASQHS

SEQ ID NO: 261696 - protein, 46 aa, Glycine max
  Clone ID: PAT_MRT3847_78334C.1.pep
LPIMRGISESLGCYNSAITVLPIDLCMLSLDNAPAVQRLQTIPVTS

SEQ ID NO: 261697 - protein, 455 aa, Glycine max
  Clone ID: PAT_MRT3847_78335C.1.pep
MASRAIVQQQQARGEAVVGGGKQQKKNGVADGRNRKALGDIGNLANIRSAVEVKPNRPITRSFGAQLLANAQAAAAAGNNKKQACANVAGPPAVANGGVAVAKRVAPKPGSKKVIVKPKPSEKVTDIDASPDKKEVLKDKKNEGDANPKKKSQHTLTSVLTARSKAACGITNKPKEQIIDIDASDAARRRQKGEYIDDIYKFYKLVENESRPHDYIGSQPEINERMRAILVDWLIDVHTKFELSLETLYLTINIIDRFLAVKTVPRRELQLAGISAMLMASKYEEIWPPEVNDFVCLSDRAYTHEHILTMEKTILNKLEWTLTVPTPLVFLVRFIKASVPDQELDNMAHFLSELGMMNYATLMYCPSMVAASAVLAARCTLNKAPFWNETLKLHTGYSQEQLMDCARLLVGFYSTLENGKLRVVYGKYSDPQKGAVAVLPPAKFLLPEGSASQHS

SEQ ID NO: 261698 - protein, 85 aa, Glycine max
  unsure (1)..(85): unsure at all Xaa locations
  Clone ID: PAT_MRT3847_78336C.1.pep
XNSQHLRXXHDPAVXDXAWHLIXMGXAAVXTVPXXSAAXAATLRHDDXXXLGXEXYXXTXXLXSAXAVXRQRRRGXNTXDRSLQY

SEQ ID NO: 261699 - protein, 151 aa, Glycine max
  unsure (1)..(151): unsure at all Xaa locations
  Clone ID: PAT_MRT3847_78337C.1.pep
EGSGKAPFEVPPHSVAGYASDAATXMVHEARHESVVSVSRRRSKREQLIEHTRVASILFIYPNSXNKALGIVXVFWRVXQGIVVVMAVYVPHLIAQQFVMGFFRLVLIFALKHVRFNSVVDHQIVQGMFQRSSPVRAHWGSNSGRASSRSF

SEQ ID NO: 261700 - protein, 97 aa, Glycine max
  unsure (1)..(97): unsure at all Xaa locations
  Clone ID: PAT_MRT3847_78338C.1.pep
VLPLLERERHRDSSREAVCFNECAVRQAADQNDMELEAIRAAKENAXLDDALRGSTPQYRQITWDEIILATSSISDDLPIARAAYRVVYKCNIANTP

SEQ ID NO: 261701 - protein, 290 aa, Glycine max
  Clone ID: PAT_MRT3847_78339C.1.pep
EHVFSGALAGICVSLCLHPVDTIKTVIQACRAEHRSIFYIGKSIVSDRGLLGAYGGITTNIACSAPISAVYTFSYESVKAALLPHLPKEYCSFAHCMGGGCASIATSFIFTPSERIKQQMQVGSHYRNCWDVLVGIIRNGGFSSLYAGWRAVLFRNVPHSIIKFYTYESLKQVMPSSIQPNSFKTVVCGGLAGSTAALFTTPFDVIKTRLQTQIPGSANQYDSVLHALYKISKSEGLKGLYRGLIPRLIMYMSQGSLFFASYEFFKRTFSLEAPYPTDLCIQDNDGNAEE

SEQ ID NO: 261702 - protein, 76 aa, Glycine max
  unsure (1)..(76): unsure at all Xaa locations
  Clone ID: PAT_MRT3847_7833C.1.pep
MMRARFPLLLLGVVFLASVSVSLGIAYWEXNPSHNKCLRSCNSEKDSYRKQACHARCKLLKVEEDVACEDGLIPRV

SEQ ID NO: 261703 - protein, 103 aa, Glycine max
  Clone ID: PAT_MRT3847_78340C.1.pep
VVCGGLAGSTAALFTTPFDVIKTRLQTQIPGSANQYDSVLHALYKISKSEGLKGLYRGLIPRLIMYMSQGSLFFASYEFFKRTFSLEAPYPTDLCIQDNDGNA

SEQ ID NO: 261704 - protein, 73 aa, Glycine max
  Clone ID: PAT_MRT3847_78341C.1.pep
NAKYSKPNPLAWGLRPCYQFDPFTNTWHFANHIHRGIILVFCFIGHIYRIIHSPIFTLICPYHHPSFSPALLI

SEQ ID NO: 261705 - protein, 81 aa, Glycine max
  Clone ID: PAT_MRT3847_78342C.1.pep
RLRSLSIAHNMVNIYPEQPNFINERASKSSSSTNTLRATTHTSQSNHIEFLDQLNCINSYYMAITLLCTLLTLLIISTKIQ

SEQ ID NO: 261706 - protein, 89 aa, Glycine max
  unsure (1)..(89): unsure at all Xaa locations
  Clone ID: PAT_MRT3847_78343C.1.pep
KSEPHSXWEWIFPIEVCGPNNGXEMRSSDWPNQTAWHLSLLIDTPKQSTDVDILLRISQDFEIAGNTLMPAYSRPQATARSCEYAECSA

SEQ ID NO: 261707 - protein, 222 aa, Glycine max
  unsure (1)..(222): unsure at all Xaa locations
  Clone ID: PAT_MRT3847_78344C.1.pep
MPMTMAMTASQLRWGWRPTPKQQQRRRMVPVVCSIAIKNAQNKERAKLKKLFEEAYERCRTAPTEGVSFTIQQFTDALDKYDFDAEMGTKVKGTVFATDNSGAYVDITAKSTAYLPLHEACIHRIKNVEEAGIIPGMREEFMIIDENQADDTLILSLRSIQYDIAWERCRXLKAEDAVVKGKXCNAXKGGLVAQVGGLKGFGPFSQISSKSAGERLLEQVIP

SEQ ID NO: 261708 - protein, 196 aa, Glycine max
  Clone ID: PAT_MRT3847_78345C.1.pep
VRIETQVGERGIQLSGGQKQRIAISRAIVKNPSILLLDEATSALDAESEKSVQEALDRVMVGRTTVVVAHRLSTIRNADMIAVVQGGKIVETGNHEELMANPTSVYASLVQLQEAASLHRLPSIGPSMGCQPSITYSRELSRTTTSLGGSFRSDKESIGRVCAEETENAGKKRHVSAARLYSMVGPDWFYGVAGTL

SEQ ID NO: 261709 - protein, 94 aa, Glycine max
  Clone ID: PAT_MRT3847_78346C.1.pep
MGINLKPEQVSLVWTVAVRVIRYKYLLNLQTPQVPVVNESPRSAQQNLSDVQVAYLSQVWLRSESATRPTLANRCRIANRSKRKTSESKESERV

SEQ ID NO: 261710 - protein, 39 aa, Glycine max
  unsure (1)..(39): unsure at all Xaa locations
  Clone ID: PAT_MRT3847_78347C.1.pep
XXLCXIXWGVXVXXQHSHIDDHXXSXSKXIPLSXSSSSS

SEQ ID NO: 261711 - protein, 53 aa, Glycine max
  Clone ID: PAT_MRT3847_78348C.1.pep
KAYKMKIPFKLSRHAIEQQHKIFKVASKCEQIFTRHQLKWQKQKHNFFAFSSD

SEQ ID NO: 261712 - protein, 109 aa, Glycine max
  Clone ID: PAT_MRT3847_78349C.1.pep
CGRAGGSPCRGHRMEAPCGRGVGPHAGGTGWRLHAAGGVGPHTGGRQGTVGWTQRAPHCPAPASRQHPGTYRASSRAASDRSQHSQRLCCRYRSSEPRVPPRLPMKALT

SEQ ID NO: 261713 - protein, 201 aa, Glycine max
  unsure (1)..(201): unsure at all Xaa locations
  Clone ID: PAT_MRT3847_7834C.1.pep
MATRRVRCMQCGRPLLVPIEVAYSIPLMCYGCQASRPNYHFANNVTPPFVNYHPAPGYAHRIRRNQFNYPRPLPLTPPPTPLNPPSSYGNKRAVLVGISYCNQINNLKGSVNDAQSMKYFLINKMGFPSDSIRVLTDDPEEKNPMRIPTKYNMRMAMKWLVEGCRSGDSLXVFHFSGHGSQEEDTNMDXEVDGYDETXCPR

SEQ ID NO: 261714 - protein, 103 aa, Glycine max
  Clone ID: PAT_MRT3847_78350C.1.pep
RPTRPRTRGRDYRSASAPPPMDTRSLFPSQLPSSGSIPSLTPSFFFNLGFLFHFHLLPLSFRTQILSFFSFSLLNLSSFPLPLNLQLSVVDETKKQKQKKKRE

SEQ ID NO: 261715 - protein, 81 aa, Glycine max
  Clone ID: PAT_MRT3847_78351C.1.pep
QRVGTRYIHKSSRCKTFFISLTEMSLVEASGYSSNKYNILVSQPSNPSANHKDASSKQYAQDDLLVATLNLTMLHIYFGKL

SEQ ID NO: 261716 - protein, 39 aa, Glycine max
  Clone ID: PAT_MRT3847_78352C.1.pep
MLVFYWFHLHSKVFFQVVTVIVRSPVPILKYHVVSFLIA

SEQ ID NO: 261717 - protein, 552 aa, Glycine max
  unsure (1)..(552): unsure at all Xaa locations
  Clone ID: PAT_MRT3847_78353C.1.pep
WISLAFDRSLGGRDFDEVIFSHFAAKFKEEYHIDVYSKTKACSRLRAACEKLKKVLSANLEAPLNIECLMDGKDVKGFITREEFEKLASGLLERVSIPCRRALTDANLTAEKISSVELVGSGSRIPAISTSLTSLLKREPSRQLNASECVARGCALQCAMLSPIYRVREYEVKDDVIPFSIGLSSDEGPVAVRSNGVLFPRGQPFPSVKVITFQRSNLFHLEAFYANPDELPPRTSPKISCVTIGPFHGSHGSKIRVKVRVPLDLHGIVSIESATFDXKDDMDDLVMAGDYHSNSDAMDIDPISETVTNGFEDDTNKKLEFPCSSADGTRKDNRRLNVPVNENVYGGMTKAEISEALEKELQLAQQDRIVEQTKEKKNSLESFVYDMRSKLFHTYRSFASEQEKDGISRSLQETEEWLYEDGVDETEHAYSSKLEDLKKLVDPIENRYKDDKERVHATRDLSKCILKHRASADSLPPQDKELIINECNKVEQWLKEKIQQQESFPKNTDPILWSSDIKSKTEELNLKCQQILGSNASPSPEDKDKPDTFNDP

SEQ ID NO: 261718 - protein, 75 aa, Glycine max
  Clone ID: PAT_MRT3847_78354C.1.pep
EDFMRYATNELLFISYRNKGTICLATIPENLPTAIDYDDPKANRAALNGTPHILYHGRNQTRVLRDQTCLRGVRM

SEQ ID NO: 261719 - protein, 58 aa, Glycine max
  Clone ID: PAT_MRT3847_78355C.1.pep
SSTFITCRFFTITPFLTLTISIITSITHNSFLPPPNSKTNSITPLIFHKQTLHASFSS

SEQ ID NO: 261720 - protein, 791 aa, Glycine max
  Clone ID: PAT_MRT3847_78356C.1.pep
MGINSNFSQGEEIMVPYLTTSIAKQHENGSIIKAEGNWQVYDVDSLRMSSWPIDSAYSGSTCEVSCSNCEQEVNDVDFQKSLEQCLLHSHKQNKVLMQNDLQEKLLNEKEKIKSNLEAYGIEDTYLSFKRTLLDGPPAEEGLKKLDSFNQWMSKELGDVEESNKPSTSGGYWDTVETENEVGNTTIPSQGHLDTYVLDPSVSHDQLFSIIDYSPSWAFEGSEIKVIISGEFLRSQHEAEQCKWSCMFGEVEVPAVIIAKGVLCCHTPPHKAGRVPFYVTCSNRLACSEVREFDFQVHYTPEDTTGENRGSTFDTFSIRFGELLSLGHAFPQNSDSISVSEKSQLRSKINSLLREEEDDWDKLLKLTQEEDFSPENLQEQLLQNLLKDKLHAWLLQKITEEGKGPNILDEGGQGVLHFASALGYDWALEPTIVAGVNVNFRDVNGWTSLHWAAFCGRERTVAFLISLGAAPGALTDPCPEHPSGRTPADLASANGHKGIAGYLAESSLSAHLTTLDLNRDAGENSGAKVVQRLQNIAQVNDLDGLSYELSLKDSLAAVCNATHAAARIHQVFRMQSFQRKQLKEYDDDKLGLSDERALSLIKMNVKSHKSGPRDEPVHAAAVRIQNKFRSWKGRREFLMIRQRIVKIQAHVRGHQVRKSCGKIIWSVGILEKVILRWRRKGSGLRGFKPEANSEGTMIQDVSSTDDDYDVLKEGRKQTEQRLQKALARVKSMVQYPEARDQYHRLLNVVTEIQENQVKHESSYNNSEEPREFGDLNDLEALLDEDIFMPTAT

SEQ ID NO: 261721 - protein, 61 aa, Glycine max
  Clone ID: PAT_MRT3847_78357C.1.pep
VAVGMKISSSNNASRSLRSPNSLGSSELLELLSCFTCKRHIQKSKLYCQSREDTMHDVKYI

SEQ ID NO: 261722 - protein, 103 aa, Glycine max
  Clone ID: PAT_MRT3847_78358C.1.pep
WYYFNMDPKNCFIDGAVRHIYSSSLGFIKRYKQFMLDKPKQLSHNLWIYNDTPIRLQCRTSYDRPLRCQQNRTLSLTTRHEVKPPAASSATITGRVGRPGNPD

SEQ ID NO: 261723 - protein, 52 aa, Glycine max
  Clone ID: PAT_MRT3847_78359C.1.pep
LVVIMCKVCGHFLIGRAYSARGSCLISFIELTLRSSVTMLEFQVMQRIPPFQ

SEQ ID NO: 261724 - protein, 90 aa, Glycine max
  Clone ID: PAT_MRT3847_7835C.1.pep
AKPLLAGVSQVSLSASWFIRRRPLISIHPVPQRLSFCSTCSSPYYLSILLLGCHHTLNLSTLFPTRPICCAPSPPKQTSVLCHTSSDDKV

SEQ ID NO: 261725 - protein, 60 aa, Glycine max
  Clone ID: PAT_MRT3847_78360C.1.pep
FTDWPNGATKHTLFLCYIASQHKGQASFQCPGYLDDRLSIIESFFYTPIGLVLWSLYRHR

SEQ ID NO: 261726 - protein, 91 aa, Glycine max
  unsure (1)..(91): unsure at all Xaa locations
  Clone ID: PAT_MRT3847_78361C.1.pep
MVYDKAQTSEAYLKSYQVXLQIRREGKTDYRAKIRLINQDKNKYNTPKYRFVVRFSNKDIVAQIISASIAGDLVHATAXSHELSRYGLEVG

SEQ ID NO: 261727 - protein, 308 aa, Glycine max
  Clone ID: PAT_MRT3847_78362C.1.pep
MATPNNRLSLAMERTGQWVFSQDIPTDVIVEVGETTFSLHKFMLVAKSNYIRKLILESDESELTRIDLSDIPGGPSIFEKTAKFCYGVNFEITVHNVAVLRCAAEFLQMTDQYCENNLAGRTEEFLTQVAFFTLTGAVTVLKSCRHLLPYADDINVVKRCVEAVSAKACSEANFPSRSPPNWWTEELALLDIDFFARVIDAMKQRSAKALTVAAALITYTERALRDLVRDHTGNGIRSSDPGDSDSRSKQRKLLEAIVDPFPSEKAAFPIHFLCCLLRCAIYLRAYAGCKTELEKRISAILEHVTVDN

SEQ ID NO: 261728 - protein, 58 aa, Glycine max
  Clone ID: PAT_MRT3847_78363C.1.pep
MKLTLFNFFNLSSCKRGVTKYGFGSVNAFMLYNILLNGNWSKCQPVITFMFYKWLVCF

SEQ ID NO: 261729 - protein, 63 aa, Glycine max
  unsure (1)..(63): unsure at all Xaa locations
  Clone ID: PAT_MRT3847_78364C.1.pep
LSSLIILQRLIKVTNFCLESQSQSMDTQKGPSSSAAAVPSCXKKKNEEATFLEDPSVVSDASP

SEQ ID NO: 261730 - protein, 107 aa, Glycine max
  Clone ID: PAT_MRT3847_78365C.1.pep
IHTTLSLGPMKQTDDVSTPSASATLHSHRPHFFLMHNISLYISTSICCSFIFTLVVPISHTYINQYNHHERSSTAYGGDVDAVQRSALALAGSPGPHLQVHSRRVSR

SEQ ID NO: 261731 - protein, 87 aa, Glycine max
  Clone ID: PAT_MRT3847_78366C.1.pep
MDTQKGPSSSAAAVTSCRKKKNEEATFLEDLKDHIDEFINASMDEHKTCFKKTVQKMFGMSKAVAERDTNAAKEVESSLPLQTTLQD

SEQ ID NO: 261732 - protein, 53 aa, Glycine max
  Clone ID: PAT_MRT3847_78367C.1.pep
AMTPPSLSSKLGISLYQKHLGYVATFFFINLRCIQHGEWGSKNLYPTTVTFHF

SEQ ID NO: 261733 - protein, 77 aa, Glycine max
  Clone ID: PAT_MRT3847_78368C.1.pep
VNLISQACNFCSLKRLGIRRETACALSLQNRPFIWFFLVHGHLKDTTTTTGPLRLGMLNRRRAHLKEARQRKRIVVV

SEQ ID NO: 261734 - protein, 145 aa, Glycine max
  unsure (1)..(145): unsure at all Xaa locations
  Clone ID: PAT_MRT3847_78369C.1.pep
LFLAVLHYTHSEVHVGXSELSLSRFSSCIMLVAYVAYLFFQLKSQRNLYVSVNEGASMAWEIPVAFISVILLPLVGNATEHASAIMFAMKDKLDISLGVAIGSSTQISMFVPAGWLFYLLMIGTHIYLAAGRSLATSSFDGLCCL

SEQ ID NO: 261735 - protein, 144 aa, Glycine max
  Clone ID: PAT_MRT3847_7836C.1.pep
MAGEVVKKGDSLNLKVTNKSHVQPEEKIGRKEYQLVTFDLPYLAFYYNQKLLFYKGEDFEGMVQKLKVGLGVVLKEFHQLAGKLGKDEEGVFRVKLDLSLAEPNGPPTSNGEAKTAPALTEKIFKFSESGHRQDKVNGQREPLI

SEQ ID NO: 261736 - protein, 310 aa, Glycine max
  Clone ID: PAT_MRT3847_78370C.1.pep
MTPARKKIVKFNATELIISIYALKSGMTCVVQLSLLGSILSNMLLVLGCAFLCGGIVNHEKEQVFNKAATSVNSRLLLMAVMGILFPAVLHYTHSEVHVGKSELSLSRFSSCIMLVAYVAYLFFQLKSQRNLYVSVNEDEGQNGTNSNDDESSDISKWETIIWLSVMTAWISILSEYLVGAIEGASTAWEIPVAFISVILLPLVGNAAEHASAIMFAMKDKLDISLGVAIGSSTQISMFVIPFCVVIGWITGHPMDLNFQLFETAVLFLTVIVVAFMLQEGTANYFKGLMLILCYLIVAASFYVHVDSSQ

SEQ ID NO: 261737 - protein, 130 aa, Glycine max
  Clone ID: PAT_MRT3847_78371C.1.pep
IRTHCFASQQQLQQQWAPKRGGKAPALAANKKPDKVTTPLFEMRAIQFGIGGAWPTNIDLTGVGGVSFFFLIHPRKRILKLRLKGPTSLNHCTRSLVTPLPCVLCSALAMYLARGLSLSATISSCKGPQA

SEQ ID NO: 261738 - protein, 54 aa, Glycine max
  Clone ID: PAT_MRT3847_78372C.1.pep
KKSLNFIEFHLGPPRRTLPGLYSKLSSKFLKTPSKKKCKRVFFQRLNRGERAFK

SEQ ID NO: 261739 - protein, 68 aa, Glycine max
  Clone ID: PAT_MRT3847_78373C.1.pep
NGRNEKLLSVDVAASGAVFKFFLLIASMIRLLAMINNLIRKEEDLNQLNFVNIMLRFYHTTTSTAYDT

SEQ ID NO: 261740 - protein, 108 aa, Glycine max
  Clone ID: PAT_MRT3847_78374C.1.pep
GRPPPPPPPPPPPPPPPPPPPPPPPPPLFFFFFFSNPGAPPEFPARDPPHFIWVAPTPPFQKEKPVGPPFLINPPPPGKRRFSFWPPGVFFFFPKETGNIFFPFPPCP

SEQ ID NO: 261741 - protein, 83 aa, Glycine max
  unsure (1)..(83): unsure at all Xaa locations
  Clone ID: PAT_MRT3847_78375C.1.pep
MVRRSARCYRQIKKKPYPKSRFXRGVPDPTIRIYDVGMKXKGVDEFPFCVHLVSWEKEYVSSEALEAARIACNKYMAKFAGRM

SEQ ID NO: 261742 - protein, 46 aa, Glycine max
  Clone ID: PAT_MRT3847_78376C.1.pep
KWKVRNHSPTSVEGVSSLSPHLKCKIFDPKNKNLSLQTQLNTHHLT

SEQ ID NO: 261743 - protein, 42 aa, Glycine max
  Clone ID: PAT_MRT3847_78377C.1.pep
FYDIPSKSFHLIFKHVVSSRGSCGGLKLVKHVCVNVRFYEER

SEQ ID NO: 261744 - protein, 73 aa, Glycine max
  Clone ID: PAT_MRT3847_78378C.1.pep
FLMGLHATSFNRCETFHMIGFYPHSMGASFYLRTRMLTELSFSWVKTITAGQLAISVWVLLDGGGYAKESICY

SEQ ID NO: 261745 - protein, 61 aa, Glycine max
  Clone ID: PAT_MRT3847_78379C.1.pep
LLGITGHVQPSSEYLPSEERNHGRRLMSLKATKYSFLSFNKPLILRGDMLYHIDRQITRKV

SEQ ID NO: 261746 - protein, 409 aa, Glycine max
  Clone ID: PAT_MRT3847_7837C.1.pep
MATSLSFLIIRDLHSNFQTESNLNFDLNLNFIFNFPVMPYTVRENLSIGNIGDAAEILENGAVQSVTHILSVLSSASISFFSEWKTTLSIPAKEITKVHAADAAAKSALPPEKLLYSLEYAGRDLKLVRMAVPLRDTEKETARLLPGSSPAGAPIWRRRPPRGLWPTRPRPLPSDIFSSKTMAGEVVKKEDSLNLKVTNKSHVQPEEKIGRKEYQLVTFDLPYLAFYYNQKLLFYKGEDFEGMVQKLKVGLGVVLKEFHQLAGKLGKDEEGVFRVEYDDDMLGVEVVEAVVVDDNEIGVDDLTVAEISNTNLKELIPYSGILNLEGMHRPLLAVQLTKLKDGLAMGLAFNHAVLDGTATWQFMTSWAEICSGSPSTSAPPFLDRTKARNTRVKLDLSLPEPTAHQLPTV

SEQ ID NO: 261747 - protein, 195 aa, Glycine max
  Clone ID: PAT_MRT3847_78380C.1.pep
MAASEKTLTNKCTTNEGWTVVLPRRSRQRRKATKSGVLEEKQEPWTPTDSQTDPSKEATLVQKMERCINRIERSEFYHTFRDQIQTSVVDYFNRVLGSEIKMQMVIYGIGSIKLYEPPRLQLSLAILMRRDFSWIGNIEVFDPILSATESRVLEALGCSVMSINEHGRREALKPTMFFMPHCEAELYNNLLQANW

SEQ ID NO: 261748 - protein, 99 aa, Glycine max
  Clone ID: PAT_MRT3847_78381C.1.pep
PPRTCLCVETFVGSFSFGAFQLNQGGTFALLCVALRAASSVCVKKIVWSAMLWVPNIDECPVRYRVFMAGRGSVPLCVMPSLLNSSVFSQSKTIIFNGG

SEQ ID NO: 261749 - protein, 97 aa, Glycine max
  Clone ID: PAT_MRT3847_78382C.1.pep
ELEVSENAFKAAGVELFPQGGRRGICFNGWLVETRRPSIMDFSPFPEWGQKPDTSPFPEMGFGGNPLIFKPLSRGTPLPFYAFDALRGWKQEAFPPV

SEQ ID NO: 261750 - protein, 283 aa, Glycine max
  Clone ID: PAT_MRT3847_78383C.1.pep
MSGFSFGSSSSQSSAFSFTNPSSSSSSPFSLSSTPAFSFGSSSLFTTNPTSAASSSPSPLTFSFASSASPAPASAAAAASSIFGAATSASPLFSSPATAPSGASSSSAMTPSFGAAASSAAASPFGGGTPSAKTTRVRPRASSVSTNLFGAGSSASTTLFGGVSSASTTPFGGAPSASLTAFGGTPSAPTAPFGTASSTPTTTTSTTLFGGASSASATPFGVASSASTTPSGAASSASTTPIGAPSSASLTAFAGTSSSSTLFGFSGTASATTPFGGSSSSSS

SEQ ID NO: 261751 - protein, 114 aa, Glycine max
  unsure (1)..(114): unsure at all Xaa locations
  Clone ID: PAT_MRT3847_78384C.1.pep
LCFEIFERINGQENLYFLYKAGQSPWEKIPPGVGPPPFGGEWSADWKVXGASKKGFQNFVKAKXNVFGGPTFGGCFWPLKXAKNHWGLERIIKNGALLVLKKFLLRGAPPFPLI

SEQ ID NO: 261752 - protein, 137 aa, Glycine max
  Clone ID: PAT_MRT3847_78385C.1.pep
LLLLTFHFLRLTRLILTFVANWDICFGEVWYDACLTGPSHPEATHSFVWLFPSLDRTTSRSLCPHSSHESRYTRRTPRCSHSAYWPSWRCRSLAQSLRKRPSFRPRALTKPTPSTPTHKKHFRTCSMPYPWNLYTQP

SEQ ID NO: 261753 - protein, 558 aa, Glycine max
  Clone ID: PAT_MRT3847_78386C.1.pep
MAPRILLCGDVLGRLNQLFKRVSSVNKSAGPFDALLCVGQFFPDSPEQLEDFTKYIEGGSHFPLPTYFIGDYGVAAPKLLLQASKDSANQGFKMDGFKVCHNLYWLKGSGKFPLFGLSVAYLSGRKSSSGQQFGNYTEDDVDALRAIAEEPGVVDLFLTNEWPNGVTNRAADSDIPAGLSDGSDSTVSELVQEIKPRYHIAGTKGIYYAREPYSNVDAVHVTRFIGLASVGNRDKQKFIHAISPTPASTMSSTEIAMKTTNTTLSPYTFKEKRTSPMDSAKRSSDSISDPQYWRYDVAQKRQKHEAGHGDKLCFKFVSSGSCPRGEKCNFQHDTDAREQCMRGVCFDFLNKGKCERGPDCNFKHSLQDEGNRLPSRRPGSGRSKECWFCLSSPNVESHLIISIGENYYLALAKGPLVEDHVLIIPVEHMPSTLSMSSESEIELSRFQNSLKSYCKSQEKEVIFFEWVSVRGTHANIQAIPIPSSKAIMAEKIFNLAAQKLGFEFVTKKFDSISEGRKFLKAQIDGDSSLFYAQIPRGTILLHHVEEKEKIPCQFGREV

SEQ ID NO: 261754 - protein, 72 aa, Glycine max
  Clone ID: PAT_MRT3847_78387C.1.pep
KKELSIAIKLLVKAEFLYACMDFRMFVNNGLIQFTALLLIILVLQIEEKNLKRILHKTKDEMSLKELKVIIN

SEQ ID NO: 261755 - protein, 250 aa, Glycine max
  Clone ID: PAT_MRT3847_78388C.1.pep
IAHPRTRNFNSLHFPLKFKSPKVSLIYITNTHLNSISMANFEVPSFSLGLDDTPPHSPIHPPLSPDLHVSDSDSDSDPESRPDPPRPLLKRLRRGPPPPCLDPDADADDDIEDFSSQEDPDQGHAVPSAWNRNHSVCSSSKVSLNRSGVLTPHSCSNSFRDRKRKELSNDVPASARLETGKSGLMFPKLTTSPLRRFQLIDSDSDDADVGVGAGTSDANKVNPNSHLEQEKKTSADENINEGSVERIFRR

SEQ ID NO: 261756 - protein, 67 aa, Glycine max
  unsure (1)..(67): unsure at all Xaa locations
  Clone ID: PAT_MRT3847_78389C.1.pep
SFNLLTMPQSRLYQLPTNGRAVAXLSRDPNSTSKASQLFLKRQSRRATGPGRVRRALMTQARFILAP

SEQ ID NO: 261757 - protein, 448 aa, Glycine max
  unsure (1)..(448): unsure at all Xaa locations
  Clone ID: PAT_MRT3847_7838C.1.pep
MAGEVVKKEESLNLKVTNKSHVQSEEKIGRKEYQLVTFDLPYLAFYYNQKLLFYKGEDFEGMVQKLKVGLGVVLKEFHQLAGKLGKDEEGVFRVEYDDDMLGVEVVEAVVADDEIGVDDLTVAEISNTNLKELIPYSGILNLEGMHRPLLAVQLTKLKDGLAMGLAFNHAVLDGTATWXFMTSWAEICSGSPSTSAPPFLDRTKARNTRVKLDLSLPEPNGPPTSNGEAKPAPALRENIFKFSESAIDKIKSTVNENPPSDGSKILPTFQALSSHVWRHVSHARNLKPEDYTVFTVFADCRKRVDPPMPETYFGNLIQAIFTVTAVGLLTAHPPQFGASLVQKAIEAHNAKTIEERNKEWESAPKIFEFKDAGVNCVAVGSSPRFKVYDIDFGWGKPENVRSGTNNKFDGMIYLYPGKSGGRSIDVELTLEPEAMGKLEQDKDFLLEA

SEQ ID NO: 261758 - protein, 335 aa, Glycine max
  Clone ID: PAT_MRT3847_78390C.1.pep
MSLGILRSRAISLASKRFLCTNAASASPPLPPPPSAASPSRWSFLKYALVGALTGGTVFAGYASYAYSLDEIEQKTRSLRESAKYTAGDGVTALDKFQGLLYSTAMTVPAKAVELYLDARRVIEEQVKSYTEPYTDKLLPDLLPQEQHVFTLVLDLNETLIHYIWTRDTGWQTFKRPGVDAFLEHLAQFYEIVVYTDEQNMFVDPVIERLDTKHCIRYRLSRPATKYQDGKHFRDLSKLNRNPGKVLYLSGHALESCLQPENCLPIKAWQQQDIDDTALLDFIPFLEFVARSSPPDIRPVLASYQGCDIPSEFIRRSKEHQRRMQEQKNCGRLWK

SEQ ID NO: 261759 - protein, 76 aa, Glycine max
  Clone ID: PAT_MRT3847_78391C.1.pep
NPGKVLYLSGHALESCLQPENCLPIKAWQQQDIDDTALLDFIPFLEFVARSSPPDIRPVLASYQGCDIPSEFIKRS

SEQ ID NO: 261760 - protein, 105 aa, Glycine max
  unsure (1)..(105): unsure at all Xaa locations
  Clone ID: PAT_MRT3847_78392C.1.pep
ETNNLTLMGLFLLVXXXXLWGLLFSKLSLSLQNVPSPPPKMGVPKVIFSLNPFRGKIKQNLSPPHPFLLRFSTSLWSFPPIPLFXTNXAFLGAPPPPHLNLSLXX

SEQ ID NO: 261761 - protein, 41 aa, Glycine max
  Clone ID: PAT_MRT3847_78393C.1.pep
IFPPSLKNGVREWHTLWFPLLASKRGNKKVCQFLTRSFHLL

SEQ ID NO: 261762 - protein, 955 aa, Glycine max
  unsure (1)..(955): unsure at all Xaa locations
  Clone ID: PAT_MRT3847_78394C.1.pep
HSPNMFATFRLLLLLSFLSLLTSAQSEDQRQILLNLKSTLHNSNSKLFHSWNATNSVCTFLGVTCNSLNSVTEINLSNQTLSGVLPFDSLCKLPSLQKLVFGYNYLNGNVSEDIRNCVNLYYLDLGNNLFSVPSGVDGTSNWEKANXEPEFGENKDIVSWVHNKARSKEGLRSAVDSRIPEMYTEEACKVLRTAVLCTGTLPALRPTMXELWFKSLRMPSLVNWLGLGTNHLHELSIIDVNFPGKREHCKILVLASLMSILKWKTCVVKGSASSTPNKRKKREANSFFLNLLMKRFITWTCRXNFLTGTIPPDMCKKGTMSALLVLQNKLSGEIPATYGDCLSLKRFRVSNNSLSGAVPLSIWGLPNVEIIDIEMNQLSGSISSDIKTAKALGSIFARQNRLSGEIPEEISMATSLVIVDLSENQIFGNIPEGIGELKQLGSLHLQSNKLSGSIPESLGSCNSLNDVDLSRNSFSGEIPSSLGSFPALNSLNLSENKLSGEIPKSLAFLRLSLFDLSYNRLTGPIPQALTLEAYNGSLSGNPGLCSVDAINSFPRCPASSGMSKDMRALIICFAVASILLLSCLGVYLQLKRRKEDAEKYGERSLKEETWDVKSFHVLSFSEGEILDSIKQENLIGKGGSGNVYRVTLSNGKELAVKHIWNTDVPARRKNSWSSTPMLGNKHGGGGKSKEFDAEVQALSSIRHVNVVKLFCSITSEDSSLLVYEYLPNGSLWDRLHTSRKMELDWETRYEIAVGAAKGLEYLHHGCEKPVIHRDVKSSNILLDEFLKPMLDEFLKPRIADFGLAKLVQANVGKDSSTRVIAGTHGYIAPEYGYTXKVLKSDVYSFGVVLMELVTGKRPTEPEFGENKDIVSWVHNKARSKEGVRSAVDSRIPEMYTEEACKVLRTEVLCTGTLXALRPTMRHVVXKIEDAEPXCKLVGIVITKDDSEKKIGVNDK

SEQ ID NO: 261763 - protein, 986 aa, Glycine max
  Clone ID: PAT_MRT3847_78395C.1.pep
PRVRFAALQLLLLLLSLFSLLTSAQSEDQRQILLNLKSSLQNSNSKLLHSWNATNSVCTFHGVTCNSLNSVTEINLSNQTLSGVLPFDSLCKLPSLQKLVFGFNNLNGNVSEDIRNCVNLRYLDLGNNLFSGPFPDISPLKQLQYLFLNRSGFSGTFPWQSLLNMTGLLQLSVGDNPFDLTPFPKEVVSLKNLNWLYLSNCTLRGKLPVGLGNLTELTELEFSDNFLTGDFPAEIVNLRKLWQLVFFNNSFTGKIPIGLRNLTRLEFLDGSMNKLEGDLSELKYLTNLVSLQFFENNLSGEIPVEIGEFKRLEALSLYRNRLIGPIPQKVGSWAEFAYIDVSENFLTGTIPPDMCKKGAMWALLVLQNKLSGEIPATYGDCLSLKRFRVSNNSLSGAVPASVWGLPNVEIIDIELNQLSGSVSWNIKNAKTLASIFARQNRLSGEIPEEISKATSLVNVDLSENQISGNIPEGIGELKQLGSLHLQSNKLSGSIPESLGSCNSLNDVDLSRNSLSGEIPSSLGSFPALNSLNLSANKLSGEIPKSLAFLRLSLFDLSYNRLTGPIPQALTLEAYNGSLSGNPGLCSVDANNSFPRCPASSGMSKDMRALIICFVVASILLLSCLGVYLQLKRRKEEGEKYGERSLKKETWDVKSFHVLSFSEGEILDSIKQENLIGKGGSGNVYRVTLSNGKELAVKHIWNTDVPARRKSSWSSTPMLGNKFAAGKSKEFDAEVQALSSIRHVNVVKLYCSITSEDSSLLVYEYLPNGSLWDRLHTSRKMELDWETRYEIAVGAAKGLEYLHHGCERPVIHRDVKSSNILLDEFLKPRIADFGLAKLVQANVGKDSSTRVIAGTHGYIAPEYGYTYKVNEKSDVYSFGVVLMELVTGKRPIEPEFGENKDIVSWVHNKARSKEGLRSAVDSRIPEMYTEETCKVLRTAVLCTGTLPALRPTMRAVVQKLEDAEPCKLVGIVISKDGSEKKIGVNDK

SEQ ID NO: 261764 - protein, 138 aa, Glycine max
  Clone ID: PAT_MRT3847_78396C.1.pep
FIESLSASEIELSEDYTCVISHGSNPKTTHIFCDCILESHVNDSERHYKAEEEGTGLPLFSVNILHTPSQYPSHDFLSVCHHCNKKLEDGKDIYIYRGEKSFCSLSCREIEITNDEEQEKSNSSPENSPKWGLGGKFF

SEQ ID NO: 261765 - protein, 239 aa, Glycine max
  Clone ID: PAT_MRT3847_78397C.1.pep
LFCSITSEDSSLLVYEYLPNGSLWDRLHTSRKMELDWETRYEIAVGAAKGLEYLHHGCEKPVIHRDVKSSNILLDEFLKPRIADFGLAKVIQANVVKDSSTHVIAGTHGYIAPEYGYTYKVNEKSDVYSFGVVLMELVTGKRPTEPEFGENKDIVSWVHNKARSKEGLRSAVDSRIPEMYTEEACKVLRTAVLCTGTLPALRPTMRAVVQKLEDAEPCKLVGIVITKDDSEKKIGVNDK

SEQ ID NO: 261766 - protein, 56 aa, Glycine max
  Clone ID: PAT_MRT3847_78398C.1.pep
GESEKEQGMMDQCLVVHIPDKQPHDLHHQPTESVFASAIDPKHATNCKAFESDSTT

SEQ ID NO: 261767 - protein, 147 aa, Glycine max
  unsure (1)..(147): unsure at all Xaa locations
  Clone ID: PAT_MRT3847_78399C.1.pep
NEFIESLSASEIELSEDYTCVISHGSNPKTTHIFXDCILESHVNDSERHYKAEEEGTGLPLFSVNILHTPSQYPSHDFLSVCHHCNKKLEDGKDIYIYXCEKSFCSLSCREIEIMMDEQEKSNSSPENSPKCGFGGEVFETGTPIAT

SEQ ID NO: 261768 - protein, 138 aa, Glycine max
  unsure (1)..(138): unsure at all Xaa locations
  Clone ID: PAT_MRT3847_7839C.1.pep
KKRILLRVTPTLTQSGGRWSSILGFSHRLKSLFLGTKVTRPSHAGSWGTGYPNRFSTELEGWVPSCGLTKSPDERXVIAXPHAGYCYSXRAAAYAFSNIDPSNITRAFLRCPPDHYYTPKCALSTATAYTTPITHLPI

SEQ ID NO: 261769 - protein, 66 aa, Glycine max
  Clone ID: PAT_MRT3847_783C.1.pep
NAGNLKFGDKIILCMKKNSPQVTFQENHPLSQGPPVVEAWGKWVLCPPIARPGIPSFNLFKPFNKA

SEQ ID NO: 261770 - protein, 33 aa, Glycine max
  Clone ID: PAT_MRT3847_78400C.1.pep
LKKWSKKIFNQPILSLISGSLKIGLGILDQEFP

SEQ ID NO: 261771 - protein, 69 aa, Glycine max
  unsure (1)..(69): unsure at all Xaa locations
  Clone ID: PAT_MRT3847_78401C.1.pep
INQVWGNKRFLCSYVLSVTNTSLTYFRDHQGXLTIIINGSCRSLVHFILLLPLLEAELLEATHATPQSR

SEQ ID NO: 261772 - protein, 140 aa, Glycine max
  Clone ID: PAT_MRT3847_78402C.1.pep
ISAPATLAIFGTGLRCFAALLTSLHSKHLPSPNMGRKHDAVLVSEPVAEEVPYSPELDSEKKKKKKKRKNKNKDKHQTDSSTKRKLDEQLDPQNGTESNKKKKKHHESKENAEKPTATTTVTTVLIATKRWRTGPWWSPG

SEQ ID NO: 261773 - protein, 76 aa, Glycine max
  Clone ID: PAT_MRT3847_78403C.1.pep
FWLFVAYIAYLDAFIVFSILVRAILLVGGALLLLMSSHRAELQFQMFIYALAFVWDKPVNYTLSCLLLLIDIIYNI

SEQ ID NO: 261774 - protein, 163 aa, Glycine max
  Clone ID: PAT_MRT3847_78404C.1.pep
MCAQNRITAEIHPTESANSEMKLSSGEHPGKKHIILNIRSRFEEFLSKPQPVEPFSYKNLAAVSPSTPSKSYEMRQIPGLNSRKFSKENDYEYSVRVVKWLEHQGHIDEIFRVRFLTWFSLKATQQERRVVSAFVDALIDDPASLADQLIHTFSDEICCEPKS

SEQ ID NO: 261775 - protein, 85 aa, Glycine max
  Clone ID: PAT_MRT3847_78405C.1.pep
AKQTISHFYLLTENSYYKSYKHSFIGIYTGQRGRIFTYILRYTEVYHMGTKKFLHISLEGTARNFSELTLPIYVFLAITGLIIKH

SEQ ID NO: 261776 - protein, 139 aa, Glycine max
  unsure (1)..(139): unsure at all Xaa locations
  Clone ID: PAT_MRT3847_78406C.1.pep
SIVWGLTVXVLVYSVGHISGAHFNPAVTIAHATTKRFPLKQVPAYVIAQVVGATLASGTLRLIFNGKNDHFAGTLPSGSDLQSFVVEFIITFYLMFVISGVATDNRAVIFHVLVQKEKKNCLFDDGCVLIFVEHFEFSK

SEQ ID NO: 261777 - protein, 95 aa, Glycine max
  Clone ID: PAT_MRT3847_78407C.1.pep
FLCFFFFFFFFFFFFFFFLPFLFFLAFAGQTHVHALSTQVRGRKAVWPNTTKPTAGRERLKPLNKGAPKKGPPSQREETQGPSPHPPPEDLKPGE

SEQ ID NO: 261778 - protein, 87 aa, Glycine max
  unsure (1)..(87): unsure at all Xaa locations
  Clone ID: PAT_MRT3847_78408C.1.pep
GEEGLTCMFKYDSGHGHWKHDDVTVKDEKTLLFGDKACTVFGHTNPXEEIPWGSTGAYIIVESTGDFTDKDKAVAHLKGGAKNDIIF

SEQ ID NO: 261779 - protein, 122 aa, Glycine max
  Clone ID: PAT_MRT3847_78409C.1.pep
EKSHCFISIELVRQYFLPFFFWLCGRSNHIHNQHLSLFSDASSSRKPKHPQHLISLLPRDPSQRQPLQQVHSHIITSGLFYNPFHNTLTCLLLFNNVIRCYSFGPYPHEALHFFTYTQHCHI

SEQ ID NO: 261780 - protein, 50 aa, Glycine max
  unsure (1)..(50): unsure at all Xaa locations
  Clone ID: PAT_MRT3847_7840C.1.pep
MQHWVHRGSQVPCLFIFGHSMDDTGNNNELPTTSXSNFIPYGIDCPLGPT

SEQ ID NO: 261781 - protein, 94 aa, Glycine max
  Clone ID: PAT_MRT3847_78410C.1.pep
ELRFPMVTDVSGLLVGIARCVCYIELSAFDKERYEQVSSMRRAERDSEGIALSKQKNNNDVTGFCEPDDERAIKILRVSEEFQELLSDRGSACG

SEQ ID NO: 261782 - protein, 246 aa, Glycine max
  unsure (1)..(246): unsure at all Xaa locations
  Clone ID: PAT_MRT3847_78411C.1.pep
MGDYHFVYKDLEGASTQWDDIQRKLGNLPPKAPAFKPPPFTPDASDDQPKDKTWIDSKTSEELEDLEDDLDDDRFLQEYRKKRLAEMQEAAKVLRFGSVILISGSDFVREVSQAPSDVWVVVILYKEGIPECGLXMQSIEELAVRYPSTXFVKIISTDCIPNYPDRNLPTLLVSTNGAVKGNYVGLHSFGQKCTPEGVALVLCQSDPVLNDGHNGNEAIIEGVRKRFIKKVVADHKKGGDNDYSSD

SEQ ID NO: 261783 - protein, 53 aa, Glycine max
  Clone ID: PAT_MRT3847_78412C.1.pep
VFINIGVLPCTLLALRGRPSLLLGLHHPWLHYLMGVNVVERSPKGVLRLALFL

SEQ ID NO: 261784 - protein, 245 aa, Glycine max
  Clone ID: PAT_MRT3847_78413C.1.pep
MGDYHFVYKDLEGASTQWDDIQRKLGNLPPKAPAFKPPPFTPASDDQPKDKTWIDSKTSEELEDLEDNLDDDRFLQEYRKKRLAEMQEAAKVLRFGSVIPISGSDFVREVSQAPSDVWVVVILYKEGIPECGLLMQSIEELALRYPSTKFVKIISTDCIPNYPDRNLPTLLVYNNGAVKGNYVGLHSFGRRCTPEGVALVLCQSDPVLNDGHNGNEAIIEGVRKRFIEKVVADHEEGGDDDYSSD

SEQ ID NO: 261785 - protein, 60 aa, Glycine max
  Clone ID: PAT_MRT3847_78414C.1.pep
WCEENINLVQPKALGMRDVAVSKYIGETYVKASMSKRGLTYRVILCDAPPHLKVWISLTI

SEQ ID NO: 261786 - protein, 204 aa, Glycine max
  Clone ID: PAT_MRT3847_78415C.1.pep
MVARTPPKQKKLLAALNPVLIKETLNKVDQCVARLQELQYTVTGGTKVVSGVTLSPRSTRGYLRTSLRCKQESLRIKNGASRRSPVGKFPANTGEWKRMSLPAMLVGETVGEILQASQFAREIVSAVGKKTDPEDPKTPMSQRSNKKVELENTQLRARRKKEKQTKAQNDGSPSLQRARSRINFKVSPPKVREFDKERNRYMAN

SEQ ID NO: 261787 - protein, 104 aa, Glycine max
  unsure (1)..(104): unsure at all Xaa locations
  Clone ID: PAT_MRT3847_78416C.1.pep
MMAAARKELDRIKVPWNTDEDEDLHKLEERHGPKNWSLIIMSIPWRSGKSCRLHWCNQLYGQVEHRAFTPXEDKTIIKAHAKFVFNXATITRLLXTRTDNAIKN

SEQ ID NO: 261788 - protein, 39 aa, Glycine max
  Clone ID: PAT_MRT3847_78417C.1.pep
PCVPVYSHNHLHFHTESNLNNGYSAIHYSVLLLTITCPG

SEQ ID NO: 261789 - protein, 56 aa, Glycine max
  Clone ID: PAT_MRT3847_78418C.1.pep
KNYIPVICMYHLMNFSKRGFSSRICNGNYKVWFATSVLSYACVSSSFTSQQHLERV

SEQ ID NO: 261790 - protein, 61 aa, Glycine max
  Clone ID: PAT_MRT3847_78419C.1.pep
MIKKIDQDNGPKIDYHYFAPMIRKGHGEKGSRKIRKPLNFRNAFGLVDNWSSQVIEGNFEL

SEQ ID NO: 261791 - protein, 48 aa, Glycine max
  Clone ID: PAT_MRT3847_7841C.1.pep
FQNQKLLEVDDPYLGLERDYAIRRMTPGVVEWAFKCMHEERENRPSMK

SEQ ID NO: 261792 - protein, 48 aa, Glycine max
  Clone ID: PAT_MRT3847_78420C.1.pep
PLNGIHSPDFKRIMSVTTMGNAFFFSKPYYYRNFHYQTSNMLHDQHSK

SEQ ID NO: 261793 - protein, 59 aa, Glycine max
  Clone ID: PAT_MRT3847_78421C.1.pep
EQWIIIIITYDEAIFNKCKNCMNRNKSLCTTGNENSCHLNTLCCGSCLSNGNKSITEPV

SEQ ID NO: 261794 - protein, 45 aa, Glycine max
  Clone ID: PAT_MRT3847_78422C.1.pep
MLKLIRKAPQRGRAFASFKGDLDFRKGVGLSLHSLMFWACPGYVF

SEQ ID NO: 261795 - protein, 150 aa, Glycine max
  unsure (1)..(150): unsure at all Xaa locations
  Clone ID: PAT_MRT3847_78423C.1.pep
GSRAKRLENYYPVLFRGVNGTVAHEFIIDLRGFKNTAGIEPEDVAKXAELDRFCDALISIRQEIAEIEKGKVDINNNVLKGAPHPPSLLMADAWTKPYSREYAAFPAPWLRTAKFWPTTGRVDNVYGDRNLICTLLPASQAVEEQAAATA

SEQ ID NO: 261796 - protein, 43 aa, Glycine max
  Clone ID: PAT_MRT3847_78424C.1.pep
SWPIINLKAVSYKAISTVRQNTSFFTPLESFPPRVRPRVKTRV

SEQ ID NO: 261797 - protein, 64 aa, Glycine max
  unsure (1)..(64): unsure at all Xaa locations
  Clone ID: PAT_MRT3847_78425C.1.pep
AVMVDAWTKPYSREYAAFPAPWXLRTAKFWPTTGRVDNVYADRNLICTLLPASQAVEEQAAATA

SEQ ID NO: 261798 - protein, 343 aa, Glycine max
  Clone ID: PAT_MRT3847_78426C.1.pep
AVYHGPEGLKTIAQRVHGLAGVFAQGLKKLGTVEVQDHPFFDTVKIKTANAHAIADAARKNEINLRVVDGNTITVAFDETTTLEDVDNLFKVFSDGKPVSFTAASLAPEVQTAVPSGLTRNSPYLTHPIFNTYHTEHEVLRYIHRLQSKDLSLCHSMIPLGSCTMKLNATTEMMPVTWPSFANIHPFAPIEQAQGYQEMFENLGKLLCTITGFDSFSLQPNAGAAGEYAGLMVIRAYHLARGDHHRNVCIIPVSAHGTNPASAAMCAMKIVSVGTDAKGNINIEELRKAAETHKDNLAALMVTYPSTHGVYEEGIDEICKVIHDNGGQVYMDGANMNAQVCFS

SEQ ID NO: 261799 - protein, 1057 aa, Glycine max
  unsure (1)..(1057): unsure at all Xaa locations
  Clone ID: PAT_MRT3847_78427C.1.pep
MERARRLANRAILRRLVSEAKQHQKNESVLHSSTTPILLYSSSRCMSSVSSPVLRSRGSKTETLLGRNMNISRSVVAGAGSARSISVEALQPSDTFPRRHNSATPEEQSKMAESIGFESLDSLVDATVPKSIRLKEMTFGKFDAGLTESQMIEHMKDLASKNKVFKSYIGMGYYNTHVPPVILRNIMENPAWYTQYTPYQAEISQGRLESLLNYQTMITDLTGLPMSNASLLDEGTAAAEAMSMCNNIQKGKKKTFIIASNCHPQTIDICKTRADGFDLKVVTADLKDIDYKSGDVCGVLVQYPGTEGEVLDYGEFVKKAHAHEVKVVMASDLLALTVLKPPGEFGADIVVGSAQXRFGVPMGYGGPHAAFLATSQEYKRMMPGRIIGVSVDSSGKTALRMAMQTREQHIRRDKATSNICTAQALLANMAAMYAVYHGPEGLKNIAHRVHGLAGAFALGLKKLGTVEVQDLPFFDTVKVKTSNAHAIADAALKSGINLRVVDGNTITVAFDETTTLEDVDNLFKVFAGGKPVPFTAASLAPEVQSAIPSGLVRKSPYLTHSIFNMYQTEHELLRYLYKLQSKDLSLCHSMIPLGSCTMKLNATTEMMPVTWPSFTDIHPFAPVDQAQGYQEMFNNLGELLCTITGFDSFSLQPNAGAAGEYAGLMVIRAYHLARGDHHRNVCIIPVSAHGTNPASAAMCGMKIVSVGTDAKGNINIEELRKAAETHKDNLSALMVTYPSTHGVYEEGIDEICKIIHDNGGQVYMDGANMNAQVGLTSPGWIGADVCHLNLHKTFCIPHGGGGPGMGPIGVKKHLAPFLPSHPVIATGGIPAPDKPQPLGTIAAAPWGSALILPISYTYIAMMGSKGLTDASKIAILNANYMAKRLENYYPVLFRGVNGTVAHEFIIDLRGFKNTAGIEPEDVAKRLMDYGFHAPTMSWPVPGTLMIEPTESESKAELDRFCDALISIRQEIAEIEKGNADINNNVLKSAPHPPSLLMADAWTKPYSREYAAFPAPWLRASKFWPTTGRVDNVYGDRNLICTLLPASQAVEEQAAATA

SEQ ID NO: 261800 - protein, 61 aa, Glycine max
  Clone ID: PAT_MRT3847_78428C.1.pep
MPPNKKPQFLKPRAPRGGVFFSSEKGEQKNLPNQWPLPGGKTSPNGFPPQQEKFNSFTITL

SEQ ID NO: 261801 - protein, 78 aa, Glycine max
  Clone ID: PAT_MRT3847_78429C.1.pep
KKYPVTLFKTYFEKFLVPQNNWKKAIFTNPLANQYNCNQFLRASLPVILGNMGPLTQKEFYSELGATNPCPVVEINLT

SEQ ID NO: 261802 - protein, 84 aa, Glycine max
  Clone ID: PAT_MRT3847_7842C.1.pep
HAIVYMFIFPSLTHTIWVYSFATGISLSTSHRSKTLDFLMFHRIQNFLASSYLILAFPQKPFLLFHVGRFIFSKVTKGSKPPNI

SEQ ID NO: 261803 - protein, 352 aa, Glycine max
  unsure (1)..(352): unsure at all Xaa locations
  Clone ID: PAT_MRT3847_78430C.1.pep
LARGDHHRNVCIIPVSAHGTNPASAAMCAMKIVSVGTDAKGNINIDELRKAAETHKDNLAALMVTYPSTHGVYEEGIDEICKIIHDNGGQVYMDGANMNAQVGLTSPGWIGADVCHLNLHKTFCIPHGGGGPGMGPIGVKKHLAPFLPSHPVVPTGGIPAPGKSQPLGTISAXAPWGSALILPISYSYIAMMGSKGLTEASKTAILNANYMAKRLENHYPVLFRGVNGTVAHEFIIDLRGFKNTAGIEPEDVAKRLMDYGFHSPTMSFPVPGTLMIEPTESESKAELDRFCDALISIRQEIAEIEKGKADINNNVLKCAPHPPSVLMGDAWTKPYSREYAAFPASWLRVSKF

SEQ ID NO: 261804 - protein, 58 aa, Glycine max
  unsure (1)..(58): unsure at all Xaa locations
  Clone ID: PAT_MRT3847_78431C.1.pep
PSQCSRRRMQTQYHKPCMYFCQKCXKTCLXGPPEDYDNKDVCPCYSYWNTNERGRKCP

SEQ ID NO: 261805 - protein, 171 aa, Glycine max
  Clone ID: PAT_MRT3847_78432C.1.pep
MSLLSSGGFFGRRRNDPPPHQPTWDHYQAQDHHHPLGVSQPHHPPPFMSFPSDSSPVLNTALIEWKETPEAHVYNAHLPGYKRNDVRVEVDDDRVLCIVCGKSVEKEEQRGGWHRVELSSGQFVQRLTLPENSMVDHVKAYMDNGVLTITVPKHHRGVNNRVRNINISSRP

SEQ ID NO: 261806 - protein, 52 aa, Glycine max
  Clone ID: PAT_MRT3847_78433C.1.pep
KFEESLRTRDCKGSNSQPLIDAEELTKWSFYRALIAEFIATLLFLYITVLTV

SEQ ID NO: 261807 - protein, 66 aa, Glycine max
  unsure (1)..(66): unsure at all Xaa locations
  Clone ID: PAT_MRT3847_78434C.1.pep
GTIRKWRHCTFNIPNKEDIGSNYEYHINLTRKSYRSLIYGTNHNMKSPLLKTQAXISSLNYSIMDH

SEQ ID NO: 261808 - protein, 71 aa, Glycine max
  Clone ID: PAT_MRT3847_78435C.1.pep
QIEVLGASNTKQYNTNFYLFQATNLGWRITKTFTHPPCDLFLNPYTPRMFNNSQCISPAALCKRGWVTCQN

SEQ ID NO: 261809 - protein, 113 aa, Glycine max
  Clone ID: PAT_MRT3847_78436C.1.pep
MANVSLLLFLLFLSLSSGGNLIMANGQKTWCVAKPSSDQATLLANLNYACSQVDCRILQKGCPCSYPDNLMNHASIAMNLYYQSRGKNHWNCDFRASGIVVVTDPSYGNCIYA

SEQ ID NO: 261810 - protein, 64 aa, Glycine max
  Clone ID: PAT_MRT3847_78437C.1.pep
RLKMSEALKILEGVVGQSVRPEESQGGTNLYDERTCSFSQNYSDVHEEPSFIIEAPALSGHRPH

SEQ ID NO: 261811 - protein, 87 aa, Glycine max
  Clone ID: PAT_MRT3847_78438C.1.pep
LHSARCPMVDNTGTPQFLLHTCLSSRPQALPSSPTPSLTSTTKCTPTLTTLVRLASAADEEGMSLQCGPSAATAWTQWALCAYFPFW

SEQ ID NO: 261812 - protein, 230 aa, Glycine max
  Clone ID: PAT_MRT3847_78439C.1.pep
MAAATAISQLGCFSAVHRSSHLRRRSFLFPSPRSKLSVVMSLERHDTDTAGSDTKNTLSYAVDVSKLHVEEKKNSYSTKDGHDAEKIGFGEATQESVDQPKRTAKIHDFCLGIPFGGFVLTGGIIGFLFSRSPATLSSGVLFGGALLFLSTFSMKVWRQGNSSLPFILGQAALAGVLIWKNFQSYSLAKKIFPSGISAIISSAMLCFYLYVLISGGNPPPKKLKASASTA

SEQ ID NO: 261813 - protein, 40 aa, Glycine max
  Clone ID: PAT_MRT3847_7843C.1.pep
IGEPGLSYCDCFIVCLVIPRPCHVLLLDFMPVSLIQLSQA

SEQ ID NO: 261814 - protein, 49 aa, Glycine max
  Clone ID: PAT_MRT3847_78440C.1.pep
NVNHLFAKSFSFHDIISTLPIQNKFEVRLTKRLLHVVMLDYEWATMHRS

SEQ ID NO: 261815 - protein, 120 aa, Glycine max
  Clone ID: PAT_MRT3847_78441C.1.pep
HASTEGDVYSFGVLVLEMVSGRRPTDVLSHEGSSLCEWIKKQYTHQHQLENFVEQALQRFSPCGVPNHRNKIWKDVILELIELGLVCTQYNPSTRPSMHDIAQEMERLKDYLTKSNLPPH

SEQ ID NO: 261816 - protein, 90 aa, Glycine max
  Clone ID: PAT_MRT3847_78442C.1.pep
QRIILYNCSVYCCCLSYGRLPILSYGFYVKLLHVIRSMFGRRKYDAEGEGSDLAAMKGIRKCYNITLHGLFLTFNFPFIFCLAATLVFID

SEQ ID NO: 261817 - protein, 138 aa, Glycine max
  Clone ID: PAT_MRT3847_78443C.1.pep
FVFFFFFFFFFFFFFFFFFFYFFSLFLVENNMLIFFLFAPVFLLPPVPIVFVKHKRGQRRKKKNNRLSLGGPGNGPPRDGKRLVSSPGPGGLKKKTPLAPGGESGGGKKSRNWTSDNQKKLPPSGRKNPYHRPGGLLN

SEQ ID NO: 261818 - protein, 91 aa, Glycine max
  Clone ID: PAT_MRT3847_78444C.1.pep
KILKEAFARMGHTGHIDDIKLPEMDVVIPADHPDKEALEIMKMSMMNNGRLKMDAKNQLLTSIIDELNHLRNDKTTLFKGLQDEGEEASKN

SEQ ID NO: 261819 - protein, 65 aa, Glycine max
  Clone ID: PAT_MRT3847_78445C.1.pep
PLFQKKWHLLGKYLFFITVGQLGLAKRPNGVYQASWKKSPKILKKGFWLLKKKKPKKKQNKKMNQ

SEQ ID NO: 261820 - protein, 165 aa, Glycine max
  Clone ID: PAT_MRT3847_78446C.1.pep
KILYHSVVPLLPLLTPPFPVEVDTPLLIWFNTTDKGTTEDSISFSEAKKLMRLVNVESLKMKLGMEGKEVICYSELLEACESVGIARSPEEAAAFARVLDEAGVVLLFRDKVYLHPDKVVDLVRRAVPLVLTADNDPMREELKKLQDKKEEIDVLAHTQARCILW

SEQ ID NO: 261821 - protein, 455 aa, Glycine max
  Clone ID: PAT_MRT3847_78447C.1.pep
MKMLNRISEIGSTIVMGKNEGLHTSGHAYRGELEEILRIVKPQHFLPIHGELLFLKEHELLGKSTGIRHTAVIKNGEMLGVSHLRNRRVLSNGFISLGKENLQLMYSDGDRAFGTSSDLFIDERLKIALDGIIVISMEIFRPQNLDSPVENTLKGKIRITTRCLWLDKGKLLDALHKAAHAALASCPVSCPLAHMEKIVSEMLRKMVRKYSGKRPEVIAIAIENPAAVLANEINTKLSGKLNVDGMSALRKVVDGHEKENQRTEMQIRDRIDVGGLLPTKDNAISSGAEDGLSDAEDPNDYFKPFVESSPVEKSIKTNNGYVPRKEKSSPLKDDCSEDTEECNSVNTSDSEPKSSKSAKRNKWKHEEVKKLIDMRGELNDRFQVVKGRMALWEEISQNLLANGISRSPGQCKSLWTSLLQKYEQEVKNEKKNKKKWPYFEDMERILADNKTLETK

SEQ ID NO: 261822 - protein, 66 aa, Glycine max
  Clone ID: PAT_MRT3847_78448C.1.pep
QVGGPKRERSKGKGGSIQLPLLQKKGLKKLFHPVFLPVGKRALIPYRKRWLQKYVFLYPYMQATVC

SEQ ID NO: 261823 - protein, 118 aa, Glycine max
  Clone ID: PAT_MRT3847_78449C.1.pep
MSEFYGKSERLLGKVFSLANTLPNGAIIFLDEIDSFAAARDNEMHEATRRILSVLLRQIDGFEQDKKVVVIAATNSKEDLDPALISRFDSMIAFGLPDHQNRQEIASKYAKHLSKPEL

SEQ ID NO: 261824 - protein, 79 aa, Glycine max
  Clone ID: PAT_MRT3847_7844C.1.pep
RERKRLNLFSHPCLLSCQPFFLGFDWNSSCLNLFLEDLPKMGFMLPLSCIWKSYMPSYMNKRLVLGYAFHNLILHLIIL

SEQ ID NO: 261825 - protein, 185 aa, Glycine max
  Clone ID: PAT_MRT3847_78450C.1.pep
MASSHNVELEAAKFLHKLQQDSKDEPAKLATKLYVILQHMKSSGKEHSMPYQVISRAMETVINQHGLDIEALKSSRLPLTGGPQIGSSSQSMNVTKDSRVSLAENEVSKMDPFASGRPPVAPSGGAPDYYQGSVAQRSGQSFDQGSPSSLDSRSANSQPQIDVILPMGTTGESKGGKEATTRRKR

SEQ ID NO: 261826 - protein, 68 aa, Glycine max
  unsure (1)..(68): unsure at all Xaa locations
  Clone ID: PAT_MRT3847_78451C.1.pep
NLTLELPLSYLVSDFEGRLSYGSTSFHSLLLTEPNCRSKWSYLTNTSALAQMLAPLIFSGDNXLTEKT

SEQ ID NO: 261827 - protein, 75 aa, Glycine max
  unsure (1)..(75): unsure at all Xaa locations
  Clone ID: PAT_MRT3847_78452C.1.pep
MHANNSYSTIKIIHANAGYILXDFTHFTDYIPNLPTYTNTLLSNPAYSVAKHYTLHIYDTVPQKVDVHKDNPRRI

SEQ ID NO: 261828 - protein, 120 aa, Glycine max
  Clone ID: PAT_MRT3847_78453C.1.pep
MKKRKWIPLVVLRKLLIAAICSIAFVALFSARVHIVPSSKDHRFNDKISTTQDPQSWMRELAPPHLSKAPLPTPKLSGSKGNLDYQKLWKPPSNRGFLPCTNPTPNYNTPAESQGYLLVH

SEQ ID NO: 261829 - protein, 73 aa, Glycine max
  Clone ID: PAT_MRT3847_78454C.1.pep
NQCLPPSFTYGFLSVKISKIFSVVERNRVLVPPHTKLRGQMPPHFWGIFFLYADFRALVPVLFFFPPLSGVWP

SEQ ID NO: 261830 - protein, 74 aa, Glycine max
  Clone ID: PAT_MRT3847_78455C.1.pep
FTGWEAGAPSSLKIKKCLVAVLSVQILHYLAPLKGYQAWAIDYNLPPIHLLFIGHFWIGTQSIAFCSKDRNFPH

SEQ ID NO: 261831 - protein, 89 aa, Glycine max
  unsure (1)..(89): unsure at all Xaa locations
  Clone ID: PAT_MRT3847_78456C.1.pep
TREGTASLVHLARSIPNMERTVPGVEPILYXIXMACSLVPAVNTQLALNAEACTQPEVKGYXDLAATLFSLLLXDSRPAHTGFKFLGSX

SEQ ID NO: 261832 - protein, 60 aa, Glycine max
  Clone ID: PAT_MRT3847_78457C.1.pep
KPSGAFPWKAQMTKTGPLSFLIPCTTIGRFITLETKRLGPFYKNVKTWVKIGAQNSLYVV

SEQ ID NO: 261833 - protein, 68 aa, Glycine max
  Clone ID: PAT_MRT3847_78458C.1.pep
IQSITGSAHKKTHRSHQRFRAPNAIVFPGASLKVVSHPLTRASLTVRVPIFRPEANGSNLSDIRHKSS

SEQ ID NO: 261834 - protein, 63 aa, Glycine max
  Clone ID: PAT_MRT3847_78459C.1.pep
MDDTELDVAFGDDEDFFTELTRRSSHTSLNETRKKQQLLTVPICNNDKVESQKMMACGLAGSS

SEQ ID NO: 261835 - protein, 50 aa, Glycine max
  Clone ID: PAT_MRT3847_7845C.1.pep
TAIFTTTNFCKRGLFKKIMGLPTAIVLTVPPIHYTRSFYIIYAIFYLSLR

SEQ ID NO: 261836 - protein, 34 aa, Glycine max
  Clone ID: PAT_MRT3847_78460C.1.pep
HSQFIHGNHLVDVSLTKSNYSSLLIYYNRESYIR

SEQ ID NO: 261837 - protein, 54 aa, Glycine max
  Clone ID: PAT_MRT3847_78461C.1.pep
LSCTNTVFRISHIIHSHFPSARMPFPPFLAIAPQTYYLLIPHLILPPPMINTLP

SEQ ID NO: 261838 - protein, 54 aa, Glycine max
  Clone ID: PAT_MRT3847_78462C.1.pep
ASENIILKQTYIELILHDQSVNALLVPEKSCIIAGGYCRNLEATIDMYSSLVYP

SEQ ID NO: 261839 - protein, 94 aa, Glycine max
  Clone ID: PAT_MRT3847_78463C.1.pep
NRSGFFFFFGVDFGPFFALPPPFFPLKFFIFCFSPFFPRTLPPPFSEKNRVVFVYWSWAGIPKPRVYFWKGLFFRGPFSPLTGFWLMPLFFFVP

SEQ ID NO: 261840 - protein, 46 aa, Glycine max
  unsure (1)..(46): unsure at all Xaa locations
  Clone ID: PAT_MRT3847_78464C.1.pep
GHPYILNEGYDALSLLQHFSINNLRDPFIERXYGGHSEHIEVGVMD

SEQ ID NO: 261841 - protein, 407 aa, Glycine max
  Clone ID: PAT_MRT3847_78465C.1.pep
MPPLHSPVTGLRRALPSAPPAASAFDRHARPATPLLKAFARAAVSALLFLCFGVRMCLASSPPAPALPTVQEEQTVQDDHDGIKQDDKETVVDKELEEAFNAWKSKTFALTVPLKVVALRGSIPPSWIKDFINSQGRRMKFNVKYYASLENIFSDLSIPFTKGKIGPASALAADIVGIGDSWVKFAINKAIIEPIRDVEDQEWFKSLDDKWKVYLRRNREGEMDPKGDIWAAPYRWGCMVIAYKTNKFQKHKLAPVEDWADLWRPDLAGRISMVDSPREVIGAVLKYMGASYNTNDINMEVNGGRDAVKHNLALLAKQVRLFDRSNYLKAFGVGDVWVAVGWSSDIIPAAKRMSNVAVVDPKFGASLWADLSAIPAAYRIQTYRIGGRIMGPSPLIHQWIELCLQSA

SEQ ID NO: 261842 - protein, 119 aa, Glycine max
  unsure (1)..(119): unsure at all Xaa locations
  Clone ID: PAT_MRT3847_78466C.1.pep
EXXQRXKRQQRRXPAGQGRTDAAGRTXQXXRRQRQXRQHEXXKRRXRRETNXRRGQQXRQNGEXXEXRXHHRRXRRKQXQXXXXEQRKXDXXXXAKGHKXRXTXXRRNERXREXRRRRE

SEQ ID NO: 261843 - protein, 56 aa, Glycine max
  Clone ID: PAT_MRT3847_78467C.1.pep
LLYTCSLYKEIISLFRRIQRTNKVKSFANYSVLEGLRLWRSYFAILEFKTTESSSR

SEQ ID NO: 261844 - protein, 44 aa, Glycine max
  Clone ID: PAT_MRT3847_78468C.1.pep
QRMKLLCCTSIQLRTQSFYCSIDSELFTEECALRLKPNKRITHS

SEQ ID NO: 261845 - protein, 33 aa, Glycine max
  Clone ID: PAT_MRT3847_78469C.1.pep
NYGARSHLAMWTNTRVCCGHKKGQEAQGVLTFW

SEQ ID NO: 261846 - protein, 329 aa, Glycine max
  Clone ID: PAT_MRT3847_7846C.1.pep
MDQRKLRDSSNSKPASDAAPQHVTLTSNRFRNSQAAVREREKEKGEGENEDPSAARKVLKADREKLRRDRLNEHFQELGNALDPDRPKNDKATILTETVQMLKDLTAEVNRLKTEHKTLSEESRELMQEKNELREEKTSLKSDIENLNVQYQQRVRIMFPWSAIDPSAVISQPYSYPVPIHIPSAPISIHPSLQPFPFFGNQNPGHIPNPCSMYVPYTTPTSHPPVEPPSMMYASTSHASNQKESGSKSPGHRRSSGAERSSETDDVVTELELKMPGSSSTQQGCTSGGRKGKMKDRTIIGGSASSQYSSSLGLQDSSNSVGDIPKTDN

SEQ ID NO: 261847 - protein, 67 aa, Glycine max
  Clone ID: PAT_MRT3847_78470C.1.pep
NSAGGKIKEMAMATHLLFDFGVEAARTEKEHVISGEEAVSTIRSLHINSAYFIKTLDSKLHFPLRNA

SEQ ID NO: 261848 - protein, 59 aa, Glycine max
  Clone ID: PAT_MRT3847_78471C.1.pep
ISCLSRCFARAITQNAKITDEELYMQHIPFPLTGRLPGSRWVQDITSSLVIVEEEVNAV

SEQ ID NO: 261849 - protein, 185 aa, Glycine max
  Clone ID: PAT_MRT3847_78472C.1.pep
MDQAPGGLRGSVHDGATLESIQFNEEIQGIMAPVPAPENANSFTALLELLHSPESDSARKPANCHVSANQKPYLLNSFGSNLTFPSNAVLIERAAKFSVFAGENSPLPPGEACLIPAGTGSVSNLDRVKNEPQETDSNPCSSSRLGCISDPAVENNNQRTAKRKEREKKLTVTLLTFPDCSKLEN

SEQ ID NO: 261850 - protein, 280 aa, Glycine max
  Clone ID: PAT_MRT3847_78473C.1.pep
GQISREEIFQAKKRKLSLRCMSCWGTGGQQLQQNYQEETWRLELLVDGIDQEILNWVKDGKYIFLFGGDDPEWVRRFVKEARRVATATQIPLEMVYVGKSNKREQVQKIIDTIIRDKLNTQYWSEQSMIWFFWTRLQSMLFSKLQLKQTDDDDHVMQEIKKLLSYDKQGGWIVLARGSHIVVNGHATTGLQTLVEYDAVWKELADRDGFEPAFKNHYDKVHSIVSPCCRFEFSHSMGRIPERLTCPECRRNMHVLTTFQCCHDEKIDEDFFVSTVTPPTI

SEQ ID NO: 261851 - protein, 46 aa, Glycine max
  Clone ID: PAT_MRT3847_78474C.1.pep
RGALAAEPEQSCAHGSWILKTLLRAILLNGHRYGSTGVTQIKCLIP

SEQ ID NO: 261852 - protein, 176 aa, Glycine max
  unsure (1)..(176): unsure at all Xaa locations
  Clone ID: PAT_MRT3847_78475C.1.pep
RLRAVLIPQSKSALPKNTVGGTILRSDLLANIVPEGQFRASXDLQRTDXIKGMIKMVATVGLPENTGIALAWTMTLFLGGRASCDIHTVCCQDCELWNPACTKAMTMSFNPNPCSDAWSLEFLKRTGFHCDIICXNGWSVTPVQDVHVTIDWYIFLQECVPRTYCXLKTQNPFVLN

SEQ ID NO: 261853 - protein, 72 aa, Glycine max
  Clone ID: PAT_MRT3847_78476C.1.pep
KRLVQCILYNNCENTPNSFESPLLNILLHISNTSSILSLLFLILLFCHSNFLVLIYNNFKGRGYYSVTTIAK

SEQ ID NO: 261854 - protein, 128 aa, Glycine max
  Clone ID: PAT_MRT3847_78477C.1.pep
SGGRRRHTHRQIPQAPLFRSHRSSLLLSAASSNNYNHSRVLCVSAGAGHEVAALRRLGIDDVTGVEILESPPLVRRADPHNLPFFDGAFDLAFTARFDEALFPARFAAEMERVVRPGGACFLLVAESG

SEQ ID NO: 261855 - protein, 148 aa, Glycine max
  unsure (1)..(148): unsure at all Xaa locations
  Clone ID: PAT_MRT3847_78478C.1.pep
MMKRSGKHEAEGGEDILIDRFLKRLSFVAIAVASLTLLFLLLRTPDTCVPHHAPRKPHLRFPKSTCDFSSTRPHVPAEKRALRIQSTRLWTAKVLSFSLLFRDHLLPLLLYAASSXTTTHSRXLCVSAGAGHEVXALRXXGIDDVTGV

SEQ ID NO: 261856 - protein, 76 aa, Glycine max
  Clone ID: PAT_MRT3847_78479C.1.pep
GQVHDVTIECDTLGLNDPSLVIRIDSKPVMKVKRLKWKFRGNHPILVDGVPVKVFWDVHSWLFGNAMGNKGITPFQ

SEQ ID NO: 261857 - protein, 174 aa, Glycine max
  Clone ID: PAT_MRT3847_7847C.1.pep
MGGGKDKHHDESDKGIFSQLAHGVAGAAHGGHGYPPGAYPPPPGAYPPHQGYPPQHGYPPAGYPPHQGYPPAGYPPAGYPGSSHAPGSHGHGGMGAMLTGGAAAAAAAYGAHHVSHGSHGSYGQYAAHGAHMPHGKFKQHGKHGKFKHGKHGKFGKHGKHGKFGKHGGGFKKWK

SEQ ID NO: 261858 - protein, 77 aa, Glycine max
  Clone ID: PAT_MRT3847_78480C.1.pep
VKGFMEGDRVGVGCLPASCLECHHCKTDQENYCQDLQFVYNGIFWDGTITYGGYSQIFVADYRLLPSFITLLFEVNF

SEQ ID NO: 261859 - protein, 37 aa, Glycine max
  Clone ID: PAT_MRT3847_78481C.1.pep
FIIILIKAQKCYASKNRGEYDTLRLQKLIYTNDVQQN

SEQ ID NO: 261860 - protein, 70 aa, Glycine max
  unsure (1)..(70): unsure at all Xaa locations
  Clone ID: PAT_MRT3847_78482C.1.pep
MGVKRFAEGGIAYIIAXCHTHPLDLIKVRMQLQGENNQPKPLHNLRPGLALQTGSTLHVAAAHTPTREGP

SEQ ID NO: 261861 - protein, 81 aa, Glycine max
  unsure (1)..(81): unsure at all Xaa locations
  Clone ID: PAT_MRT3847_78483C.1.pep
NTLXNHTKIKNIKKHKNTPARIFFKIKHPHPIFXHXIKHYRPFSRMRYILIPSLYVKTTPKLFTLKLHKPHLFNFPHTFLK

SEQ ID NO: 261862 - protein, 202 aa, Glycine max
  Clone ID: PAT_MRT3847_78484C.1.pep
LGPEDTSKNIVEIIFHSSWLKKQSPVCKIDRILKVHNTQKTITKFEEYRDSIKAKATKLSKKHPRCIADGNELLRFHCTSFNCSLGLNGSSNLCNSIPQCNVCSIIKHGFKVTGGGAGILTTATSGKAHDKAACVDESEEKRAMLVCRVIAGRVKKNIAEGGGMEEYDSVAAAVGAYSNLDELVVSNPRAILPCFVVIYRGF

SEQ ID NO: 261863 - protein, 74 aa, Glycine max
  Clone ID: PAT_MRT3847_78485C.1.pep
IMGRPRGDEKYWNEVTSFEENGKQKWKCKHCEKTYGGGYSRIKLHLDKEQKGQGITKSTVYCSNEEVLNIIAST

SEQ ID NO: 261864 - protein, 50 aa, Glycine max
  Clone ID: PAT_MRT3847_78486C.1.pep
VGVDVLPESATVGLDRSSGRGHSRLECRMRAEKCGRQGCRPRPPSHRLKD

SEQ ID NO: 261865 - protein, 60 aa, Glycine max
  Clone ID: PAT_MRT3847_78487C.1.pep
GTYQMSPPLFNALVLEGWVQTKVAACFPPDPTEGCLFGLASGRQNRGSLKKTPPLWGFFS

SEQ ID NO: 261866 - protein, 75 aa, Glycine max
  Clone ID: PAT_MRT3847_78488C.1.pep
FGRGTTITCTQEGEQTLDGYYGSFDCPDPMTFCNTVGQQFCPRNCMGRGTCVNNQCQCDSGYSGSDCALGPLGAN

SEQ ID NO: 261867 - protein, 103 aa, Glycine max
  Clone ID: PAT_MRT3847_78489C.1.pep
MMIECLCFVFVGLQGSGKTTTCTKYAFYHQKKGWKPALVCADTFRAGAFDQLKQNATKAKIPFYGRYTLVSFLVGEFQSWLDLTVDLLFCCWTCCTYDIPVEC

SEQ ID NO: 261868 - protein, 150 aa, Glycine max
  Clone ID: PAT_MRT3847_7848C.1.pep
EHFACAIDLYGRAGHLKKAKALVETMPFEADEMVLKNLLGACRFCVDIELASQIAKNLLEPEPEEPCTYVILSEMYGCFKMWDEKASVTRMIRDRGVKKVPGWSWIEAKNKVHAFNAEDHSHPQCEEIYILLQHLKEGIKLFDNFVDQFR

SEQ ID NO: 261869 - protein, 60 aa, Glycine max
  Clone ID: PAT_MRT3847_78490C.1.pep
LFYAFLGASLPNIFITTEHCWSDSYPVKFSMSLIASLPSYNIITEAFHYFIHTGLVLRGT

SEQ ID NO: 261870 - protein, 67 aa, Glycine max
  Clone ID: PAT_MRT3847_78491C.1.pep
RCHAEVKSVHVDIVQYYHMIKVMYDHKHLEQGQPLPRRQEQQHDPLTPEGLGSVRPRCCCVSSIAVS

SEQ ID NO: 261871 - protein, 229 aa, Glycine max
  Clone ID: PAT_MRT3847_78492C.1.pep
MWLPWRLRTTASRPNRSRSFPIPCSSFKDIQSILQSQPQPPSLFRRLIVSPSLIRSFSSPRAATSSIEPPPDSDRSAVVVYYTSLRVVRRTYDDCRAVRSILRGFAIAIDERDVSVDERFREELQRILVHRSVMLPSVFVGGLYIGGADEVRKLYESGELHELIGRLPKSQRNMCDLCGGLRFVVCDECDGSHKVFGEKSGGFRSCSSCNSNGLIRCPACFVVQPQHTK

SEQ ID NO: 261872 - protein, 92 aa, Glycine max
  unsure (1)..(92): unsure at all Xaa locations
  Clone ID: PAT_MRT3847_78493C.1.pep
MGNYLIIHGRLIVLVKLGGLIGHAVPLGLVTVGLPLDGPRMDSVKYPSRXVVMELLQAHAIEARVQMCQLPVGDGITRWRRIICSFGSFPPL

SEQ ID NO: 261873 - protein, 108 aa, Glycine max
  Clone ID: PAT_MRT3847_78494C.1.pep
CLLDQLNTNSLDILFTIRSFLNVLPGLPLSFFTGLKTMQSTIFTGASNGLLYTCQNHLSLFSIIFSSTGPRPISPRIQSFHILFFLVWPHICFNFVIATPNFFSCPFA

SEQ ID NO: 261874 - protein, 72 aa, Glycine max
  Clone ID: PAT_MRT3847_78495C.1.pep
AELEQGEFGSRRVNRGKSVFNESQGNRSRVSELKSRLLERIGMTSACTSMTPSIFLDFFVFLFFFFFFFFFF

SEQ ID NO: 261875 - protein, 81 aa, Glycine max
  Clone ID: PAT_MRT3847_78496C.1.pep
SLPSSKVVTSLFEGSSLPCMVCQHSWVGLHCGFVILVSFFPSFFLPIWKSPMGFYGERRVLWTPSVLLFPQYESGKELMIN

SEQ ID NO: 261876 - protein, 69 aa, Glycine max
  Clone ID: PAT_MRT3847_78497C.1.pep
RNSARGERDSLELPTKPSTINIPHYYSSISLFLHFVSNAKVCNYKGFEIYFIISKSFQNLNKLFYHEFF

SEQ ID NO: 261877 - protein, 105 aa, Glycine max
  Clone ID: PAT_MRT3847_78498C.1.pep
NKTCFCCEEYNLRRNMIKMACTEEIAQISLPKLYSNRSNKALQSCNINESFNTLMSMRCVLETCLPITSVKSSSNGFPEHCHSDFLNDWRWKVRKLSRPLTPAKT

SEQ ID NO: 261878 - protein, 66 aa, Glycine max
  Clone ID: PAT_MRT3847_78499C.1.pep
GGGEGPKTQALVVSPPKTFGKNPPRLHEPMGGVLGTNPVSPFLGNKALFWGPHFFMGPPHQTKGVV

SEQ ID NO: 261879 - protein, 56 aa, Glycine max
  unsure (1)..(56): unsure at all Xaa locations
  Clone ID: PAT_MRT3847_7849C.1.pep
LQARIRNSGRDPRIRPRVRCLIFSXRYRRPEAQGASMLPYSVFYRDLVITMTVRGF

SEQ ID NO: 261880 - protein, 43 aa, Glycine max
  unsure (1)..(43): unsure at all Xaa locations
  Clone ID: PAT_MRT3847_784C.1.pep
LVVAIGGGGXXISHXQTADGPXIDGQALMTXSLXGKXGYGLAG

SEQ ID NO: 261881 - protein, 132 aa, Glycine max
  Clone ID: PAT_MRT3847_78500C.1.pep
FQKQQNDLLADLVDIPRKACDSRINEFVKRARSAKIHAYIISHLRNEMPAMMGKAKTQQRLIDNLEDEFRKVQREFHLPAGDFPNVEHFREVLSGYSIDKFEKLKPKMIQAVDDMLGYEIPELLKKFRNPYD

SEQ ID NO: 261882 - protein, 39 aa, Glycine max
  Clone ID: PAT_MRT3847_78501C.1.pep
YLMLLFIIKLIFKYQYCVLNNVEQFNYSLNLITSYQRLL

SEQ ID NO: 261883 - protein, 92 aa, Glycine max
  Clone ID: PAT_MRT3847_78502C.1.pep
EGGVRWVGFVASPLLKQKGVKNRELIHISDWLPTLMKLARGHTNGTKPLDGFDVWKTISEGSPSPRIELLHNIDPNFVDSSPCPRNSMAPAK

SEQ ID NO: 261884 - protein, 71 aa, Glycine max
  Clone ID: PAT_MRT3847_78503C.1.pep
PTKQPGILIWFQLVFNIHLDMAQTNLCSISVPFLILLMIAFNFSAQITPVSAGLSFSLKNAKMYKSIYGRI

SEQ ID NO: 261885 - protein, 31 aa, Glycine max
  Clone ID: PAT_MRT3847_78504C.1.pep
FYLYVCLLKVGLSIVNFENIFLGSFIYNILG

SEQ ID NO: 261886 - protein, 41 aa, Glycine max
  Clone ID: PAT_MRT3847_78505C.1.pep
GLYQVLVKDQGVISARTLKSVMYKSVKTQISPVTVQNFMGK

SEQ ID NO: 261887 - protein, 64 aa, Glycine max
  Clone ID: PAT_MRT3847_78506C.1.pep
PRSLGKDLKIREGSVLLWMLCLNWGKSFQLGGATDGWFLLFRRITKQRENEGCLKREGTNNTLF

SEQ ID NO: 261888 - protein, 67 aa, Glycine max
  Clone ID: PAT_MRT3847_78507C.1.pep
RRSYTTATSHTTSSFLSILTTPILLTPRYILSTPLTILNLLSYILHIISCLPGMFQIHYTYFIIPTF

SEQ ID NO: 261889 - protein, 43 aa, Glycine max
  unsure (1)..(43): unsure at all Xaa locations
  Clone ID: PAT_MRT3847_78508C.1.pep
NPSQHITQCYLRTASCTNXVSEVKPFQHGFQXCFSQWRLPILV

SEQ ID NO: 261890 - protein, 78 aa, Glycine max
  Clone ID: PAT_MRT3847_78509C.1.pep
KKKPLFFFFFCEGPSTPAPKGREEKKKIKKSLKQPFWKKQGPTQRHLWDPKRLTKSFFMVPKKPSLLGSKSFDQLKWG

SEQ ID NO: 261891 - protein, 56 aa, Glycine max
  Clone ID: PAT_MRT3847_7850C.1.pep
EVGWVLNSPSGSVEGLMQGTPAKIAEMKNWLCKTGSPTSKIENCVFTNEEGKEALT

SEQ ID NO: 261892 - protein, 76 aa, Glycine max
  unsure (1)..(76): unsure at all Xaa locations
  Clone ID: PAT_MRT3847_78510C.1.pep
MIHVVVSMAXFSPTIGKHVKDGIIITKLTKINSQSRVRXMQDVNSKGRHSGYRXHQATCEAWRPSXILWLMRMRLL

SEQ ID NO: 261893 - protein, 94 aa, Glycine max
  Clone ID: PAT_MRT3847_78511C.1.pep
KDKFVAVDFGPRQLAVLSAFLGPDQNATETLLASDPDVAPWVQKYQRSRETVSQTDYEVDLITTFTKLSTLGQQINYEAYTYPPPKIDITKLKL

SEQ ID NO: 261894 - protein, 71 aa, Glycine max
  unsure (1)..(71): unsure at all Xaa locations
  Clone ID: PAT_MRT3847_78512C.1.pep
RAAKFLSENSAALGSLTMDAFYLYPDEYEHYEEPTESSKSSNAGFIIRQQLAVVLPCLCYYSSXGWSFIFF

SEQ ID NO: 261895 - protein, 58 aa, Glycine max
  Clone ID: PAT_MRT3847_78513C.1.pep
CGISRPTTYLLRLANYTHELFIPPEISLLLNSAVGWYPWEALGRSALEASASYMGPNT

SEQ ID NO: 261896 - protein, 352 aa, Glycine max
  unsure (1)..(352): unsure at all Xaa locations
  Clone ID: PAT_MRT3847_78514C.1.pep
MGVSFLSTCPSLLPLVAYDTPPSTRYQPRSVSICCNKTISNVSDEEPFHWRRREILKCAGATVGLLYLFXELIGSSGSLVGMANAADLIQRRQRSEFQSKVKETLFTAIKGNPDLIPSLLTLALNDALTYDKATKSGGPNGSIRFSSEIGRPENTGLSAAMNLLEEAKKEIDSYSKGGPISYADLIHFAAQSAAKATFLAAAIRKCGGNEEKGKTLYNAYGSNGQWGLFDRQFGRADTQDPDPEGRVPIWEKASVQEMKDKFVAVGFGPRQLAVLSAFLGPDQTATETLLATDPDVAPWVQKYQRSRETVSQTDYEVDLITTFTKLSTLGQQINYEAYTYPPPKIDITKLKL

SEQ ID NO: 261897 - protein, 54 aa, Glycine max
  Clone ID: PAT_MRT3847_78515C.1.pep
TKNERIKRIEHLPCHLTILWQIWQMLMISGLWTGYFLYMYLEFNVLFICLYLMY

SEQ ID NO: 261898 - protein, 548 aa, Glycine max
  Clone ID: PAT_MRT3847_78516C.1.pep
MLPVSSLSLSHHKTTTTIAEATCHCAFFKFSFNKPHHHRTPLLFPNHLPNASPPLLRTTTSLRRNAAADPPPGFSGVADVIVVGAGVAGSALAYTLAKDGRCVHVIERDLREPDRIVGELLQPGGYLKLIELGLQDCLEQIDAQRVLGYVLFKDGKKTKLPYPLENFHADVAGRSFHNGRFIQRMREKAATLHHVRMEQGTVTSLLEQDNGTIIGVQYKTKDGQKLKAYAPFTIVCDGCFSNLRRSLCYPKVEVPSCFVGLVLENCQLPLENYGHVILADPSPILFYRISSTEVRCLVDIPGQKVSPVGKGGMANYLRAMVASQIPPELRDAFISAIDRGNIRTMPNSSMAADPWPTPGALLMGDAFNMRHPLTGGGMTVALSDIVVLRNLLKPICDLNDATSLCRHLESFYILRKPMASTINTLAGALYKVFSTSPNEARKELRQACFDYLSLGHFFSSGPIALLSGLNPSPLNLILHFFAVALYGVGRLLLPFPSFERTWIGAKIVLCAFGIIFPIIKGEGVRQMFFPTSIPAFYRAPPDRWCIEE

SEQ ID NO: 261899 - protein, 135 aa, Glycine max
  unsure (1)..(135): unsure at all Xaa locations
  Clone ID: PAT_MRT3847_78517C.1.pep
RSDRLCRWATNGGHRKRHRPGQHLRRNREEPYKQAPPTSKKETDPMANHGRSHYPEQDPWHRAGIGSTIMALRAEHHALDPTAAHGVRHRSVLTDDNYQNVYSGPYGGYRARKKPLAEISRRTEXDRLPEKLHWR

SEQ ID NO: 261900 - protein, 86 aa, Glycine max
  Clone ID: PAT_MRT3847_78518C.1.pep
SHASPHATANGECQDQTRLETRDHAPGAERAAQQNDLTNGGGQPKAAEHDLHNACHHRTTTKTKRSQTTDTEDEHDHRCTSRKNNT

SEQ ID NO: 261901 - protein, 78 aa, Glycine max
  Clone ID: PAT_MRT3847_78519C.1.pep
SYRMGKVLISLYLCTMGTMWYIKPPDGWKGFMRFGYTTIADAWGSHSKRIFAFKENFTALLIIDMLWGKYNLYLRMLE

SEQ ID NO: 261902 - protein, 137 aa, Glycine max
  Clone ID: PAT_MRT3847_7851C.1.pep
SRYRAVEGISDEILSKTAKHTRNKSDTFTQPSSDGDGSPATALHNWFANILKPTYSNNNNTQQPPPSPPDSPKPSLPPRQHHPRKSRFKTEPSAAPHPQGIHPPNSRRTFKTSTPPPENPPSDSAPLSPPRNLVESA

SEQ ID NO: 261903 - protein, 234 aa, Glycine max
  Clone ID: PAT_MRT3847_78520C.1.pep
MPEMDGSSAKPPQISEMFQKFALAFKTKTFEFFSEEENNNASPLFDDIDGFSLLDSTEEIIPDQKVVVIKPDPDPSNNSSPPPLLPQPQSPPPPPPPQIIPPPPPPESREPETPPPPLTSAQIREMTHALVSSVFAAVSAFEASYFQLQSAHVPFVEEHVTSADKVLVSHLQRLSELKRFYSNSEPCGFPLGLRLEAEVEENQSKLRTLGTVSNRLQWELEQKHDEVVALRAKL

SEQ ID NO: 261904 - protein, 140 aa, Glycine max
  unsure (1)..(140): unsure at all Xaa locations
  Clone ID: PAT_MRT3847_78521C.1.pep
NTNPNPSPKHLPFPFPDPAPLGPPPPPAYGFHMLERRTIVLADGSVRSYFALPPDYQDFAPRPLDLPPRFCLPDYSYRRRXKRKYGDDDGGPRDDLARQREQLLRNANGISREQFSAGPSDLRPSKHSKLDGLSKSTRHS

SEQ ID NO: 261905 - protein, 270 aa, Glycine max
  Clone ID: PAT_MRT3847_78522C.1.pep
DLCLNTLEDTSFVVQVEGTSTWGCYTENKRGYISCGSVQVEHTSTWWFKENKGGYIPCGSFLVKGSKTNASDKNDDKIKLPPKLPKNKDHIEDVNVVDLSSSQGPSNPAYDKNEETHDTLVSLNAKSVNKDKNEIKEPIVVNQANLSMGVVVATSIALQQYAKPPTFEVSHNRPFTHFEVAMNHYRKLAIDKNLEESLAHLDYKEKLQQLVNEVFKFNDLVVDELREEMESFLNPFNNAYEAHQLCNQHAYDIAEIESSTKQGRTKLIQA

SEQ ID NO: 261906 - protein, 74 aa, Glycine max
  Clone ID: PAT_MRT3847_78523C.1.pep
AHTLSLNTFWVRTLILISLSLSYWWNPRELGGRRYIGASWNTSSTSTSTRPSGFTSFPLTTPLMIMLTNLFFQA

SEQ ID NO: 261907 - protein, 97 aa, Glycine max
  Clone ID: PAT_MRT3847_78524C.1.pep
MARGLKKHLKRLNAPKHWMLDKLGGAFAPKPSSGPHKSRECLPLILILRNRLKYALTYREVIAILMQRHVLVDGKVRTDKTYPAGFMGMFAACQFLE

SEQ ID NO: 261908 - protein, 43 aa, Glycine max
  Clone ID: PAT_MRT3847_78525C.1.pep
TCIRPPFSITCVLCLSCALTLVMQFWNGNFVILLLNEKHTLFS

SEQ ID NO: 261909 - protein, 191 aa, Glycine max
  unsure (1)..(191): unsure at all Xaa locations
  Clone ID: PAT_MRT3847_78526C.1.pep
DHRLLQLNXDDYDRVXQIPQKKGANFRDLPGVLVNGNXVEWDPSVERVMLDSGKPLVPDYAMTFVRGTSTKTXPFGRLWWDEIVSTVVTRAEPHNQAILHPTQNRVLTIRENARLQGFPDCYKLCGPVKERYIQVGNAVAVPVALALGYTFGLACQGLLSDDNPLTTLPFKYPSCLALSSLAETENDNESS

SEQ ID NO: 261910 - protein, 107 aa, Glycine max
  Clone ID: PAT_MRT3847_78527C.1.pep
RGAHKHHIHMPLDFSPMRKCRKIIVINVASFFNICKIKSIVRECKEQEKQRTEAVMFMYICMISLSFLLIKNNMYDKARCSFNQRVNKKIGKKCWSVLFYFPWIQTD

SEQ ID NO: 261911 - protein, 93 aa, Glycine max
  Clone ID: PAT_MRT3847_78528C.1.pep
GSRFWTVTSIERARWLYDSSYRTKMFCLLARTMGTIKRELGIKRDPADMLSSLSGITDAAREGITVRCSVSSSARKLEATTIKPSIIESLDSS

SEQ ID NO: 261912 - protein, 96 aa, Glycine max
  Clone ID: PAT_MRT3847_78529C.1.pep
FIFFFFFFFFFFFFFPVVSVFPKLVFWGLAKQEKLISARRCIRGQFHTLPAGSKRGKTGGPKSEQAGANRGEPGGHPETSKPALQGEQMNLTKPGE

SEQ ID NO: 261913 - protein, 104 aa, Glycine max
  unsure (1)..(104): unsure at all Xaa locations
  Clone ID: PAT_MRT3847_7852C.1.pep
IGIVLALRNSSRFGGEPNVGRPHKADMGVLFEAPTXQPVNQSAGWMVQKQHLENSSESNPSVRRSVFCPCMNTTSKTYTMSEVRTHNNAGSACIIVHEHVYDCT

SEQ ID NO: 261914 - protein, 65 aa, Glycine max
  Clone ID: PAT_MRT3847_78530C.1.pep
TLRLDLPAPLLVQRETNEACVIDGYEIPAKTIFYVNAWAIHRDPKDRKDTNEYIPWRFLDNTIYF

SEQ ID NO: 261915 - protein, 71 aa, Glycine max
  Clone ID: PAT_MRT3847_78531C.1.pep
KGVNDFIFPAFDILSVVGESLRNCRVHEGPNVQARGFQNGSKSSEFISKPEKRNRPNQFRIGVRTRIHHRN

SEQ ID NO: 261916 - protein, 167 aa, Glycine max
  Clone ID: PAT_MRT3847_78532C.1.pep
MCVLLTIPMLYICMPIGSAKVISIILILSNIQWIHFINHFAFLIIITKTPTMNPDRFKYMQALIIFMMLQVDVSDQDHIMCIETKREALLQFKAALLDPYGMLSACAISSCCTSPDCRCSNLTAHVIMLDLHGLNRSWRHAYFKFISNFSDAIYVMAAVKVFKLHHR

SEQ ID NO: 261917 - protein, 44 aa, Glycine max
  Clone ID: PAT_MRT3847_78533C.1.pep
MSNGQRLTNVDHSEGITYGDKQCLALDLHTRAKNFVDFHTLSKK

SEQ ID NO: 261918 - protein, 536 aa, Glycine max
  unsure (1)..(536): unsure at all Xaa locations
  Clone ID: PAT_MRT3847_78534C.1.pep
MGEGRRGGTSKLREAARRVAVAAAYACGSFSRRKALVDPVSIDNSCSLSATASNSSFLSPSTTKNSSEELTEETYSGITTNINNELHSKNLCAICLDPLSYHSKGSSPGQAIFTAQCSHTFHFACISSNVRHGSVTCPICRAHWTQLPRNLNNNLGPFTSSNQSDPILRILDDSIATFRVHRXSLLRSARYDDDDPVEPDETPESPKLCFSLVPIPPNAPTSYNPALQVTKHASCPCHLSLHPLTCSSLSLLQSPPMQKPYVIHERATDLVLVASPNGPHLRLLKQAMALVVFSLRHIDRLAIVTYSSAAARVFPLRRMTSYGKRTALQVIDRLFYMGQADPVEGLKKGIKILEDRVHKNPESCILHLSDNPTRPYHAVSMELPSTPIHRFHVGFGFGTSSGFVIQEFEEFLAKMLGGIVREIQLRICGAGEEVGSGRVIRIGEIRGGEERRILLDLGDCTHVYVEYSYIEGEIDECVRRTGETVVGVGEHKGDVSENGENTGGGGGGRSSSVESWDFHDPYMARRWAKHLHGYRL

SEQ ID NO: 261919 - protein, 73 aa, Glycine max
  Clone ID: PAT_MRT3847_78535C.1.pep
KFYLLYFINNLQEILTLVLNFWTCKVKKTSTLFIRLKKIKQKHKKNKLRRDTAITSTTLSFHFEFCGLHLEGS

SEQ ID NO: 261920 - protein, 60 aa, Glycine max
  Clone ID: PAT_MRT3847_78536C.1.pep
QAYRVASLQSTAKMHIKTYVEIGRVVQINYMLEYRGLALIVDVIDQNRALDDAPDMARSQ

SEQ ID NO: 261921 - protein, 442 aa, Glycine max
  unsure (1)..(442): unsure at all Xaa locations
  Clone ID: PAT_MRT3847_78537C.1.pep
MRGVRGRVHYNLKKSVLVTPSDNWLRCDDSLVMQFLEIKNGYNYFRYVHSPSYSQSQRAFEAAKAINDINGIASILQHHPYHIDSLLTMAEYFAVLGEQQMSADAIARCLYALECAWHPMFNPLQGNCRLKFKHDTNKPIFTALFTHMKNLDRRGCHRSALEVCKLLLSLDSDDPMGAIFCIDYFALRAEEYAWLEKFSEEYKSDNSIWLFPNFSYSLAICRFYLEREACKDDCMDAEKASSSDLMKQALXLHPSVIKKLVAKVPLKDRTWTDILKHAFXWSDQTGIPSQDHLINIYVERNYLIWRLPDLQKLLSGAAKLVIETLESNKSELKDWACVRKEAFSSEKNEYGHLLVSEFSDSLSSIPRENLQQFMGVPRMMEGMQDENQFANLPGNGHAPRGVANRNALAVLFESMLPWVTYEDGVDGEPDDNQHDDHRQDNQ

SEQ ID NO: 261922 - protein, 55 aa, Glycine max
  Clone ID: PAT_MRT3847_78538C.1.pep
VALVVVVLFSNRPYPSLHIRRVDHLTRSVLTPYGGRDLLLLCLLCRPVLAGYPRH

SEQ ID NO: 261923 - protein, 36 aa, Glycine max
  Clone ID: PAT_MRT3847_78539C.1.pep
RSNQCVFIETPMYHAVLFDTFTVHPYLIDLEKLNTP

SEQ ID NO: 261924 - protein, 91 aa, Glycine max
  unsure (1)..(91): unsure at all Xaa locations
  Clone ID: PAT_MRT3847_7853C.1.pep
PTDASTRTSFHFHTFLIPFIKRITPGDXYLIWRHYPNLHTDITLTSFDRFRIHPSYQTFLYLSHDPMPYHASPKELHSTSLILLSHKDKKI

SEQ ID NO: 261925 - protein, 43 aa, Glycine max
  Clone ID: PAT_MRT3847_78540C.1.pep
KPNENQKNLFTAQGREDPNQNTGISILNCKIAAAADLIPVKSS

SEQ ID NO: 261926 - protein, 59 aa, Glycine max
  Clone ID: PAT_MRT3847_78541C.1.pep
SESTFLSPCCISDTLKKVVVGEHWILTLICYFIEHKEKLLFTLQVYNMYFLGGFQIGCV

SEQ ID NO: 261927 - protein, 59 aa, Glycine max
  Clone ID: PAT_MRT3847_78542C.1.pep
CLHLVQYSLSNFFFLPKLNCSCLNFPLGCFLLPYFIINVMSKDPAFMIVFAYFIQFLPR

SEQ ID NO: 261928 - protein, 39 aa, Glycine max
  Clone ID: PAT_MRT3847_78543C.1.pep
CTSPFKFFPVVFGYLICLVDPHLLPFVSSISAFLLLSYP

SEQ ID NO: 261929 - protein, 162 aa, Glycine max
  Clone ID: PAT_MRT3847_78544C.1.pep
MVRNFLLIARLTTSFTHHRSNPIQLGSLLQHKHNASFFFFNSFTSGISSDAESDDENHHKGDTFTVSYLINSWGLSPKLASELSNRVNLKNPDGPNAVINLLNKYGFEKTHLAKLAEIKPSVIAANAENTLLPKLKFFRSIGISNADMPKILIASHHIVVRS

SEQ ID NO: 261930 - protein, 81 aa, Glycine max
  unsure (1)..(81): unsure at all Xaa locations
  Clone ID: PAT_MRT3847_78545C.1.pep
LICTSXPTILIPLVNSVGWIPLSCIXXNSCGVYXXXXNMXXPHRXDSNFENFSRXPXVXRIEIQXXXCXXXKNYXXLAFSR

SEQ ID NO: 261931 - protein, 65 aa, Glycine max
  Clone ID: PAT_MRT3847_78546C.1.pep
GGPKTKGQEGLKLPLGLIQGGTWVSPQTGENKIYLAPSRAKKGSPPKNPTNYGPPPERGGKKYNA

SEQ ID NO: 261932 - protein, 121 aa, Glycine max
  unsure (1)..(121): unsure at all Xaa locations
  Clone ID: PAT_MRT3847_78547C.1.pep
GGGESTFSQFQKLSVDTSQEKHWRWCKRGVGRVRSLIAGPGVKRQGISTLRSMHTFGHLQTHIRSKRVTMXNGNQALQKQVLQTHGKNLESMGRGDGWDGMVQSTDQGEAKVLGNDEASMR

SEQ ID NO: 261933 - protein, 53 aa, Glycine max
  Clone ID: PAT_MRT3847_78548C.1.pep
YQCSLFPPSQHRAGLSGIYSVRSLLRPMFTSTTTFYFKNLAYIMLINCPTTRT

SEQ ID NO: 261934 - protein, 115 aa, Glycine max
  Clone ID: PAT_MRT3847_78549C.1.pep
KASPCFGLFLPGQFKGSGSLHVDYEFAARSKSPEGYITRGKGDYTFPAGKAVGYRTLFGIPWAAFKTAETPFFFKGFLHLRGELTIKQRPLCRKGAPPLLAFEDKCPKFFCPQPP

SEQ ID NO: 261935 - protein, 115 aa, Glycine max
  unsure (1)..(115): unsure at all Xaa locations
  Clone ID: PAT_MRT3847_7854C.1.pep
MLHESRATRRPSQPTEWTRYHDKLYXRALMVVPEDLPDRREKIGDXICGRSAAEVREHYEALDDNDYXINSWRATALRCVHDWVATRASGGAQICTTHNADANSYRSNPKRHGDN

SEQ ID NO: 261936 - protein, 317 aa, Glycine max
  Clone ID: PAT_MRT3847_78550C.1.pep
MEGMRDTKSQLEIQDQEGTNIGSSLSKLILASGSGTNTLDSIFSNCPQTTNGSTSSNSVLDDLEPFKSSGCEPLGSSVYLRQRDILQKFYQESRGNGSYNVPTSSLSNSLTNPCKKKLYRGVRQRHWGKWVAEIRLPQNRMRVWLGTYDTAEAAAYAYDRAAYKLRGEYARLNFPNLKDPTKLGFGDSARLNALKSSVDAKIQAICQKVKRERAKKNAAKKLHNSTDPKRGQSEKPSSSSSPSPSPSPSSIFNDNWANQLFSPAVSEDGFWKGENSHSPASVLTECQTEETELLFEGCSLARLPSFDPELIWEVLTV

SEQ ID NO: 261937 - protein, 117 aa, Glycine max
  unsure (1)..(117): unsure at all Xaa locations
  Clone ID: PAT_MRT3847_78551C.1.pep
VSVNGANNLSAQQLVGSEIHXFHTLHDLYVGSIMXEAITRWLRPNEIHAMLCNYKYFTINVKPVNLPKSGTIVLFDRKMLRNFRKDGHNWKKKKDGKTAKEAHEHLKVGYEERIHVY

SEQ ID NO: 261938 - protein, 99 aa, Glycine max
  unsure (1)..(99): unsure at all Xaa locations
  Clone ID: PAT_MRT3847_78552C.1.pep
IVDTFXLKDEPALDIXLFVTFMNRFMKNLTSKFDAEQQELFKXHIXGATIYLLSNIEDFQFFVCVSMGDDACLIFAYYKDGAADLTFLYFSYALKEVKC

SEQ ID NO: 261939 - protein, 81 aa, Glycine max
  Clone ID: PAT_MRT3847_78553C.1.pep
LLYFNTLNQTIQHNKNYYIIQYYYRQSVIIFKLYVIEFSNSFFILKNPITYYIKFQSDHRFIMVLDYTQIYLPHPLIHKNI

SEQ ID NO: 261940 - protein, 40 aa, Glycine max
  Clone ID: PAT_MRT3847_78554C.1.pep
LPRKRFPSSLYDVLLLWGGRGGWGDGDNGAWDTLNAKRLD

SEQ ID NO: 261941 - protein, 78 aa, Glycine max
  unsure (1)..(78): unsure at all Xaa locations
  Clone ID: PAT_MRT3847_78555C.1.pep
GPEGRSWTRICSYSLLEGMRPSKDSPCSTHTLQGLSHGHAHLNSXQHAPCWAPSLVLRXARALTGVDATTTQPRDDGP

SEQ ID NO: 261942 - protein, 51 aa, Glycine max
  Clone ID: PAT_MRT3847_78556C.1.pep
SIVTLKKKKKKKKKKKKKKKKKKKKKKKNKKKKTKKKNKKKLKIKKKGGVF

SEQ ID NO: 261943 - protein, 77 aa, Glycine max
  Clone ID: PAT_MRT3847_78557C.1.pep
CTKVRAVVDYYIRPVLTSTCDGRGPCVIGSGYVLIASSSYHTCPLSVALLEGLHGLSSTLKLVNPNKGVIRLSTDLN

SEQ ID NO: 261944 - protein, 88 aa, Glycine max
  unsure (1)..(88): unsure at all Xaa locations
  Clone ID: PAT_MRT3847_78558C.1.pep
DPPKGIKGAVQKAKKIWDKTPNFYILRQFENPANPKILYXTRGPEIWKGSKRKINVIALQLRTYLKVLGNAGFLCCDWVNFPPLRKLL

SEQ ID NO: 261945 - protein, 174 aa, Glycine max
  Clone ID: PAT_MRT3847_78559C.1.pep
KDMQGPLSSMTSFRPKLQQKQLDPSQSKVSLTRETSAQLTTNNLSAAPVKSGVIPKKSITCDPDPRKHPSQTGVQPTQSGRPTTLDPLHNDSSTLPKNTQGKAGQPPQRLSTQPPASSNISSSSAPTLNAAKNNKLNPISNLLSSLVAKGLISAETESPTTVPSKVPKGSKIKL

SEQ ID NO: 261946 - protein, 71 aa, Glycine max
  Clone ID: PAT_MRT3847_7855C.1.pep
DRPGIVIASDNFPPPPCSSVFQLSCSFPTDVDHIQQFISLESTTAHIRLVAIIHHLHTSSRASPPSGRSVQ

SEQ ID NO: 261947 - protein, 177 aa, Glycine max
  Clone ID: PAT_MRT3847_78560C.1.pep
KTPPPTTLGFKNGFWAEFPTKKGKFKRSMVVRWWIKKWPSYQKRRFSFSPKPSLRSKWSAPIISGTAHWTWTRWIWGPGCTRTPSGSSKWFCPKARSKKKFKTNPNGNIFSWAPTQPWGLILILRAWPQNTVLPPRFKTQSTLFPRGKKSFRSHQKPFFFLRAKGPPKRKTGFPFIF

SEQ ID NO: 261948 - protein, 421 aa, Glycine max
  Clone ID: PAT_MRT3847_78561C.1.pep
MQGPLSSMTSLRPKLQQKQLNPSQTEVTATTKLPQSKVSLTRETSEQLTTNNLSAAPVKTGIIPKKSITSNLDPRKRPSQTGVQPTQSGRPTTLISSGSAVASPSSLDPLHNDSSTLPKKPKGKAGQPPQRLSTQPPASSSVSSSSAPTLNAAKNNKLNPIANLLSSLVAKGLISAETESPTTVPSEVPKGSKDQTEIITTSCSLPVTSISGSAAVPVSSSGDEVDSATKTSLASPQSTSTEIRNLVGFDFRPNVIREFHPSVIRELWDDFPHNCKVCGIKLKQEELFNRHLEWHATREHGPIKASRSWYAESSDWIAGKAEYSSESGFNDSVDVHEQKTDSSQLDTMVLADENQCLCVLCGELFEDAYCHERNEWMFKGAVYMNYSDVNCEMESRNVGPIIHAKCLSENSIVTNLVRPII

SEQ ID NO: 261949 - protein, 96 aa, Glycine max
  unsure (1)..(96): unsure at all Xaa locations
  Clone ID: PAT_MRT3847_78562C.1.pep
LDLTWYMHRLKSKDLSICHNMILLGSCIMKPNATXTEMMLXAVTWPNFTDVYPFAPIDQXKGYQEMFNNLSELLLDKFSLHSRLVVIRAHYLICQL

SEQ ID NO: 261950 - protein, 184 aa, Glycine max
  unsure (1)..(184): unsure at all Xaa locations
  Clone ID: PAT_MRT3847_78563C.1.pep
MASALGSRVESVRNSHLLSFSLNSIRSLSSSSSSAVSSAQNPKTKKSKRRKKNLFDVAQFLPNWGIGYHMAKTHWNEVSYEITKINLYKDGRHGKAWGVAFKNGSFLLRTNGGVCLSFIXLGKLHCLFELQIKTGLPLADAPKKISGVHKRCWRYLPNVVKELESSTNLMSSADSDFGFLGHRH

SEQ ID NO: 261951 - protein, 138 aa, Glycine max
  Clone ID: PAT_MRT3847_78564C.1.pep
MRAVLFLAMVFLVMAVILETANSKAAKKENKKGAVATSAKGKAAPKGAAKGGIKKDAKSKGKGKKDAKGKKDKKAKPAKGKGVPKNDKKSPTAKANDKKSPTKPMAAVKAVPKAAENAQKGPSSAEVVAEENNLDTEA

SEQ ID NO: 261952 - protein, 86 aa, Glycine max
  Clone ID: PAT_MRT3847_78565C.1.pep
VVGGNVVEELTSAGQVIVIAASFTNVAYERLPLEEDEQQQQQLQIQSPATTSSQGNNNNNPFPDPSSGLPFFNLPLNMQNVQLPPF

SEQ ID NO: 261953 - protein, 58 aa, Glycine max
  unsure (1)..(58): unsure at all Xaa locations
  Clone ID: PAT_MRT3847_78566C.1.pep
IVFPTRIDPFPVPLRLVFXGVKNENTSSKASTLILTTLCDNCNSFXYKDKDCPFAFAG

SEQ ID NO: 261954 - protein, 171 aa, Glycine max
  unsure (1)..(171): unsure at all Xaa locations
  Clone ID: PAT_MRT3847_78567C.1.pep
MVESTEQGGRGILGLFQFQLLHPKTTPFASHKTLLAFLWVATLASVLLWQRTTISGFLVQGGVPVRAPPKLRPVVFCLTEFGGVGDGVTLNTEAFERGVGAISKLGDKGGGXQLNVPPGRWLTAPFNLTSHMTLFLARDSVILAVQDEKYWPLMPALPSYGYGREHPGPRF

SEQ ID NO: 261955 - protein, 151 aa, Glycine max
  unsure (1)..(151): unsure at all Xaa locations
  Clone ID: PAT_MRT3847_78568C.1.pep
MLKEPNSDILFESFSSKGVDHDPFHDCLSFDMIDNSRDPQEESHHQVIEEAMKTKKKSYIGVRRRPWGRFAAEIRDTTRKGIRVWLGTFDSAEEAALAYDQAAFSMXXSXAVLNFPVKXVKESLQEMNYSGCSRRCSPALELKERHNIRRK

SEQ ID NO: 261956 - protein, 88 aa, Glycine max
  Clone ID: PAT_MRT3847_78569C.1.pep
VVAYVNIACYYFFGIPLGLILGYKLDKGVMGIWSGMLLGTILQTCVLFFMVYRTDWNKEASLAEDRIKQWGGHEDSKTHAIAKNDQET

SEQ ID NO: 261957 - protein, 44 aa, Glycine max
  Clone ID: PAT_MRT3847_7856C.1.pep
HACAQLTIYINKQKVGLQSAPERFNMSKEENPPINYLRLNLRWV

SEQ ID NO: 261958 - protein, 78 aa, Glycine max
  unsure (1)..(78): unsure at all Xaa locations
  Clone ID: PAT_MRT3847_78570C.1.pep
SALHLAKNPVYHGTSLLIAGCSPFIXACIESKEVQLTYVMSLDLARGIFTKPLKLYTFVQLRSSACSHVSSLRADVEI

SEQ ID NO: 261959 - protein, 112 aa, Glycine max
  Clone ID: PAT_MRT3847_78571C.1.pep
VFAPPPKTLASTPTPVDSSQERPAQGLEQKECQTLRYTAQGPYVIGAHPVAGGVVFGSQNSSSVYEVHPGVKSGLSPPPNSFVKQKGRRFATISPKRGWGKGVKRSLLYYVC

SEQ ID NO: 261960 - protein, 50 aa, Glycine max
  Clone ID: PAT_MRT3847_78572C.1.pep
WIAQILGARMAALVLRLVTKKMRASGLHMRQRVCLRHMPILERSMTFALM

SEQ ID NO: 261961 - protein, 108 aa, Glycine max
  unsure (1)..(108): unsure at all Xaa locations
  Clone ID: PAT_MRT3847_78573C.1.pep
SSTLFLFNHVLFFVTSIFSLSFFYSSFFTIQEGKEQALYFDAHVLDAQRRRHDVRGCRCRFLVRYDHDQSEEIVPLRKICRRPETDYRXQQLHAVNXAAPVDQQKTMD

SEQ ID NO: 261962 - protein, 140 aa, Glycine max
  Clone ID: PAT_MRT3847_78574C.1.pep
SKKAMVNKEDSMDNITLFSIITVMSFFLLAPVAIFREGVKFTLAYLQSGGVNVRQLYIRSLLGALCFHAYQQVSYMILQRVSLVTHSVGNCVKRVVVIVSSVIFFQTPVSPVNAFGTAIALAGVFLYSRVKRIKAKPKPA

SEQ ID NO: 261963 - protein, 357 aa, Glycine max
  Clone ID: PAT_MRT3847_78575C.1.pep
LQWRFFHFLHSPILDSSSFFFFQIQASPFFTSSRRRKRRSRKRTAPVENPLFKTLELGALFGLWYLFNIYFNIYNKQVLKAFHYPVTVTVVQFAVGTVLVAFMWGLNLYKRPKLSGAMLGAILPLAAVHTLGNLFTNMSLGKVAVSFTHTIKAMEPFFSVILSAMFLGEFPTPWVVGSLVPIVGGVALASVTEASFNWAGFWSAMASNVTNQSRNVLSKKAMVKKEDSMDNITLFSIITVMSFFLLAPVAIFMEGVKFTPAYLQSAGVNVRQLYIRSLLAALCFHAYQQVSYMILQRVSPVTHSVGNCVKRVVVIVSSVIFFQTPVSPVNAFGTAIALAGVFLYSRVKRIKAKPKTA

SEQ ID NO: 261964 - protein, 62 aa, Glycine max
  Clone ID: PAT_MRT3847_78576C.1.pep
TERQSFYASGQDDINCETTTHPAREVTMIIFGPVLLLDEHCDLRAMNMAELWTLTDNGYLGT

SEQ ID NO: 261965 - protein, 76 aa, Glycine max
  Clone ID: PAT_MRT3847_78577C.1.pep
LFASHAELECIRYSWTSADCIGLWIAASYGTSNIKDVIFNTCRNLLHLWRDFSSVVKLVFVYDSCYCLKLVLLYEF

SEQ ID NO: 261966 - protein, 35 aa, Glycine max
  Clone ID: PAT_MRT3847_78578C.1.pep
TLLRHIQNILVFMTFKLIVKLNVKEKSPFKFNIHC

SEQ ID NO: 261967 - protein, 138 aa, Glycine max
  Clone ID: PAT_MRT3847_78579C.1.pep
IPFLLEKKILKGGFLQVENSTKTCSLLHLPFWGADLIETATNKQKNRGGFFILYIQPPKLKIGFTGAFPQKCPPHIKPSSETLADFLACPDLWQKTKMGLLKPVLLSGKPEGISSTGQNPILSKNISGNGAGQIIILR

SEQ ID NO: 261968 - protein, 52 aa, Glycine max
  Clone ID: PAT_MRT3847_7857C.1.pep
THPLQQKVYKNKKRYKTSTTNLKSLTPKIKKRKMKQSNPIDKTECLISLTHY

SEQ ID NO: 261969 - protein, 81 aa, Glycine max
  Clone ID: PAT_MRT3847_78580C.1.pep
IHQHLITKKQEQTPCHRNKLTRHIIVYFYFRFDCFEFLEDLPVSSFLRVALNSSSKGLAYHHPHILKLEMRTLNQTALFFY

SEQ ID NO: 261970 - protein, 35 aa, Glycine max
  Clone ID: PAT_MRT3847_78581C.1.pep
NANYYGLRYKQKTCFFTKNTEEAVLKFKNYPLRGN

SEQ ID NO: 261971 - protein, 80 aa, Glycine max
  Clone ID: PAT_MRT3847_78582C.1.pep
ISLDTPFSLTNNFLSFFITLQQLLAYKYHCILPFHSQTTFFLFYNSSNSSSLRSYSLVGTVKKELLSKRRKKHFEELMKH

SEQ ID NO: 261972 - protein, 110 aa, Glycine max
  Clone ID: PAT_MRT3847_78583C.1.pep
IFLHSFCSVHDSKVTISQNPSHMMETKFFSNNKEEQDKLNCCEECASNYEKEAQLFKPGQKKLLPSWLQSHTTEAHLKDELTQLKRKWNRLCHCLHQSKQPQNQWSLEPN

SEQ ID NO: 261973 - protein, 44 aa, Glycine max
  Clone ID: PAT_MRT3847_78584C.1.pep
TSSLKSNITNMKVFFNFAPKNNRNQAGISFTNSSYVSRTERRRV

SEQ ID NO: 261974 - protein, 58 aa, Glycine max
  Clone ID: PAT_MRT3847_78585C.1.pep
VGLRFSSGLSRTTGTEGNASLGETSAHRSILSPACRQTLVCPHISSPVSGTLKRTTGG

SEQ ID NO: 261975 - protein, 101 aa, Glycine max
  unsure (1)..(101): unsure at all Xaa locations
  Clone ID: PAT_MRT3847_78586C.1.pep
ITLPCKRTSQFGKRFSGVKSPGFRLVGKPHTIRPFKTILEKCVDPPKDSFNGNHFKSNFKPVNHQAFFFAIDXKFHHTTLLLSALNTTVLFNFPSYENHGF

SEQ ID NO: 261976 - protein, 45 aa, Glycine max
  Clone ID: PAT_MRT3847_78587C.1.pep
HILGYAFSLFKNFSLLKFSPLFILCCLLVKPFGPYISPLTIFFLF

SEQ ID NO: 261977 - protein, 34 aa, Glycine max
  Clone ID: PAT_MRT3847_78588C.1.pep
GGGGVQIRYVISAKFLKLSKFLIRCQPLLKKVES

SEQ ID NO: 261978 - protein, 51 aa, Glycine max
  Clone ID: PAT_MRT3847_78589C.1.pep
THTSMFYNIQGKIIFLICTNRAQITQPRDSSLFCSEVGNRIILPRVQVQSS

SEQ ID NO: 261979 - protein, 74 aa, Glycine max
  Clone ID: PAT_MRT3847_7858C.1.pep
GFYRACRRGQRFGAQEPRSCSPIAYTTLSRFTRILTGRSSGEERGICDRGGNIFGAPKIKLASDEKQLLGNKTV

SEQ ID NO: 261980 - protein, 164 aa, Glycine max
  Clone ID: PAT_MRT3847_78590C.1.pep
PTPKPLSPGWVNELAVGEGKPSEEDGFGTGTSTGIRLWFFLRRRRRRRGGPLSIFFSATTNMNLKLPLWLSTPLTTMLLKARLGLSLMLRTMLLRGGKFAGRQLLLIWTQNMGPEEFLRTLLPHWRSLCLLGHDRSSASENAEKTPEPPKEPEATKEPDVNCPI

SEQ ID NO: 261981 - protein, 93 aa, Glycine max
  Clone ID: PAT_MRT3847_78591C.1.pep
KLVHKVLVQASATPFQGYKGDVEKHESAPLLCQCKKCNLFCSISTFRLTSDTCMACISALVRAGYDSQYQMPVSWQTCSLTSTHPAPSPPSST

SEQ ID NO: 261982 - protein, 118 aa, Glycine max
  Clone ID: PAT_MRT3847_78592C.1.pep
GGTPVRPPRVNNFSLRPPWGVQFLTQNLLPRETVWPFVCPTFYPSPHRETWVPQGFRSGILGEPQGPVFFFRPFSRGRVPWKTSPAPWGAKGPKGVGVVPHFCPRKGSAKKKKPFKGL

SEQ ID NO: 261983 - protein, 243 aa, Glycine max
  Clone ID: PAT_MRT3847_78593C.1.pep
MNLRLGSKGTCRIQMIPLNYLNYEEVEWDGMAFKEMNNLKTLIIRGGCFTTGPKHLPNSLRVLEWRRYPSPSLPFDFNPKKLVSLQLPDSCLTSLNWLNSKNRFLNMRVLNFNQCHYITEIPDVCGAPNLQELSFEYCENLIKIHVSVGFLDKLKILDADGCSKLTSFPPMKLTSLEELKLSFCANLECFPEILGKMENVTSLDIKDTPIKELPSSIQHLSRLQRIKLKNGGSYFSYQVPFLQ

SEQ ID NO: 261984 - protein, 153 aa, Glycine max
  Clone ID: PAT_MRT3847_78594C.1.pep
PRVRGRVGSKLFKFQNKEMESLLPKSIYGGIKSYLRRRRYRRLHGGATVVRRKMAIIRLRGPRRYWRIRAVPRLRWVMRSPLTILTKLKNAYMNFMLKLSGNVGAMNSDNIFEVKRIPKARQVSKGYSRDEFEARLIFEISKTLVASYELHPM

SEQ ID NO: 261985 - protein, 219 aa, Glycine max
  Clone ID: PAT_MRT3847_78595C.1.pep
MASASVGKELTLYSYWRSSCSHRVRIALNLKGLKYEYKPVNLLKGEQSRPEFLQLNPVGCVPVLVDDHVVLYDSFAIIMYLEDKYPHNPLLPHDIYKRAINFQAASVVSSTIQPLHNLSLLNYIGEKVGPDEKLPWAQSIIRRGFKALEKLLKDHTGRYATGDEVFLADIFLAPQLHAAFKRFNIHMNEFPILARLHETYNEIPAFQEALPENQPDAVH

SEQ ID NO: 261986 - protein, 158 aa, Glycine max
  Clone ID: PAT_MRT3847_78596C.1.pep
PVLVDDHVVLYDSFAIIMYLEDKYPHNSFLPHDIYKGAINFQAASVVSSTIQPLHNSSLLNYIGEKVGPDEKLPWAQSIIRRGFKALEKLLKDPPGRYATGDEVFLADIFLAPQLHAAFKRFNIHMNEFPILARLHETYNEIPAFQEALPENQPDAVP

SEQ ID NO: 261987 - protein, 214 aa, Glycine max
  unsure (1)..(214): unsure at all Xaa locations
  Clone ID: PAT_MRT3847_78597C.1.pep
RKELTLYSYWRSSCSHRVRIALNLKGLKYEYKPVNLLKGEQSRPEFLQLNPVGCVPVLVDDHVVLYDSFAIIMYLEDKYPHNPLLPHDIYKRAINFRPASVVSSTTPSXHNLSLLXNYIGEKVXPDEKLPWAQSIIRRGFKALEKLLKDHTGRYATGDEVFLADIFLAPQLHAAFKRFNIHMNEFPILARLHETYNEIPAFQEALPENQPDAVH

SEQ ID NO: 261988 - protein, 43 aa, Glycine max
  Clone ID: PAT_MRT3847_78598C.1.pep
TEILLTYIIVPFSNHVLCTLTQMFVLSGHHSSVVLFDSDHSKF

SEQ ID NO: 261989 - protein, 80 aa, Glycine max
  unsure (1)..(80): unsure at all Xaa locations
  Clone ID: PAT_MRT3847_78599C.1.pep
PRVREDIPHSAWDLFCWDSEKTLPNNFSGELLSWKLDTGTGQYYSEWASIYCGGHXQPIYITVRDYVRKRDVSIEYDACT

SEQ ID NO: 261990 - protein, 126 aa, Glycine max
  unsure (1)..(126): unsure at all Xaa locations
  Clone ID: PAT_MRT3847_7859C.1.pep
RQQFVIYVGRKLFQVSDDQLPKTDVSGSIGTFFGWAMTFIYLGGRLPQICLNIRRGHVEGLNPLMFLFAVIGNATYVASILVISLDWSKIRPNLPWLVDAXGGCVLLDFFILMQFIYFRCWTSQAL

SEQ ID NO: 261991 - protein, 78 aa, Glycine max
  Clone ID: PAT_MRT3847_785C.1.pep
NQTHSLQNVLLQQPNTQIQRQPLQISWLPPIVNSYKLNSDGSSIWEMNLFMVTWVCVVLHPSSIHAEGYGILRGLGKR

SEQ ID NO: 261992 - protein, 160 aa, Glycine max
  Clone ID: PAT_MRT3847_78600C.1.pep
SFVKLVADVELVMDVSKRDFLPSPKVDSSVVIIRPKHQIPNVDLHEWRSFTRTCFSSNRNKTLGALFKLKGKVFELFKISNGNDECSLHKGDEVQDEGGLTSFKEKIIGVVRTGGFEDKRPAKLSLQELLHLLSLFNQAGIYFNHRGRHKIEDMLDDNDE

SEQ ID NO: 261993 - protein, 44 aa, Glycine max
  Clone ID: PAT_MRT3847_78601C.1.pep
LALALYQTPCNEENRDVRVSHSLSSDVDRQTQLCPDLSLSRSGL

SEQ ID NO: 261994 - protein, 66 aa, Glycine max
  Clone ID: PAT_MRT3847_78602C.1.pep
DSDGYTTINASHISVITTSRGLTDVDLTGAVQNDTVTNEMVFEGGAFGAANMAICAFEAMGKIDEI

SEQ ID NO: 261995 - protein, 38 aa, Glycine max
  Clone ID: PAT_MRT3847_78603C.1.pep
IILGAVGTLYFGPVIFVFTIVAYGRILQVIQEILVLEC

SEQ ID NO: 261996 - protein, 68 aa, Glycine max
  Clone ID: PAT_MRT3847_78604C.1.pep
RGAFFLCLNSIFFFCLFFLVTWLCLIDCPKAAVAIYQRPTTISRGRQKPIQREGGGSPTNVNIWRQRF

SEQ ID NO: 261997 - protein, 57 aa, Glycine max
  Clone ID: PAT_MRT3847_78605C.1.pep
FQEAHCPILKSWQLSHIVFTRLIKDMLNAIPIKIYYPSPSQITPRDLFMAYRVRCDK

SEQ ID NO: 261998 - protein, 106 aa, Glycine max
  unsure (1)..(106): unsure at all Xaa locations
  Clone ID: PAT_MRT3847_78606C.1.pep
MVTGTETLHIMKGTADLGSPDTGSGKGKRSEHITHGYRLKRGLPGHTMEDHLVXRMSGAITTDEQSSFASICGHVCHEGACYVQNHLFPDILQHHDFWTETESAVK

SEQ ID NO: 261999 - protein, 162 aa, Glycine max
  Clone ID: PAT_MRT3847_78607C.1.pep
MGKKSSPAEGEEAVPEHLRCSRTDGRQWRCRRRVKENLKLCEIHYVQARRRQHKKTLKLKRKRQNDAVEVQIGAKRDRKSREALVNRRNQLELIRMVLQREVEKKKKKQSQLNLNLHLHFNHELKKELPNGVMAIASNMASSRYFRSKNAERGSVSKLQCGQ

SEQ ID NO: 262000 - protein, 75 aa, Glycine max
  unsure (1)..(75): unsure at all Xaa locations
  Clone ID: PAT_MRT3847_78608C.1.pep
ARENTANTHPSQGRRPLGPVASERQRTTAENGISTAESEGATTVMGGHPQKRPKKGNFVEPTLSPEATTSXQLWR

SEQ ID NO: 262001 - protein, 97 aa, Glycine max
  Clone ID: PAT_MRT3847_78609C.1.pep
MILLGAKKCSSNVFPKLLHHHFFLCSSIAKPSEIASFHIPSAAQITLHLPLMQGNILAGFLLTGLVSIYILAIPLDWFNAWVNRLWCAVSLHKYGWL

SEQ ID NO: 262002 - protein, 83 aa, Glycine max
  Clone ID: PAT_MRT3847_7860C.1.pep
MSFKREGDDWSQLNVLKKRRVGDLLASYIPEDEALMLRDGRFACAICPHRPVLDTLAMLTAHRAGKKHLSSLQLFYGKKQPGK

SEQ ID NO: 262003 - protein, 53 aa, Glycine max
  Clone ID: PAT_MRT3847_78610C.1.pep
RNESSFFFYHVLIDTMILNSVLQSIAATMSRNFDSPQYNCNCINSIFPQLPVT

SEQ ID NO: 262004 - protein, 36 aa, Glycine max
  Clone ID: PAT_MRT3847_78611C.1.pep
NLGDLKSELYSCMLALPLFGFFFLCRYFFVFFYVFF

SEQ ID NO: 262005 - protein, 74 aa, Glycine max
  Clone ID: PAT_MRT3847_78612C.1.pep
YFLPQNSQMRPKNGASHQQRLVCPFSSTYLLHNHIQGIKCKKGADIIFPELLTFSRRRRKVSVERTACINSLIF

SEQ ID NO: 262006 - protein, 59 aa, Glycine max
  Clone ID: PAT_MRT3847_78613C.1.pep
DIISSRVVTAISCPAVRFQSAVAVVIPVHVVHERIDLRFILSLIRDILRDCNNAYLRRA

SEQ ID NO: 262007 - protein, 65 aa, Glycine max
  Clone ID: PAT_MRT3847_78614C.1.pep
LAPLRNLFRYPIKLVSLGQNSFLPPPKNVAFQNHPSGGPLMGLGIYFFNLFNKPNVYNIVNKLNA

SEQ ID NO: 262008 - protein, 123 aa, Glycine max
  unsure (1)..(123): unsure at all Xaa locations
  Clone ID: PAT_MRT3847_78615C.1.pep
EGKEQDVXLGANNFPERQSIGTAAQSQDDGKDYQEPVPAPLVDPTEFTSWFVYRAWIAEFVATFLFLYINVLTVMGVAWAKSKCITVGIXRNSCAFCGMIFCLFYLCAVFFWGHIITAVIYFV

SEQ ID NO: 262009 - protein, 77 aa, Glycine max
  Clone ID: PAT_MRT3847_78616C.1.pep
GVVVFFFFLSRKNLACSVTIGKCELIMFITNLREDRITITLWEGTLKRLFKPQMKNVYISWTRVPYKNSTKSRDPIH

SEQ ID NO: 262010 - protein, 106 aa, Glycine max
  Clone ID: PAT_MRT3847_78617C.1.pep
FSEFDTDVCNSTGPPLVFERSNPSLKLGRVFLHFAPKLTIVEFVFHFGKSVQCPKDINKVGDVLLFTPKKSVCFVSKHGNFSPFLFILFVKEENDFSTYGYKRKPS

SEQ ID NO: 262011 - protein, 87 aa, Glycine max
  Clone ID: PAT_MRT3847_78618C.1.pep
GNHFFFFFFFFFFVFFFFFFFFFFFFFIVRGLRPFSCSSGEGKTAPSGVRGLRPFSCSSGEGKTAPSGGARRLYCPLLSSSHDHAST

SEQ ID NO: 262012 - protein, 35 aa, Glycine max
  Clone ID: PAT_MRT3847_78619C.1.pep
RRVEGSTYHFHRPSHRFQCICILNQYGNDSLQDRP

SEQ ID NO: 262013 - protein, 91 aa, Glycine max
  Clone ID: PAT_MRT3847_7861C.1.pep
LLWTVRLSSILHFYSEPHELIVIHASSTNESGVPRIDSLALFAYPPFSSFIRRPMNILSLMHPPPTRLQPRKLIALHCSPILHSPLFFGSP

SEQ ID NO: 262014 - protein, 140 aa, Glycine max
  Clone ID: PAT_MRT3847_78620C.1.pep
KTINKIELDEMALLFSRSFHCLWLPCCNVPPKSSERLRIYAPIPLPKPWVSFTHHTRLLPNATSSPNSDPEDFDILSSTEHSDGSFGFRFASANEIREQLDELNKKKKSDALNKKKKKLAREGVLEESETGVPALVSESV

SEQ ID NO: 262015 - protein, 64 aa, Glycine max
  Clone ID: PAT_MRT3847_78621C.1.pep
NNSCILEVLSSAFSAPMVFLTSSNKKKWINSTIHLPVRFVYKYTIIKYSYSYSIYNLINIFFLS

SEQ ID NO: 262016 - protein, 73 aa, Glycine max
  unsure (1)..(73): unsure at all Xaa locations
  Clone ID: PAT_MRT3847_78622C.1.pep
TCYGSVRGFVQRXGFNKTVKQVMEEVKGKKLTKKVRELAKMPKLATQEGGSSCSTLNSLLHQTCVASPKNQIS

SEQ ID NO: 262017 - protein, 53 aa, Glycine max
  Clone ID: PAT_MRT3847_78623C.1.pep
VNLIPCKRKNVEEKKVIWYLVRRSCIQSVEHVDQIWFLTLCMKNALLGDLFTC

SEQ ID NO: 262018 - protein, 413 aa, Glycine max
  Clone ID: PAT_MRT3847_78624C.1.pep
LGSYIYYILCDYFSKLIIIIIIVIVRTVYCFKTDERGNEKAGEVMKNALRKVLVHYYPLAGRLTISSEGKLIVDCTGEGALFVEAEANCSMEEIGDITKPDPGTLGMLVYDIPEAKHILQMPPLVAQVTKFKCGGFALGLCMNHCMFDGIGAMEFVNSWGEAARDLPLSIPPVLDRSMLKARNPPKIEHLHQEFADIEDKSSTNSLYVEDEMVYRSFCFEPERLKQLKMKAMEDGALEKCTTFEVLSAFVWIARTKALKLLPDQQTKLLFAVDGRAKFNPPLPKGYFGNGIVLTNSVCQAGELTEKPFSFGVSLIQDAIKMGTDSYMRSAIDYFEVTRARPSLACTLLITTWSRLSFHTTDFGWGDPVLSGPVSLPEKEVILFLSHGQERRNINVLLGLPAPVMKIFQDLMQM

SEQ ID NO: 262019 - protein, 57 aa, Glycine max
  unsure (1)..(57): unsure at all Xaa locations
  Clone ID: PAT_MRT3847_78625C.1.pep
YLYISIIKAIXNLTVVIXTNKNQARSKASKKETIRSKQKKGMEEHHKGKLQGMEEVR

SEQ ID NO: 262020 - protein, 77 aa, Glycine max
  Clone ID: PAT_MRT3847_78626C.1.pep
VSLAQAKIEKIKGSKKAIKVFSSAKYPAPERLQEHGSIYTGAQDPGLQRRSRHRIQSKHRPLDERALQEKLKYLPVC

SEQ ID NO: 262021 - protein, 60 aa, Glycine max
  Clone ID: PAT_MRT3847_78627C.1.pep
LSLCGTRMVVPLSSKIFFGNSLSGDKFFDLGRSSVYNLELNFHSRGAASLFKRAESKGLF

SEQ ID NO: 262022 - protein, 74 aa, Glycine max
  unsure (1)..(74): unsure at all Xaa locations
  Clone ID: PAT_MRT3847_78628C.1.pep
VVGPNKGFDMWRSEWVNDFSWXLSIRSDNRSQSTVFGNVLGISQDFDIAGNTLMPAFSVPHATARSSEDTGSSA

SEQ ID NO: 262023 - protein, 95 aa, Glycine max
  Clone ID: PAT_MRT3847_78629C.1.pep
GSKTWNLACARPVVGFPGFALSKSGFSGASPLKGRLTQGGHVGPRVFFWWYPGWPGRSWGNPGLKGTFLGIVFFFRGWGVLAFPLRGPLGPGLFF

SEQ ID NO: 262024 - protein, 74 aa, Glycine max
  Clone ID: PAT_MRT3847_7862C.1.pep
KKKETLRRVGPPLKAPVVVKWRVGAIIMGSPPTQHLWKNIITPCELLNNVQGLCHYLFGDALYAFLLNQAPCRP

SEQ ID NO: 262025 - protein, 73 aa, Glycine max
  Clone ID: PAT_MRT3847_78630C.1.pep
GYLLPQGGEGTLGCLGPFHWAWRRSKHRLTLTPLSLIRPRRPLSRSFSMEEVRFRLYRALLPSPKPNQDDFDF

SEQ ID NO: 262026 - protein, 92 aa, Glycine max
  Clone ID: PAT_MRT3847_78631C.1.pep
LPISGFGVGFCAQLFGYVCVPFWLEKWGIRGWLTNGGFGFFFFNWGWSRWRFINRGGISGAELSFDGVFFFWVWKVFFFFGEARFGFCFTQL

SEQ ID NO: 262027 - protein, 81 aa, Glycine max
  Clone ID: PAT_MRT3847_78632C.1.pep
KEGLKGYFLLREGFQKAREGKRNALREKNRKGSKRQKKNDQSQWQYMRGSFSTEQTRLDSKMEVLGCLPVMGVYPGISCML

SEQ ID NO: 262028 - protein, 529 aa, Glycine max
  unsure (1)..(529): unsure at all Xaa locations
  Clone ID: PAT_MRT3847_78633C.1.pep
RILRSPDTASLVKLEIVEDSLEEEHAPLNKRCKPSASPLPQPQQWNASDDGSVSSPSHLNILDEPSPLGXLSLRKSPSLLDLIQMKLSQGSAQQKEDLSSGAKRESRCASAAAASSGAGAADKLKASNLPASLLRICSWEYKSRYEGDLVAKCYFAKHKLVWEVLEGGLKSKIEIQWSDIMALKAHCPDNGPSTLTVVLARQPLYFRETNPQPRKHTLWQATADFTDGQSSKHRLHFLQCPQGLWXKHFEKLIQCDMRLNFLSQQPEIILDSPHFDTQPSAFEDPDNPKDHDLLQVSGKGSSTSCYQDSGSPQASLSSSFKIEHNDPPGMMLDSLPRDAPSPSSVMECTSIEGSTSSETDSKGPRNGDQIKLPGLRPSMSVSDFIGQIELCLSEQITSGNPPFSDGGSEYKEILEDIAQHLLNDNQVAATSDEKSLMSRVNSLCCLLQKDPVTVQNSHFTEDNTVEGPDDGKDVKPAVEESKDASGGKQALGMSRKDSFSDLLLHLPRIASLPKFLFNISEEDGNSHAR

SEQ ID NO: 262029 - protein, 177 aa, Glycine max
  unsure (1)..(177): unsure at all Xaa locations
  Clone ID: PAT_MRT3847_78634C.1.pep
MEDYDSYIAQSGRGENGVIVASRACSRDEFRPRGGKVLSRVAAVAAARNGSSTSSYDIAVTRNIKKKQKRKGLRELFTTDYIVNSVLRKDGPTLGQEFDFLPSGPKYFTSACQEDQRSFKRRKVPNSAFXSLANCNMKAPVKKHGIGKGLMTVWRETNPDAGDLPFWFGRFWPKKFL

SEQ ID NO: 262030 - protein, 77 aa, Glycine max
  unsure (1)..(77): unsure at all Xaa locations
  Clone ID: PAT_MRT3847_78635C.1.pep
MNTRIFRYCSWFNKQRGERETRVTIDIGMMQFXTTEHYCXQLDAPGHNAYIRSIDTETSHIYCTQRISDSTTSGNEG

SEQ ID NO: 262031 - protein, 49 aa, Glycine max
  Clone ID: PAT_MRT3847_78636C.1.pep
GLSVTTQHIYFDKIYVYLQLNQCEPSLVFSSVRFKYEFYVCFHARHIVM

SEQ ID NO: 262032 - protein, 83 aa, Glycine max
  unsure (1)..(83): unsure at all Xaa locations
  Clone ID: PAT_MRT3847_78637C.1.pep
XFHKRRQIFNGHHVVDQLGMMQMQREKKDVVSTSHCYQPINMEYDMGIEWCLLQERANKSWRMLYQQQGEELSKLKAKLKSKI

SEQ ID NO: 262033 - protein, 87 aa, Glycine max
  Clone ID: PAT_MRT3847_78638C.1.pep
NNNSTTLKTSFKTPILIKQSYKMSSQSEQLTAIAQSFKGVPGSEPITAAIEDFVQFFKPQNAIQVGDKFPSFRLSDATGKEVSSDDL

SEQ ID NO: 262034 - protein, 480 aa, Glycine max
  Clone ID: PAT_MRT3847_78639C.1.pep
MVKICCIGAGYVGGPTMAVIALKCPSIEVAVVDISKSRIAAWNSDQLPIYEPGLDGVVKQCRGKNLFFSTDVEKHVFEADIVFVSVNTPTKTQGLGAGKAADLTYWESAARMIADVSKSDKIVVEKSTVPVKTAEAIEKILTHNSKGIKFQILSNPEFLAEGTAIKDLFNPDRVLIGGRETPEGQKAIQALKDVYAQWVPEERILTTNLWSAELSKLAANAFLAQRISSVNAMSALCEATGANVQQVSYSVGTDSRIGPKFLNASVGFGGSCFQKDILNLVYICECNGLPEVAEYWKQVIKINDYQKSRFVNRVVASMFNTVSNKKIAILGFAFKKDTGDTRETPAIDVCQGLLGDKANLSIYDPQVTEDQIQRDLSMNKFDWDHPIHLQPTSPTTVKKVSVVWDAYEATKDAHGLCILTEWDEFKTLDYQRIFDNMQKPAFVFDGRNIVDADKLREIGFIVYSIGKPLDPWLKDMPALA

SEQ ID NO: 262035 - protein, 106 aa, Glycine max
  Clone ID: PAT_MRT3847_7863C.1.pep
VTTAIFYINCFPVMQPLVSGAALGLEGQLTVYNYNGGPCYRCLFPTPPPRTACQSCAEGGVLGVVPGIIGCLQALEAIKIAASVGEPLSGRMLLLDALSGRIRIVC

SEQ ID NO: 262036 - protein, 60 aa, Glycine max
  Clone ID: PAT_MRT3847_78640C.1.pep
HHFASFKGKVRKTYATKEEHDHRLWRVKSNLLRVRVDANVKLFLGSTGGTKFFGSNCLSG

SEQ ID NO: 262037 - protein, 77 aa, Glycine max
  unsure (1)..(77): unsure at all Xaa locations
  Clone ID: PAT_MRT3847_78641C.1.pep
CPYINCTGSLSIPLGNMADDPINLVAFPHMLVLCVEIHEKXALVLSADEFHTARSTHVQPASTLMTDGCTYLDCNRA

SEQ ID NO: 262038 - protein, 61 aa, Glycine max
  Clone ID: PAT_MRT3847_78642C.1.pep
ARLEEGPNSNINSCKTKLFGVSLQSKKRVHPDYGSNPETNKARLVLEKDDLGLNLMPPSTC

SEQ ID NO: 262039 - protein, 61 aa, Glycine max
  Clone ID: PAT_MRT3847_78643C.1.pep
GSELILCNVSYDRKSLLMGGLRRMGAPRSIHYPRSTPNVCDTFSTLFMGFNLKMCFKLCVV

SEQ ID NO: 262040 - protein, 56 aa, Glycine max
  Clone ID: PAT_MRT3847_78644C.1.pep
LCESETDLWQFSLSLCYCAVQFRCCLGIWLVGFCCQLVLTMDLLGLVVFGIEITCI

SEQ ID NO: 262041 - protein, 64 aa, Glycine max
  Clone ID: PAT_MRT3847_78645C.1.pep
GARYHPNTIFHNAISNRSHFFNTNPPAYYFDKPFGSNINTNSLSFHGAQCPIYITNTLPANTIH

SEQ ID NO: 262042 - protein, 72 aa, Glycine max
  Clone ID: PAT_MRT3847_78646C.1.pep
MCSGAFTRDSGMEAVAQDQANLVSKGRLFISNPDLVLRLKLHAPLTKYNRNPFYTQDPVIGYTDYPFLNGTT

SEQ ID NO: 262043 - protein, 79 aa, Glycine max
  Clone ID: PAT_MRT3847_78647C.1.pep
NYKIILFIKNIISTQFVSFKYHVMPIPLLLLFIDNFNLNLVVLSTKYTLYLMSTCMSLQFKIAINIIVLKRFFLMNCKL

SEQ ID NO: 262044 - protein, 132 aa, Glycine max
  unsure (1)..(132): unsure at all Xaa locations
  Clone ID: PAT_MRT3847_78648C.1.pep
LRESPGKKKKGRVRGXHRKKHPFCPNFPPPRGLSQKRVPGGGLDLFGATPLWVKTRKKLSGLFYPPGVGPPLLLWAKNKSPGGFFFSTQKKGVFPTNGGKGAPFFWLGFKNPFFFCLNKKGGGNLQTWARSL

SEQ ID NO: 262045 - protein, 47 aa, Glycine max
  Clone ID: PAT_MRT3847_78649C.1.pep
FTGHYCCNPSEQHSKDETKLSDRSLIREPLLYFYFLFSFFSDTKSKR

SEQ ID NO: 262046 - protein, 131 aa, Glycine max
  Clone ID: PAT_MRT3847_7864C.1.pep
IRLEVSQKTKRSEFVQRRTRRPFSVTEVEALVHAVEELGTGRWRDVKLRAFENADHRTYVDLKDKWKTLVHTATISPQQRRGEPVPQELLDRVLAAHAFWSQHQAKQHGKHQAGPGTLKITEASAERPCVC

SEQ ID NO: 262047 - protein, 96 aa, Glycine max
  Clone ID: PAT_MRT3847_78650C.1.pep
LEPFVTPHIFLLPTHFIHKVKFFTSNSLIPPKSLIPQYHPLISNIRPRLRPKPGPSPSILAGHAAQPAKNPVVTLQAQARSPTCRKPSRGPSNQMG

SEQ ID NO: 262048 - protein, 43 aa, Glycine max
  unsure (1)..(43): unsure at all Xaa locations
  Clone ID: PAT_MRT3847_78651C.1.pep
QDAHXKTGTKASARDLRNPQLLLLHSDQFNGKENHSLRWPQTT

SEQ ID NO: 262049 - protein, 73 aa, Glycine max
  Clone ID: PAT_MRT3847_78652C.1.pep
FLPNLKIPSCDFTHPYFPIFLHPPLFINSLVIFMYSSPPPCLISTTTKLISHASNHSFLDTIHPETFNPTQTH

SEQ ID NO: 262050 - protein, 530 aa, Glycine max
  unsure (1)..(530): unsure at all Xaa locations
  Clone ID: PAT_MRT3847_78653C.1.pep
GFTLLDKIISRWGLILSIVCVHGSLSCPVNIAMEGETMLVMVVYNVKGEDGIHRQRVRQLRTGWADGXIXISQCGVIAAHIYIXNFTLRGCVPSRLIKAHXVGNKTRCACHQSFPLCPVRVKLYTKXHTEKVIILSEWWKSDTEAVINEALKSGSAPNVSDAHTINGHLGSVQNCASQGGYKLQFQPGNTYLLRIINAALNEELFFKIAGHQLTVVEVDAVYTKPFKTDTIVIAPGQTTNVLLKANRAAGKYLVAATPFMDSPITVDNVTATATLHYTGSLGSTITTLTSLPPKNATPVATNFTDSLRSLNSKKYPARVPQKVDHSLFFTVSLGVNPCPTCANGSKVVAAINNVTFVMPKVSLLQAHFFNISGVFTDDFPGKPPVVYDFTGTQQPTNLRTNRGTRVYRLAYNSTVQLVLQDTGMITPENHPIHLHGXFNFFVVGRGQGNFNPKKDTKKFNLVDPVERNTVGVPSGGWTAIRFRADNPGVWFMHCHLEIHTTWGLKMAFVVDNGKGPNESLLPPPSDLPKC

SEQ ID NO: 262051 - protein, 67 aa, Glycine max
  Clone ID: PAT_MRT3847_78654C.1.pep
SVKGKGPSNINVLKKVMEIIQKGFQSMGVSKKQWKLEKSFFRGLKCEQGRFFGSLQINFPKELWSCK

SEQ ID NO: 262052 - protein, 59 aa, Glycine max
  Clone ID: PAT_MRT3847_78655C.1.pep
RRILPHHITSSTHPLIDDNTYMPDYYPTHLHRSIRSYHSHYRKNTLSHSTLVKTLHLTL

SEQ ID NO: 262053 - protein, 70 aa, Glycine max
  Clone ID: PAT_MRT3847_78656C.1.pep
VGAYRYTYRFFTLLLNYFFTWELMHPNLVVAFAVSLFYSCCLPLYYPFQPPPPPKEGGRHTVMTGNLPGT

SEQ ID NO: 262054 - protein, 48 aa, Glycine max
  Clone ID: PAT_MRT3847_78657C.1.pep
RFNVSSYHPIHSYKTPCVLFGRIKGINNTSVKLTIIRPPNPTRPRTRG

SEQ ID NO: 262055 - protein, 43 aa, Glycine max
  Clone ID: PAT_MRT3847_78658C.1.pep
RMIVFQASRSLSFPSSEDVRSRNKEDGLSPPEKKTRSPRSFLA

SEQ ID NO: 262056 - protein, 303 aa, Glycine max
  unsure (1)..(303): unsure at all Xaa locations
  Clone ID: PAT_MRT3847_78659C.1.pep
HSPPPXYYYHSPPPPKHSPPPPYYYHSPPPPKHSPPPPYYYHSPPPPKHSPPPPYYYHSPPPPKHSSSFPYYYHSPPPPKHSPPPPYYYKSPPPPPKEPYKYPSPPPPVYKYKSPPPPYKYPSPPPPPYKYPSPPPPVYKYKSPPPPVYKYKSPPPPYKYPSPPPPPYKYPSPPPPVYKYKSPPPPVYKYKSPPPPYKYPSPPPPPYKYPSPPPPYKYPSPSPPPYKSPSPPPPVYKYKSPPPPVYKYKSPPPPYKYPSPPPPPYKHPSPPPPVYKYKSPPPPVHSPPPPVYIYASPPPPYHY

SEQ ID NO: 262057 - protein, 563 aa, Glycine max
  unsure (1)..(563): unsure at all Xaa locations
  Clone ID: PAT_MRT3847_7865C.1.pep
MVLKKRVDHGFDGLRVPVIPKAPRSARRRIAFKKAVEDGQVCAIELLASLAGQLLQESEGSASSNASEGNHHPPFSQGVIEQDIQDGVKPLKKEEIHQGSCVESTFKTEVASQNSSFKPLSHTKTGHVSVNNSSDCCEKAEADVKSEIFEWDNKFGNYSNRLVETREKFRVSTHGNIKNGFKWEQEAGSSCIRGSNLADKCSLEDHLELYVSPALIDSKSNIKSPFHRKFFPSASFSRYGNGIKLGFRDDDENFLRCKKFCTKPKAFRSPRRIAHRRIRNLMSSKYWKTAPKLKDSELSRSDLGVPRYHKRKTCYGFERSQHNAIVKKRKFVDRVSGVTSDGGFSSESVSNSPQKGMDGDKPSSSAKLHVPKAADSHVKFSIKSIRIPELYIEVPETSTFSLKRTIVEAVMAILGGGAHVGVLLQGKKVRDDNRTLVQTGISCNENLDTLSFMLEPTSLQASPTVCVGDPSSQCETSQPTRSTEIPVLDSGITDTLHDSPLLTYPGNLIESNHEPTSSLADTTLDKLTPDSRAXVVVPATTETLAVVPGKSALSLAFVNDLTQ

SEQ ID NO: 262058 - protein, 60 aa, Glycine max
  Clone ID: PAT_MRT3847_78660C.1.pep
ILAAQQTPALKLPSFKKAKLSFQKQPFNIRIFLFLHINFQKPFTKKLSFHLLETLLRLVI

SEQ ID NO: 262059 - protein, 44 aa, Glycine max
  Clone ID: PAT_MRT3847_78661C.1.pep
RQDTVSRVNTRYSNGSSATIGNSLRHTATTHVSSRTAITPFVFS

SEQ ID NO: 262060 - protein, 96 aa, Glycine max
  Clone ID: PAT_MRT3847_78662C.1.pep
VFGCSLSHHKIRSFLCLSCPLSLTEKKPNKIKIHPNQIPSFDSCAVLCHSIMFFSPFIPILGFLAHFFCFMFTNAWLSLITKSPPYLYFFLLETRI

SEQ ID NO: 262061 - protein, 43 aa, Glycine max
  Clone ID: PAT_MRT3847_78663C.1.pep
MVIDNNFSRIIKDVLMHSRCRRKVDRSGCSGGAQLRHRMLPRG

SEQ ID NO: 262062 - protein, 253 aa, Glycine max
  Clone ID: PAT_MRT3847_78664C.1.pep
MVLSNKKLKLKLRAELAQRNSNAAAEPPSSSSSTNNNNSLKTLLDSATPKARFSKREKRRKLRSDQPSQQANKEIQTETEAEGSPNKKRKRKKVEGDDVAANGVSDTPKNKKKKQKQKKNKNKNKKKSTTAEENESNGGGEMPEATELTKTNTTTSKDNGDAPTNTKAYVGGIPYYSTEDDIRSYFESCGTITEVDCMTFPETGKFRGIAIITFKTEAAAKRALALDGADMGGLFLKIQPYKATRANKASDFA

SEQ ID NO: 262063 - protein, 93 aa, Glycine max
  Clone ID: PAT_MRT3847_78665C.1.pep
GSETENSGIARNLDQASCVASQGLGWLIARGDFVIRTIVNAAEALVSFWEIRKSLLPPTYDPCKPFCVEPTLMVLFIQGRHCVCFNTSIWRNH

SEQ ID NO: 262064 - protein, 97 aa, Glycine max
  unsure (1)..(97): unsure at all Xaa locations
  Clone ID: PAT_MRT3847_78666C.1.pep
ALTRFWVKYADDDMFSALIAFFLTTDDEYSTXYIDKXLHHLMLVKNHILDDPKTFPDTNLTHIKDIMLXALFYILLIPLYLSDTKTHQDYLYIRMHS

SEQ ID NO: 262065 - protein, 120 aa, Glycine max
  Clone ID: PAT_MRT3847_78667C.1.pep
GFRPLLLVVVSLGAGPLLFVLFAAPWCLPRLGFPLFSGCLWAPPCLGVALLFLLVFLLCSVFAGFFLPRLLFLSPCAPVSAVCLRVCCLLLFAVRVVVAVLVSACPAPARLRVVGWPSAT

SEQ ID NO: 262066 - protein, 178 aa, Glycine max
  Clone ID: PAT_MRT3847_78668C.1.pep
LVSFFFQVLGRMVDTLEEKVTPDMKKDPIVVVVGTDAQPGNDLAESEIPPESEPSNLETRPNKELPASETLATNGEAVAALPNQYLGNSEEPMNDHLENCESLTSNQPDNAEASWSSQTGDSKAVPTNQSANSEDLSNSGQLVSSEAPLDMKMKASQPSNQQVNTEALPNHNNVGNCN

SEQ ID NO: 262067 - protein, 66 aa, Glycine max
  Clone ID: PAT_MRT3847_78669C.1.pep
ARRATRGVTELWVYFFSPLDCNFHRIQICDRRLLEVGERFDRMNERPFTLTVVTSLSTKLIPAPAV

SEQ ID NO: 262068 - protein, 251 aa, Glycine max
  Clone ID: PAT_MRT3847_7866C.1.pep
WKTAPKLKDCELSDLGVPRYHKRKTCYGFERSQHNAIVKKRKFVDRVSGVTSDGGFSSESVSNSPQKGMDGDKPSSSAKLHVPKAKDSHVKFSIKSIRIPELYIEVPETSTVGSLKRTIVEAVMAILGGGAHVGVLLQGKKVRDDNRTLVQTGISCNENLDTLSFMLEPTSLQASPTVCVGDPSSQCETSQPTRSTEIPVLDSGITDTLHDSPLLTYPGNLIESNHESTSSLADTTLDKLTPDSRAIVVVP

SEQ ID NO: 262069 - protein, 102 aa, Glycine max
  unsure (1)..(102): unsure at all Xaa locations
  Clone ID: PAT_MRT3847_78670C.1.pep
GSRTATESATYEDTIADVMEQYDEFLSSMLSRSARLQMDYKCXERNDVNDVIAILTRIDDHAGTADVGSTIREKSDTITLEICAGLLPLLTDLLQSVMCRLL

SEQ ID NO: 262070 - protein, 102 aa, Glycine max
  Clone ID: PAT_MRT3847_78671C.1.pep
PIRTFSQYKEYVQEFQDKYDSYCSLNKILEGYRDQFQKLGNDLELAKGRDMDRYYDIVEQLKESYRRCGPRHKRLRKIFVVLHTELENLKRRIKDFANSYNK

SEQ ID NO: 262071 - protein, 82 aa, Glycine max
  unsure (1)..(82): unsure at all Xaa locations
  Clone ID: PAT_MRT3847_78672C.1.pep
TIVNSRDSDILLVYYTMTAQIRNXCLPYYIREEYECQADLNSAIXITAAIKYKPKTGNIHINRLSYDGXYKVWTKHDKNVGL

SEQ ID NO: 262072 - protein, 77 aa, Glycine max
  Clone ID: PAT_MRT3847_78673C.1.pep
KKRFIPPPKKKGFFLGPPRPILVGGANFRKKLGKVLAHLDKRGPTWGFFGDPYLEIFFLLAPFGFGKEIKIGKVIKG

SEQ ID NO: 262073 - protein, 108 aa, Glycine max
  Clone ID: PAT_MRT3847_78674C.1.pep
PPQYWAIPATAAPFFNVQARPISGFVSALQMQHDNHHSLNGAASDSVNSSSTVGSTMSTVTVTTSSGSGSASGSSAATTTQMLRDFSLEIYDKKELQFLGQPPPSSKP

SEQ ID NO: 262074 - protein, 79 aa, Glycine max
  unsure (1)..(79): unsure at all Xaa locations
  Clone ID: PAT_MRT3847_78675C.1.pep
VCTIDVWCDECGVPSGFPRRVICNSIFYVMLIRYGYDXLLRHARAPSLCLQSFMNVLSVCVYGDDNLISVHEHVKPYFS

SEQ ID NO: 262075 - protein, 499 aa, Glycine max
  unsure (1)..(499): unsure at all Xaa locations
  Clone ID: PAT_MRT3847_78676C.1.pep
ASSNGHRSPKSELETQEVEKIASGEGETASGSHSVTTYSEQNDEHVDKTVTNDELDDNQQTPALKDVRATTEVVEPQTETSNKGDQSHLGLGFEISLCGHELKVGMGSVAAAEAFEAHRISVVDFTSSAPSIIKNQNLVIKFKERYMTWEKAAPLVLGMAVYGLDLPVESKDTIPVEQDHALKSRDDDLGSSSSGRIDGRLSIPFRKVKTFEHTNSNSSNEDVFLDSESGSLIEPTPTSSTLGSTHKKFRKTNVPNTWQIASXNRNVGQNLVNFSFXRMVLGTQQVDAHIYLWKWNARIVISDVDGTITKSDVLGQFMPLVGKDWTQSGVARLFCAIKENGYQLLFLSARAIVQAYLTRNFLLNLKQDGKTLPNGPVVISPDGLFPSLYQRMIRRAPHEFKIACLEDIKRLFPSDYNPFYAGFGNRDTDELSYRKIGVPKGKIFIINPKGEVAISHRIGAKSYTSLHTLVNDMFPPTSLVEQEDYNSWNYWKTPLPDID

SEQ ID NO: 262076 - protein, 45 aa, Glycine max
  Clone ID: PAT_MRT3847_78677C.1.pep
SIFHSEFYAFLMCILHSRSVVYILSDLGRVAVIYNIVVNIIKFHG

SEQ ID NO: 262077 - protein, 49 aa, Glycine max
  Clone ID: PAT_MRT3847_78678C.1.pep
SGLKVSIVCWFRRYGLQYIFLRDNLVLRLLMHGFAFFLSICEASSWKYQ

SEQ ID NO: 262078 - protein, 68 aa, Glycine max
  Clone ID: PAT_MRT3847_78679C.1.pep
GSRMYSFSSELDVRLEPLECRDPETGMLQLTELMHQAEAVTLPIVASIVRLEFMTSVMDTSYGSLHLA

SEQ ID NO: 262079 - protein, 64 aa, Glycine max
  Clone ID: PAT_MRT3847_7867C.1.pep
RSNEVIHVSEMEDGTISSMYTVQLSHYEVFQVVLCSLSSIAFFPSCNLCFSFFFNVFFILDVLS

SEQ ID NO: 262080 - protein, 128 aa, Glycine max
  Clone ID: PAT_MRT3847_78680C.1.pep
RVCSYEHTHGWDIKPVRFELSTMDGQQASSECYLDETEPDDLHGNHKRGHWVDYKVGEFIVSGSEPTTKVRFSMKQIDCTHSKGGLCVDSVFIIPRDLRERKRSGHSEITMRRLGFFLLPIFGSWCAL

SEQ ID NO: 262081 - protein, 173 aa, Glycine max
  unsure (1)..(173): unsure at all Xaa locations
  Clone ID: PAT_MRT3847_78681C.1.pep
EHALIRALQLNVSLAVAWGYLGKLYRKVDEKQLARQMFDRARSIDPGLALPWASMSFESCVGRELESDEAFESCSRAVQIMPLAEFQLGLTKLALLSGHLSSSQVFGAIQQAVQLSPHYPESHNLHGLVCEARNDYKSASTFYKVARHAINIGSRGIYNSHXGGISINLARTL

SEQ ID NO: 262082 - protein, 89 aa, Glycine max
  Clone ID: PAT_MRT3847_78682C.1.pep
SYVNLKRKNLANLIWPNRSPCHVWLQSYIKNSEWPTFHAWPNKLGHFANFTRKLVNINPGYCILHSIILDLSILNLYCGRTFWNVIKDD

SEQ ID NO: 262083 - protein, 47 aa, Glycine max
  unsure (1)..(47): unsure at all Xaa locations
  Clone ID: PAT_MRT3847_78683C.1.pep
NFQNXFFQTIFLSKPKRPIKLXETSGKMENLFRLVDYEDMFSKRCIG

SEQ ID NO: 262084 - protein, 325 aa, Glycine max
  unsure (1)..(325): unsure at all Xaa locations
  Clone ID: PAT_MRT3847_78684C.1.pep
IVASLRLSLVNPKDIGILVVNYSLFNPTPSFSSMIVNKYKLRGNAKSFNLGGMGXKRRRVITVDLAKDILQAHPNTYAVVVSTKNVTXNWYFGNNPSVVFPNCLFRVGGAAILLSNKSSDRARAKYKLVHVVRTHKGADDKAFRCVYQEQDEVGKTGVSLSKDLMAIAGGALMTNITTLGPLVLPISEQFLFFLTLVVKKLFNAKMKPYIPDFKLAFDHFCIHAGGGSRIDELEKXNLQLRPEHVEASRMTLHRFGNTSSSSIWYELAYTEAKGRIRKGHRVWQIAFGSGFKCNSAVWEALRHVNPSPNTPWENCIHRYPVHIHT

SEQ ID NO: 262085 - protein, 54 aa, Glycine max
  Clone ID: PAT_MRT3847_78685C.1.pep
PSGNWRSTWYTYRMFCVRCGRTDPDLRVTMFVVELDLDFADIVVVAYAWVGMGI

SEQ ID NO: 262086 - protein, 269 aa, Glycine max
  Clone ID: PAT_MRT3847_78686C.1.pep
MAHTPVTLLAVEQHKVIIPNKHGEKLVGILHESGSREIVILCHGFRSSKESNSLVNLAAALENARMSSFRFDFAGNGESDGSFQYGYYWREAEDLRAVIQHFHESNRGVSAIVGHSKGGGVVLLYASKYHDIKTVVNLSGRYDLKVGIEERLGKDHIERIRKDGFIDVTRSGNFEYRVTLESLMDRLDTNMHEACLQIDKECRVLTVASALDKVVPTDDAYEFAKIIPNHKLHIIEGADHSFTNHQDELASVVVNFIKETLHQDRSTAN

SEQ ID NO: 262087 - protein, 99 aa, Glycine max
  Clone ID: PAT_MRT3847_78687C.1.pep
EGQREPSWLALASPRLRRLSSTTSLKHKIAIPDFLTLQESRAFLVVLLNIPPTGSTRPLNVISPSIYMVTYCLIVWFNINKMAPKLFALPQNENKLFTA

SEQ ID NO: 262088 - protein, 170 aa, Glycine max
  unsure (1)..(170): unsure at all Xaa locations
  Clone ID: PAT_MRT3847_78688C.1.pep
MLGNVGKVAQSILRTHRRRYLEASRNEAFTSVGPNIKQCRMYMQYKFPIEGCNSFLWHWTRENFHKGCSFRNFSVTSARNVAAYNSRIAWEVAVQKIXSNGYNGFTSINMIAQAVSLALTRSYLLVPGFLAFASGKLALAQQNGADTEFYPSQNALYMHAQDGYGYMFAF

SEQ ID NO: 262089 - protein, 213 aa, Glycine max
  Clone ID: PAT_MRT3847_78689C.1.pep
MKNSERSSVRKYNKSELPRLRWTPELHQHFVEAIQSLGGSHKATPKRILQQMRVKGLRIAHIKSHLQMYRNMKGHAIVAPVDQLLEGKAKDFKICSNICPTERNLKRELHLLDYKDGLSQTSEETDYDLNQEPQSSAVLLLSDDVSNEEENFADLSLISFSMPLISMMQSENNKEIMRFLSSTAAAAANHSVVDSSFFTPSFANNYINLDLTI

SEQ ID NO: 262090 - protein, 56 aa, Glycine max
  Clone ID: PAT_MRT3847_7868C.1.pep
TGQKGWLDEVNYLGQLSHPHLVQSIVHCFYYAHRLLPYEFTPTGHLEYHLPMRGSN

SEQ ID NO: 262091 - protein, 105 aa, Glycine max
  Clone ID: PAT_MRT3847_78690C.1.pep
MAFSLFIPSQPFPLVPTLLLLVLLHASLLEPSHGARISKDASTRHLFESRNTKHPNKCGELVALSQCSQNSKCSWCTSEVLDDMCFTKSEAWRLPQQVYSCSLIR

SEQ ID NO: 262092 - protein, 58 aa, Glycine max
  Clone ID: PAT_MRT3847_78691C.1.pep
RKHFDLSGRGLEKTCYLTILIIYLRRGLLLPLKLTLKFQGKVSRLVETWTIYLRGILV

SEQ ID NO: 262093 - protein, 56 aa, Glycine max
  Clone ID: PAT_MRT3847_78692C.1.pep
GVGRDFQAKAQGPRGAPPRDARGPAPRDPREPAPREAKGEARVLKKKTVGGTTATG

SEQ ID NO: 262094 - protein, 193 aa, Glycine max
  unsure (1)..(193): unsure at all Xaa locations
  Clone ID: PAT_MRT3847_78693C.1.pep
FLSLVPNCFVRPRAAQNAADEAKASLGHIDGDHLTLLNVYHAYKQNRXLKSADSVRQQLVRIMARFNLKLCITDFNSRDYYVNIRKAMLAGYFMQVAHLERTGHYLTVKDNQVVHLHPSNCLDHKPEWVIYNEYVLTSRNFIRTVTDIRGEWLVDVAPHYYDLSNFPQCEAKRVLERLYKKREKEKEEARSRR

SEQ ID NO: 262095 - protein, 53 aa, Glycine max
  unsure (1)..(53): unsure at all Xaa locations
  Clone ID: PAT_MRT3847_78694C.1.pep
HARXRKLGIRLEXCLIXSYYFHAPHRXKLSSAKQIFSIFXGDGVPQIISVXTH

SEQ ID NO: 262096 - protein, 50 aa, Glycine max
  Clone ID: PAT_MRT3847_78695C.1.pep
IRSLTLIVTNETLCNHSLVSTKCERAFFTIRRGLFFYINSFIDHLYLLIS

SEQ ID NO: 262097 - protein, 224 aa, Glycine max
  Clone ID: PAT_MRT3847_78696C.1.pep
LVVSPEFNCSNEILSVSAMLSVPNCFVRPREAQKAADEAKARFGHIDGDHLTLLNVYHAYKQNNEDPSWCYDNFVNHRALKSADNVRQQLVRIMSRFNLKLCSTDFNSRDYYVNIRKAMLAGYFMQVAHLERTGHYLTVKDNQVVHLHPSNCLDHKPEWVIYNEYVLTSRNFIRTVTDIRGEWLVDVAPHYYDLSNFPQCEAKRVLERLYKKREKEKEEARSRK

SEQ ID NO: 262098 - protein, 778 aa, Glycine max
  unsure (1)..(778): unsure at all Xaa locations
  Clone ID: PAT_MRT3847_78697C.1.pep
MSLIYEKIMLFFSWGYNAFTVKFSPALKQFLGASTESCRFINYGICDHDINIRVLMGTERKRKVSLFDVVDDAAAKMSKSNGGAVAANNLINRWNGKPYSQRYHDILEKRKTLPVWHQKEEFLQALKDNQTLILVGETGSGKTTQIPQFVLEAVDIETTDKRRKMMIACTQPRRVAAMSVSRRVAEEMDVSIGEEVGYSIRFEDCSSARTVLKYLTDGMLLREAMTDPLLERYKVIILDEAHERTLATDVLFGLLKEVLKNRPDMKLVVMSATLEAEKFQGYFFGAPLMKVPGRLHPVEIFYTQEPERDYLEAGIRTVVQIHMCEPPGDILVFLTGEEEIEDACRKITKEISNLGDQVGPVKVVPLYSTLPPAMQQKIFEPAPPPLKEGGPPGRKIVVSTNIAETSLTIDGIVYVIDPGFAKQKVYNPRVRVESLLVSPISKASAHQRSGRAGRTQPGKCFRLYTEKSFNNDLQPQTYPEILRSNLANTVLTLKKLGIDDLVHFDFMDPPAPETLMRALEVLNYLGALDDDGNLTKLGEIMSEFPLHAQMXKMLVVSPEFNCSNEILSVSAMLSVPNCFVRPREAQKAADEAKARFGHIDGDHLTLLNVYHAYKQNNEDPSWCYDNFVNHRALKSADNVRQQLVRIMSRFNLKLCSTDFNSRDYYVNIRKAMLAGYFMQVAHLERTGHYLTVKDNQVVVHLHPSNCLDHKPEWVIYNEYVLTSRNFIRTVTDIRGEWLVDIAPHYYDLSNFPQCEAKRVLERLYKKREKEKEEARSRR

SEQ ID NO: 262099 - protein, 67 aa, Glycine max
  Clone ID: PAT_MRT3847_78698C.1.pep
FSGCRVGLDFDSNDISFFGYWRVEMDLNLNSMLHLSAVAHLLYLECHEFDLSIVENPKNKYTLNFTR

SEQ ID NO: 262100 - protein, 108 aa, Glycine max
  unsure (1)..(108): unsure at all Xaa locations
  Clone ID: PAT_MRT3847_78699C.1.pep
MTXRAVLIDFWPTPFGMRVKIALAEKGIKYEYKEEDLKNKSPLLLQMNPVHKKIPVLIHNGKPICESLIAVQYIEEVWNYKNPLLPSDPYQRAXARFWADYFDKKIYY

SEQ ID NO: 262101 - protein, 47 aa, Glycine max
  Clone ID: PAT_MRT3847_7869C.1.pep
PQEESPKMSIKPGNQRGSHCLFRKNIYPHYRRNLQKNLETCPHRGRT

SEQ ID NO: 262102 - protein, 41 aa, Glycine max
  Clone ID: PAT_MRT3847_786C.1.pep
SLHEPLLLLLSATPQRPFSLTQFLNANPPFTNQIPMAMPNP

SEQ ID NO: 262103 - protein, 81 aa, Glycine max
  Clone ID: PAT_MRT3847_78700C.1.pep
CAHEGDMSDVPNSVEPYAKNNGHEPACRPSDSNIRLRNAASIAATVYTSTPTEPHNVPSQALHSDAKLPDDIKVKLAAKKT

SEQ ID NO: 262104 - protein, 65 aa, Glycine max
  Clone ID: PAT_MRT3847_78701C.1.pep
GKKGKGGAFKGGLKKPPPWGLTPRKPPLKSRLKGGPIGQKGVPTVCKNLFNGPLWDVSHLEKRGV

SEQ ID NO: 262105 - protein, 94 aa, Glycine max
  Clone ID: PAT_MRT3847_78702C.1.pep
KKKKETIIKKSKKRKTKMPGAGGKRKTYDPAAPNSFNGALKKTRAGFNTVPAGKTLRTNFKSLKTTPLTKARSQKDAPTPFPNSGPPSMKKGQT

SEQ ID NO: 262106 - protein, 69 aa, Glycine max
  Clone ID: PAT_MRT3847_78703C.1.pep
QIVCSKDSIEELYLCFYKNFQPRDCALGSDIKIDMVTSKKSCPKYVSLPESVSVGYNGLQSRVSDDVAL

SEQ ID NO: 262107 - protein, 38 aa, Glycine max
  Clone ID: PAT_MRT3847_78704C.1.pep
MSGMGDGYVGTRQDSVRIRRLGMHREADRRRIQELKTK

SEQ ID NO: 262108 - protein, 62 aa, Glycine max
  Clone ID: PAT_MRT3847_78705C.1.pep
YPHVAILSSFKYVHGSQLYHLSFPDGDSSGSSSNFLSVCVNIVIILGLLLYYPPVSSTQNNK

SEQ ID NO: 262109 - protein, 79 aa, Glycine max
  unsure (1)..(79): unsure at all Xaa locations
  Clone ID: PAT_MRT3847_78706C.1.pep
CNTKVERMRDTKLXEVVFLLLFXLIXAXRFTXGHRHVTXXYXXSSXHMSSIQFSPYXHLVSSTLSPFXILDLRLILXXP

SEQ ID NO: 262110 - protein, 57 aa, Glycine max
  Clone ID: PAT_MRT3847_78707C.1.pep
EEEPNRLLYDSPKFEGDGRQNIMKKHVLWQDSHQCYKKTSIMKNWLPAITSSSPWQV

SEQ ID NO: 262111 - protein, 266 aa, Glycine max
  Clone ID: PAT_MRT3847_78708C.1.pep
MESGLIKDLPEIHQERTSTLHSSSTPSGSLNGMVNEQHVNLERISSTGSDDESASSDEGSVDSVDQSLMSPSTRESSNALSSEQSQTDVRTTSHNNTPLLSTSSVHSQDASGELNSGPDAVAMPTRHREPEFSPQLAVPRSRSQTLWQRSSEWLVPRVVSNPIETRADLSAAETQVRKLLEQLKSDSVDSKREATAELRLLAKENMDNRIVISNCGAISLIVDLLQSTDTRIQENSVTTLLNLSINDNNKAAIANSGAIEPLIHVL

SEQ ID NO: 262112 - protein, 107 aa, Glycine max
  unsure (1)..(107): unsure at all Xaa locations
  Clone ID: PAT_MRT3847_78709C.1.pep
XLFFLIFGARKEIFRVKGYKRGRGSTSTLSPVNLGKHTHHMQKAAPDSFTFLIPLPISRSAHSRRLMEPIIQNRGRGCYNTWATKKYRNPHYCSRGSVNPMLYDQTR

SEQ ID NO: 262113 - protein, 56 aa, Glycine max
  Clone ID: PAT_MRT3847_7870C.1.pep
NYKGFQYKLIASLAKLIRAYSAIRVCLTFPLQTWWIKLAKQHKLILTIIEPSLYNS

SEQ ID NO: 262114 - protein, 89 aa, Glycine max
  Clone ID: PAT_MRT3847_78710C.1.pep
VMSVFFYPIDAPLYYILKKGGAWAIILEDLILFTFPPCSSKAIQGTFFSTNDLKHFTYKYFISTPIFLSTVKLYAHFSKSFSALYSSHT

SEQ ID NO: 262115 - protein, 79 aa, Glycine max
  Clone ID: PAT_MRT3847_78711C.1.pep
QRSGQNYEAYIHASKRMVSYVSQDKPLSPKIKIPYYHHLHLTVANYHTQICFSAVLYQSTSFPLMNETYTHEGHNSLIS

SEQ ID NO: 262116 - protein, 52 aa, Glycine max
  Clone ID: PAT_MRT3847_78712C.1.pep
RVSVSESTRSCTLNIGIAFIRDHGSLSVSETSRSLQSPTMPGCGHIAAVRTS

SEQ ID NO: 262117 - protein, 699 aa, Glycine max
  unsure (1)..(699): unsure at all Xaa locations
  Clone ID: PAT_MRT3847_78713C.1.pep
MRKRDLAILMLSAFAIFFTLQQDGGISFKDAWMHLTDEYPIKYEAERLPPPLVADLNGDGKKEVLVATHDAKIQVLEPHSRRVDEGFSEARVLAEVSLLPDKVRVMTGRRPVAMATGYIDRYKIGQPQKQVLVVVTSGWYVMCFDSNLQKLWXENNLQEDFPHNXSRYGNGAISISNYTLKHGDTGLIIVGGRMEMQPHIFMDPFEEMGVGARKAEQHRRIADVKEAYXNTGTQGAERIALNAFAGRNAXIEGTDEXGAEQSQTVDCKIWTECRKFDVIILXGNLCWPLQGEKKKSKPSNKPETTHQSAKSEDTLLKLAHGRRHKRKASAKSXGTLLRFPPHPPALNLAACPGLFRLIXRSSGSPARPARPAKSKKHLPYVPTITNYTQVWWVPNVVVAHQKEGIEALHLASGRTICKLHLQEGGLHADINGDGVLDHVQAVGGNGAEQTVVSGSMEVLRPCWAIATSGVPIREQLFNVSICHYTHFNLFQHGELYRSYSQGSDIASLEVATPILIPRSDGHRHRKGSHGDVIFLTNRGEITSYSPGLHGHDAIWQWQQSTGVTWSNLPSPSGVMEGGGLVIPTLKPLSLRLHDNQEMILAAGEQEAVIISPGGSLLATIELPGPPTHVLIAEDFSNDGLTDLILVTSNGVYGFVQTRQPGALFFSMLVGCLIVVMGVIFVTQHLNSTKGKPRPSSGSR

SEQ ID NO: 262118 - protein, 87 aa, Glycine max
  Clone ID: PAT_MRT3847_78714C.1.pep
MSDIGRQSLGDKAGAALKPDSQKTYLEQAGDAIKGKADSAASTGQPESQKSYTQQAGDALSGNQNENKGSLLDSAKDALGMNNNNRA

SEQ ID NO: 262119 - protein, 160 aa, Glycine max
  Clone ID: PAT_MRT3847_78715C.1.pep
QNMRMTYYPPCPQPELVMGLSAHSDATGITILNQMNGVNGLQIKKDGVWIPVNVISEALVVNIGDIIEIMSNGAYKSVEHRATVNSEKERISVAMFFLPKFQSEIGPAVSLTNPEHPPLFKRIVVEEYIKDYFTHNKLNGKSYLEHMRITDDEKFTNASI

SEQ ID NO: 262120 - protein, 78 aa, Glycine max
  Clone ID: PAT_MRT3847_78716C.1.pep
VSLKILPWAVTAIAPFFSHHRSTLFGINSEAHGICHCGKPLAPCWSKSLDGLTNLGFVVLLLLNRYNVTGKVYEPPFG

SEQ ID NO: 262121 - protein, 92 aa, Glycine max
  unsure (1)..(92): unsure at all Xaa locations
  Clone ID: PAT_MRT3847_78717C.1.pep
ITGLWEDVFYKFWTIYQKNLALTEEEKMEVITNKGIPADVLATRAHEFEKHCCSXIALKDSNFLAVDKXLYSTKVNSXAKIINLRQSAVGYS

SEQ ID NO: 262122 - protein, 127 aa, Glycine max
  unsure (1)..(127): unsure at all Xaa locations
  Clone ID: PAT_MRT3847_78718C.1.pep
PHIESTTKPQPQAEKGNGDRPNPRRETKSGTGQSKQAGRTQPRETRHTPETDEQTPTANEPKAEAKAEDPGAGTKEKEQXRAQQRXGRKSPTTXQGXKKEHSXNKTPKDAKTEAXSKGTAAQDPEPG

SEQ ID NO: 262123 - protein, 53 aa, Glycine max
  Clone ID: PAT_MRT3847_78719C.1.pep
KLTRYTNIKKKKKYILYVQGHSQSTGFSLKTNGKSKQLPQHITVSTSPKCNHG

SEQ ID NO: 262124 - protein, 55 aa, Glycine max
  Clone ID: PAT_MRT3847_7871C.1.pep
PRAFDYNPQGLNIWAQPNPFGYPISFTRWVAFSILVPPCNLIKPRPFHPWFAFPP

SEQ ID NO: 262125 - protein, 338 aa, Glycine max
  Clone ID: PAT_MRT3847_78720C.1.pep
PNTCNDRMAEELRKLTGGTLLSRNKEYIVFYRGNDFLPPVVTNTLNERQKLTLLQQDEEDKARQIASSITVSNSKAAQVPLIAGTLTETRAATTNWGHQPSKQEIENMIRDSAMNKLSALVKHHEKKLALAKSKFRKAEKALAKVQRDLDPADIPSDLETLTNEERFLFRKIGLSMKPYLLLGRRDVYAGTIENMHLHWKYRELVKLIVKGRNSAQVKHISISLEAESGGVLVSVDKDTRGHHTIIVYRGKNYFSPRVVRPKNLLTRRQALARSVELQRREALKHHISDLEERIGLLKSELEDMKNGKEIEDSKTLYPALENPVSSDDDLEELNIFFP

SEQ ID NO: 262126 - protein, 89 aa, Glycine max
  Clone ID: PAT_MRT3847_78721C.1.pep
MPITIIAVGRPEEATHPDTLLAALAEFISTFIFMFAGSGSCIAYYKLTDNCAATPAGLMYASIDHAFALFVGVFVGANIFGGHFNPVVT

SEQ ID NO: 262127 - protein, 190 aa, Glycine max
  Clone ID: PAT_MRT3847_78722C.1.pep
MVLVLALGDLHIPHRAPDLPAKFKSMLVPGKIQHIICTGNLCIKEIRDYLKTLCPDLHITRGEYDEETKYPETKILTIGQFKLGLCHGHQVIPWGDLDSLAMLQRQLDVDILVTGHTHQFTAYKHEGGVVINPGSATGAYSSITYDVNPSFVLMDIDGLRVVVYVYELIDGEVKVDKIDFKKSSTSHSAH

SEQ ID NO: 262128 - protein, 44 aa, Glycine max
  Clone ID: PAT_MRT3847_78723C.1.pep
VKLKSYLFNSSQVKLGLLGSFPPLLMTYKFQILQLHTKMRERKS

SEQ ID NO: 262129 - protein, 97 aa, Glycine max
  Clone ID: PAT_MRT3847_78724C.1.pep
RLPGRFTVGIPTRQNLEICFSLRYGLCSGGAPTIPLSGNPLLVCHRCSRQFMSSLILPNIINSGLARRAFGARPSLASLAGHRRANPLPSILRGRLG

SEQ ID NO: 262130 - protein, 76 aa, Glycine max
  Clone ID: PAT_MRT3847_78725C.1.pep
MVLVLALGDLHIPHRAPDLPAKFKSMLVPGKIQHIICTGNLCIKEIHDYVKTLCPDLHITRGEYDEETKYPETKTL

SEQ ID NO: 262131 - protein, 190 aa, Glycine max
  Clone ID: PAT_MRT3847_78726C.1.pep
MVLVLALGDLHIPHRAPDLPAKFKSMLVPGKIQHIICTGNLCIKEIHDYLKTLCPDLHITRGEYDEETKYPETKTLTIGQFKLGLCHGHQVIPWGDLDSLAMLQRQLDVDILVTGHTHQFTAYKHEGGVVINPGSATGAYSSITYDVNPSFVLMDIDGLRVVVYVYEHIDGEVKVDKNDFKKTSTSHSAH

SEQ ID NO: 262132 - protein, 133 aa, Glycine max
  unsure (1)..(133): unsure at all Xaa locations
  Clone ID: PAT_MRT3847_78727C.1.pep
RGVPRSYCFVNPHNSFVLNRWMGKLTFPQGXSRSCKRMPLIIGGGAGAKNAILMNMPNAVLSMWRYCVGDLVFEVFKMTTPYIKCTVSFXLAFGNLADDTINYEAISHXSLVQLGEIHEKVVXLKFSQEEFLS

SEQ ID NO: 262133 - protein, 45 aa, Glycine max
  Clone ID: PAT_MRT3847_78728C.1.pep
IRLEERPPFYFFFNKTHWLSIYNRKFTSKRHKDFNKTLHAIKSYS

SEQ ID NO: 262134 - protein, 98 aa, Glycine max
  Clone ID: PAT_MRT3847_78729C.1.pep
FLTNSSSREHFDACEWTKSEPHSWELIFPIEVCGPNNGFEMWSFEWANQTSWRLSFLIDNPKQSTVFDILLGISLDFEIAGNNFMPAFFVPQATARSS

SEQ ID NO: 262135 - protein, 63 aa, Glycine max
  Clone ID: PAT_MRT3847_7872C.1.pep
VMYTIPLIPPVQIWDNHFGLCFFYVSSLCFCGFFIQSYSSSTAERLWERVNPMEKKLIRMGGG

SEQ ID NO: 262136 - protein, 64 aa, Glycine max
  Clone ID: PAT_MRT3847_78730C.1.pep
GNKYSPRGSWMPWPWVLSNGVASKCHGQGGPPDAFKLSRFQCPKCLKRKESLKEKPPSKTLIWF

SEQ ID NO: 262137 - protein, 88 aa, Glycine max
  Clone ID: PAT_MRT3847_78731C.1.pep
KSEPLSWELIFPKKVGGPNNGFEMGSFEWANQTSGHLSFLIDNPKQFTVFDILLGISQDFENAGKTLMPAFFVPQGTARFFENGESSA

SEQ ID NO: 262138 - protein, 171 aa, Glycine max
  unsure (1)..(171): unsure at all Xaa locations
  Clone ID: PAT_MRT3847_78732C.1.pep
FSVKTFKYDIMGAGSHSSEDYPEQEDQEKPQXIDAGLRQRIDPXYNEVQAHMETNMVKLSLDDGETPKGSMLDLKISXSKIALPKNTVGGTILRRELWANSMTEGNFRASVDLQRTHRIKGMIKRAATVGISVNTGLALACAMKRFFMGRASLILHHLLTDCEXWNSSCQK

SEQ ID NO: 262139 - protein, 111 aa, Glycine max
  unsure (1)..(111): unsure at all Xaa locations
  Clone ID: PAT_MRT3847_78733C.1.pep
NHVGQIPLMAQEEILSSSASDSRTAMVSKNSKPQATAMHVGAIEIIIDXYASPDCNIGGAMLLVDTHHTNPENAARSIFAAPIRGGRPIRVGTFANTIVQIEPHMNSRHQL

SEQ ID NO: 262140 - protein, 136 aa, Glycine max
  unsure (1)..(136): unsure at all Xaa locations
  Clone ID: PAT_MRT3847_78734C.1.pep
PTRAVLGGGDITGPHXHTRYADGLTDTLPXATMGAGSLAAKSEFEDKYKESESMDEGIKLVGEAICTDICNDLRSGSNVNTSVKTKGHKEYLMNHLLPNAHTYGNPKRYDTPKKTKDLSTKNAPVEENVGETEGDA

SEQ ID NO: 262141 - protein, 61 aa, Glycine max
  Clone ID: PAT_MRT3847_78735C.1.pep
MNPRYKTLTPPISYQQNNTLINIQGFKKCSVTTTEPTPSWFSRSPLSQLQPHLKTNLQPQF

SEQ ID NO: 262142 - protein, 95 aa, Glycine max
  Clone ID: PAT_MRT3847_78736C.1.pep
FDACKWTKSDPHSWELIFPIKVGGPNNGFKMWSFKWANQTSGHLSFLIDNPKQFTVFYIFLGISQDFEIAGNTFMPAFFVPQATARFFENGESSA

SEQ ID NO: 262143 - protein, 92 aa, Glycine max
  Clone ID: PAT_MRT3847_78737C.1.pep
CKWAKWEPHFWELIFPKKGCGPKKGFEMWSFEWANQTSGHLGFLIANPNQFPVFDIFLGIFQDFENGGKIFKPAFFVPQGTARFFENGESFA

SEQ ID NO: 262144 - protein, 146 aa, Glycine max
  unsure (1)..(146): unsure at all Xaa locations
  Clone ID: PAT_MRT3847_78738C.1.pep
STTPGDSAMGAXLATIPNMCAYGLNPGISGSRLXGTIPXSIPQHTEWNQMATVRTPLNFDPSKQSFCQFSIDLLGGGILADKTGDWITLIQRXQLVTLLRVAACKKGCLMVKIVMAGNAACKRSDCASSAPVFLTNSYSTEYVDAR

SEQ ID NO: 262145 - protein, 413 aa, Glycine max
  Clone ID: PAT_MRT3847_78739C.1.pep
MAVLLRMAQPHNGNTNNTSNQQLVLHDFLGMRPAADSPKTADVRLPEPSASASSTGGRGPFSATSDIASEKQVGNHLEGVPFYGPRSDFSGTEISNRLVGSKRSNSDSTFMGSSRDAFQLVPDSFQNSHLMKVLRNAAGGERPRRPNDDAVLLGMQSMKPSSSQIFQPPTSTKIDANKWERSILMNVGPSMQHPPRGVQLAPFVHQMASSKIRDTNAGPSFISQSAADEGSRTGIKGPGILSSAAATATEKSIPSAVMLGGSRPKPGTNVVESSTHPSSQHGLTSASRQMTIFYGGQAHVFDDVHPHKADVIMALAGSNGGSWSTAFSPKSVVKMVSDGNLHGGENETGLVSNVAFPQELHGKLSITGSSSHAIGLGDRVTTPAGAHQGSVFAKDTRTLVQPPDPSSEDKRPQ

SEQ ID NO: 262146 - protein, 102 aa, Glycine max
  unsure (1)..(102): unsure at all Xaa locations
  Clone ID: PAT_MRT3847_7873C.1.pep
ATANGEDTDTMRHKIEQEASMNWSWTFIAPPCENKDIEACAATDDEACMDPAVPDLRMACKLLLRCVSLPNTSCTVRNRAXGYTFVMRLVDLFDSEDPSERE

SEQ ID NO: 262147 - protein, 92 aa, Glycine max
  Clone ID: PAT_MRT3847_78740C.1.pep
CKWPKWDPHSWELIFPKKVCGPKKGFKMWSFKWANQISGPLSFLIANPKQSTVFKILLGISQDFEIAGKTLRPAFFVPQAIASFFENGESSA

SEQ ID NO: 262148 - protein, 463 aa, Glycine max
  unsure (1)..(463): unsure at all Xaa locations
  Clone ID: PAT_MRT3847_78741C.1.pep
VAWADAWADAWADAWADAWGFIKPLGQAKESNLICHLTPWDIAMMSLHYIQKGLLFKKPATLVDPQDFMENLLEKLKHSLSLTLFHFYPLAGQLVTXKPKSVSYTVSVDCNNTDGARFIYATLDITISDILSPVDVPLSYGLRSVVHSLFDHHKAVNHDGHTMPLLSIQVTEIVDGVFLGCSMNHAVGDGTSYWIQAHAKGHDTDVPISHQPILSRWFPNDCAPPINLPFKHHDEFISRIEAPLMRERVFHFSAESIARLKAKANMESDTTKISSFQSLSALVWRSITRACSLPYEQRTSCRLTANNRTRMEPPLPQEYFGNSVSRVSAETTVGELLENNLGWAAWKLHLAVTNHNDRVVLQSLKEWLQSPLIYQLGQPMDPYVVLISSSPRFNMYGNEFGMGKAVAVRSGYANKFDGKVTSYPGREGGGSIDLEVGLLPHIMSALESDEEFMNVVSVSNPLC

SEQ ID NO: 262149 - protein, 142 aa, Glycine max
  unsure (1)..(142): unsure at all Xaa locations
  Clone ID: PAT_MRT3847_78742C.1.pep
MLFSSSVQSSIRQIALFVISSRRPLGERQARALGVVLKVDVLSRGVYAPRLGKALESLRLGALPPRPPLGAPAAAGAPRASPRPRPPRPSPXARSPPRPRPSPPRKDPRPSPRPRSSRSPRPPCDPPSRGGGASMRLLSSST

SEQ ID NO: 262150 - protein, 56 aa, Glycine max
  unsure (1)..(56): unsure at all Xaa locations
  Clone ID: PAT_MRT3847_78743C.1.pep
SVRLALLTELCCSPRQLVLRRRNWRSVSTCVWMRSRRACHLQLSHXKVQIKVSTCV

SEQ ID NO: 262151 - protein, 47 aa, Glycine max
  Clone ID: PAT_MRT3847_78744C.1.pep
IQLAILYFNLYQTQHNWVILKTNFIIYQYDPIMLGLVKVEINSTSYS

SEQ ID NO: 262152 - protein, 84 aa, Glycine max
  unsure (1)..(84): unsure at all Xaa locations
  Clone ID: PAT_MRT3847_78745C.1.pep
IRLERKFYMSSNXKREIDVNETNGKMGGTVQTTTYNLLLTLLQLPSLNPTKNPYESLLLHRHNTPQLLSLFSFPVSFSFSLSST

SEQ ID NO: 262153 - protein, 50 aa, Glycine max
  Clone ID: PAT_MRT3847_78746C.1.pep
SFWDKRITHEDLGAALGEDPKGYVFKIYRGRDKQGLPMKQGVLNPGSMHV

SEQ ID NO: 262154 - protein, 62 aa, Glycine max
  Clone ID: PAT_MRT3847_78747C.1.pep
EPWYWCSPSSGFVPLKCPLFLARYFLVCSGSEEFLLCYRGFSLLLRAFSGFPLYNLDRMLLS

SEQ ID NO: 262155 - protein, 58 aa, Glycine max
  Clone ID: PAT_MRT3847_78748C.1.pep
YFSAPIIREASPAASITHSSTIHLTGSGGMNKHSASSQLLCLLRRQHYLRCSNCDCDS

SEQ ID NO: 262156 - protein, 125 aa, Glycine max
  Clone ID: PAT_MRT3847_78749C.1.pep
CNGLLQGPHKALQWLFPNRQPIREPSLPNSTTSDFQTLIKRALVSATDLSGITKGKVRHFPDTPPSSTATRRHDAAASSSVVFFSDDIPSSQSHSTPTTTSTVTNIDDVAKSSSDANHDSKGGEK

SEQ ID NO: 262157 - protein, 40 aa, Glycine max
  Clone ID: PAT_MRT3847_7874C.1.pep
VPRGVDRRVMLLKCNPLCGKSALQIVSTGVFELSEKVNCN

SEQ ID NO: 262158 - protein, 43 aa, Glycine max
  Clone ID: PAT_MRT3847_78750C.1.pep
ECCDTIENLGPSHISSQWWCELNLPIHTRHHHHHVLVFHTHQI

SEQ ID NO: 262159 - protein, 62 aa, Glycine max
  Clone ID: PAT_MRT3847_78751C.1.pep
PGLPFCKNWGWVYFQKKKRGEKIKKKFFLFNPLKGLLLFSLAPLIRVELTIKKKLGQFIPCF

SEQ ID NO: 262160 - protein, 414 aa, Glycine max
  unsure (1)..(414): unsure at all Xaa locations
  Clone ID: PAT_MRT3847_78752C.1.pep
MQIRGSSHRLPSMGNNRSRIPPQIASVYFTSTNIIGVGGRSYVYLGRLKDGSNVAVKRLKDQGGPEADSAFFKEIELLARLHHCHLVPLLGYCSELKGKHVQRLLVFDYMANGNLRDCLDGVSGKHIDWATRVMIAIGAARGLEYLHEAAAPRILHRDVKSTNILLDENWQAKITDLGMAKNLRSDDLPSCSNSPARMXEAMGYFAPEYAIVGRALSXSEVLXFGVVLLELISGRHPIHKYTDIWQSLYKXTELFFVPRPRIIRELVSSLLKGNFPEEEVQIMAYLAKECLLLDPDTRPTMSEVVQILLSISPGKSRRRRNIPASLFQEPEDAQKQRQAPPSKFPTHSSMPIYNDHNLSVENKNKAEDALSAEYMESLILLTSKSDGSCASEEEIVDLTEPRFESFCITNGNVP

SEQ ID NO: 262161 - protein, 197 aa, Glycine max
  Clone ID: PAT_MRT3847_78753C.1.pep
QGVTFCKDEYAIVGRASLESDVFSFGVVLLELISGRHPIHKSTGKEESLVIWATSRLQDSRRALTELADPQLNGNFPEEELQIMAYLAKECLLLDPDTRPTMSEVVQILSSISPGKSRRRRTIPVSPFQVLNCSVLVWTLNMFLIFQNFWLILRLILAAIIDHPHFVIETNHILTFFYAEHVKEPEDLEKQRQAPPS

SEQ ID NO: 262162 - protein, 70 aa, Glycine max
  Clone ID: PAT_MRT3847_78754C.1.pep
KVVPPLVEKKNSMGVLRGDFKKKGPPLVDADVALSGKKRFPLNKLLFKKLATPYADSLVVHDLFCPPPSV

SEQ ID NO: 262163 - protein, 171 aa, Glycine max
  Clone ID: PAT_MRT3847_78755C.1.pep
QGVTFCKDEYAIVGRASLESDVFSFGVVLLELISGRHPIHKSTGKEESLVIWATPRLQDSRRVIRELVDPQLKGNFPEEEVQIMAYLAKECLLLDPDTRPTMSEVVQILLSISPGKSRRRRNIPASLFQEPEDAEKQRQSTPSKFPTHKEEIVDLTEPRFESFCITNGNAP

SEQ ID NO: 262164 - protein, 48 aa, Glycine max
  Clone ID: PAT_MRT3847_78756C.1.pep
LSPLNKWIDIGRACYLRGRLPISPLLSQGLAQFCRFTIHVCTFLLPPQ

SEQ ID NO: 262165 - protein, 74 aa, Glycine max
  Clone ID: PAT_MRT3847_78757C.1.pep
LKPEQLLAIYYHSPYHNKQHKYTKNKSFNLIHLSLSISSIITPSKSLNSKKKQLTFKPIKREFQKLRWQKINST

SEQ ID NO: 262166 - protein, 145 aa, Glycine max
  unsure (1)..(145): unsure at all Xaa locations
  Clone ID: PAT_MRT3847_78758C.1.pep
AKILTHRNPYPRKQKGKEGKFPIKEKAKRKRRKISNQRESKKEKKGNSQSKSGRKQKEEKENSQSKNGRKKKEKKRRKESSXKDRKKNRRNVQRGLWTGQYLNNTELSPNEQKRRKGNHDLKWSSPFDYQPKSRALVTFFFSPRT

SEQ ID NO: 262167 - protein, 160 aa, Glycine max
  unsure (1)..(160): unsure at all Xaa locations
  Clone ID: PAT_MRT3847_78759C.1.pep
MLRLAIADKDKMEITKEXPTYIXXQGALGADFAVLGRTLNAPGDWWASYGYEIPTLQKAAVRILSQPCSSLWYRWNWSTFESIHNRKRNRVELEKFSELVFVHSNLWLQTIFKRREAKSEPIIFDEIDCSCEWPSEIESSPPLMDDSWLDDFPLQCRGSP

SEQ ID NO: 262168 - protein, 74 aa, Glycine max
  Clone ID: PAT_MRT3847_7875C.1.pep
VAWAPHSSCHICTAGDDSQALIWDLSSMGQPVEGGLDPILAYTAGAEIEQLQWSSSQPDWVAIAFSTKLQILRV

SEQ ID NO: 262169 - protein, 64 aa, Glycine max
  Clone ID: PAT_MRT3847_78760C.1.pep
GAYLWHSVTFGCLVCGDATESYNDKYFFLGCYHVIFSWAAMATKTEGKVCGGRVHLKVVTSLMW

SEQ ID NO: 262170 - protein, 144 aa, Glycine max
  Clone ID: PAT_MRT3847_78761C.1.pep
MAGTIFGYPFRHFIWGHPPIFKEWSGSTALLDWLESPTAHILKINVPGFSKEDIKVQIEDGNILHIKGEVWREEPQAKEKDTVWHVAERGTGKGGFSREIELPENVKVDQIKAQVENGVLTIVVPKDATPKTPKVRNINITSRL

SEQ ID NO: 262171 - protein, 107 aa, Glycine max
  unsure (1)..(107): unsure at all Xaa locations
  Clone ID: PAT_MRT3847_78762C.1.pep
VFVCRLXRRSSGFRAFGACCFWWPVFGSLSPLLFFRCLXRSPPGPSVGFLCFLSRCAGPFGVCPFLWFCCGPLFLXRPAPLVSCPPRLVCFVXPPLPFESFPXXFXG

SEQ ID NO: 262172 - protein, 65 aa, Glycine max
  Clone ID: PAT_MRT3847_78763C.1.pep
VELWSEVVMGSGNSSGRIFKKNLMGRVRDMGGAKITNLACSGSTMFLTRKDQQCVEVWQSSSREF

SEQ ID NO: 262173 - protein, 118 aa, Glycine max
  Clone ID: PAT_MRT3847_78764C.1.pep
KLQEEEKEKRLVWWKVPFEVLRYWVNPLPLPLPVWSLSVAAAAAFLGLFFLGRRLYRMKRKTQTLKLNLALDDKKVSQLMGRVARLNEAFSVVRRVPIVRPPSLPSSSVTLRPVMSMR

SEQ ID NO: 262174 - protein, 218 aa, Glycine max
  Clone ID: PAT_MRT3847_78765C.1.pep
MDDAKREVEEWELLHPNNDDDSIVFAGPPLDSIRPDHFSLLDDNLNPNSSCSSNSSSEVDRNFDDSYVANQIFPNQSLWNGDSDSDSDIPRSEPVVEEAQEEKIQQVVEKDKRLVWWKVPFEVLRYWVNPLPLSLPLSVAAAAAFLGLFLLGRTLYRMKRKTQTFNLNLALDDKKVSQLMGRVARLNEAFSVVRRVPIARPPSLPASSVTLRPVISMR

SEQ ID NO: 262175 - protein, 84 aa, Glycine max
  unsure (1)..(84): unsure at all Xaa locations
  Clone ID: PAT_MRT3847_78766C.1.pep
LIVGFDSKILRLSSCGCGNSCSCGSNCGCNKYSFDLSDVESTTRETRVLGVGPVNAQLEGADMGVASENGGCNCGXSCTCDSCI

SEQ ID NO: 262176 - protein, 53 aa, Glycine max
  Clone ID: PAT_MRT3847_78767C.1.pep
FALEKIRDFFGTKVKFGMLSFVMLSWVANFLEVEKYLIFVLQYKVPFFFFRYI

SEQ ID NO: 262177 - protein, 90 aa, Glycine max
  unsure (1)..(90): unsure at all Xaa locations
  Clone ID: PAT_MRT3847_78768C.1.pep
TQYTPPXLPTHPHXEXTPSKNYTHTRFSIPTLSSNPTPXNPPLYLSNLFPIXNPAEMNAEGXEEPPRFEVPXELVGRRRMEGWVSAREVM

SEQ ID NO: 262178 - protein, 281 aa, Glycine max
  Clone ID: PAT_MRT3847_78769C.1.pep
MEVSASASRRRNNSICIKISLLILVIFHFSSTITAIRKDVGFQIIHPCKTTVQGRYLLSDDNGYVCNAASVNSRSRCCPQRGEKFSCHGCNLLSQCCNSYEYCVSCCLNPALISKEQVLKMKVAKPTTARTYSSVFDYCAGRCRHSSESVVHENAYISDFHHCFSLSSNSSGKNSTLTEARLSGINVVVGRQGESCNSVCKSRGQSCVPNKLVVLNSCDIIQKYMSCKGSCLASVGADQPAEVVYDAPVHLNPGSCLYTETQSILSCDGLHQHTRRLCPCA

SEQ ID NO: 262179 - protein, 75 aa, Glycine max
  Clone ID: PAT_MRT3847_7876C.1.pep
SNPAPHAPPNHILHAYTQFTPRTTSSPSHAIRPLPRKTDQDSGFVCVNPSVQSSPAMPSPLPPRSLATKSFQIYT

SEQ ID NO: 262180 - protein, 49 aa, Glycine max
  Clone ID: PAT_MRT3847_78770C.1.pep
TQEPSQAEDCHVGGSNSTPELEGIELVIHRAALRSIGHPRAEFLADVRV

SEQ ID NO: 262181 - protein, 100 aa, Glycine max
  unsure (1)..(100): unsure at all Xaa locations
  Clone ID: PAT_MRT3847_78771C.1.pep
MDIENQNTVDREIKPTHRRXMRAGAPDDDDNQWPPWLKPLMNESFVVRCKLHAESHHSECYMYCMDXLNGPICSLWHPHHKEHRAIHIRRWSYHDEIRGL

SEQ ID NO: 262182 - protein, 79 aa, Glycine max
  unsure (1)..(79): unsure at all Xaa locations
  Clone ID: PAT_MRT3847_78772C.1.pep
MFPIEVCGPTNGFQMWSXDWSNQTSWHLSFIIDNPKQSPVFDIILGISQDFEIVGNTLMPAFSVPQVSVRFYENKESSA

SEQ ID NO: 262183 - protein, 52 aa, Glycine max
  Clone ID: PAT_MRT3847_78773C.1.pep
LTELNGFFVFMYSKIVLEINLSSNPSLFFFELIFNKYFSYFVLKNSCSKLFV

SEQ ID NO: 262184 - protein, 84 aa, Glycine max
  unsure (1)..(84): unsure at all Xaa locations
  Clone ID: PAT_MRT3847_78774C.1.pep
MAMATQASLLTPPLSGLKASDRASVPWKQNSSLSFSSPKPLKFSRTIRAAAGDXPQRDQEKLGVNRSGFTPGIVANXPSPIFGG

SEQ ID NO: 262185 - protein, 71 aa, Glycine max
  Clone ID: PAT_MRT3847_78775C.1.pep
LCEQKYNKYPCTHKNRRLSSARHRKYKCCLVIISCLNSLMHRDILLDYVLYTQLYNKSHDVLSLHLTHWRE

SEQ ID NO: 262186 - protein, 89 aa, Glycine max
  Clone ID: PAT_MRT3847_78776C.1.pep
LQNRMDRKRCAHMHKTGHGTWDDYKITACLKDDCHKVKAPVIVAFAADVSNIDDDEPTSDASVDPTQLMGTSCCTCMCTVGRHILRRLN

SEQ ID NO: 262187 - protein, 113 aa, Glycine max
  unsure (1)..(113): unsure at all Xaa locations
  Clone ID: PAT_MRT3847_78777C.1.pep
MAPDPTRAVPSASVNDVRDDSGVKMKVDNEDLLNEDLVLKQKXEQYVDRGQDPVLGSQMDELWSVRQDFLASTSCMTCGTQPXKFLRRHYGTLKSYXQLLPDADLKNVLEGIL

SEQ ID NO: 262188 - protein, 47 aa, Glycine max
  Clone ID: PAT_MRT3847_78778C.1.pep
PNLQISEGLCIQNPAPCYPRASFLDLPGIENFRSTIFVSTFYPLTKK

SEQ ID NO: 262189 - protein, 134 aa, Glycine max
  Clone ID: PAT_MRT3847_78779C.1.pep
GTRFFYGLPLLFPLILFAGPAVPFSVCHAFVAAPLHSLGHGSLIGSFSRSFMSIGILHSAPERPDAVLITFRLILSSCEPAVSTAFFIGVNARLYGLAKDCLVAFAWECAVRWEGNMISNTPAPSASSGEKKRG

SEQ ID NO: 262190 - protein, 139 aa, Glycine max
  Clone ID: PAT_MRT3847_78780C.1.pep
LLGFIEKNFCSTGQQQKEEGKKNRKTKNNPAPKKRKKEGNTKTIKTKPTSPKYKHPQRIIGKGKQKQKRGKNTKTKKNQKKTNNSPKKKEKIQNKKQQLSQNKTKAENQEAETTTLKPASSQNEDHISWGMPNHYNTRT

SEQ ID NO: 262191 - protein, 70 aa, Glycine max
  Clone ID: PAT_MRT3847_78781C.1.pep
IVGEKPMPNQALMMELSPDGVVCYSPSMRPRTNTYRPHQEAKVKKKNNPFKKFDTENIVAANTMGVGVSG

SEQ ID NO: 262192 - protein, 81 aa, Glycine max
  Clone ID: PAT_MRT3847_78782C.1.pep
ESNLSYSSVASDNSTASVFTFPRALFCPHRDILSKSVSAQLTSFTNEGPLGRMNIQWISQHSRSMPTNIQANRPPETIPCL

SEQ ID NO: 262193 - protein, 155 aa, Glycine max
  Clone ID: PAT_MRT3847_78783C.1.pep
LSSAMALVLRLGSRSRRRSVLFFSTNSNSPLSSLFNDNLKQSSPSNTTRSSFRTPPNSQPGFTDDINKNLHEFRARTTAPPPQQTSFQKQTIRDYLRRNFDQLDQNQTETAKKASRQRLSVEEKLGMLRPEETKKDWFSVSERPGMMRKMEEEEE

SEQ ID NO: 262194 - protein, 58 aa, Glycine max
  Clone ID: PAT_MRT3847_78784C.1.pep
KLLGCSNHHLVHKLDQFLCDRSSVINFFCPDRIWMWLWCNYNYTKKIIEILINLCTYK

SEQ ID NO: 262195 - protein, 117 aa, Glycine max
  unsure (1)..(117): unsure at all Xaa locations
  Clone ID: PAT_MRT3847_78785C.1.pep
DIERYCHVHATTMMHVTTMDRYITYHLXEAERTFDVNCATCSFAAKNHIXSLSSILDLQGVGLKSFIRHATDLDTRLQKIDSDNSPETLNRMFLINAGSGFMILRNTVESFLDPDTT

SEQ ID NO: 262196 - protein, 40 aa, Glycine max
  unsure (1)..(40): unsure at all Xaa locations
  Clone ID: PAT_MRT3847_78786C.1.pep
PXRXXRVDPRVRTHSIHPDNIVALYLTSNKNKALRCHHVL

SEQ ID NO: 262197 - protein, 281 aa, Glycine max
  unsure (1)..(281): unsure at all Xaa locations
  Clone ID: PAT_MRT3847_78787C.1.pep
MAIGVAVSGMYTLTPTLSSFKHPTRLFSRAAFTAKLPLQFRASSTSFIDTETNPRESNVVVVEKDVSSRSSNSLACPVCYDSLTWNGDPGFSVDTITGSSFQCSTCQKTYIGNQTHLDLTATGGAKSYGESMPASTELFRVPLISFLYERGWRQTFSVWGGFPGPEKEFELMKGFLKPILGGNIIDASCASGLFSRLFAKSARSSVIVALDYSENMLQQCYEFIQQEDNFPKENFILVRXADISRLPFVSSSVXDAVHAGAALHCWPSPLAAVAEISRVLR

SEQ ID NO: 262198 - protein, 231 aa, Glycine max
  unsure (1)..(231): unsure at all Xaa locations
  Clone ID: PAT_MRT3847_78788C.1.pep
RGSSISPASAGCRRRRSRSRRWFCRCGLLLLSGLESPKSRPRPGFEIKEATPKKQKQCNCKHSKCLKLYCECFASGIYCDGCNCVNCCNNVENEAARREAVEATLERNPNAFRPKIASSPHRTRDIREDAGEILILGKHNKGCHCKKSGCLKKYCECFQANILCSENCKCMDCKNFEGSEERQALFHGDQNNNMVYIXQAANAAITGAIGSSGYSSPPISKKGKGQELLFS

SEQ ID NO: 262199 - protein, 127 aa, Glycine max
  Clone ID: PAT_MRT3847_78789C.1.pep
MGEGEAEGSDGAPKNIVSNDVVANALLPFDVPAKKLARQLDFTDFGGMPAPPQPPVILPLPPSASVRVGKPESPKSRPRPGFEIKEATPKKQKQCNCKHSKCLKLYCECFASGIYCDGCNCVNCYNN

SEQ ID NO: 262200 - protein, 56 aa, Glycine max
  Clone ID: PAT_MRT3847_7878C.1.pep
NLHEKNPHNNREKPKWNHIKERKFCNECKTIKGKGDNVDEKPCWVVIPDISFYSKV

SEQ ID NO: 262201 - protein, 80 aa, Glycine max
  Clone ID: PAT_MRT3847_78790C.1.pep
TKASAKPRPSLRYGGKKTTEGNLKGFQLDTNRWNPLELKKEKSTKDKVNWMSCIYTSDLKKIVPHFKTHPMDCSACYISS

SEQ ID NO: 262202 - protein, 171 aa, Glycine max
  unsure (1)..(171): unsure at all Xaa locations
  Clone ID: PAT_MRT3847_78791C.1.pep
MEGSGGGGGXGSGSPSTPIKQYLQKFSXLFXYYLNKSTPHTLYKXIKTFIITSIYILHIIYLPKFYIISYRPQIYLLNLLINFLSPLINPXLNPSNTPILPTKDSNKFKPFIXXLPXFKFXYSFTKPLYITFIIPFFXVDIPILLPILLFCXVLFFIVTIKAQVTHIIRDQ

SEQ ID NO: 262203 - protein, 76 aa, Glycine max
  Clone ID: PAT_MRT3847_78792C.1.pep
PEVSEKRATYNGDYHLTLSRAFFFPGASSSGEEIIIGMPLFDYVALWGSFIKYSGFVNHQSGASYKYFSLRPSGLE

SEQ ID NO: 262204 - protein, 98 aa, Glycine max
  Clone ID: PAT_MRT3847_78793C.1.pep
FQHSQPYTDSNQQAYYHPYPRPPSPRQYSRWGFGCAPFVYRLFFYSPLLVLYLPFACTLKYIAQILFLLAYLYLALGLGPKTALYLVFIWAILSRLYA

SEQ ID NO: 262205 - protein, 95 aa, Glycine max
  unsure (1)..(95): unsure at all Xaa locations
  Clone ID: PAT_MRT3847_78794C.1.pep
FGSRPSPFLSLEFSDLRGEKMQQPRPGMAPPTRGQEPXQQYQQQPPPQQQQPYVMMPPQHQAPHTMWAPIRQTSLSEQPANAHQGRTLWIGDLQY

SEQ ID NO: 262206 - protein, 82 aa, Glycine max
  unsure (1)..(82): unsure at all Xaa locations
  Clone ID: PAT_MRT3847_78795C.1.pep
DEFRIAKARSTGRFTAPDRGLKRNSPPEAMSGSVAPATRCPDSYTLLAISSLDPDAHGXRAYRARVQRSRXTRWGPDEDNVE

SEQ ID NO: 262207 - protein, 54 aa, Glycine max
  Clone ID: PAT_MRT3847_78796C.1.pep
GSRPGFSCPWVVCLRASDLVIFGVSVLAAVPLHASGLCVWFLYRGRPLFAFFFR

SEQ ID NO: 262208 - protein, 64 aa, Glycine max
  Clone ID: PAT_MRT3847_78797C.1.pep
KQRYRNRQLALLSGNMKGLYRQNTTIATKKSPILSPAIITLGGKPDLEHQHNEMHVVPPHIRPE

SEQ ID NO: 262209 - protein, 113 aa, Glycine max
  Clone ID: PAT_MRT3847_78798C.1.pep
KILDPVPGLNSIRLFFNRKIDCDVAVEDTIGKFYDDLRPPQRTFNFSFLQPVKFPRSQRLFVVRASDLEFEATVVAGKVPPKPAAPVGTPVVPSLPLHRRPRRNRKVAALRSA

SEQ ID NO: 262210 - protein, 289 aa, Glycine max
  Clone ID: PAT_MRT3847_78799C.1.pep
KQWKLVQTSGKSLFLLFSLSFSRTKLNLVYKILSLLKLMDRGLDDQKDMREKHVREREKERQGERQALCRGRAPERGRARLLERQRGSLRNREPTRDCSYDNNRIYRRSRERGRDRDRRHEEYLPRCRSISRNSSRIGSSTRQKGGNQEHNRQDAEPDQEVWTKVIRRREAKAAKKNYTQNRSLHNLSANHPNWRDKEDITSFYFTNFTDNVNEVRLWGKFKIWGDVREVFIAKRRNKEGRRFGFVRFKDVSDVKLLETHLDNIFIDDHKLFVNLPRFTRLASNVHTHT

SEQ ID NO: 262211 - protein, 164 aa, Glycine max
  Clone ID: PAT_MRT3847_7879C.1.pep
MGASSDPTQDGSDEQQKRSEIYTYEAPWHIYAMNWSVRRDKKYRLAIASLLEQYPNRVEIVQLDDSNGEIRSDPSLSFEHPYPPTKAIFIPDKDCHRPDLLATFYDFLRVWHISESAVELKSLLNGNKNSEYCGPLTSFDWNEAEPRRIGTFSIDTTCTIWDIE

SEQ ID NO: 262212 - protein, 88 aa, Glycine max
  Clone ID: PAT_MRT3847_787C.1.pep
WYPSFVSYCQQTIHLADCICQYNRAFIYTWQLLYIESYGFVSHPAQLISVIDDLFGIPPAAYSNPNCCLFRVHIEGGFESVLCYLDTI

SEQ ID NO: 262213 - protein, 414 aa, Glycine max
  Clone ID: PAT_MRT3847_78800C.1.pep
MAMASSIPNAPSAFNSQSYVGLRAPLRTFNFSSPQAAKIPRSQRLFVVRASDSEFEAAVVAGKVPPAPPVPPRPAAPVGTPVVPSLPLHRRPRRNRKSPALRSAFQETSISPANFVYPLFIHEGEEDTPIGAMPGCYRLGWRHGLVEEVAKARDVGVNSVVLFPKIPDALKSPTGDEAYNENGLVPRTIRLLKDKYPDLVIYTDVALDPYSSDGHDGIVREDGVIMNDETVHQLCKQAVAQAQAGADVVSPSDMMDGRVGALRAALDAEGFQHVSIMSYTAKYASSFYGPFREALDSNPRFGDKKTYQMNPANYREALTEMREDESEGADILLVKPGLPYLDIIRLLRDNSPLPIAAYQVSGEYAMIKAAGALKMIDEEKVMMESLMCLRRAGADIILTYSALQAARCLCGEKR

SEQ ID NO: 262214 - protein, 253 aa, Glycine max
  unsure (1)..(253): unsure at all Xaa locations
  Clone ID: PAT_MRT3847_78801C.1.pep
MASSIPNGPPSALNSQFYDDLRPPQRTFNFSFLQPVKFPRSQRLFVVRASDLEFEATVVAGKVPPKPAAPVGTPVVLSLPLHRRPRRNRKSPALRSAFQETSISPANFVYPLFIHEGEEDTPIGAMPGCYRLGWRHGLVEEDNTALYYLLFAKARDVGVNSVVLFPKIPDALKSPTGDEAYSENGLVPRTIRLLKDKYPDLVIYTDVALDPYSSDGHDGIVRXDGVIMNDETVHQLCKQAVAPGQAGADVVSP

SEQ ID NO: 262215 - protein, 59 aa, Glycine max
  Clone ID: PAT_MRT3847_78802C.1.pep
FVEQVSGEYAMIKAAGALKMIDEEKVMMESLMCLRRAGADIILTYFALQAAKCLCGEKR

SEQ ID NO: 262216 - protein, 301 aa, Glycine max
  unsure (1)..(301): unsure at all Xaa locations
  Clone ID: PAT_MRT3847_78803C.1.pep
MAMASSIPNAPSAFNSQSYVGLRAPLRTFNFSSPQAAKIPRSQRLFVVRASDSEFEAAVVAGKVPPAPPVPPRPAAPVGTPVVPSLPLHRRPRRNRKSPALRSAFQETSISPANFVYPLFIHEGEEDTPIGAMPGCYRLGWRHGLVAKARDVGVNSVVLFPKIPDALXSPTGDEAYSENGLVXPRTIRLLKDKYPDLVIYTDVALDPYSSDGHDGIVREDGVIMNDETVHQLCKQAVAQAQAGADVVSPSDMMDGRVGALRAALDAEGYQHVSIMSYTAKYASSFYGPFREALDSNPRFGD

SEQ ID NO: 262217 - protein, 45 aa, Glycine max
  unsure (1)..(45): unsure at all Xaa locations
  Clone ID: PAT_MRT3847_78804C.1.pep
IGHCFRNNGNRREKLVRGKNVIYDSKGLRMENFXLRLHFRKALCN

SEQ ID NO: 262218 - protein, 80 aa, Glycine max
  Clone ID: PAT_MRT3847_78805C.1.pep
QFPNVSHRSRHHRAVPSVVISAVEAPEKITKLGDEITGLTLEEAKNLLDFQQDKLGVSAAEYAPVAINNGAGCTSADTPA

SEQ ID NO: 262219 - protein, 54 aa, Glycine max
  Clone ID: PAT_MRT3847_78806C.1.pep
PNTLIMFIEHTYYFFALPEERFVGDAVTITKEVNTPWTGGLSTFGTGCIFSAYV

SEQ ID NO: 262220 - protein, 64 aa, Glycine max
  unsure (1)..(64): unsure at all Xaa locations
  Clone ID: PAT_MRT3847_78807C.1.pep
KKFNRFISPAPAFGGICIGVPKGLAKFMGALGSGTGKLLSVPIIHQXFKHFXKEKASELGFFGF

SEQ ID NO: 262221 - protein, 59 aa, Glycine max
  Clone ID: PAT_MRT3847_78808C.1.pep
MWGLFLTFTLFLSFTFLVPFFPIYYMTTALRIHRYKCSPPPHTFYLQRLMTYLPRTSWV

SEQ ID NO: 262222 - protein, 65 aa, Glycine max
  Clone ID: PAT_MRT3847_78809C.1.pep
SNILHPTGHYIQCCSASVHVFCSYNNYAINMVEKHRQNMNASQRRDEAADAVGRSRDISGSGILQ

SEQ ID NO: 262223 - protein, 72 aa, Glycine max
  Clone ID: PAT_MRT3847_7880C.1.pep
HSEVNRPKPDSYKHLRFKWSRYTTACLDTIVQHNACFTWTGQNPRVRPNMGLTLHRVQDHVLYKLYPLRDTS

SEQ ID NO: 262224 - protein, 123 aa, Glycine max
  Clone ID: PAT_MRT3847_78810C.1.pep
MTHRQQNEGGGGAVTPNATTTGHLQEQMANAMERVGEAAHNVGQRVTDFFQGDPFGTLIGRKIELATDATKMATENWGLNMEICDFINGTNDGPRDAVRAIKKRLQTQMGKNNAIVMYTLTVL

SEQ ID NO: 262225 - protein, 122 aa, Glycine max
  unsure (1)..(122): unsure at all Xaa locations
  Clone ID: PAT_MRT3847_78811C.1.pep
MRDLGPQASCRVDEQPVNITEGNYVKELVTGWAYDACTYXNMVGDGCAYKDAMDDEIVGFTVAGSKGRLGYASLIPYVEAYVLAQGAEGYFDLFPVEVECQEGVAHIGELQCGVYVTLTTET

SEQ ID NO: 262226 - protein, 38 aa, Glycine max
  Clone ID: PAT_MRT3847_78812C.1.pep
RSQRRNLVRERHRRQRRETELENERGELELNSRLNIFF

SEQ ID NO: 262227 - protein, 82 aa, Glycine max
  Clone ID: PAT_MRT3847_78813C.1.pep
GESGEVTGTGGGGPAVGTVVKVDTTKGSTVDGVKGPVDGGRKHKLGLGLNARDRLSSHVTTINWNLGLCLGSRNFGFWGKNG

SEQ ID NO: 262228 - protein, 75 aa, Glycine max
  Clone ID: PAT_MRT3847_78814C.1.pep
FPFSSVQNFIFSCPKAKVVCGMFSLSKKKPGYFYLSTVPFKGSRWVEIPGCSWTPFLWAPPFIKVFSFAPVFSPI

SEQ ID NO: 262229 - protein, 40 aa, Glycine max
  Clone ID: PAT_MRT3847_78815C.1.pep
MKGRVQMRVLIAGWGMWNNGGVHWLLSGPEPLFDFVNKPM

SEQ ID NO: 262230 - protein, 84 aa, Glycine max
  Clone ID: PAT_MRT3847_78816C.1.pep
IGPANPLHLTVWKTRGPHPFSNGALPRILLNTLACPSSIRGNQLLVTTFLCYSNCRTDIWRVPRGQLCYKQTLVEQNIAPGLGP

SEQ ID NO: 262231 - protein, 243 aa, Glycine max
  Clone ID: PAT_MRT3847_78817C.1.pep
MSSMMVKGKVVLIRKYVLQTISNAKELVGNGFNLIGSSVEYDITKSVFFNLISRTKSSKDNYSKDGKEACLENNASVLRSLGGKEEEFDIYFEWDATEMGIPGAFYVKNHMKDEFFLVSMTLEYPLPTCDRHKDKNSIIHFLCNSWVHNHGCYKTHHRIFFDNNPYLPGNQTPEALPKYREEELDNLRGDGTGERKEWDRIYDYDVYNDLGYLNSDEKDDHPILGGTLYPYPRRGRTGRKLLH

SEQ ID NO: 262232 - protein, 87 aa, Glycine max
  Clone ID: PAT_MRT3847_78818C.1.pep
DCLSWDFVLRLRQHLATVVPRTGFLIDGGKNAFIYLCFNVLCLSEPLHYNFVKRSEFLVFAALCCLWFIKCHLSICSVQFLAWYAFS

SEQ ID NO: 262233 - protein, 51 aa, Glycine max
  Clone ID: PAT_MRT3847_78819C.1.pep
LDYLTRCYCLFFGFFRLLLFLSLRGFFKKTLYFSHKVLLAFLPKEKNILFA

SEQ ID NO: 262234 - protein, 101 aa, Glycine max
  unsure (1)..(101): unsure at all Xaa locations
  Clone ID: PAT_MRT3847_7881C.1.pep
RRHAYVSSEFSRMLQIXLXKXVVIXXIXXXXXKYXRXLGAXYLRXTGPDXDXYRYLEXLXNXXRKXRRXLXDGQFXLTHXDGXIDXXLXXXXACQXALPRV

SEQ ID NO: 262235 - protein, 394 aa, Glycine max
  unsure (1)..(394): unsure at all Xaa locations
  Clone ID: PAT_MRT3847_78820C.1.pep
MLGDGGETPSRYELLSMVKKHSNLIGKTVVEEQDASDIEMDMRFWHDVFDLYFVCGKESRGRQDDDLVFFVRKLGSHGSGSNNKTESVDPYFVRRWAPKLSDLVDETSIDVDWRRSFYLNLIAHTSFSVTVAICSHQDLLNHRAGEDTPLSPIYKVVKTDYASPAPVNFQLDSKKEVETTAAYPDICFAIDDFDSTFDAVVLTEKDHCYCVVLNAHDGAAFPSEKVSNDCSTSDSSSLQVHTISAKKKDTXLTLCSRCVSYQMVRDAYDAGRSSLGRLCAVVHASGKTDRIYMKGPGGRGEVEVAVSGVADQSHEDSGPFSPVISKKGFGLGVIVRKAASAASVAARHAYAAASASSPTFDELIPLKCSLMSISLPWEYIAYDLLFKGAPPVNM

SEQ ID NO: 262236 - protein, 106 aa, Glycine max
  Clone ID: PAT_MRT3847_78821C.1.pep
SFCRPPFLPLRVSPPFWLPPFFGRAVSPLRGGAAPSIFSYFFFWPGVPPLLFSFFLGSSLFWPAALFLSAPGVLLSRACLGFPLALACVSIRHSQTNKTHKPQIVS

SEQ ID NO: 262237 - protein, 61 aa, Glycine max
  Clone ID: PAT_MRT3847_78822C.1.pep
IVNTHHPSSVHKSFVLKHNRRISIILLSFPFFIFCNIRNYAPCDALNMDHSSLAFSYLLTL

SEQ ID NO: 262238 - protein, 52 aa, Glycine max
  Clone ID: PAT_MRT3847_78823C.1.pep
AQLREFFILMLLVMRARSLLYITNFCYKKKKKKKGRGLSIQAETQACVVATS

SEQ ID NO: 262239 - protein, 127 aa, Glycine max
  unsure (1)..(127): unsure at all Xaa locations
  Clone ID: PAT_MRT3847_78824C.1.pep
HICVNTLTGNSITLXVESSDTIYDVRSNIHDNDGIPPDLRRLIFAGNQLEHGRALADYYIQRESTLYLVLLLRGGMQIFVKTLTGXTITLEVESSDPIDHCEAMIDDMEGIPPDLQRLIFAGKQLED

SEQ ID NO: 262240 - protein, 54 aa, Glycine max
  Clone ID: PAT_MRT3847_78825C.1.pep
IYLAPTSLIGGGQLNSNKQSFISLPQNLSRKFRFNMILPGGYLYIMAYYHPIAS

SEQ ID NO: 262241 - protein, 32 aa, Glycine max
  Clone ID: PAT_MRT3847_78826C.1.pep
HEDSPSYLPSLDGSTTIIVSHIISKRCLQWNK

SEQ ID NO: 262242 - protein, 92 aa, Glycine max
  Clone ID: PAT_MRT3847_78827C.1.pep
NKKLYFDHLTSTPNLARASAVLFASRRMWHQEYVSPHTESFADFTNWKQLLENSQTPSIISIAYLKSDSTYKFVKPLSQASLTPIVIAHISA

SEQ ID NO: 262243 - protein, 136 aa, Glycine max
  unsure (1)..(136): unsure at all Xaa locations
  Clone ID: PAT_MRT3847_78828C.1.pep
LIKVLAKIMNHVRIPIDPDDESWKERCSKRMKELENRQFPSQNAASQPELVHKELVGKRKVMTSELYEAVEKGDVENFVDALQRTCDERRTPLHAIFDQVTCAGDSLLHVAADHKGRERIAELIVITXLSFLLGET

SEQ ID NO: 262244 - protein, 222 aa, Glycine max
  unsure (1)..(222): unsure at all Xaa locations
  Clone ID: PAT_MRT3847_78829C.1.pep
MATMLSYSPPRFKIAVDAHHDPLLPFLRSIKKALEASDDSASNLSNLLKDCIRNFKNNDRYRNDVRFLKIWLLYMGVSDDFESVFKEMLDSNVCTNSSSLYVWSASFFELKGRLHDALTIYQLGICRNAEPIEWLKKAHALFLNRISEIQNAASTQKVDDKESKKFEDNGINPWGTSTMDSLLKKIYPLIMKFDGYRSSTKPYXXKVALSTFEXSSRNKVIE

SEQ ID NO: 262245 - protein, 102 aa, Glycine max
  Clone ID: PAT_MRT3847_7882C.1.pep
PRVRAAPPQELWCVAKINAEDAALQAALDWACGAGGADCGPIQRGGPCYDPTSVQNTASFSFNDYFLKHGMTDDSCNFNNNAAVTSLNPSQSNTQTPLSQCG

SEQ ID NO: 262246 - protein, 88 aa, Glycine max
  Clone ID: PAT_MRT3847_78830C.1.pep
EEKKGRKKGTIQANINADPYRTPHERTSDQHLLHPPRLPQNTRPKQRQLPIQILRKPPQKWERNNAPDRDSPRALPRTPRPRVNHPSL

SEQ ID NO: 262247 - protein, 195 aa, Glycine max
  unsure (1)..(195): unsure at all Xaa locations
  Clone ID: PAT_MRT3847_78831C.1.pep
MSLFHCHAFHHRMATLSPFSPFNSKPLFAFLPNPSFLTHHQQQQHPYPLTKTTTTDLNNNRPLSLSTLPRKLLCKPPQGKYVREDYLVKKLSAQEIQELVKGERKVPLIIDFFATWCGPCILMAQELETLAVEYQNKALIVKVDTDEEYEFARDMQVRGLPTVFFISXPDPNKEAIRTEGLVPIQMMRDIIDKDM

SEQ ID NO: 262248 - protein, 558 aa, Glycine max
  Clone ID: PAT_MRT3847_78832C.1.pep
MAGRRRTIPQGCYFSYSRIRPVLDAMENLRRLNITKEGIQFPSIVVVGDQSSGKSSVLESLAGISLPRGQGICTRVPLVMRLQNHPLPTPELVLEFNGKTISTDEANVSQAINAATEELAGHGKGISNNPLTLLVKKNGVPDLSMVDLPGITRVPVHGQPENIYDQIKDMIMEYIKPKESIILNVLSASVDFTTCESIRMSQSVDKAGLRTLAVVTKADKSPEGLLEKVNADEVNIGLGYVCVRNRIGDESYEDARVKEQRLFEFHPLLSKIDKSIVQAMSISKTLPEIVKKINEKLANNLSELEKLPTNLASVADAMTAFMHIIGLTKESLRKIILRGESDEYPEDKNMYCTARLVEMLDSYSNDLYRCAESDASKNFLMQEIKVLDEAKWIGLPNFMPRTAFLSILQGKEYNKLISQQDAFLNDVLNNPDKPSHVSLEGVGKIEVGHLRQYPSLLTQAFDLKVRMISYWKIVQKRLIDTIALHLMLSINNLVNKDLKNEIVHDLLSPSGGGIERLLEESPSISGKREKLQRSVNVHKESKETVANIIDRIGSCSDY

SEQ ID NO: 262249 - protein, 595 aa, Glycine max
  Clone ID: PAT_MRT3847_78833C.1.pep
MAGRRRTIPQGCYFSYSRIRPVLDAMENLRRLNITKEGIQFPSIVVVGDQSSGKSSVLESLAGISLPRGQGICTRVPLVMRLQNHPLPTPELVLEFNGKTISTDEANVSQAINAATEELAGHGKGISNNPLTLLVKKNGVPDLSMVDLPGITRVPVHGQPENIYDQIKDMIMEYIKPKESIILNVLSASVDFTTCESIRMSQSVDKAGLRTLAVVTKADKSPEGLLEKVNADEVNIGLGYVCVRNRIGDESYEDARVKEQRLFEFHPLLSKIDKSIAMSISKTLPEIVKKINEKLANNLSELEKLPTNLASVADAMTAFMHIIGLTKESLRKIILRGESDEYPEDKNMYCTARLVEMLDSYSNDLYRCAESDASKNFLMQEIKVLDEAKWIGLPNFMPRTAFLSILQGKVNGIASKPIGLVENVWNYLEDAIEMEKHTDYTCNPEFVQEYNKLISQQDAFLNDVLNNPDKPSHVSLEGVGKIEVGHLRQYPSLLTQAFDLKVRMISYWKIVQKRLIDTIALHLMLSINNLVNKDLKNEIVHDLLSPSGGGIERLLEESPSISGKREKLQRSVNVHKESKETVANIIDRIGSCSDY

SEQ ID NO: 262250 - protein, 53 aa, Glycine max
  Clone ID: PAT_MRT3847_78834C.1.pep
MAPPPGPYSGTSTLALVARASAFSFGLVYGSIKLKYLKAKAKSHQKAQEKAHH

SEQ ID NO: 262251 - protein, 94 aa, Glycine max
  Clone ID: PAT_MRT3847_78835C.1.pep
SKKELPSAFAFTNHSKVYEHGTFEFDDCLNVYTCTGRTCTFKTLTNPKILDKINGETFKRIASKMNCTINCNYTFLYTQKNRPFKIITWPKLLG

SEQ ID NO: 262252 - protein, 196 aa, Glycine max
  Clone ID: PAT_MRT3847_78836C.1.pep
PFVGGRRFLWPCSSSLRTRPLSLKKRLKAPRFAESIKRVTDPRLTHDLIAIFFFLFLFFFVFCYKHGTQKKTWYSLFKQGKILNIFSALNSMLQDYPKLKPEKKKKMGENMIQFLVMNYFSILLHQWTDNNTGDLSLLSMMSLLLSFLMRFGFCLEVLELNGSINKAKGESGSSSDQSEGAGTRIRSRWWCHYERE

SEQ ID NO: 262253 - protein, 243 aa, Glycine max
  unsure (1)..(243): unsure at all Xaa locations
  Clone ID: PAT_MRT3847_78837C.1.pep
YNATLNVYFGVPPEGKLLDWRKRCGIIEGIGRGLLYLHRDSRLKIIHRDLKASNVLLDEALNPKISDFGMARIFGGTEDQANTNRVVGTYGYMSPEYAMQGLISEKSDVFSFGVLVLEIVSGRRNSRFYDDENGLGLLGFAWIQWKEGNILSLIDXIYDVTHHKEILRCIHIGLLCMQXLTVDRPTMAAVICMFNREVVFLPSPSQPALIQSHNMLNSVSVSSKESHRFCSINAISITDIGGR

SEQ ID NO: 262254 - protein, 71 aa, Glycine max
  Clone ID: PAT_MRT3847_78838C.1.pep
EISSGLPGKIRPPRKYRPRKKNLHRRKKNQRALRRTAFRAQARCTGVQDDTILTPRVTETSKGSFAMSMLA

SEQ ID NO: 262255 - protein, 80 aa, Glycine max
  Clone ID: PAT_MRT3847_78839C.1.pep
NIIFVTMSTTYLKRLAFLIVYLLFILHLHLSTAQLNLNASVRTINDNYLVYFELLYNTYTYQESIVNVYLNNYNYNHTSN

SEQ ID NO: 262256 - protein, 54 aa, Glycine max
  Clone ID: PAT_MRT3847_7883C.1.pep
IVRMMSIIFFTLFSILTYKKNDDDKLNNSLLSLFYDEMLLDFLKILIKELNKFP

SEQ ID NO: 262257 - protein, 57 aa, Glycine max
  Clone ID: PAT_MRT3847_78840C.1.pep
VREPTSSHFHCCFFFGGCLNLRPQLLLESHLNCSSSFPALVAASLGVALIAASRLVI

SEQ ID NO: 262258 - protein, 103 aa, Glycine max
  Clone ID: PAT_MRT3847_78841C.1.pep
MATIRILGTLKEGDLHGKTVLVKVHLNVTLDDTLNISDDTKVRAAVPTIKYFTRNGPKVILSSHLRRSRCLTPKYSLNPLVPTLSQPPGTEVTIANEPNWEEI

SEQ ID NO: 262259 - protein, 124 aa, Glycine max
  Clone ID: PAT_MRT3847_78842C.1.pep
QQQSGELPVIPHNLLFATSITQLSYSLQGCGAILAHSYAPKPDIILPGYSTSNSTPTTNTMHEIFPNNATEQPDLIILYFGGNDTLITHSISLGQHVPVQQYIENMTKIGTHLNSLLKKTTLIF

SEQ ID NO: 262260 - protein, 68 aa, Glycine max
  Clone ID: PAT_MRT3847_78843C.1.pep
VHVLKGCFSLFLKRKIFLCCKKRESYLGGGGVCYVRKLKIKNKREKKGKKDRKKIKPRKRKVIEKKKK

SEQ ID NO: 262261 - protein, 46 aa, Glycine max
  Clone ID: PAT_MRT3847_78844C.1.pep
FPCWPAQDSRIYKKPVGNPIMLMLILCLKMKGINGPLPFEYVCYRD

SEQ ID NO: 262262 - protein, 91 aa, Glycine max
  unsure (1)..(91): unsure at all Xaa locations
  Clone ID: PAT_MRT3847_78845C.1.pep
FLGSTPXNXSSXXSPSQSSXHHPMXXSXVQHYLVKADSHLQXEXSXXMTLXLXGTPPNEXXXGAXXWRXFTXLXXIXXISXLEPNSELTYA

SEQ ID NO: 262263 - protein, 164 aa, Glycine max
  Clone ID: PAT_MRT3847_78846C.1.pep
RDIQARRLPYVSMASQAHGGSFSKGSWIGEMKQASDKTVIISEILDPRKKNLISMSKISDYVLSNELVSMALAMVAEDRQINDVLEELFAEEGNEMHIRKADLYLCEGEELNFYEIMLRARQRREIVIGYRLANAERAVINPPVKTDRRKWSLKDVFVVITEKE

SEQ ID NO: 262264 - protein, 96 aa, Glycine max
  unsure (1)..(96): unsure at all Xaa locations
  Clone ID: PAT_MRT3847_78847C.1.pep
SECEPFTHVNLHTILLNKIDLIRFHVLYMFFFQLYACWDRGCDREKDKEFLHKMRLFRNWAGHDEQYLVTQNLWDNLMGDMDGKMNITVNPXYVAP

SEQ ID NO: 262265 - protein, 50 aa, Glycine max
  Clone ID: PAT_MRT3847_78848C.1.pep
KKGEPSGAEYIQKIDHAEEMGNIIGIIQGIFPQQTQPNQGGLKLRFSIDT

SEQ ID NO: 262266 - protein, 59 aa, Glycine max
  Clone ID: PAT_MRT3847_78849C.1.pep
IPVEMYTIHMRKGVLYMSPNLQHEVNTLYCCPLLESSDQGVQARLLFILRLCIELNVLI

SEQ ID NO: 262267 - protein, 98 aa, Glycine max
  Clone ID: PAT_MRT3847_7884C.1.pep
MAEEKQGQGTNPPQEQPNEPLPRDYNQLLGTNNPTKTSWPELVGVTAEEAEKKIKEEMGGAEIQVVPPGYFVTADFKPKRVRLYVDESNKVTRAPGIG

SEQ ID NO: 262268 - protein, 73 aa, Glycine max
  unsure (1)..(73): unsure at all Xaa locations
  Clone ID: PAT_MRT3847_78850C.1.pep
KIFVDAFWNSXKPSFPTHLLQLKTSWAVVCEGWDLEPPNFRAGKTPLXFAKKGKNIISHCGGVKKGPLEGNFK

SEQ ID NO: 262269 - protein, 63 aa, Glycine max
  Clone ID: PAT_MRT3847_78851C.1.pep
ASSSYLDRTVQGPVTENDGVDKAQNLRKPMGKGCESRVRCSVCEAAISLAKSQGNHPKSSSGA

SEQ ID NO: 262270 - protein, 70 aa, Glycine max
  Clone ID: PAT_MRT3847_78852C.1.pep
LRKWSCTCSVFHIRKLPRTSCCNCTGMIMFSFYLVTPLMLLTYTYTPIVSLCLVYLSNTTLFFEFNRVST

SEQ ID NO: 262271 - protein, 83 aa, Glycine max
  Clone ID: PAT_MRT3847_78853C.1.pep
SLLVFYIILISISHTIRSSSKWNQQISILMAVNFKQVAHILSGSTDISWEIKLLISEARSPGTFAITYLTKHISYFSFTFVVC

SEQ ID NO: 262272 - protein, 42 aa, Glycine max
  Clone ID: PAT_MRT3847_78854C.1.pep
KNMPPFMVPKLVKFVEDLPKTSTGKIKKFELRDKVKNTVSRL

SEQ ID NO: 262273 - protein, 388 aa, Glycine max
  unsure (1)..(388): unsure at all Xaa locations
  Clone ID: PAT_MRT3847_78855C.1.pep
RALDSVVEAMKEDEKSVLSVLGRSNIAALVQLLTATSPRIREKTVTVISSLAESGSCENWLVSEGVLPPLIRLVESGSTVGKEKATISLQRLSMSAETARAIVGHSGVRPLVELCQIGDSVSQAAAACTLKNISAVPEVRQALAEEGIVRVMINLLNFGILLGLNSDAAISLPNLTASNEXRRDYVGYDQGVRSLLSVIDGRLPQESAVGALRNLVGSKEECHMVSLGLIPRVAHVLKSPXESAQQAAAAAICCVCSSTDMKKMVGEAGCIPLLVKMLEAKSNSVREVAAQAIASLMVVSQNRREVKKDDKSVPNLVQLLDQSPQNTAKKYAVTCLGSLSSCKKCKKLMISYGAIGYLKKLTEMDIPGAKKLHERLERGKFRSLFSKK

SEQ ID NO: 262274 - protein, 97 aa, Glycine max
  unsure (1)..(97): unsure at all Xaa locations
  Clone ID: PAT_MRT3847_78856C.1.pep
MAKEAQGLKGFLEDYXMQKMSQSLTRGSAFHPRLRDRQKKMEAHVRVSKRDKELLGATRPRFMAEGHPDPDAXLQRMELEAERRRHPLIKQEPESEE

SEQ ID NO: 262275 - protein, 246 aa, Glycine max
  unsure (1)..(246): unsure at all Xaa locations
  Clone ID: PAT_MRT3847_78857C.1.pep
MKHSDGNSSTQPLLTARADEPHQIHPHPAETTAVFSAGTPDIAPITGAGDFYREFMVESKKLWYLAGPAIFSFVSKPPLGAFTQIFAGHVGTIDLAAVSVENSLIAGFSYGIMLGMGSALETLCGQAVGAGKLDMLGVYMQRSWVLLLSTACVLCPLYIFAGQVLKLIGQDTEISEAAGTFAIWMIPQLFAYALNFPVAKFLQAQSKVXVIAAIAGMAMVLHPVLSWLLMVKLEWGLXGAXVVLNG

SEQ ID NO: 262276 - protein, 238 aa, Glycine max
  Clone ID: PAT_MRT3847_78858C.1.pep
MEGGERGVNPNNYELQVSFANTPQAIHEMGFVQFEENQVLSFLAPSAQSQSSQLSQSLNACNGGSNTAVAAATTTATATTSGSGATIGFSHNDLVSRTCWYNNEQVRTLDPKAVNDENCTGNTSDGGNNSWWRSAGSEKNTMKVRRKLREPRFCFGIRLEVDVLDDGYKWRKYGQKVVKNSLHPRSYYRCTHNNCRVKKRVERLSEDCRMVITTYEGRHNHSPCDDSNSSEHECFTSF

SEQ ID NO: 262277 - protein, 205 aa, Glycine max
  Clone ID: PAT_MRT3847_78859C.1.pep
MSVPPPSTAAMWTPFTAAQWHELEHQALIFKYLKAGLSVPPDLLLPIRKSLQLISSHPSMGYYGKKIDPEPGRCRRTDGKKWRCSRDAHPDSKYCDRHMIRRRYRSRKPVESSQTHSSSSASAASSNSNPVAAAGGGGSVANVSATAAKNLHTLPLHINGAREGFTFTLGNNTSTNTNTNTNTLPHLHMNPLTLSADNTKKTYRF

SEQ ID NO: 262278 - protein, 167 aa, Glycine max
  Clone ID: PAT_MRT3847_7885C.1.pep
MNMKSFAAVAKLFKCCAHEYETHQEMAAAALAYKCMEVAYMRVVYCKNSSTNRDRHELQSTLQLVFQGESPSSSASDVDNLNNQTAADKATLPRGTNTHVAINQVISARTRPNLVRLLDFTQDIHFAMEACTKCQSTFVLANVIMHEAWKKDCIASITSAFDFSFQD

SEQ ID NO: 262279 - protein, 95 aa, Glycine max
  unsure (1)..(95): unsure at all Xaa locations
  Clone ID: PAT_MRT3847_78860C.1.pep
XDXYVXSEXXXXGXGXXCXGLSXLXXXXXXXXXGFCXRXXCFLRXKKXKXXWHVVXXXXGVXXXYEXXXCRXXVCXXXXXLVDXXXXAXFXLVXV

SEQ ID NO: 262280 - protein, 88 aa, Glycine max
  Clone ID: PAT_MRT3847_78861C.1.pep
QKGLTNCVLLSGQVYQNGGLQIGSSRVVDQPKCLHNCIGDVIRIKQLGNERFGIIKRFDKYSRKHSIMFEDGCVEIYDMSKEDWELVR

SEQ ID NO: 262281 - protein, 89 aa, Glycine max
  Clone ID: PAT_MRT3847_78862C.1.pep
WDMCAIAGALGSLVFGPVSREQIETDALILVLSAWHCCFSLASELVTSHLDSGGEQVHNYFGSLFCGAFSSLVKEGLVGPPGYAAAVLG

SEQ ID NO: 262282 - protein, 348 aa, Glycine max
  unsure (1)..(348): unsure at all Xaa locations
  Clone ID: PAT_MRT3847_78863C.1.pep
MPAMKKNPELTCIGSVFNMLGKELGEPVDFELPDSFNKSKPMQYTYIKRNIYLTKKVKRSRFDDDGIFCSCTPSPGSTSVCGRDCHCGMLLSSCSSGCKCGSSCLNKPIQNRPVKKMKLVKTEKCGSGIVADEDIKLGEFVIEYVGEVVKGVLXNFGHGILVMVECMIFSYEYINHLVVKSFSSLLITSWSRFFKDPSLPFSHIIFHTCGNXFIPLLSPMXQGEHLTYDYQFVQFGADQDCHCGAAECRRKLGVRPTKSKLSSDAALKLVAYQVYQNGGLQIGSSRVVDQPKCLHNCIGEVIRIKHLENERFGIIKRFDKYSRKHSIMFEDGCVEIYDMSKEDFELVR

SEQ ID NO: 262283 - protein, 169 aa, Glycine max
  Clone ID: PAT_MRT3847_78864C.1.pep
MKRVCRFSSDATTRAALLLLMQSHHNFHGFSNPKTTFSPSFATALSHHRNVHTVPNIYSDITPLFTAKSCSSPKQDLINKVTILKNELIRDSCDSARVQTILDDSFDTLFRRHPNGSALLKLMNQLNSNPSLALQVFSWRRKRSNAENPMDAYEYSKGIKAAGRSGNVD

SEQ ID NO: 262284 - protein, 75 aa, Glycine max
  unsure (1)..(75): unsure at all Xaa locations
  Clone ID: PAT_MRT3847_78865C.1.pep
FDLLCTKGSSTNFQSISTVWRIXFQFIYSXLNHSKLMLQPHPLXQIKNHNSTTFSISYNHPHYFSSNHQNTYRTS

SEQ ID NO: 262285 - protein, 49 aa, Glycine max
  Clone ID: PAT_MRT3847_78866C.1.pep
IAYFNFMRYDIFQTATKSEPNQPFQAREHQGVNLPWCCQDMAYALLIEF

SEQ ID NO: 262286 - protein, 46 aa, Glycine max
  Clone ID: PAT_MRT3847_78867C.1.pep
SRCLYLRQNYSNHVQDVLDLMELNASTLLLTSPRDLTEDRNLYYTY

SEQ ID NO: 262287 - protein, 73 aa, Glycine max
  Clone ID: PAT_MRT3847_78868C.1.pep
MHNNPLRLHCQRRYVFHSGQDPLGTLLVCYAPTTKVPRSHNPLVLIFSRLIHTMQCIRLEQRCVKIMVNQRHV

SEQ ID NO: 262288 - protein, 59 aa, Glycine max
  Clone ID: PAT_MRT3847_78869C.1.pep
RFGKTSFLRRGDQGNIFWKENFFFRELTPPPSRVIKIFKTYIKAFIISPFFKRHPPARK

SEQ ID NO: 262289 - protein, 90 aa, Glycine max
  unsure (1)..(90): unsure at all Xaa locations
  Clone ID: PAT_MRT3847_7886C.1.pep
IGIXSIXXIXXXXXXKQKXKNXXYXXXXXXIXSXXXLQSXXXXSNRFRREIMXXXGXEXXPXHXXXIXXXIXFCXXDXXSXAXXXXSGNX

SEQ ID NO: 262290 - protein, 54 aa, Glycine max
  Clone ID: PAT_MRT3847_78870C.1.pep
NGTAAVNTTLRVHGGTGVTTFQSSRSTCSKLTCPFMRPHRSSIMSPNFNSLGVV

SEQ ID NO: 262291 - protein, 128 aa, Glycine max
  Clone ID: PAT_MRT3847_78871C.1.pep
MSWAGPEDIYLSTSLASYLDKKLLVLLRDGRKLMGTLRSFDQFANAVLEGACERVIVGDLYCDIPLGLYVIRGENVVLIGELDLEREELPEHMTRVSTAEIKRAQKAEREASDLKGTMRKRMEFLDFD

SEQ ID NO: 262292 - protein, 122 aa, Glycine max
  unsure (1)..(122): unsure at all Xaa locations
  Clone ID: PAT_MRT3847_78872C.1.pep
SNFTGVSGQLHFNSDRSIVSGGYDIINVNQMGISGVGFWSNNSXFSVVPPTALTKRXYNRFSQDHNLGKVIWPGGVTDQPRGCVIADNTKPLKIVMPXRARYVEFVTQLPHGDLINASCINV

SEQ ID NO: 262293 - protein, 125 aa, Glycine max
  Clone ID: PAT_MRT3847_78873C.1.pep
MSWAGPEDIYLSTSLASYLDKKLLVLLRDGRKLMGTLRSFDQFANAVLEGACERVIVGDLYCDIPLGLYVIRGENVVLIGELDLEREELPEHMTRVSTAEIKRAQKAEREALDLKGTMRKKWNSL

SEQ ID NO: 262294 - protein, 92 aa, Glycine max
  Clone ID: PAT_MRT3847_78874C.1.pep
RDSDIRFSTQPFSQKTLDNSVHLCNNSIQKHLENSCHRHPLLPPDNMWSSQRFQAHLQEMGAPNAWSTIIVPGMKDAVIHALQTSQDTVQCR

SEQ ID NO: 262295 - protein, 79 aa, Glycine max
  unsure (1)..(79): unsure at all Xaa locations
  Clone ID: PAT_MRT3847_78875C.1.pep
FTVQENMLWMLQCRSGKLTGKGAFKIAVHMVNQGLVDIDXASRCYXPHDFDSLLHPHCDDASTYKDEMIALGLDHSPVA

SEQ ID NO: 262296 - protein, 69 aa, Glycine max
  Clone ID: PAT_MRT3847_78876C.1.pep
IEQNKPFYNLILQCYVRYHIIPSIVLVTMLVYLKQHHISLPKICHQISCSKSPFETPVLPSIRINIVTF

SEQ ID NO: 262297 - protein, 57 aa, Glycine max
  Clone ID: PAT_MRT3847_78877C.1.pep
IKHILRSCWSQVCMAMHVLVSRLLNITKVFSSISMRETLLLSYVWISPKSKKEDFGC

SEQ ID NO: 262298 - protein, 60 aa, Glycine max
  Clone ID: PAT_MRT3847_78878C.1.pep
TTLPCKYYVCIEHIHLLHGVDNALKCPLTNFITNPRSNYTRTSFCDQYHDYMTDYTEPAP

SEQ ID NO: 262299 - protein, 62 aa, Glycine max
  Clone ID: PAT_MRT3847_78879C.1.pep
SQRRYRLAPLEHVQCFGRNKTALAVTLRKHEHSHITIDCCSSDLVDHDIYLFNASDSFLLSG

SEQ ID NO: 262300 - protein, 285 aa, Glycine max
  Clone ID: PAT_MRT3847_7887C.1.pep
RNSRLDPRVRRNSSPYFVTFSLLALSSASTPTSCQEEKGSDCDSPIESNVCDDLSLTKERTFDLKPVSPNSSGQGLPYAPEGWPNPSDVWGWKVLKRTSNAGHFCDRHLYLPKSLQISSHKRQSFRTKRDVERYIESNFPNMGIEAFFGLFSWKIPATKKTPRKVKSLETEEAGNATEQIGTKLKRKIQICSQPTRKSSKLLHLRPHIVPDQDANIVIDLCDQDDEEARVDSTENSKGISDSEEGSAMQTAVEKDPKAINVLENLDTLENSPDHATLDNEIIQYC

SEQ ID NO: 262301 - protein, 171 aa, Glycine max
  Clone ID: PAT_MRT3847_78880C.1.pep
SFCMYLKKDYFTTTLICTFVCRHPTLHGIPRENRMLHMSLTEACNYQKNMLALDSESKPLDLPSSIENLTQNLGPTMEGLRDAVDEAPKDQPCEASTQVHLEALKEASLEKPKEVFTEFPQEDQLKLQIQMKFPRKLILYPIAMKERGPLKSRSSNLLPPVGLILIIKWLN

SEQ ID NO: 262302 - protein, 101 aa, Glycine max
  Clone ID: PAT_MRT3847_78881C.1.pep
SKGVKAMAEKIYWCCVVVFVELVLVLSGCESSTNEFSVPMLMQMNINKACDEIYVVREGETLQTISNKCGDPYIVEENPHIEDPDDCFRISTTTTTPLTNR

SEQ ID NO: 262303 - protein, 109 aa, Glycine max
  Clone ID: PAT_MRT3847_78882C.1.pep
ALARISMKLKVVAPPILTYSVWIGGFIGASISSFQHMWRQTPGSFESGPSFVHIKCLYPVSIDRASQGHEVDLRDLFVMQCIAVCNPLVLALGNQSSYCLGGVITYLPR

SEQ ID NO: 262304 - protein, 77 aa, Glycine max
  unsure (1)..(77): unsure at all Xaa locations
  Clone ID: PAT_MRT3847_78883C.1.pep
GAQGLVLTSVLKLRGQAQAPLRVICTARNLYGVTSLEPPFQGAHRLMWAKIGPVGAVVAXAILIAIVCYITQTRRKK

SEQ ID NO: 262305 - protein, 335 aa, Glycine max
  Clone ID: PAT_MRT3847_78884C.1.pep
GKCGKRCEVCESERRELREMELRELGRTGLKLSTVGFGASPLGNVFGDVSEEQANASVRLAFQSGINFFDTSPYYGGTLSEKVLGKALKALGAPRNSYVVATKCGRYKEGFDFSAERVTRSIEESLERLQLDYVDILQCHDIEFGSLDQVVNETIPALVKLKEAGKARFIGITGLPLGIFSYVLDRVPPGTLDVVLSYCHYCVNDTSLGELVPYLKTKGVGIINASPLSMGLLTESGPPEWHPASLELKSACQAAATHCKEKGKNISKLALQYSLLNKEITSVLVGMKSVEQVEENVAAARELATSGIDEETLSEVEAILKPVKNQSWPSGIQQS

SEQ ID NO: 262306 - protein, 190 aa, Glycine max
  Clone ID: PAT_MRT3847_78885C.1.pep
CRVGERTMGSSTSVQSTFILLIFALIAFGNFAAGGGSAERGGSSAENAAKTVVRQTLQKSYGYGEVPATYGDEKPDYSVCSGLPKRNRKACKLVVQIAVEARKAERRGLLEDDELPPPSQGLGLPYLRKPTKAEEDAQPPPKVVAERYACMNMTCLCPYLGGSSSEPDQCIFGGSATNDQSGRARCQSGN

SEQ ID NO: 262307 - protein, 98 aa, Glycine max
  unsure (1)..(98): unsure at all Xaa locations
  Clone ID: PAT_MRT3847_78886C.1.pep
KKGPAKFPLKQQKPSPLPGFHPKPPGGFKKTQNPPPPPKKKPQKAQKRARAPPTRTPPGLKTRLIQPPFFWPDQNPKPXGKPKPPGKRGKPPPLERTP

SEQ ID NO: 262308 - protein, 145 aa, Glycine max
  Clone ID: PAT_MRT3847_78887C.1.pep
AAGWVRQALKLGGGCSVGVRPANKRVIGTSNTNQCTHALSSAPPLRSVHGRLLPFLPPLYSRILHSCAFKGTNSGVNVCCHQQGHLPGTQGHQHVQSHQRQQHHQQHHHHGNNNNFGPGVSVNNNLLVNLCVSPLIMRKVRQVNP

SEQ ID NO: 262309 - protein, 102 aa, Glycine max
  Clone ID: PAT_MRT3847_78888C.1.pep
LRLQGHQRPVSTSAANQQGHRTRYTRSPSMVQSHPASAAPISNTTTHGNNNNFGPGVRVNNTVLVKLCVSPVIMRKVRQVNPNCTTRVTQTPTITSLQVVNR

SEQ ID NO: 262310 - protein, 171 aa, Glycine max
  Clone ID: PAT_MRT3847_78889C.1.pep
SSRSWWSFEGAVGDPQTLLLKQDCSGFTAPNLSNFNQNLNASLADLRAEVSNQRKHFATSQSTTGTSPVYAMIQCRNYLSNTDCAACLAAADAKIRNCSTGANGARVIYDGCFLRYESNDFFAQIMPRSSICGSQSADESTAFSEAGQQVLTDLQIATPKITGYYAATKTQ

SEQ ID NO: 262311 - protein, 58 aa, Glycine max
  Clone ID: PAT_MRT3847_7888C.1.pep
NGQWCRVNNHAYVVSQSHIVREAKCGFEFRLWLEAIMCSRSDDGRPVWFHSRRPCGLN

SEQ ID NO: 262312 - protein, 45 aa, Glycine max
  Clone ID: PAT_MRT3847_78890C.1.pep
LEILTIISLNLLFRFKNKLKNIIKKMHNKIILQLSVVLTPQEKLK

SEQ ID NO: 262313 - protein, 128 aa, Glycine max
  Clone ID: PAT_MRT3847_78891C.1.pep
LINQSNSPSNNIWNQINQPCQSNNFYSPSNQIYQRSLEDNSTIHSMTPMNPQHIQQTNQHQAQYYEQINSLPSSEFMNQQLNTLHTSNSQSSNQQSNAQYGTNSTNIQSNQEYNYVNDLINIGQVDEL

SEQ ID NO: 262314 - protein, 64 aa, Glycine max
  Clone ID: PAT_MRT3847_78892C.1.pep
QFYLCVGLGNYTRGSRCFARLPYCCSVVLELKCNLLILPFTHPEPDSLMCPFCQIWYMSMSLFQ

SEQ ID NO: 262315 - protein, 82 aa, Glycine max
  Clone ID: PAT_MRT3847_78893C.1.pep
DEEDDDPFLEEDLPDEFKETHFSLWILLEWLSLISIIGLLITTLCVPFLRNKNLWQLRLWKWEVMVLVLICGRLVSDWVVRI

SEQ ID NO: 262316 - protein, 49 aa, Glycine max
  Clone ID: PAT_MRT3847_78894C.1.pep
KLISAKNPKILYKNNTISTINQYTHDVNHKQIYPLSSIATTLVDNIYLD

SEQ ID NO: 262317 - protein, 50 aa, Glycine max
  Clone ID: PAT_MRT3847_78895C.1.pep
ALECKHSTYPWTLTHSDMTAHVTKNQYIYYDSNQFIGACKREGARKGDHH

SEQ ID NO: 262318 - protein, 58 aa, Glycine max
  Clone ID: PAT_MRT3847_78896C.1.pep
FLCDSACIVRCGIGPELFFLVPCTMFCFCPIICIRHCALTWVRSGLLLSRPPALYFPP

SEQ ID NO: 262319 - protein, 84 aa, Glycine max
  Clone ID: PAT_MRT3847_78897C.1.pep
YCCTSMNLINNGYTVLQFLPLTDVNFLIFNQSPTIRATKNFEDGNKPNSSITIHALRSGVTYVNCRTIWLLKMLSQLLPLLLKK

SEQ ID NO: 262320 - protein, 209 aa, Glycine max
  Clone ID: PAT_MRT3847_78898C.1.pep
PLVSTTSFAALVADPFTNEAVEIAKGEFNLLSYIYFPISAMTMSLLLHLPKLHQQVLCEYKDHKEAIQIPGCLPLQGHDLPSDFQDRSCVDYELILQRCKRLPLADGFLVNSFYEMEKGTLEALQEHCKGSNNNNSCVYLVGPIIQTEQSSESKGSECVRWLEKQRPNSVLYVSFGSGCTLSQQQLNELAFGLELSGQNFLWVLKAPND

SEQ ID NO: 262321 - protein, 103 aa, Glycine max
  Clone ID: PAT_MRT3847_78899C.1.pep
MSTTTHFSLLSLYLILSLNSLHMTMAARIIPQSAPSTVTRPQFLSEAETYLRPHLGNKQNVFQGRQVKNCLPKGYRHNSAPSRFVNYDTLGSSGCSGMRSEKP

SEQ ID NO: 262322 - protein, 33 aa, Glycine max
  Clone ID: PAT_MRT3847_7889C.1.pep
YYEAIYGGSYKIEKSDGMKCPHLVKKTSTFVRL

SEQ ID NO: 262323 - protein, 73 aa, Glycine max
  Clone ID: PAT_MRT3847_788C.1.pep
MTGAMHLQKPLAHEPMLATRATIEDGVDLLHDVDDIERILQVNQLQDGGPAWRRKRQRLLAGHAAALKGVEPL

SEQ ID NO: 262324 - protein, 103 aa, Glycine max
  Clone ID: PAT_MRT3847_78900C.1.pep
MSTTTHVSLLSLYLILSLNSLHMTMAARIIPQSAPSTVTRPQFLSEAETYLKPHLGHEQNVFQGRQVKNCLPKGYRHNSAPSRFVNYDTLGSSGCSGMRSEKP

SEQ ID NO: 262325 - protein, 132 aa, Glycine max
  Clone ID: PAT_MRT3847_78901C.1.pep
MKCFVRRNLSMQVWPPVGKKKFETLSYLPDLDDAQLAKEVEYLLRKGWIPCLEFELEHGFVYREHNRSPGYYDGRYWTMWKLPMFGCTDASQVLKERAEAKTVYPNGFIRIIGFFFVGRVHCISWLAYKPPG

SEQ ID NO: 262326 - protein, 74 aa, Glycine max
  Clone ID: PAT_MRT3847_78902C.1.pep
SMDTDMNTGHPWTCTRTDLLSLRQQSPWTLESWIFNISFCWDRSRPWIQGHKCLRHATFIMLIVFLQVVLYIHC

SEQ ID NO: 262327 - protein, 55 aa, Glycine max
  Clone ID: PAT_MRT3847_78903C.1.pep
AKGEVIFVKRYAPAYLVFVLVFIYKVRIIIQFIYWLLVLPYCVLCRLRNCSGRKD

SEQ ID NO: 262328 - protein, 59 aa, Glycine max
  unsure (1)..(59): unsure at all Xaa locations
  Clone ID: PAT_MRT3847_78904C.1.pep
TILKFPRDIIDSSNSTLFLIFFSIPQPLXFIEHFPTLTGSPLIPITLYFSRLFLFHKIK

SEQ ID NO: 262329 - protein, 110 aa, Glycine max
  Clone ID: PAT_MRT3847_78905C.1.pep
LGSPSCSLSSLPLPVQHAFKFTFLCIKYELGLRMYIGRVLPLSSEIALVGSRRLSSSLGAANAPPVLVDAHPSSRLCSLLLFSYGVFLELGSLWLHPPCLINTNFTIVFT

SEQ ID NO: 262330 - protein, 137 aa, Glycine max
  unsure (1)..(137): unsure at all Xaa locations
  Clone ID: PAT_MRT3847_78906C.1.pep
FSFFFFLSFFSSFFSALPFFLTPFFFFPFPRKKALPKTPMAGHNPPVPKLPTLPPTAPPHKLLKKKTPPCPLFPPNPSSTLTPPPPFPKPXTPQARPPPKSEPEPTTAPPAPDPPKPRVPTKXPPKPANPPCTPTAP

SEQ ID NO: 262331 - protein, 50 aa, Glycine max
  Clone ID: PAT_MRT3847_78907C.1.pep
NGNVFMLDLLSPSYTHLSTGCFDKKILIYPVGVRIDRTQKMEKKKKKKDG

SEQ ID NO: 262332 - protein, 155 aa, Glycine max
  unsure (1)..(155): unsure at all Xaa locations
  Clone ID: PAT_MRT3847_78908C.1.pep
KKKRAAASKTIQLIKTHSLYRMNTIFHFATNIMCFFILISYSILVNQQLVLINSFFLXFIYNLIYTIKAFSILLLTYLCIGFHSTHFFXLVIFFFYKHLSFSHNYQIISALESTYSVILYTFLKYFIFLYFNLLSPLLFIIYHLYNNSLTKIFTY

SEQ ID NO: 262333 - protein, 62 aa, Glycine max
  Clone ID: PAT_MRT3847_78909C.1.pep
TQYISLAVAHLTKQYTELIDQGLNDINTRTYVVTFLQLGSRLIFIVPLLWSSGMHHSCKRSR

SEQ ID NO: 262334 - protein, 92 aa, Glycine max
  Clone ID: PAT_MRT3847_7890C.1.pep
MVSLKDLMLVNFKIPPIRGPIHQLSAMEKKKKVIMEINPLMIKWKKKVKISNPQRKNCFKKMIFLQVLSILNEIFIDWGIFTTSPSACWIAT

SEQ ID NO: 262335 - protein, 51 aa, Glycine max
  Clone ID: PAT_MRT3847_78910C.1.pep
QHEAVMLCPTCLVSKRLWTVQPKNRPTKLTCQQHKTLTPHRLARCLKGCGL

SEQ ID NO: 262336 - protein, 58 aa, Glycine max
  Clone ID: PAT_MRT3847_78911C.1.pep
IKSVISYALYQVQTGSLPVYSSVLTKSPLQLQTVIYRLIVQIQHLNIPSSSSTHSSPF

SEQ ID NO: 262337 - protein, 70 aa, Glycine max
  Clone ID: PAT_MRT3847_78912C.1.pep
HLYMCSINCLTHVLNLQHCGFGPFGPLSIIDIYAIYLKFVILVRCFLSFDFQLFFFLIMNGTLRYLFFCK

SEQ ID NO: 262338 - protein, 70 aa, Glycine max
  Clone ID: PAT_MRT3847_78913C.1.pep
NIVLQIRNETHITIQFHEPLYGCRKYEPSGRRARICLQRRNSTHGVQNFPVLRGRRLHRLRMQRVTCVQN

SEQ ID NO: 262339 - protein, 206 aa, Glycine max
  unsure (1)..(206): unsure at all Xaa locations
  Clone ID: PAT_MRT3847_78914C.1.pep
MVLVLWSRGTKNMDFLTLFTLLLLLFIHTALSSTQYHDGNILLTHRKIFPKQEAITSYAVIFDAGSTGSRVHVFHFDQNLDLLRIGNELEFYDKVTPGLSAYADNPQQAAESLIPLLEEAESVVPEDLYPTTPVKLGATAGLRLLEGDASERILQAVRDLLKNRSTLNTQPDAVAIIDGTQEGSYLWVTINYLLXKLGKGFKDRVV

SEQ ID NO: 262340 - protein, 60 aa, Glycine max
  Clone ID: PAT_MRT3847_78915C.1.pep
FHLASSMSEGISSEIVNVYVFSALRVQINCLCNMLKHDSMSHSSLLYIPGRRLGSISIKT

SEQ ID NO: 262341 - protein, 98 aa, Glycine max
  Clone ID: PAT_MRT3847_78916C.1.pep
SLGSNTLSGALPQRFSVLTCEPPSPQIGNIASSPASSSFSYDTLPPILCLDFFDILVVGLSFIYAHYLFMSTFARCPFKFGGLIFILGTVLSVCTDPT

SEQ ID NO: 262342 - protein, 56 aa, Glycine max
  unsure (1)..(56): unsure at all Xaa locations
  Clone ID: PAT_MRT3847_78917C.1.pep
MNNTPLLLHINPLHTKIPILIHIIKPTSXTLITSHYIYKIFNXINPFLPSYPYLIT

SEQ ID NO: 262343 - protein, 506 aa, Glycine max
  Clone ID: PAT_MRT3847_78918C.1.pep
TFYGVDRDVFLPWYNGYRFLVQNAKRLEAEGLAPFVPFDQATLLNSTNVLDQWKNSATQSLIHFVRQEMDGYRLYTVVPYLLKFLDNLTNIYVRFNRKRLKGRSGEEDCGIALSTLYHVLLLSCKVMAPFTPFFTEVLYQNMRIVNNGSNVSIHYCRFPTEEVWGGERIEQSVSRMMTIIDLARNIRERHNKPLKTPLREMVIVHPDADFLDDINGKLKEYVLEELNVRSLVPCNDTLKYATLRAEPEFSVLGKRLGKSMGIVAKEIKAMSQENILAFENAGEVVIANQCLKLTDIKVLRDFKRPDGMTEKEVDAAGDGDVLVILDLRPDESLFEAGAAREIVNRIQKLRKKVALDPTDMVEVYFESLDDDKSVSQRVLHSQESYIRDAIGSQLLPNSLMPAHAVVLGEERFHGIASMSFGITLTRPALMFNQKAILSLFTGDAKSAYKLQTYLLSRDHLKLKSEFQDGNGKKIVDSIEQLPAVEVVLGQHVFFTVGDYSLAGKSD

SEQ ID NO: 262344 - protein, 116 aa, Glycine max
  unsure (1)..(116): unsure at all Xaa locations
  Clone ID: PAT_MRT3847_78919C.1.pep
QAFGQSEGKATLNIYAMNQCVGXQHVSVWCSRDLLYTGLKTWXGRSENVNAAHDALLFRTKCNSLAHFTKYTIQGESQEAYKVLDHKSYSYSDVYNESYPCDDSLTHPEPIAVDCL

SEQ ID NO: 262345 - protein, 87 aa, Glycine max
  unsure (1)..(87): unsure at all Xaa locations
  Clone ID: PAT_MRT3847_7891C.1.pep
MVSLLMGHWKGTRVEXVNXXSXXCXXYGXSALTXXLADXYXXRFITSLKXXNDXPWMTQLTAXAXXSLAXXTEXXHVXLLLDLQWRS

SEQ ID NO: 262346 - protein, 61 aa, Glycine max
  Clone ID: PAT_MRT3847_78920C.1.pep
LMKVRGDSGSTQDRVSRHDAVRLNAMFQAGAFSSDDADLDPGVTSKWGEGLYWLSQLCLWC

SEQ ID NO: 262347 - protein, 161 aa, Glycine max
  Clone ID: PAT_MRT3847_78921C.1.pep
MESNRQSLEGHEGADGRGHRISVMQSTQKHGDPKQPSLSGLRNVMKGLCTNDCELHFERFLRRVVREEVECKIQDFLSSRGWVNQISTSRATPFELRFVTRTPDIIFTNSNVISEDKTSIQIALFDVRDQSVVNVGPLSSLKVEICALNGEFGSNGSEDWT

SEQ ID NO: 262348 - protein, 69 aa, Glycine max
  Clone ID: PAT_MRT3847_78922C.1.pep
KVLIRVGVYNYGSFQLFPEKEVWGNEAIWLQTSSRRTVTSSDAAYPCSCADTTTLFPIRPCTLTMLIPI

SEQ ID NO: 262349 - protein, 145 aa, Glycine max
  unsure (1)..(145): unsure at all Xaa locations
  Clone ID: PAT_MRT3847_78924C.1.pep
MFFFSSISFSAAVNAETHEEVAIKKVGNAFDNRIDAKRTXREIKLLRHMEHENVIALKDIIRPPQXYFLYQLLRGLKYVHSANVLHRDLKPSNLLLNANCDLKIADFGLARTTSETDFMTEYVVTRWYRAPELLLNCPXYTAXID

SEQ ID NO: 262350 - protein, 65 aa, Glycine max
  Clone ID: PAT_MRT3847_78925C.1.pep
IQNRGIPVKEALCHPNLAPLHDINEEPVCVRPFSFDFEQPSFTEEDIKELIWRESVLFNPDPPIY

SEQ ID NO: 262351 - protein, 276 aa, Glycine max
  Clone ID: PAT_MRT3847_78926C.1.pep
AAQLLHSLSFSTTPFPSDHYQRFLELPKLLREVLCFLNGNRTGSCSGEVAASAQLRPPLLEMGRQRQEQHHHRFRRPSDPDSRPHRLGSRTARNRFSLPLKPLPPPQLHKAEHDDADDAVQKPWNQRPRKPTLLPKATIKIGTGPSRNHHHATNNGEFHDGGGGGGGDNNNPAPKSLWLRGFSVKSGNFFFVNCLSVGSFLFYLVLVLVSYVEVSCILADTVYFIFCKAIMHLFLCFHSFSFVVEGFKKGFRLREIVGALIKSWVYTLYKPTPITQ

SEQ ID NO: 262352 - protein, 253 aa, Glycine max
  Clone ID: PAT_MRT3847_78927C.1.pep
MATAPAHAPVKSQPLHNFALPFLKWGASGKNNTTTTDGHHHRFRRPSDHASEPDSSDPDSRPHRLGSRTARNRFSLPLKPPPPPPPQLHEAEHDDADDAVQKPWNLRPRKPALLPKAALEIGTGPSRNHHHATNNGEFHDGGGGGGDNNNPAPKSLRLRGFSDTPCSVKKEKRKFWIALSREEIEEDIFVMTGSRPARRPRKRPKNVQKQMDSALIHPPRGEENLGRSWEIGGTEAWNFVKRKPKMLDWKFGI

SEQ ID NO: 262353 - protein, 79 aa, Glycine max
  Clone ID: PAT_MRT3847_78928C.1.pep
HVMPSDITRVFAPRHAFSSHRGQHIEQLVNLLRALPPNALSMRHRQDGKIIHEVRVPTGCQESPHYGLRLAMTDRGASS

SEQ ID NO: 262354 - protein, 52 aa, Glycine max
  Clone ID: PAT_MRT3847_78929C.1.pep
EDIFVMTGSRPARRPRKRPKNVQKQMDSVFPGLWLVGITADAYRVADTPAKR

SEQ ID NO: 262355 - protein, 121 aa, Glycine max
  unsure (1)..(121): unsure at all Xaa locations
  Clone ID: PAT_MRT3847_7892C.1.pep
IYIKDHGLKGVAIIHVKSHWRRYRTEKFIPDPSXGKYDKTISQXHVSHSDVKSAIQIREALNLQSNAQRCLHRQLEVHTELQLGIEQLGTELKKMIVQQHKNNNNLRNSQNSARDESTIAH

SEQ ID NO: 262356 - protein, 83 aa, Glycine max
  unsure (1)..(83): unsure at all Xaa locations
  Clone ID: PAT_MRT3847_78930C.1.pep
GRAARPXSFIFISFLFFLFIIIIFLRAAMVFLALLCFLSLTISFSLPFISETQKLLLLLLISPKPFTLLIHQKAVLFPFSPGF

SEQ ID NO: 262357 - protein, 47 aa, Glycine max
  Clone ID: PAT_MRT3847_78931C.1.pep
MTGSRPARRPRKRPKNVQKQMDSVFPGLWLVGITADAYRVADTPTKR

SEQ ID NO: 262358 - protein, 95 aa, Glycine max
  unsure (1)..(95): unsure at all Xaa locations
  Clone ID: PAT_MRT3847_78932C.1.pep
RGGELFPNLTKKVLTPRKEDDGIKKGCSPSPEKNRGGGRHCHCGRVKPPRPSSCNRGSSRKNKPFXNRSVPYMPAPKTDKCGSGIEAPVEFKLGE

SEQ ID NO: 262359 - protein, 115 aa, Glycine max
  unsure (1)..(115): unsure at all Xaa locations
  Clone ID: PAT_MRT3847_78933C.1.pep
MGEQTEKAFLRQPKVCLNTKKTXKGNRPLKGXNRFXECMGLGFKTPREAIEGAYIEKKCAFTGNVSIXRXRILGWTCDSAKRNRTIIGXGSYLHFINXYQRGEKRRSNIAAHISP

SEQ ID NO: 262360 - protein, 142 aa, Glycine max
  unsure (1)..(142): unsure at all Xaa locations
  Clone ID: PAT_MRT3847_78934C.1.pep
NGAPAARTTPPPPPLTTTASAAPPITPLNPTPPTPTPAPTASDPEPRATDSXPSQTTATTTTTTXTKPNTTTQTTPCRSHGTCALASPRSSPRPHSRSAPDLPETTTTPPTTENSTTAAAATTTTPHRSRCGSAGSRTRRAV

SEQ ID NO: 262361 - protein, 64 aa, Glycine max
  Clone ID: PAT_MRT3847_78935C.1.pep
VTQNHLLKKKRLELSKPAGISPIPLLYSHNAMENGTYLVTPHFVEIRFPKKKKKKKNSNRANLK

SEQ ID NO: 262362 - protein, 96 aa, Glycine max
  Clone ID: PAT_MRT3847_78936C.1.pep
FVFFFCGSHSCQKWETGPEKVYFRSEKSRATGNFIGASFKPWKSLSLTLTFQTQHDNTEMKSQNQSTQKPMLAGPTIIHKPFFATFNAGPHKFFLP

SEQ ID NO: 262363 - protein, 71 aa, Glycine max
  unsure (1)..(71): unsure at all Xaa locations
  Clone ID: PAT_MRT3847_78937C.1.pep
MXSHRQXYXAGXTXGRXXXXTXQTXGNIXEXXQAAXXXTXXMXQAANEKXQQXXQAAXDXTXXTSXXAEXX

SEQ ID NO: 262364 - protein, 406 aa, Glycine max
  unsure (1)..(406): unsure at all Xaa locations
  Clone ID: PAT_MRT3847_78938C.1.pep
MESVVCELEGTLVKDKDAFSYFMLVAFEASGLVRFALLLTLLPVIRFLDMVGMNDASLKLMIFVAVAGVPKSEIESVARAVLPKFYMDDLDMDTWRVFSNYDKRVVVTKTPKIMVERFVKEHLRAGEVIGTELSFNRFGFATGFVLGHSNNTISERVANFFDXKRPLWLWIIKIXPRLFGGKVIVKGKPPLPPSGENSGVLFVCTHRTLMDPVVLSSVLRRKIPAVTYSVSRLSEILSPIPTVRLTRTRDIDAEKIKRELSKGDLVVCPEGTTCREPFLLRFSGLFAELTDRIVPVAMNYRVGFFHATTARGWKGLDPIFFFMNPRPVYEVTFLNQLPVEATCSSGKSPHDVANYVQRILAATLGFECTNFTRKDKYRVLAGNDGTVSPTYSFVDQMVKVVRTFIQ

SEQ ID NO: 262365 - protein, 112 aa, Glycine max
  Clone ID: PAT_MRT3847_78939C.1.pep
MKFNINGKTHDADVDIRTSLLDLCREHLGLTGSKKGCDHGQCGACTMLVDCRRINSCLTLAVMHQDSEIVTIEGLGQVGDLHAMQDAFVRHDGYQCGYCTPGQICSAVGMLG

SEQ ID NO: 262366 - protein, 90 aa, Glycine max
  Clone ID: PAT_MRT3847_7893C.1.pep
FFLSAIFLHFHLFGQIKRGEPMIPPLSSFLFQFLLLFPLILSHSDSDSGSPRAPAPADRGVTGVRRGAAVRRVARGRGREQPMRVGDKSL

SEQ ID NO: 262367 - protein, 94 aa, Glycine max
  unsure (1)..(94): unsure at all Xaa locations
  Clone ID: PAT_MRT3847_78940C.1.pep
GLQADSEGSLKDLQKRPSNLLCSAGPVXEDLFPLGKRLIWGPPEYPYGGGGFFQETIPFXPGFPFPAPPRGAFRAKSFPPPIPTPKGEICLGIL

SEQ ID NO: 262368 - protein, 46 aa, Glycine max
  Clone ID: PAT_MRT3847_78941C.1.pep
SDMSLSNTSVRRLDSCIHFCIYRATLHMIFTFAQTNAVAITKSAFT

SEQ ID NO: 262369 - protein, 45 aa, Glycine max
  Clone ID: PAT_MRT3847_78942C.1.pep
IIKTMRIFRCFTSNIFSPKETNLCHVINNQGRNTMRHIVTKMEIR

SEQ ID NO: 262370 - protein, 212 aa, Glycine max
  unsure (1)..(212): unsure at all Xaa locations
  Clone ID: PAT_MRT3847_78943C.1.pep
SRRPTRPKSFLIDSXLPFGFELLMCDTDMVWLKNPLPYLARYPEADVLTSSDQVIPTVVDDSLENWPEVSGAYNIGIFHWRPTESAKKLAKQWKEMLLADDQIWDQNGFNDIVHRQLGPSVDDESGLVFAFDGKLKLGILPASIFCSGHTYFIQAMYQQLRLEPYAVHTTFQYGGTEGKRHRLREAMHFLDPPEYYNPSGGFXAFKPHIPXN

SEQ ID NO: 262371 - protein, 248 aa, Glycine max
  Clone ID: PAT_MRT3847_78944C.1.pep
LWTSAFDPSLSREQLIAKVPYGIPEDQWLSFIDNHLKPEYQELCRKNAVVRQKQTVPHTGGAKLLSRKQHEMEVELGRPISRVELYIATRKKKDGSFVNEEARSIGEKMTQEISECANPTEISTNDALAKVLGRDHCGRVRCLGLGGLHSVAFQSTEKFSGTGRNLSNSNSVESSQLKEEVTSLKTKLAAAEENVKTLQNIMLTYIQMKEGHIPKELGALFDTNVAVVICGLAVATSESGSSLDSNRH

SEQ ID NO: 262372 - protein, 78 aa, Glycine max
  unsure (1)..(78): unsure at all Xaa locations
  Clone ID: PAT_MRT3847_78945C.1.pep
MFRCRGHCGCLSYCKSLNRCGGCKMYPYLIYTESTTTETXVMGVAPANAHYEGAEMPEPSDNHGCRCGRNCSCNPCTS

SEQ ID NO: 262373 - protein, 103 aa, Glycine max
  Clone ID: PAT_MRT3847_78946C.1.pep
HHSRAWDCSGTCGSPWSEQLSSYIRSSPLARRLDFAEADPMLEGNVATRVAAIRGGKGARGEVTIANKSDGELTAADLKGKKVLGRNDLNVPIDDNQNMTDDT

SEQ ID NO: 262374 - protein, 89 aa, Glycine max
  Clone ID: PAT_MRT3847_78947C.1.pep
RQATNQIKLVERHIEVDDSTCPFCRSVEETAAHLFFHCSKITPLWWESLSWVNIMGAFPKSPKATLSPTYTWSDSRHEVSQMENGGGLH

SEQ ID NO: 262375 - protein, 55 aa, Glycine max
  Clone ID: PAT_MRT3847_78948C.1.pep
HLNKLPCMDPKKIENPPCRTIQQQRSLPLKVHFVIPKTYIQMIMNGSREEKGITE

SEQ ID NO: 262376 - protein, 161 aa, Glycine max
  Clone ID: PAT_MRT3847_78949C.1.pep
AIARCAWLRRGPVAGSGSGAGESPATANKGLKKKVVNSLPKFTYAGGGDRCKWSECAICLTEFGAGDEIRVLPQCGHGFHVACVDTWLASHSSCPSCRAPFAVTARCHKCGHFPAVSAAARRRRQWRMRMVIMLLLRMDLVITVSCLESCFSNYEFACKYR

SEQ ID NO: 262377 - protein, 131 aa, Glycine max
  unsure (1)..(131): unsure at all Xaa locations
  Clone ID: PAT_MRT3847_7894C.1.pep
MANKLFLLCRTLSFFLGLTNTSIYRTIVQVDXDDATNPPGPFRIPKCTKEFQQAQHLKACQQWLHKQAMHSGSGPSWTLDGEFDFEDDMXNPQGPQQRPPLLQQCCNELHQEEPLFVCPTLKGASKAVKQQ

SEQ ID NO: 262378 - protein, 201 aa, Glycine max
  Clone ID: PAT_MRT3847_78950C.1.pep
MTRGLRLLQSAAAPPPEAAAAVESDFVVILAALLCALICVVGLVAIARCAWLRRGPVAGSGSGAGESPATANKGLKKKVVNSLPKFTYAGGGDRCKWSECAICLTEFGAGDEIRVLPQCGHGFHVACVDTWLASHSSCPSCRAPFAVTARCHKCGHFPAVSAAAASESKAVGGDNAADSTANANRNNVIITNGFSNYGFLP

SEQ ID NO: 262379 - protein, 54 aa, Glycine max
  Clone ID: PAT_MRT3847_78951C.1.pep
QSYAIPSPINRVRKQPLTTKTEKPSVSSTAPCLDANDSPPDSDDPKYSLTLIFT

SEQ ID NO: 262380 - protein, 40 aa, Glycine max
  Clone ID: PAT_MRT3847_78952C.1.pep
SNETHTILSCMTPPWLILPQILSHCFMLQTYPQGSKVHCS

SEQ ID NO: 262381 - protein, 88 aa, Glycine max
  unsure (1)..(88): unsure at all Xaa locations
  Clone ID: PAT_MRT3847_78953C.1.pep
TEHMANFEKDEVPIFSDIHPKLSNELVDSKFPRRVPRTRSVSISIPATLTEPYERDTNLVGYTGPLXSQRKTPFDQMSGTLYVTNKPG

SEQ ID NO: 262382 - protein, 52 aa, Glycine max
  Clone ID: PAT_MRT3847_78954C.1.pep
HCNRCDIFLEDSPSGTCLIDGYSDALYRRMSSYTMNHVDCRLRDTKLFMDRL

SEQ ID NO: 262383 - protein, 55 aa, Glycine max
  Clone ID: PAT_MRT3847_78955C.1.pep
LLYLSCSPELNILILGFFVIGLKVVLIFMQTMWKFCLLDPSANSGSYIKNSISFI

SEQ ID NO: 262384 - protein, 44 aa, Glycine max
  Clone ID: PAT_MRT3847_78956C.1.pep
PLTSQSNRLRRRLYKYLWFSCQQVGAANEPQLDKEDKNVVKRSS

SEQ ID NO: 262385 - protein, 111 aa, Glycine max
  unsure (1)..(111): unsure at all Xaa locations
  Clone ID: PAT_MRT3847_78957C.1.pep
NPPPPNCPPSLGGICLNKWGPPFYTAFLGPLPRQLPPPGFSPFKKPWAKFLISQKTPPPKKTPGPWGFPPPSKLVSGXAPPKNFQKLFFYPPPPPPGFFFFLKNFPPFFPV

SEQ ID NO: 262386 - protein, 61 aa, Glycine max
  Clone ID: PAT_MRT3847_78958C.1.pep
WHQHANQSRMSCAILTIITVAVINISHFNSLTIILHSFPQSIVFTLLAIIPHSISVFIIMK

SEQ ID NO: 262387 - protein, 50 aa, Glycine max
  Clone ID: PAT_MRT3847_78959C.1.pep
LGIVSALQVVGSVTNLWALRLSTLYKWYEPSGIQKINFFIYKREFYLGRA

SEQ ID NO: 262388 - protein, 90 aa, Glycine max
  Clone ID: PAT_MRT3847_7895C.1.pep
DIKDCMLDFSESTTSQMVAREDYRVAFFFFKMPIPRQKENTWIPFVTSILCGHQGKKKLNLTKNMCIFRHHLKKEKLVINWENTTIANEE

SEQ ID NO: 262389 - protein, 103 aa, Glycine max
  Clone ID: PAT_MRT3847_78960C.1.pep
LALYAPPICDLADYNEKVMLPLINNVGVKAHTFMASCNARHDQRIVCSWVHVGDVAPEDVIAMVATLTIKTNVMFMYGCANAYKCGINCHTAYVVHVGDLVSA

SEQ ID NO: 262390 - protein, 57 aa, Glycine max
  Clone ID: PAT_MRT3847_78961C.1.pep
FAYIMLSYWGNKKLYVLGHTNLKFDNFYFMKRFPFKRYHLCCRLAAHQLMDYLGIKL

SEQ ID NO: 262391 - protein, 112 aa, Glycine max
  Clone ID: PAT_MRT3847_78962C.1.pep
RDFEEKKKKGQTPQILTTHSQSFIKRKQTPFQKLKKTRPLRKNPFMFYPKKRTPARIPPVFYGQKPPQKIKNKTHPNWGPGTEKYLRNSSPPTLNRGQGGPPLSFAPVTLES

SEQ ID NO: 262392 - protein, 98 aa, Glycine max
  unsure (1)..(98): unsure at all Xaa locations
  Clone ID: PAT_MRT3847_78963C.1.pep
RRMHAXVSSEFGSXACXRXIPXNFHXXXFXXXMXXLXXMXMLXKSXVMPKSXXAXXXXXXMXTPSYXAQELSESGXXXIAVXMXXRENIXXCXXXSDX

SEQ ID NO: 262393 - protein, 110 aa, Glycine max
  unsure (1)..(110): unsure at all Xaa locations
  Clone ID: PAT_MRT3847_78964C.1.pep
PRCPFFLGCGVFSVGCAWVWLFAPPVCVCPPLSVVRVFCLFLRLLFCSGCLPGLFVWLLPRSVGFLGLSCVVPLCGLLSLVCCCGGRGVLSSLGPWCFVACRPGVLFRXV

SEQ ID NO: 262394 - protein, 54 aa, Glycine max
  unsure (1)..(54): unsure at all Xaa locations
  Clone ID: PAT_MRT3847_78965C.1.pep
FVFLIKKLSXXLLCAXTGVEHRNSAMRIXTSVNDSPQTKLGSDNTLIQYPFLSN

SEQ ID NO: 262395 - protein, 56 aa, Glycine max
  Clone ID: PAT_MRT3847_78966C.1.pep
SMPVILFIITALFFSFSNICCRRPHGSEVSVGGCNVTCQKRYHNLHRETLSRIDLI

SEQ ID NO: 262396 - protein, 48 aa, Glycine max
  Clone ID: PAT_MRT3847_78967C.1.pep
STSLAGKDVKLFPSASELGRSCIRNTDTKQVYSGCPCYGPYLVKILVP

SEQ ID NO: 262397 - protein, 77 aa, Glycine max
  Clone ID: PAT_MRT3847_78968C.1.pep
HHSLMSCPHFVPHSSVVEGAPIVIKVRPLLYFVACILLLLNSTLGVFYFINPKSGSIIQKPIFFMANNLLLLFLVFE

SEQ ID NO: 262398 - protein, 116 aa, Glycine max
  unsure (1)..(116): unsure at all Xaa locations
  Clone ID: PAT_MRT3847_78969C.1.pep
DEEHIHLCRVPXYHQLIAILKDGDTFCVSKRNPPFDKGLELKQCGVHLIFEGDDDYDGWEESLDNDLQSVLXKLANFFKTYEDESVRNLNELEMMGQVPRTFLVTLRSNFIFFFLI

SEQ ID NO: 262399 - protein, 147 aa, Glycine max
  Clone ID: PAT_MRT3847_7896C.1.pep
GYYLRFCSIVDAISSTLGNLTNLTGLYLSDNNLIGNVPGTLGQLLALLVLDLSRNSLTGSVPASFAFLSNLSSLDLSANFLSGAVPTGIGTLSRLEYLNLSNNGLASLPAQLGGLASLVDLDLSENPFVGVGLPSDLTGLRNLRRMI

SEQ ID NO: 262400 - protein, 69 aa, Glycine max
  Clone ID: PAT_MRT3847_78970C.1.pep
GFACSDYGVALSVHNSSGLRSTRSDCITRDTLCKNSHTLYLTKTSSHGIFIHLLWHRCECDINNRSYVV

SEQ ID NO: 262401 - protein, 264 aa, Glycine max
  unsure (1)..(264): unsure at all Xaa locations
  Clone ID: PAT_MRT3847_78971C.1.pep
MVADRSKKPKVSEKGENLDEIDGELVLSIEKLQEIQDELEKINEEASDKVLEIEQKYNEIRKPVYDKRNDIIKAIPDFWLTAFLSHPALGDLLNEEDQKIFKYLSSLEVEDFKDVKSGYSITFNFNANPYFEDTKLVKTYTFLEEGTTKVXATPIKWKEGKGIPNGVNHEKKRDKRGXTDVSFFSWFSDTEQKDDIDDIHDEXVAELIKDDLWPNPLTYFNNEEPDEEEGDEDEADDEGKEDESDDDDDNQEEDDDEGEEDDYK

SEQ ID NO: 262402 - protein, 143 aa, Glycine max
  Clone ID: PAT_MRT3847_78972C.1.pep
SRMIYGQTHLPISTMKNLMKRKVMRMKLMMRERRMSLMMMTTIKRMTMRVRRMPSEKYIMVILLFFGVVGVCKRSLGDDHGHPLWLSSYVSRWSYQGQLLVLSLTIVYLLSYEVISGFIPCVLFQILMFQRLFSITLRRGTTW

SEQ ID NO: 262403 - protein, 111 aa, Glycine max
  Clone ID: PAT_MRT3847_78973C.1.pep
PHVVLLTASAVPSRRRLLRLFCRSAGTKPSFSRLRHLSVLSPSVFPPPPLPPSSVLLLRNLKMPRPRPSGLTPTFTLFCVDFSKDRRLEQVVRVLVSPVLWCKISCVRFRT

SEQ ID NO: 262404 - protein, 230 aa, Glycine max
  Clone ID: PAT_MRT3847_78974C.1.pep
MAKVKEKVAVVTGASSGIGEAIAKKLSQQGASIVLVGRNEQRLNEIAQQLNTPAKVVSADVTVKSNIDDMLKAVIDHFGHIDIVVNSAGQSLSSKITDYNVEQWDTMIDVNIKGTLHVLQATLPYLLKQSSGHIINLASVSGFEPTKTNAVYGATKAAIHAITQSLEKELARTGVKVTSISPGMVDTPMTEGTDFGERKKLEAQNIADAVVYALTQPSHVNVNEVTIRPV

SEQ ID NO: 262405 - protein, 50 aa, Glycine max
  Clone ID: PAT_MRT3847_78975C.1.pep
YGVKTKIQTMVVPMLHNKKKCCNLNLTTEGIHIIKNFLVRPSNAYFWGYY

SEQ ID NO: 262406 - protein, 71 aa, Glycine max
  unsure (1)..(71): unsure at all Xaa locations
  Clone ID: PAT_MRT3847_78976C.1.pep
ERXPLSLTIXLFAITNGCHNXCPXPXFRXSNSTQSKXVXSCXQKCXTDXKXXMXYXDKYXGQAXDGVXXXI

SEQ ID NO: 262407 - protein, 111 aa, Glycine max
  Clone ID: PAT_MRT3847_78977C.1.pep
KAGKSTDELLDLFRTIAKGAEYMDSSYSEIGARLDMCNRGKITTAFQGLPVVTWHKCRHVLQIIVYYWGNWYRILIRDHIPTVWKFIGVLAAAALFVFTIMQTYYSSRNKD

SEQ ID NO: 262408 - protein, 61 aa, Glycine max
  Clone ID: PAT_MRT3847_78978C.1.pep
LFVKHTMNMILCVYFKIIIAIVNRLVSLDQHTPSTSPPTTVYCYLVKNRMTIPINVVENMT

SEQ ID NO: 262409 - protein, 241 aa, Glycine max
  Clone ID: PAT_MRT3847_78979C.1.pep
MASISSLSLTSVSLPKSQSLDPKKISDSSSSSGSRSQSCCCAPSFQRRKMLLSSAAIVAGTLCSNSVSGVSLAAEFADMPALRGKDYGKTKMRYPDYTETESGLQYKDLRPGNGPKPKMGETVVVDWDGYTIGYYGRIFEARNKTKGGSFEGDDKDFFKFKIGYNEVIPAFEEAVSGMALGGIRRIIVPPELGYPENDFNKSGPRPTTFSGQRALDFVLRNQGLIDKTLLFDIELLKIIPN

SEQ ID NO: 262410 - protein, 292 aa, Glycine max
  unsure (1)..(292): unsure at all Xaa locations
  Clone ID: PAT_MRT3847_7897C.1.pep
MAILNTGSVCGAGAALILAIIAFLLYKRHRRIKEAQARIAKEREGILNASNGDRAAKLFNGKEIKKATNDFSCDRLLGVGGYGEVYKGILQDGTVVAVKCAKLGNPKGTDQVLNEXNGTLLDHLQGQMPKGRDWLTWTHRLQVAXTAEGLAYLHFMAVPPIYHRDVKSSNILLDIKLNAKVSDFGLSRLARTNMSHISTCAQGTLGYLDLEYYRNYQLIDKSDVYSFGVVLLEVLTAQKALDFNRAVDDVNLAVYVHRMVTKEKLLDVIDPVLKMLEKRRDNTKSHTLKMMR

SEQ ID NO: 262411 - protein, 97 aa, Glycine max
  Clone ID: PAT_MRT3847_78980C.1.pep
ILLSSDFSCLYSFCHRNGSIPVSFIQKLLMKKLGLKSEDEVEIKCMGHPVLPSLQVQNLVDSWLDMAASGHRIPATIGSSGKDFVMILTYGRKVLHP

SEQ ID NO: 262412 - protein, 72 aa, Glycine max
  unsure (1)..(72): unsure at all Xaa locations
  Clone ID: PAT_MRT3847_78981C.1.pep
ILVDRNDQCPFLQLFPQLVRNRPRIFIDIIHRTVCMVQNYPLNVYQQGACXGFAIASIYKLFESIKEYNYSS

SEQ ID NO: 262413 - protein, 106 aa, Glycine max
  unsure (1)..(106): unsure at all Xaa locations
  Clone ID: PAT_MRT3847_78982C.1.pep
GCRCCCCGCRXPRAXSGSCPLGLSLRAXSLWWSRAAGWGAFSAARASWSWASGARGXRSSLAGAXXXXALVXFGRGAGXVGAGVAASPPXRPSFLXPXLWLSXAGS

SEQ ID NO: 262414 - protein, 491 aa, Glycine max
  Clone ID: PAT_MRT3847_78983C.1.pep
MPMYTPSLSAPSSNHIQPSVTLPLYITTTKLNLKQQHHTSTPMPIPMCNEIQAQAQAQAQAQPGFKLVGFKNFVRTNPKSDRFQVNRFHHIEFWCTDATNASRRFSWGLGMPIVAKSDLSTGNQIHASYLLRSGDLSFLFSAPYSPSLSAGSSAASSASIPSFDAATCLAFAAKHGFGVRAIALEVADAEAAFSASVAKGAEPASPPVLVDDRTGFAEVRLYGDVVLRYVSYKDAAPQAPHADPSRWFLPGFEAAASSSSFPELDYGIRRLDHAVGNVPELAPAVRYLKGFSGFHEFAEFTAEDVGTSESGLNSVFLGNNSETVLLPLNEPVYGTKRKSQIETYLEHNEGAGVQHLALVTHDIFTTLREMRKRSFLGGFEFMPSPPPTYYANLHNRAADVLTVDQIKQCEELGILVDRDDQGTLLQIFTKPVGDRPTIFIEIIQRIGCMVEDEEGKVYQKGACGGFGKGNFSELFKSIEEYEKTLEAKRTA

SEQ ID NO: 262415 - protein, 152 aa, Glycine max
  Clone ID: PAT_MRT3847_78984C.1.pep
MVNEQRIQEEAKVAALECSGTMSGPLVGAAASAGTRRRRRAEAMQLVLRALCMASSVVAISLMVTAKESSSVSIYGFLLPLHSKWSFSESYEYLVGVSAAVAAHSLLQLLIGISRFLRMSSMISSRNHAWLIFAGDQAFCYALMSAGSAASG

SEQ ID NO: 262416 - protein, 101 aa, Glycine max
  Clone ID: PAT_MRT3847_78985C.1.pep
PYPPPSKAGLKNQKTVFKSTKAEAPAPKGQRKEYPQPRGKRGALFWPRQEPNPTSGKKEKGFYGTPDTHRKALYNKRAWDGAPFLGGALQKRSFHSKKKKQ

SEQ ID NO: 262417 - protein, 51 aa, Glycine max
  Clone ID: PAT_MRT3847_78986C.1.pep
KHLASQVLTLIPSQLFPVKANKTPDSSSQTLIHSSHSKSQSSFRINHSLSP

SEQ ID NO: 262418 - protein, 39 aa, Glycine max
  Clone ID: PAT_MRT3847_78987C.1.pep
FFFCRTKLIYKIIVLEREREIEREREYTVWVTDYFSEQI

SEQ ID NO: 262419 - protein, 77 aa, Glycine max
  Clone ID: PAT_MRT3847_78988C.1.pep
YLKETCSYHHDVDVACILKAQDGHLYQHRSVRVEFSEDVSDDYLNQTPMRWFCISDSQVHAVSVEGVLSSEASLPFL

SEQ ID NO: 262420 - protein, 33 aa, Glycine max
  Clone ID: PAT_MRT3847_78989C.1.pep
RRFYVCARAEGPASNPEANCGYFKWASSKSRNK

SEQ ID NO: 262421 - protein, 156 aa, Glycine max
  unsure (1)..(156): unsure at all Xaa locations
  Clone ID: PAT_MRT3847_7898C.1.pep
GSRSLKTKKNEQVSLMISFATVTTVNRAAAXVWIAPFTDHKSTASFRTRRYQRDRSSIASIGDKVQRVQGRPPLEKKKFETLYXLQDLDDAQLAXEVQYLLKKRWLTRLELXVGARILNREHNTSPAYYDGRYWTMWKLPKVGCTDASHVMQDLQE

SEQ ID NO: 262422 - protein, 165 aa, Glycine max
  unsure (1)..(165): unsure at all Xaa locations
  Clone ID: PAT_MRT3847_78990C.1.pep
MSAEKVKLTGRLRLFFTNAKPYILMIGLQFGMAGNYIFGKDALNHGMSRFVFIVYRNAMATIALAPFAFFIERKSRPKMTLPVFLQIIVLGFLEPVFNQSFNYLGMKYTSASFTSTIVNAVPSITFVLAVFVRLEHLRLREVRSQAKVIGTLVXLEGALLMAIYK

SEQ ID NO: 262423 - protein, 78 aa, Glycine max
  Clone ID: PAT_MRT3847_78991C.1.pep
MVREFKEVKIVDAANLGFFSNAYAILFVVLITFCIIPAIIFSCADGVSKEKTSAADQEPYGAGCGAGCGAGCGAGCGA

SEQ ID NO: 262424 - protein, 78 aa, Glycine max
  unsure (1)..(78): unsure at all Xaa locations
  Clone ID: PAT_MRT3847_78992C.1.pep
NQSERKFVGXVPPPPPGLNGGVLDAHQGIAAAVDVPHRAPKRREGVAKSQRAYKRRRSSDPPPPPPIKXEARQKRVGR

SEQ ID NO: 262425 - protein, 73 aa, Glycine max
  Clone ID: PAT_MRT3847_78993C.1.pep
EKLGPLRAPVRIFRVSPGVPPGAPFGPFDPFFSFIPMRGFGPFNPKKKKKKKKKKKKKKKKKKKKKKKKKKKK

SEQ ID NO: 262426 - protein, 112 aa, Glycine max
  unsure (1)..(112): unsure at all Xaa locations
  Clone ID: PAT_MRT3847_78994C.1.pep
APILRYWKQPIHRKTSXTCFYPSASVVNHQCYSAAASNHAISRSLKSTAVSARVRGAIASRYVVLCHRSESSWLANGTASDTAATNSLTSSTAPGGFSAVVAVAVALSTYAL

SEQ ID NO: 262427 - protein, 56 aa, Glycine max
  Clone ID: PAT_MRT3847_78995C.1.pep
QYLLPMLLFLLTKISIIKPERRVTNYFDVPIPHCPFYRATPLNYKIPPLFIKHILY

SEQ ID NO: 262428 - protein, 140 aa, Glycine max
  unsure (1)..(140): unsure at all Xaa locations
  Clone ID: PAT_MRT3847_78996C.1.pep
MAWRLTQTAPFEAENALEASLRVAFESLQPSLRPPFSLSIPTPDQYALLNGAILHGALTEPHFSKTHIKHLHAIVTDGYATFVNLLLDAVLQLYXKLLXSAKTQLLWLTEEMVHVLAIGYDAVLVSLLRQIGAADCTEAT

SEQ ID NO: 262429 - protein, 266 aa, Glycine max
  unsure (1)..(266): unsure at all Xaa locations
  Clone ID: PAT_MRT3847_78997C.1.pep
MDTIANSVSKLLTLFLTVLFVGSELTHCNVTYDRKSLLINGQRRILISGSIHYPRSTPEGRVSFSTFSMXMWEDLIWKAKHGGLDVIDTYVFWDVHEPSPGNYDFEGRYDLVRFIKTVQKVGLYANLRIGPYVCAEWNFGGIPVWLKYVPGVSFRTDNEPFKAAMQGFTQKIVQMMKSEKLFQSQGGPIILSQIENEYGPESRGAAGRAYVNWAASMAVGLGTGVPWVMCKENDAPDPVINSCNGFYCDDFSPNKPYKPSMWTETW

SEQ ID NO: 262430 - protein, 202 aa, Glycine max
  unsure (1)..(202): unsure at all Xaa locations
  Clone ID: PAT_MRT3847_78998C.1.pep
GSELIHCNATYDRKSLLINGXRRILISGSIHYPRSTPKVCDLIRKAKHGGLDVIDTYVFWDVHEPSPGNYNFEGRYDLARFIKTVQKVGLYANLRIGPYVCAXWNFGGIPVWLKYVPGISFRTDNEPFKAAMQGFTQKIVQMMKSEKLFQSQGGPIILSLIENEYGPESRGAGGRAYVNWAARMAGELGTGVPWVMGKENDA

SEQ ID NO: 262431 - protein, 153 aa, Glycine max
  Clone ID: PAT_MRT3847_78999C.1.pep
RSTIDHPFFLILPTNMSRAAASFGILLCLLLLVAAVNCSDQGNCSTTCIVEQCDTIGIKYGKYCGVGYWGCAGEKPCDDLDACCMAHDNCVDKFGMTHVKCHKRLKNCLTRELKSGKVGFSKECPYSRAAPTMIRGMDLAILLSQLGDFSVPH

SEQ ID NO: 262432 - protein, 309 aa, Glycine max
  unsure (1)..(309): unsure at all Xaa locations
  Clone ID: PAT_MRT3847_7899C.1.pep
MAILNTGSVCGAGAALILAIIAFLLYKRHRRIKEAQARIAKEREGILNASNGDRAAKLFNGKEIKKATNDFSCDRLLGVGGYGEVYKGILQDGTVVAVKCAKLGNPKGTDQVLNEVGILCQVNHRNLVGLLGCCVELEQPIMVXMPKGRDWLTWTHRLQVAXTAEGLAYLHFMAVPPIYHRDVKSSNILLDIKLNAKVSDFGLSRLARTNMSHISTCAQGTLGYLDLEYYRNYQLIDKSDVYSFGVVLLEVLTAQKALDFNRAVDDVNLAVYVHRMVTKEKLLDVIDPVLKMLEKRRDNTKSHTLKMMR

SEQ ID NO: 262433 - protein, 329 aa, Glycine max
  unsure (1)..(329): unsure at all Xaa locations
  Clone ID: PAT_MRT3847_789C.1.pep
MGAKRQQPSEWVKGKLVGCGSFGNVHLAMNKTTGGLFVVKSPHSRAERHALDKEVKILNTLNSSPYIVQCLGTEEEEEDQGKLNVFMEYMAGGNLADMVHKFGGSLDEEVVRVYTREILHGLEHLHQHGIVHCDLKXQNVLLGSSGNIKLADFGCAKRVKEDSANCGGTPLWMAPEVLRNESVDFAADIWSLGCTVIEMATGTPPWAHQLSNPITAVLMIAHGDGIPHFPPHFSKEGFDFLSRCFQRQPNKRSTVQDLLTHPFVSTPSSQQQYAPSSSPSTVKETSKENRSSITNTFASHHDDPKGIPVCKPQDIALGSSGNWITVRSG

SEQ ID NO: 262434 - protein, 56 aa, Glycine max
  Clone ID: PAT_MRT3847_78C.1.pep
LPHVRLECQCFLHSFGPTRVYGDDLQMELLHAILCVIHCWGGPRLQHFEHSCSECL

SEQ ID NO: 262435 - protein, 83 aa, Glycine max
  Clone ID: PAT_MRT3847_79000C.1.pep
QLMHLKVIICFLYLGTKKYSHLFLIYKNGGSIMRCFDILIDRLAFHSLLALDILLSIFRSPNCDNILSLYFQFTNMNCILLDK

SEQ ID NO: 262436 - protein, 58 aa, Glycine max
  Clone ID: PAT_MRT3847_79001C.1.pep
RPQLQKVVMYHSMWLAPFIKIPGFVFVMFGFKYQGSCQWSPSQDYGTGVSHQRTRPRV

SEQ ID NO: 262437 - protein, 53 aa, Glycine max
  Clone ID: PAT_MRT3847_79002C.1.pep
CVSILAIMLSHSKISVVTPARAFAQQSGLICAAGCANEVCESSQSSLSNRDVL

SEQ ID NO: 262438 - protein, 93 aa, Glycine max
  Clone ID: PAT_MRT3847_79003C.1.pep
MMVQKEDLGLSLSLNFPHHSTPNPQHLSLMSSSTHSSSPSGFNPQKPSWNEAFASSDPDRNSDTCRGETRSFLRGIDVNRLPSAVDAEEEAGV

SEQ ID NO: 262439 - protein, 456 aa, Glycine max
  Clone ID: PAT_MRT3847_79004C.1.pep
MDPCPFVRLTVGNLALKIPVASKPALSVVHPSSSPCFCKIKLKNFPLQSAVVPFIPPESHFPDSQVHPIAATFHLSKSDIDKLAGKSIFSGKLCLKISIYTGRRGSTCGVSSGRLLGRVSVPLDLTGTVAKTTVFHNGWIRIGKDAKGSSAQFHLNVKAEPDPRFVFQFDGEPECSPQVFQIQGNISQPVFTCKFSFRNNGDRNHRSRSLQSEPGGSRSWLSSFGSERERPGKERKGWSITVHDLSGSPVAAASMVTPFVASPGSDRVSCSNPGSWLILRPSDGTWKPWGRLEAWRERGGSDGLGYRFELIPDTNGGMSAAGIVLAESTLSSNKGGKFVIDLSCRNGNVSGNGGSNGRATPGSATSPACSPRSSGDYGYGLWPYCMYRGFVMSASVEGEGRCSKPTVEVSVPHVNCTEDAAAFVALAAAVDLSVDACRLFSQRLRKELCQQLDLIG

SEQ ID NO: 262440 - protein, 41 aa, Glycine max
  Clone ID: PAT_MRT3847_79005C.1.pep
VFGEYYRFDATSFVMVMRREAKVRIYVKPDQNAENKGVFCY

SEQ ID NO: 262441 - protein, 140 aa, Glycine max
  Clone ID: PAT_MRT3847_79006C.1.pep
MSAAGIVLAESTLSSNKGGKFVIDLSCRNAVNGSGNGGSNGRATPGSATSPACSPRSSGDYGYGLWPYCMYRGFVMSASVEGEGRCSKPTVEVSVPHVNCTEDAAAFVALAAAVDLSVDACRLFSQRLRKELCQQLDLLG

SEQ ID NO: 262442 - protein, 94 aa, Glycine max
  Clone ID: PAT_MRT3847_79007C.1.pep
PLNQHVKFTPVHQHQSQSSLSTLSSPTPTCYNTNQFTVNVLVSNRVKPYDCLTDDPSITAAFFVPFYVSFNIARYLCYCKTWHRFLQLLKTSNN

SEQ ID NO: 262443 - protein, 247 aa, Glycine max
  Clone ID: PAT_MRT3847_79008C.1.pep
MLNWLDMTNNHNHCVPDFDIQMDHDHEYPILTPSALPRQKKPSIADDDIMELLWHNGQVVVQSQNQRSLRKLPPVTNSHDASPAGPSMTREIRPLVENFNQHLFMHEGEMASWLHYPIDDDEPALDQSFGADFLYSPPTTANNSSFMQTLGHTSQLTELRPMSANPRPPIPPPRRPEQRTPNFAYFSRHNTRAAEPSVKAARESTVGGFVRYGGGGFESFGDSKERGGREVPALRRLPRVPAVEGAR

SEQ ID NO: 262444 - protein, 47 aa, Glycine max
  unsure (1)..(47): unsure at all Xaa locations
  Clone ID: PAT_MRT3847_79009C.1.pep
YXSQHLXLHHSPAQSRSHFWRPIFPSTLNDPVMLTLLQDLHPGSIAF

SEQ ID NO: 262445 - protein, 346 aa, Glycine max
  Clone ID: PAT_MRT3847_7900C.1.pep
MFILNFLTVYFTKFSFCSCSSDVQQSAGSVCGVGAALILAIIAFLLYKRHRRIKEAQARLAKEREGILNASNGGRAAKLFSGKELKKATNDFSSDRLLGVGGYGEVYKGILQDGTVVAVKCAKLGNPKGTDQVLNEVRILCQVNHRNLVGLLGCCVELEQPIMVYEFIENGTLLDHLQGQMPKSRGLLTWTHRLQIARHTAEGLAYLHFMAVPPIYHRDVKSSNILLDIKMNAKVSDFGLSRLARTDMSHISTCAQGTLGYLDLEYYRNYQLTDKSDVYSFGVVLLEVLTAQKALDFNRAVDDVNLAVYVHRMVTKEKLLDVIDPVLKMLEKRRDNTKSHTLKMMR

SEQ ID NO: 262446 - protein, 110 aa, Glycine max
  Clone ID: PAT_MRT3847_79010C.1.pep
LAMEDKYSLGRQHSGIWKSLRDGEFDEEEVWDVFKNRSDYGSSSSGVRKSKDKGKSSSVPARPSSARMIPRSSNSSNNSSASSSNEAKVLQQSAPVNIPDWSKIYRTKTP

SEQ ID NO: 262447 - protein, 80 aa, Glycine max
  Clone ID: PAT_MRT3847_79011C.1.pep
MGDQAQSSDAKGTNRDFNTAILERKKAPNLLVVDEADNDDTLRPVHNPHTIEKLQLLQRDTILLKGKKKKDTICIALADD

SEQ ID NO: 262448 - protein, 125 aa, Glycine max
  Clone ID: PAT_MRT3847_79012C.1.pep
MKSYDMIPDLTKAVWNVLELRLLVLISFFLQVFLIVFGNRRKCIADARLQVSVWLTYLSADWIATVALGMLSKDSKNPENDPDFIIMAIWAPFLLVHLGGPDTITAYSLEDNELYLRHFLGLLYQ

SEQ ID NO: 262449 - protein, 79 aa, Glycine max
  Clone ID: PAT_MRT3847_79013C.1.pep
MKLKFIIILCASISTFVCMGEWEPTWSTRAAEEAEAVAAIPCSGHGRAYLDGLILKDMNKSRCECNSCYAGSDCSQFLS

SEQ ID NO: 262450 - protein, 70 aa, Glycine max
  Clone ID: PAT_MRT3847_79014C.1.pep
IRLEGEQEQKSIKFYLTPESNTGEVSYNNTWPSQHTCFLLFLQLPPSFMDHMHKPDTCYVIPRAGSFIPT

SEQ ID NO: 262451 - protein, 69 aa, Glycine max
  unsure (1)..(69): unsure at all Xaa locations
  Clone ID: PAT_MRT3847_79015C.1.pep
NRNPYFKLFWPVKKTLFFLVQQKPNCYFFLPVTTRXXRLFFRAKFYMIYVNLPPFAISKEGLLKHAYFS

SEQ ID NO: 262452 - protein, 39 aa, Glycine max
  Clone ID: PAT_MRT3847_79016C.1.pep
WLPILVNCLYPVSQLPSEPGDGNVTCGRGPGGVPTTSVE

SEQ ID NO: 262453 - protein, 36 aa, Glycine max
  Clone ID: PAT_MRT3847_79017C.1.pep
KSVFSHPFWNSFRGKSIFPTAYKTPKPFVNIKVFIF

SEQ ID NO: 262454 - protein, 92 aa, Glycine max
  Clone ID: PAT_MRT3847_79018C.1.pep
MGTGWRRAFCTRDPASTISDKQPRSPSQSPSPSPRSCARLGFLSGGSNPSTPRLRCTTTAETVSQTVTVSESPRVHSKKSTPRAAKSPKTLS

SEQ ID NO: 262455 - protein, 44 aa, Glycine max
  Clone ID: PAT_MRT3847_79019C.1.pep
KTVAHSFHVPLTTENNYSTNFYRKFSSPAAPYSKKFTCYCHLEE

SEQ ID NO: 262456 - protein, 67 aa, Glycine max
  Clone ID: PAT_MRT3847_7901C.1.pep
PTSSSSWGRLFVCQHSLTIFWISSGSAYPSSPALWRFLCGSCIGKAIGSQKASSPNASWSGSTSKEG

SEQ ID NO: 262457 - protein, 393 aa, Glycine max
  unsure (1)..(393): unsure at all Xaa locations
  Clone ID: PAT_MRT3847_79020C.1.pep
MPSLLSPGKIHCLEVENFKSYKGFQVIGPFYDFTAILGPNGAGKSNLMDAISFVLGVRTGQLRGAQLKDLIYAFDDREKEQKGRRAFVRLVYHLANSTEIKFTRTITSAGASEYRIDESLVNWDTYNNRLKSLGILVKARNFLVFQGDVESIASKNPKELTALVEQISGSDECKRDYEQFEEEKGAAEEKSALVYQKKKTVVMERKQKKEQKEEAEKHLCLQQELKSMKGEHFLWKLFNIHNDYAETIKDLEDEEKSREGVVKELEYFESEASKKKKEQAKYLKEIALREKRIAEKGNKLDKSQPELLKLKEEMTRITSKIKKGKKELDKKKVERKKHDADIALLQNDIQDLTAQMADLQEKGRDVDDELDLQCNDLEEXFRINEEPGMKTAK

SEQ ID NO: 262458 - protein, 340 aa, Glycine max
  Clone ID: PAT_MRT3847_79021C.1.pep
MGISIRNSLVYVLLLFAFCEMQIIAGKDTLTCPFRRSPCFGKKVQCPSQCPLQSPSDPKAKVCNLDCDSPTCETKCKTRKPNCNGRGSACLDPRFVGADGIVFYFHGRRNENFALVSDANLQINARFIGLRPATRTRDYTWIQALGILYGSHQFTIEATPSPTWDDEIDHLKFSHNGNELVIPDSFLSTWQCPENKLRIERTSSKNSVSITLQEVADISINVVPVTKEDSRIHNYQIPDDDCFAHLEVQFKFHGLSNKVEGVLGKTYQPDFQNPAKLGVAMPVVGGEDRYRTTSLVSADCGVCLFDAREGSEKKMNSESEYGVLDCTGAANSGNGIVCRR

SEQ ID NO: 262459 - protein, 75 aa, Glycine max
  Clone ID: PAT_MRT3847_79022C.1.pep
MGLPLLLLFSLLGLSSSSSVSTHRSILDLDLTKFARQKQESAMVQLWQSEHGRVYHNLEVEAMRLEIFKNNLNYI

SEQ ID NO: 262460 - protein, 69 aa, Glycine max
  Clone ID: PAT_MRT3847_79023C.1.pep
KSPNIQTKEAESWKPRIKGLQLWEDLKFIAYPNGNTFSLAGETFIYSFFLRAEFSGKLFIIRLLIVFGS

SEQ ID NO: 262461 - protein, 570 aa, Glycine max
  Clone ID: PAT_MRT3847_79024C.1.pep
MAEEAKAKGNAAFSAGDFAAAVRHFSDAIALSPSNHVLYSNRSAATLPPELRGGPSRRQKTVDLKPDWPKAYSRLGAAHLGLRRHRDASPPTKPASNSNPDNAALKSGLADAQAAASRPPPTSPFATAFSGPDMWARSPPTPPHVQPPGPRVRQDHAGHPEGPQQVQPAFEYQRVMHAIGVLLNVKIQTPNHDENDHDADDDVSEDEVVSQPEPEHEPEAAVEVAEEEEEEEKETRDRKGQAQKEKEAGNAAYKKKDFETAIGHYSKALELDDEDISYLTNRAAVYLEMGKFEDCIKDCEKAVERGKELRSDYKMIARALTRKGTALAKMAKCSKDFEPAIEIFQKALTENRNPDTLKKLNEAEKAKKELEQQEYFDPKLADEAREKGNELFKQQKYPEATKHYTEAIKRNPKDAKAYSNRAACYTKLGAMPEGLKDAEKCIELDPTFSKGYTRKGAVQFSMKEYDKALETYREGLKHDPNNQELLDGIRRCVEQINKASRGDFTPEELKERQAKAMQDPEIQSILQDPVMTQVLTDFQENPRAAEEHVKNPMVMNKIQKLISAGIVQMR

SEQ ID NO: 262462 - protein, 207 aa, Glycine max
  Clone ID: PAT_MRT3847_79025C.1.pep
MATLSNSTNIFWQDCQIGRPERQKLLNQKGCVVWITGLSGSGKSTLACSLSRELHSRGKLSYVLDGDNLRHGLNKDLGFKAEDRTENIRRTGEVAKLFADAGLICVASLISPYRRDRDTCRAMLPDANFIEVFMNMPLELCEARDPKGLYKLARAGKIKGFTGIDDPYEPPINCEIEIKQENGNCPTPTMMAGQVVTYLENKGFLES

SEQ ID NO: 262463 - protein, 207 aa, Glycine max
  unsure (1)..(207): unsure at all Xaa locations
  Clone ID: PAT_MRT3847_79026C.1.pep
MATLSNSTNIFWQDCQVGRLERQKLLNQKGCVVWITGLSGSGKSTLACSLSRELHSKGKLSYVLDGDNLRHGLNKDLGFKAEDRAENIRRTGEVTXLFADAGLICVASLISPYRRDRDTCRAMLPDASFIEVFMNIPLXKCESGFHEDASKLARGTRTKGPIEAYXPNEQPINCEIEIKQENGDCPTPTLMAGQVVTYLENKGFLES

SEQ ID NO: 262464 - protein, 93 aa, Glycine max
  Clone ID: PAT_MRT3847_79027C.1.pep
NHQMQLPNLEKLPSHTSFCEFPSLLPSRSPDNFSGVTTVTGVSSNYFFPLFASIPRSFLVLRTSSFSFHHHNFRYCIFNCFGYILRVITDCFF

SEQ ID NO: 262465 - protein, 109 aa, Glycine max
  unsure (1)..(109): unsure at all Xaa locations
  Clone ID: PAT_MRT3847_79028C.1.pep
YLIVIXSLLSLYFKTLHIXXFLVAFQIGARPSQXPFSLHFIYPTLFYICYSYFHLQRIFFYYNYASILSIHSPRVSLLPPSSHHLHFSISFPYLLFFNPFIFFFFQSLS

SEQ ID NO: 262466 - protein, 197 aa, Glycine max
  Clone ID: PAT_MRT3847_79029C.1.pep
MAGVTKEEERGSPSWGASFFTQTTEDVARAVATAMNSQRPSVVYSLKNDHGGSQLQRLQYQVTKMIKGFSSPPEVKYTNYNPEILTTQKRQWAANFQLQYTDHKSWKEPTKLFESMVVAGLHPNCDIQALQRQCFLRKSEGPGKLRSALGYQNQSRVEVEPNLEPQVLFVYPPEKQLPLKGKDLLSFCFPGGLEVNA

SEQ ID NO: 262467 - protein, 70 aa, Glycine max
  Clone ID: PAT_MRT3847_7902C.1.pep
LMTIKYLFRHFFFMFYAYTRDLRSGSVNFTNIERQEHYSGNLTGIDREAGTCSHERMPPLNIVFMFKLWH

SEQ ID NO: 262468 - protein, 34 aa, Glycine max
  Clone ID: PAT_MRT3847_79030C.1.pep
TVTLCGIIGAVHYDSLAEAEPLCSLIENVSFCSI

SEQ ID NO: 262469 - protein, 75 aa, Glycine max
  Clone ID: PAT_MRT3847_79031C.1.pep
FCEFTVTERERKKESERATELERARDAAACMFSAIQKKKSNGFHQLLFSLLQAAAVARTSLARSSFAACYFKRVL

SEQ ID NO: 262470 - protein, 53 aa, Glycine max
  Clone ID: PAT_MRT3847_79032C.1.pep
YTALPVGLRLDLFLLLQSRSHVISLILVVLLVRFLVIISLSFTSIVHFGSVGS

SEQ ID NO: 262471 - protein, 61 aa, Glycine max
  Clone ID: PAT_MRT3847_79033C.1.pep
QASIRWGHKHYRIYNKAANITRFPQGFPQKSSQAINNLIQMLQYHYKMIPIYGTHRCSHGR

SEQ ID NO: 262472 - protein, 135 aa, Glycine max
  unsure (1)..(135): unsure at all Xaa locations
  Clone ID: PAT_MRT3847_79034C.1.pep
TCLASTFLPRFGVLVVEPIPDFLFSPRVAPISAERTNNGLGGTKTLFLLGEALREXDWSAPARPPPPLLVARQCSXSCSRWCCRLECRLYXSRPXSFIVSASGLILRFLPGPLAVVAALLTXLSFAFLRGRFAGA

SEQ ID NO: 262473 - protein, 76 aa, Glycine max
  unsure (1)..(76): unsure at all Xaa locations
  Clone ID: PAT_MRT3847_79035C.1.pep
INXSGWHESSPAFAVSTLYYAAPNNPRPASHPANRVTWPGYHVIXXPDLXNFPVPPFLDGDRWLPHTGVPYVPGXI

SEQ ID NO: 262474 - protein, 328 aa, Glycine max
  Clone ID: PAT_MRT3847_79036C.1.pep
MAETEIEKITTIDPETEFLASKRRNGNEWETFKENVRPLKRGRNVNLLNHALNSHTDNELKKSLMEQRRKLIEAIEEYQGDDPLLPWIQCIKWVQEAFPPGGDSSGLVVIYEQCVRAFWHSERYKDDLRYLKVWLEYADNCFDADVIYAFLDANGIGKTHSIFYISYALHLESKNKFKAANQMMELGISRNAQPVDKLKAAYRQFFARSMARPIAIDDAVEKLAPTRSFGTVLAKGENRAPLSILNSNRDPCAKNDRTRAAPLSIYKDSADTGDTDPHKPDLSHSWHTLGARADRNKENNAIPGKWKCYMNSQRPGTYNWRGYCKCLL

SEQ ID NO: 262475 - protein, 134 aa, Glycine max
  unsure (1)..(134): unsure at all Xaa locations
  Clone ID: PAT_MRT3847_79037C.1.pep
MSDTEDHAASEYSNGDESPPKPRQRFRDRSKEMLSKQAVQTKQMLSKQAVKIAKQAEEHERFINTRXTHLVGVLGFGGFCFLLAARRRQKGPQAVPLVYCLFYVVFVPLRWIYYRFKKWHYYLLVNDDISISVF

SEQ ID NO: 262476 - protein, 37 aa, Glycine max
  Clone ID: PAT_MRT3847_79038C.1.pep
LVSSFMRSCNNLISHQCTVLAFLVYAWRPFCRLLAAV

SEQ ID NO: 262477 - protein, 40 aa, Glycine max
  unsure (1)..(40): unsure at all Xaa locations
  Clone ID: PAT_MRT3847_79039C.1.pep
SSHPVTSKSQRRMMMNIEHYLPPPAVEKKNCSKSSHYLXT

SEQ ID NO: 262478 - protein, 74 aa, Glycine max
  Clone ID: PAT_MRT3847_7903C.1.pep
DVDEVEELRDNAAEALVNYYVDPLYHDSVSDAINVPSFRNMQNRLTHIRASNEHMARSLRRMSVEQLTWNPDLA

SEQ ID NO: 262479 - protein, 54 aa, Glycine max
  Clone ID: PAT_MRT3847_79040C.1.pep
PGTIQIISLLALKQNMCSLRKLSEFGYIFTTCEPLHQTQVLTFPFLIYLQFLYR

SEQ ID NO: 262480 - protein, 104 aa, Glycine max
  Clone ID: PAT_MRT3847_79041C.1.pep
MALNNGVPATGTGLIVSFGEMLIDFVPTVSGVSLAEAPGFLKAPGGAPANVTIAVTRLGGKAAFVDKLGDDKFGHMLAGILKDFNQDTRTALALVTLHASGERK

SEQ ID NO: 262481 - protein, 56 aa, Glycine max
  Clone ID: PAT_MRT3847_79042C.1.pep
RKELRLRQKACIFYQSLHRVNFSRVKFSFKWLQCVCLKIKGNLFFFIHWIASNLCI

SEQ ID NO: 262482 - protein, 63 aa, Glycine max
  unsure (1)..(63): unsure at all Xaa locations
  Clone ID: PAT_MRT3847_79043C.1.pep
AECGCVKEGGGTRRSLVKYDEQWPALHYSPSLHLENLXESMRHHEEELNYWRTAEETGRSNVK

SEQ ID NO: 262483 - protein, 135 aa, Glycine max
  unsure (1)..(135): unsure at all Xaa locations
  Clone ID: PAT_MRT3847_79044C.1.pep
QFRQAATRYQRETWVKVLYYLRDEGLHASGGFSSGVSKSGSQXRFKTFNSMFEEVHRTQAVWLIPDSQLREELRISISEKLIPAYRSFLGRFRSYIESGRHPENYIKYSVEDLEYAVLDFFEGIPVSQHLRRRSE

SEQ ID NO: 262484 - protein, 84 aa, Glycine max
  Clone ID: PAT_MRT3847_79045C.1.pep
EHKLQYPRPKSKQLIEVHKRTMKNTKSTFIQKINAIMLTENILQHTTLKEAPCSFRCHVSIVRLDSTSLQTQQALHLPFLSNSR

SEQ ID NO: 262485 - protein, 53 aa, Glycine max
  Clone ID: PAT_MRT3847_79046C.1.pep
LLKLQNSISLHSTSPFNPSFSSPSQVLGNRNPFEEVQNSFLQVLNRVLDEILR

SEQ ID NO: 262486 - protein, 109 aa, Glycine max
  Clone ID: PAT_MRT3847_79047C.1.pep
ESGGQKHHFLSYNLELPSQKNKYEAQGGWATSLMLQRIEGHAKVKNMHWYKVGNHSARKQKQFLLFIKEIINLIACFRQGGGPLRGGTFHKGGSWRGGSYRGGWKPGGS

SEQ ID NO: 262487 - protein, 39 aa, Glycine max
  Clone ID: PAT_MRT3847_79048C.1.pep
YIPLYILRFLYLMSRSKRIFHPLNFIKECKQKSLKKSKL

SEQ ID NO: 262488 - protein, 172 aa, Glycine max
  unsure (1)..(172): unsure at all Xaa locations
  Clone ID: PAT_MRT3847_79049C.1.pep
WSSSIGEWRLSCMSPAKTSLSKATLGACICRTIDTPSCPSGWSSGSFPAVIQNEPILTTPSDMVTPTVRRNMARKXEQTIKXLQKLLREKIGRQTTSTKKVEHITTSLXTSSSNNIPSSQSSYRIKANFIHFNKYKYYNNPALYGELTKYHRRKFIIFTYSDSQVWPSHVRD

SEQ ID NO: 262489 - protein, 73 aa, Glycine max
  unsure (1)..(73): unsure at all Xaa locations
  Clone ID: PAT_MRT3847_7904C.1.pep
TCXTCLDQAIFVPLHNDAMVVFRVTALSHFLVTLFNFTLIPFQDIFFSSVLLWCYKKEMEQNTDQDGPGKTEI

SEQ ID NO: 262490 - protein, 67 aa, Glycine max
  Clone ID: PAT_MRT3847_79050C.1.pep
FFFGIGLHFVALPPKEEGPCFLNCGVGTLIALIPPGSGEAYFLRFDSIFKIFYPLPEPWEGLYSPFP

SEQ ID NO: 262491 - protein, 109 aa, Glycine max
  unsure (1)..(109): unsure at all Xaa locations
  Clone ID: PAT_MRT3847_79051C.1.pep
ITHWPQGDFILDLDPLFSHHSITMPSPSADQSQSQPKPYPNLLSLFLKPIIMLLLTSLFFLLLXFSAFLLLNLFLLGGAFHRLCFRPFVNFAPAFFIGLPPCDINNLPR

SEQ ID NO: 262492 - protein, 84 aa, Glycine max
  Clone ID: PAT_MRT3847_79052C.1.pep
QPVPEHYYTQNGNPQCSRTCKTQTQMALVPFYLSIYKQHLVKAFHRKPTVPWYANYIPSFATIRFFSTSLNFAGAHGAVPTLFF

SEQ ID NO: 262493 - protein, 48 aa, Glycine max
  Clone ID: PAT_MRT3847_79053C.1.pep
NVQRQSLFDRNYYQINFHVNNEMLKSNHYLTRVIVILSCPCEQWSVQR

SEQ ID NO: 262494 - protein, 987 aa, Glycine max
  Clone ID: PAT_MRT3847_79054C.1.pep
MERARRLANRAILRRLVSEAKQHQKNESVLHSSTTPMLLYSSSRCMSSVLRSRGSKTETLLGRNINMSRGVVVAAAGGFLGVGSARSISVEALRPSDTFPRRHNSATPEEQSKMAESCGFGSLDSLVDATVPKSIRLKDMKFGKFDAGLTENQMIEHMKDLASKNKVFKSYIGMGYYNTHVPPVILRNIMENPAWYTQYTPYQAEISQGRLESLLNYQTMITDLTGLPMSNASLLDEGTAAAEAMSMCNNIQKGKKKTFIIASNCHPQTIDICKTRADGFDLKVVTADLKDIDYKSGDVCGVLVQYPGTEGEVLDYGEFVKKAHAHEVKVVMASDLLALTVLKPPGEFGADIVVGSAQRFGVPMGYGGPHAAFLATSQEYKRMMPGRIIGVSVDSSGKTALRMAMQTREQHIRRDKATSNICTAQALLANMAAMYAVYHGPEGLKNIAHRVHGLAGAFALGIKKLGTVEIQDLPFFDTVKVKTSNAHAIADAALKSGINLRVVDGNTITVAFDETTTLEDVDNLFKVFAGGKPVSFTAASLAPEVQSAIPSGLVRKSPYLTHPIFNTYQTEHELLRYLYRLQSKDLSLCHSMIPLGSCTMKLNATTEMMPVTWPSFSDIHPFAPVDQAQGYQEMFNNLGELLCTITGFDSFSLQPNAGAAGEYAGLMVIRAYHLARGDHHRNVCIIPVSAHGTNPASAAMCGMKIVSVGTDAKGNINIEELRKAAETHKDNLSALMVTYPSTHGVYEEGIDEICNIIHDNGGQVYMDGANMNAQVGLTSPGWIGADVCHLNLHKTFCIPHGGGGPGMGPIGVKKHLAPFLPSHPVIETGGIPAPDKPQPLGTIAAAPWGSALILPISYTYIAMMGSKGLTDASKIAILNANYMAKRLENYYPVLFRGVNGTVAHEFIIDLRGFKNTAGIEPEDVAKRLMDYGFHAPTMSWPVPGTLMIEPTESESKAELDRFCDALISIRQEIAEIEKGNKSITEPV

SEQ ID NO: 262495 - protein, 63 aa, Glycine max
  unsure (1)..(63): unsure at all Xaa locations
  Clone ID: PAT_MRT3847_79055C.1.pep
ILRDSAEAHTHEPANGPXRGGQSHPYAQXTLDPRSHGKPGAARRPAGPPPPPTPAPAYITPPP

SEQ ID NO: 262496 - protein, 118 aa, Glycine max
  unsure (1)..(118): unsure at all Xaa locations
  Clone ID: PAT_MRT3847_79056C.1.pep
LLVTCPSFTDIHPFAPVDQAQGYQXMSNNLGELCCTITGFDSFSLQPNAGAAGEYAGLMVIRAYHLARGDHHRNVCIIPVSAHGTNPASAAMCGMKIVSVGTDAKGNINIEELRKAAL

SEQ ID NO: 262497 - protein, 67 aa, Glycine max
  Clone ID: PAT_MRT3847_79057C.1.pep
HGARYHRIPLLIKTGFAGQPEQVKRLRVTVASLSHLITASETIYKNGGLPAGEYIDNEPAIANCVTF

SEQ ID NO: 262498 - protein, 91 aa, Glycine max
  Clone ID: PAT_MRT3847_79058C.1.pep
MERARRLANRAILRRLVSEAKQHQKNESVLHSSTTPMLLYSSSRCMSSVLRSRGSKTETLLGRNINMNMNMSRGVVVAAAAGFLGVGSARS

SEQ ID NO: 262499 - protein, 41 aa, Glycine max
  Clone ID: PAT_MRT3847_79059C.1.pep
MCHNCMTQLLHSCSIETSLCLEYLGFIYFISMMLPKVHNRN

SEQ ID NO: 262500 - protein, 114 aa, Glycine max
  Clone ID: PAT_MRT3847_7905C.1.pep
MMALKKTLAQRIINITNSFNYRIACSEDRSPNPTDADIGADPGDNRRMLHKRTAEFPPELRAAPPVGRLLQRLREMDMMQSRSRLDGLTAPETDQLQAPEHMRKVIRAAQIETV

SEQ ID NO: 262501 - protein, 55 aa, Glycine max
  unsure (1)..(55): unsure at all Xaa locations
  Clone ID: PAT_MRT3847_79060C.1.pep
GKTPPLGGEKIQKKAXVQKLLEKNVGLSALLAKKKAPLFPLNDQCKMMALGVSNM

SEQ ID NO: 262502 - protein, 36 aa, Glycine max
  Clone ID: PAT_MRT3847_79061C.1.pep
AASDTRGQLLLFGVTPATAWVLYNILQPALNQLNKM

SEQ ID NO: 262503 - protein, 65 aa, Glycine max
  Clone ID: PAT_MRT3847_79062C.1.pep
TSFFSVCVCSLGLLLCNMARQSLSMGIPKSGLMQRCSRHFREQKTRFYIIWRCTVFLMRCEDNRI

SEQ ID NO: 262504 - protein, 127 aa, Glycine max
  Clone ID: PAT_MRT3847_79063C.1.pep
LEEQCHVPHIVANIFTGFLFGPSVLGRWNAFIKNAFPFSNMIPFETVGGMVLVYYVFFVGLEIDLKPITGFHKKAMVIVISCTIFTLPIGFGLYYMLVTDMWRKPLPLVNARPKGAILWVNYPFLQQ

SEQ ID NO: 262505 - protein, 112 aa, Glycine max
  unsure (1)..(112): unsure at all Xaa locations
  Clone ID: PAT_MRT3847_79064C.1.pep
HNASHSERGRSSSMSDSAMLGAXQYQSRVKSLTKAGGGGTWSEEIGHGVVCGVIRCQHTTKKSRVSPWVWERNTPRSEAGVPQTYSLLKKLIRLLLCRPTDPGAVVARTRPC

SEQ ID NO: 262506 - protein, 144 aa, Glycine max
  unsure (1)..(144): unsure at all Xaa locations
  Clone ID: PAT_MRT3847_79065C.1.pep
PGVPTGRHHEHRAGIFTTSTSGLQADDNMXITLSYHHPTHSAQRAMPGVAVEPGGPAYAAYINIGSYHLIGLPLGIITGWAFKSGVTGTRGGMIFGGTARXTLILTIVTIRCDWEKEEEKACYRVSKWTKSNSNGNREACKKHL

SEQ ID NO: 262507 - protein, 60 aa, Glycine max
  unsure (1)..(60): unsure at all Xaa locations
  Clone ID: PAT_MRT3847_79066C.1.pep
IPQTYRETAALITKGKMRWLFINDLDAXAGLLAGTTPSAVNTHMANAALMNIADNHTNVQ

SEQ ID NO: 262508 - protein, 197 aa, Glycine max
  Clone ID: PAT_MRT3847_79067C.1.pep
MDFSSVRAALDSKSYDKVADVCDNLMLQVAAEGIAYQDDWPYTIHLLSHIYVHDINSARFLWKSIPSSIKESQPEVTAVWKIGQKLWLRDYAGVHEAIRGFDWTQELQTLVAAFSELYTKEMFQLLLSAYSTISIKDTALFLGMNEDDATNYVLQQGWTVDPASQMLIVKKQPVVTEQKLDPSKLQRLTEYVFHLEH

SEQ ID NO: 262509 - protein, 84 aa, Glycine max
  Clone ID: PAT_MRT3847_79068C.1.pep
ENIPQREEEGAFIPLICPFGDALYFLAASSTSSVLPSSTVSISISACNIHSELGSVSAIDQCSLLSVSRFQPRSCISPLPFVRS

SEQ ID NO: 262510 - protein, 175 aa, Glycine max
  Clone ID: PAT_MRT3847_79069C.1.pep
MEFESLQRRRSSSVSANQNNASIREKRPKRSEVIAKNKTIEELIKTARAEKDHLAPFPDFRRFHVNGLSVCLKSGHGNKLSSPVKHYIQSLLKLNMEGPYGSEWPEEEKVKRKEMVLPEAHYVFVHEVANSNADEMTTVLTAAETSTCLEDSGPLVGFVQYRFVLEEEIPVLYVY

SEQ ID NO: 262511 - protein, 48 aa, Glycine max
  Clone ID: PAT_MRT3847_7906C.1.pep
QTFAGIIYAYEVGLFNMIQGKRMNSISRAFPTKTDVLKDIYKKDNIDL

SEQ ID NO: 262512 - protein, 103 aa, Glycine max
  Clone ID: PAT_MRT3847_79070C.1.pep
ELRFQPRVPCVMVHLYVSSRVDLAPWGASRWSLFDEPGGGLPIFCFSREEVEASLFLLHPIIGSSIVFSGPCGGVLFNFITIVLVISIYIKKKTTKITKKIIL

SEQ ID NO: 262513 - protein, 51 aa, Glycine max
  Clone ID: PAT_MRT3847_79071C.1.pep
SSSTNKNKSCPTSENLSVVEICCTPITHSVFAISKLSLCIFIFILVRKNRS

SEQ ID NO: 262514 - protein, 60 aa, Glycine max
  Clone ID: PAT_MRT3847_79072C.1.pep
VHLDGNNITKKVLFALHIQCISLANRKINTKKIDGPFLCEHSQLIPIYFMFSEGIATSRS

SEQ ID NO: 262515 - protein, 69 aa, Glycine max
  Clone ID: PAT_MRT3847_79073C.1.pep
IHFRYEIEKSSLGDCACKCDAYIGIMWLKSSKFQQRINRNITAKFNLRLKEIFELVQKEILLMSQNSHG

SEQ ID NO: 262516 - protein, 56 aa, Glycine max
  Clone ID: PAT_MRT3847_79074C.1.pep
RKKGEINYLQKEKVKTSKKKKKNELCLVCGWHHISMYLNKYYSQEPIIFSNFSLPK

SEQ ID NO: 262517 - protein, 142 aa, Glycine max
  unsure (1)..(142): unsure at all Xaa locations
  Clone ID: PAT_MRT3847_79075C.1.pep
FVCTAAGGADTLIQYTPISYLLGVAAREKGCLRVKIVMCVNATRQGSDRNSLLHGVITSSCRTQILDTCKLTNXKRLCWELRLLIEGGGXSLSYRRAVISWRXLPSWSLSCLIGNTRRCTLLDNLLIISYDCAMAGNTLMAP

SEQ ID NO: 262518 - protein, 135 aa, Glycine max
  Clone ID: PAT_MRT3847_79076C.1.pep
MDNTPRLIQTVSSLVLILSISSLASASLKVGFYSSTCPSAEAIVKSTVEKAISANPGIAAGLIRMHFHDCFVRGCDGSVLLASTPGNPISERDNFVNNPSLRGFEVIEDAKNQIEAACPETVSCADILAFAARDS

SEQ ID NO: 262519 - protein, 66 aa, Glycine max
  Clone ID: PAT_MRT3847_79077C.1.pep
GALCLCVRMTFFLGECVYECMTMFYVKYVNSLTFIMSLWFCNLLNLGTFFFLDKKTSWFSELLLRA

SEQ ID NO: 262520 - protein, 169 aa, Glycine max
  unsure (1)..(169): unsure at all Xaa locations
  Clone ID: PAT_MRT3847_79078C.1.pep
MARKTSNCAICENSNQASICSICVNYRLNEYNTSLKLLKDRRDSLYSKLSEVLVRKGKGDDQANWRVLQHEKLARLKEKLRQGKEQVTQGRAKIETKSADLKLKYGLLESALSTLEKNRVEQXEKFYPNLICTQSLGHVAITSERLINKSVVIKQICKVVPTRPGGHRG

SEQ ID NO: 262521 - protein, 68 aa, Glycine max
  Clone ID: PAT_MRT3847_79079C.1.pep
VLQFCKPLTLYCAPHSFPSCDRLTELLCSHRPRGLWSRIIRRRVCCALFGSSYSFHTLSLCGSSGSSS

SEQ ID NO: 262522 - protein, 193 aa, Glycine max
  unsure (1)..(193): unsure at all Xaa locations
  Clone ID: PAT_MRT3847_7907C.1.pep
MKDGGRKQGAPSPCAACKLLRRRCAQDCVFAPYFPADEPQKFANVHKVFGASNVNKMLQGMFGIKKKEREREINIGDXCDAFLHHKVNLSHIKDLAEHQRGDAVSSMVYEANARVRDPVYGCVGAISSLQQQIDVLQTQLAVAQAEAVHLRVRQTASLYSPTSPTNSGSPSQAKPIFDMDMVVDQNSYGDSMW

SEQ ID NO: 262523 - protein, 56 aa, Glycine max
  Clone ID: PAT_MRT3847_79080C.1.pep
IKSFSKFILPSWQVDRVYLSSPNIIAVLDHERKRTFVIRKDGLPDVGKLVKVVQNI

SEQ ID NO: 262524 - protein, 56 aa, Glycine max
  unsure (1)..(56): unsure at all Xaa locations
  Clone ID: PAT_MRT3847_79081C.1.pep
VQWLQDKDHSCREAGYNNLKRLAEEFGTGWXAMQHIFAXEPEMNNSPHYLHRMTIR

SEQ ID NO: 262525 - protein, 62 aa, Glycine max
  Clone ID: PAT_MRT3847_79082C.1.pep
SEEELSIYYICNMICSGNHRPHQAFWLQMGYILEHSEKASQNFLKTGMHQRRTNRKGPTNTL

SEQ ID NO: 262526 - protein, 78 aa, Glycine max
  Clone ID: PAT_MRT3847_79083C.1.pep
VSKKLETFQKFKSFSPPKEGPLGLTVKIFFFPPPLNPRFNQGCCPKNNEGPKFPEFIWVLQGLFFPVFKKKKKKLLPK

SEQ ID NO: 262527 - protein, 52 aa, Glycine max
  unsure (1)..(52): unsure at all Xaa locations
  Clone ID: PAT_MRT3847_79084C.1.pep
AEKCFIPLILSMQNSSISFADASLMKFYRMFYFSLRHQLLFIKTKESHXIFS

SEQ ID NO: 262528 - protein, 78 aa, Glycine max
  Clone ID: PAT_MRT3847_79085C.1.pep
KFFLRLHKIWLRNGLIALMRRIPLWGDTDRTLSNIFSAQSLSCTLYTVTALYYPQWAPIYILALFTTNLHLLEENFSH

SEQ ID NO: 262529 - protein, 55 aa, Glycine max
  unsure (1)..(55): unsure at all Xaa locations
  Clone ID: PAT_MRT3847_79086C.1.pep
NMNTTIFCSQXSTCXLIFYLFINGLVLQFWYFFLLHIAICNRDVSLYMTQRGLIM

SEQ ID NO: 262530 - protein, 67 aa, Glycine max
  Clone ID: PAT_MRT3847_79087C.1.pep
RSNGCVLVPFLFIFSGLVFLMEHERHGPCTPPRFSVDSSFYVHTKKQKKDKLRRCDAISLIEPCFVG

SEQ ID NO: 262531 - protein, 89 aa, Glycine max
  Clone ID: PAT_MRT3847_79088C.1.pep
KQQQVQNFGHPFLLVIHEGETLTEVKLRIQKKLQVPDEEFSKWKFAFLSFGRTEYLQDSNIVSAPVQRRDIYGAWEQYLGLEHTDNALK

SEQ ID NO: 262532 - protein, 110 aa, Glycine max
  Clone ID: PAT_MRT3847_79089C.1.pep
VNEIRSAFHSDCFPSPGNASAPTVHQMKHSRDYPSMWFSLFISFCWINDYCYYFLFSPFLWPSILIIHKSFQNILRELHKRKFWRWKIQGRKIGDWNVLGFPSICCELLP

SEQ ID NO: 262533 - protein, 94 aa, Glycine max
  Clone ID: PAT_MRT3847_7908C.1.pep
EKGFVPSTSTFVIIVCSLAMERRLEDAIELLFDMLGQSRSPDHLTYKTVLEGLCREGRVDEAFELLDECKKRDVSMGEKTYKSLLNDLYVICRE

SEQ ID NO: 262534 - protein, 56 aa, Glycine max
  Clone ID: PAT_MRT3847_79090C.1.pep
GTGRTGCEAATFCTRNRPATKLYCRHGRYGSNGIAKNLCMGYNSRISWCVALDIIY

SEQ ID NO: 262535 - protein, 50 aa, Glycine max
  Clone ID: PAT_MRT3847_79091C.1.pep
APICSVINLLITPSHLIIFHLKKKKKKKKKKKKKKKKKKKKKKKKKKKKK

SEQ ID NO: 262536 - protein, 52 aa, Glycine max
  Clone ID: PAT_MRT3847_79092C.1.pep
PFLQLPQDLGDKSQSALLAAIHAKHLMDAFVIWAYQTMHVTTAVFVIDFAID

SEQ ID NO: 262537 - protein, 56 aa, Glycine max
  Clone ID: PAT_MRT3847_79093C.1.pep
CQNNERVLVIFLEYITYNFIKYILVRIIRAFIFPFRYFILCYIKIILVVPPISHHT

SEQ ID NO: 262538 - protein, 109 aa, Glycine max
  unsure (1)..(109): unsure at all Xaa locations
  Clone ID: PAT_MRT3847_79094C.1.pep
SIKVTVAYIGASDNAGIGKIKATVQENAYRTTSRDPLSSRLVDXKKEAQMIHANVDKRVAPXIRTEVEKAVMAMHMXNPWRSIRRALWPRMYPDRPRSMSPSEWPDHNL

SEQ ID NO: 262539 - protein, 103 aa, Glycine max
  Clone ID: PAT_MRT3847_79095C.1.pep
MIFIDLISGLFSPLTYFFSRNGSHMLDYQLALQRCVRNDTDERFREERNRAFISKWLRRPLRVYENFDLSLEGLKSFFENAKEHYGINTVRATQSLGLNGDVV

SEQ ID NO: 262540 - protein, 66 aa, Glycine max
  Clone ID: PAT_MRT3847_79096C.1.pep
CHETISLGTPFHMHTLASYILLPQIPTNYNLTLDYAKIQNLVTLLPYHLLLPDLLPPILYYMTLIT

SEQ ID NO: 262541 - protein, 75 aa, Glycine max
  unsure (1)..(75): unsure at all Xaa locations
  Clone ID: PAT_MRT3847_79097C.1.pep
APYSVREXSRVEPTSSRRLGREETYRRGAPQKLKFERKKESLLEKVLXKSQPGRRVREGPCXKSDXQKEENQRRA

SEQ ID NO: 262542 - protein, 48 aa, Glycine max
  Clone ID: PAT_MRT3847_79098C.1.pep
PFQFLESFRCSISSVSLYYAPESDLRVKSYDHINFSRAYVCQFQKSLI

SEQ ID NO: 262543 - protein, 95 aa, Glycine max
  Clone ID: PAT_MRT3847_79099C.1.pep
QNSPHTFFIFSFSPISTLSRFIILPIKTKFEVCTVQLDLLRCVLFAQWTKLREDCADPCTTAPRSSQFNSTKKFRDSWRRRRENENASSRPRLHK

SEQ ID NO: 262544 - protein, 64 aa, Glycine max
  unsure (1)..(64): unsure at all Xaa locations
  Clone ID: PAT_MRT3847_7909C.1.pep
YTLLVMLSXVWIEGVFVVYAVVRILSLVFVLVKVSETNGMPIEVISEFFSVVGRQANELEDEGR

SEQ ID NO: 262545 - protein, 53 aa, Glycine max
  Clone ID: PAT_MRT3847_790C.1.pep
APLAVTSPQSSKWIETKPGHPHVIICRESLLLSPPSFNLFSLCFNLLLATKEF

SEQ ID NO: 262546 - protein, 68 aa, Glycine max
  Clone ID: PAT_MRT3847_79100C.1.pep
HLHYSSIEKEDEVQWVLAWKGVTSEESVNGRNTMSLILAFRSQKIGKLMSVIASCELTDIAPQSHPCP

SEQ ID NO: 262547 - protein, 63 aa, Glycine max
  Clone ID: PAT_MRT3847_79101C.1.pep
ILETPLVPFFNFMFKKSFCVKNLKRAGNSYEHDCGIAIPVSFPKKKKDSKKLKKIKKKKKIII

SEQ ID NO: 262548 - protein, 47 aa, Glycine max
  Clone ID: PAT_MRT3847_79102C.1.pep
LSLCERYQVLMVISQLNLVHTLVDQSLVVLANVIMHRIDLMDDCYSL

SEQ ID NO: 262549 - protein, 67 aa, Glycine max
  Clone ID: PAT_MRT3847_79103C.1.pep
MSESPFRPREKLAEKQKYFQSIHRHTYLKGPMDKITSVAIPLALAATSIYMIGRGIYNMSHGIGKKE

SEQ ID NO: 262550 - protein, 67 aa, Glycine max
  Clone ID: PAT_MRT3847_79104C.1.pep
MSEAPFRPREKLAEKQKYFQSIHRHTYLKGPMDKITSVAIPLALAATSIYMIGRGIYNMSHGIGKKE

SEQ ID NO: 262551 - protein, 74 aa, Glycine max
  Clone ID: PAT_MRT3847_79105C.1.pep
NTPFFFKGPAPPKKFPVEKGFKLKNRENWLGPLGIYKNRDLKKIFLLNPNKGVFLSWAPPGLTLLFWGPPLAFY

SEQ ID NO: 262552 - protein, 78 aa, Glycine max
  Clone ID: PAT_MRT3847_79106C.1.pep
ARLKISGLASVQTLTTPSVWEVIGISIRCVPKLNCLVILYLTVIRIMCVKSSAIVTTHSTKQEQKRNKKKIKKKKKKK

SEQ ID NO: 262553 - protein, 122 aa, Glycine max
  Clone ID: PAT_MRT3847_79107C.1.pep
SLKIPNGVKNNMCSTTTTTTKAKVHECSICGAEFSSGQALGGHMRRHRTLVNASLATSMSGGNVVGVGGNNEFQEAKKPLKLDLNLPALPEDDHRESKFSFQQREKNVIVFSKQSSLVDCHY

SEQ ID NO: 262554 - protein, 81 aa, Glycine max
  Clone ID: PAT_MRT3847_79108C.1.pep
TTSPPAMLVPSSIQNVHSCENWLPRKVMSAWRIAGIVHCLEGWSEHECNYPMHNIDKVWRSTLQHGFQPLSVPINKELAHY

SEQ ID NO: 262555 - protein, 64 aa, Glycine max
  Clone ID: PAT_MRT3847_79109C.1.pep
AAHNVQKNNGASYLNSEPRLQKTATSKFNSLGVKVKALCYLFSIHYIVVQKEMTSWFGGCCLFD

SEQ ID NO: 262556 - protein, 104 aa, Glycine max
  unsure (1)..(104): unsure at all Xaa locations
  Clone ID: PAT_MRT3847_7910C.1.pep
MRRRSLSRLEENENLGVTPFEKNVDIWRQVWRVGFRQDLLVXVFDXREPIFYRWPXLEAYARDGYXHKLSLVLGNXGDLLPACVTEKWVEAFHAHNILYISWSA

SEQ ID NO: 262557 - protein, 32 aa, Glycine max
  Clone ID: PAT_MRT3847_79110C.1.pep
TQKHLKSSRGILKTKIKKKKKRIERNTLDSSI

SEQ ID NO: 262558 - protein, 31 aa, Glycine max
  Clone ID: PAT_MRT3847_79111C.1.pep
ETRAHNLIKPPGRKTHWDFFYFIYLPISLIT

SEQ ID NO: 262559 - protein, 70 aa, Glycine max
  unsure (1)..(70): unsure at all Xaa locations
  Clone ID: PAT_MRT3847_79112C.1.pep
REXXVSQKIKWWRDVVVGDSRSSQYDAKSGRRLNNTXSKARLLVWQQGGIQYRSQRQAGEWWQDIQGRKY

SEQ ID NO: 262560 - protein, 363 aa, Glycine max
  Clone ID: PAT_MRT3847_79113C.1.pep
AIPHHNTTRALHASSFSHYPFRDPKWPLPPLSSPLTPCFQLNTTLSLPSPTIPKSFTGLCKPFHSRVPTSIPSFHCRRPKFFVRATVIKWRCPKQTIPPNDTGFQKKLLYLESIGIDSFLLIENHPTVITTSLADIRSTVEYITSLDFTAIEFRRMVGMCPEILTTQVSDLIPVFTFLHREVHVPGSDIKRVINRRPRLLVSSVSKRLRPTLYFLQSIGIEEVNKHTDLLSCSVEEKFMPRIDYFENIGFSRRDATSMFRRFPQLFCYSIKNNLEPKYSYFVVEMGRDLKELKEFPQYFSFSLENRIKPRHKQCVEMGVCFPLPALLKTSEVKFQSRLDVCVNSSTPLKTSPLWSAGCDVYDV

SEQ ID NO: 262561 - protein, 66 aa, Glycine max
  Clone ID: PAT_MRT3847_79114C.1.pep
FGSFFFSDARLVLIFPFRGVLVLFTCSMKEYEANRSLADVILQNLCPYYKEQSKKYNLGIFSGFPE

SEQ ID NO: 262562 - protein, 45 aa, Glycine max
  Clone ID: PAT_MRT3847_79115C.1.pep
MDLEGSEKGSVVTQISIGGFGSEVKASDLLNYLEDKIGLVYRCRL

SEQ ID NO: 262563 - protein, 55 aa, Glycine max
  Clone ID: PAT_MRT3847_79116C.1.pep
QVMCFRPFSILVPMQESQRRYLAYNIRVAMEPSQVSSCVIDSMVICPYVSIIDTP

SEQ ID NO: 262564 - protein, 118 aa, Glycine max
  Clone ID: PAT_MRT3847_79117C.1.pep
PAPPPGLMLHVQGEGPSHFKLRNVFSKANAIDLIPITPYAKRGMRYKLKKFKLGRVLPFPSVVHCRPLSCKLVSGYNIYDVACSRKASWILYSVHPPPFFFVFECCMRRRTCVRTRGR

SEQ ID NO: 262565 - protein, 38 aa, Glycine max
  Clone ID: PAT_MRT3847_79118C.1.pep
IEFRGPYTIFMALHARVRKFVSFTATALSFFYLFLYFG

SEQ ID NO: 262566 - protein, 232 aa, Glycine max
  Clone ID: PAT_MRT3847_79119C.1.pep
MTSLDMPTMASSLLLPLGSTCGRSPSFTPQSILVDKLRRLVVKVKSSETRECTTAMFNANSRRDFLGLALGVSGGLFMGSLDANGAGLPPEEKPKLCDDTCEKELENVPTVTTGSGLQYKDIKVGQGPSPPIGFQVAANYVAMVPSGQIFDSSLEKGQPYIFRVGSGQVIQGLDEGILSMKVGGKRRLYIPGSLAFPKGLTSAPGRPRVAPSSPVIFDVSLEYIPGLEVDEE

SEQ ID NO: 262567 - protein, 106 aa, Glycine max
  unsure (1)..(106): unsure at all Xaa locations
  Clone ID: PAT_MRT3847_7911C.1.pep
PLGRFPVRHRGQTVPVGVLKTVXKKDPPGPKVPKVAPKKKFLVRAGSPGDVGSNKCGFLFGTLGSSFLGTLFFGQSFKSPPSFCNCCSQNWVFDRRGQNCFFLSGF

SEQ ID NO: 262568 - protein, 48 aa, Glycine max
  Clone ID: PAT_MRT3847_79120C.1.pep
AQVDWSTGLFDCFSNFKNCCITCWCPCITFGRVAEIVDQGSTCNKLAS

SEQ ID NO: 262569 - protein, 41 aa, Glycine max
  unsure (1)..(41): unsure at all Xaa locations
  Clone ID: PAT_MRT3847_79121C.1.pep
FNLPNFRPMSPRPSCSPSIAPAYSMSFLKNSPVSLNXFHYF

SEQ ID NO: 262570 - protein, 122 aa, Glycine max
  Clone ID: PAT_MRT3847_79122C.1.pep
GAHWQLGGKFSSFPRNKGGNTFIKQGRVILGPQKKHLVQTFLLHFYKGYLPFGKHFRWQGNSNHGEQQTSHHRGVPDEKKTGLEEWRPEPYLHGYILRAYRATYKDWAKFFKEKKRPKHGGA

SEQ ID NO: 262571 - protein, 82 aa, Glycine max
  Clone ID: PAT_MRT3847_79123C.1.pep
NNPSCLSFKMKKHAYKIARTYNSLSFTSEAPKKNFTWTKTGSNKKKKPQLKFGKEFLTLKEQEYPCLTYPRRTFLHHPCPKF

SEQ ID NO: 262572 - protein, 76 aa, Glycine max
  Clone ID: PAT_MRT3847_79124C.1.pep
KEISLTFFHSHFLQKKKNKAFFFLPERLRALVKLFRATPFANHAHIPKGTLLPLIKANFFMVQLQRQCQADSDILQ

SEQ ID NO: 262573 - protein, 66 aa, Glycine max
  Clone ID: PAT_MRT3847_79125C.1.pep
RRQGLSLLYASKLSKISRCVIIALGFPYTPFDLLLYRFHCFLYWHWIYTIQGYGILTFRIMHTNTS

SEQ ID NO: 262574 - protein, 47 aa, Glycine max
  Clone ID: PAT_MRT3847_79126C.1.pep
RTKQKKKGWLSKLLRISTTYLTKCRTHTNSHVGYYQVVSCIAGLFLN

SEQ ID NO: 262575 - protein, 87 aa, Glycine max
  Clone ID: PAT_MRT3847_79127C.1.pep
STCFMSHTVKALICSFGASPSVIELDKMQSGHQVERALIQLGCKPSVPAVFIGQQFIGGADEVIKLNVQNKLAQLLLGAKAIFIWSR

SEQ ID NO: 262576 - protein, 51 aa, Glycine max
  Clone ID: PAT_MRT3847_79128C.1.pep
KWIRFIGLVSRKRKNRSVCSASIIWGDNHNIHLAMQPTTRHNNTKKPNSNK

SEQ ID NO: 262577 - protein, 81 aa, Glycine max
  unsure (1)..(81): unsure at all Xaa locations
  Clone ID: PAT_MRT3847_79129C.1.pep
FDNVGGDVLNEASTVVKRYGCFSIXGAILGYHGAPMTLTNWRXTVYNRLTLKGFILFDHLKDLPTAGKELAGWVKEGKLNV

SEQ ID NO: 262578 - protein, 131 aa, Glycine max
  unsure (1)..(131): unsure at all Xaa locations
  Clone ID: PAT_MRT3847_7912C.1.pep
LPIITATTGIMLEPVNKLLVIPITKLLLRVSPXLNHVLQPIDGAFKPTAVDIPVEDLMMDLNLGLVTQEVFVLFAVITDYYNKQLALVMNALLIMHIHKAAGVVXNHPMFLLEGIVESVTGSTYAGLRPMT

SEQ ID NO: 262579 - protein, 118 aa, Glycine max
  Clone ID: PAT_MRT3847_79130C.1.pep
SADPSDSWNSCKVNMSNCSPDQLSKLQGFKSEFERALSEVGDSPSKGMFIDSCYAHCQTEPQETWFKTDSPKLANTTIAKAVADWFYGRSSFRHVDCNYPCNPSCQNRVFDLKDLPGI

SEQ ID NO: 262580 - protein, 52 aa, Glycine max
  unsure (1)..(52): unsure at all Xaa locations
  Clone ID: PAT_MRT3847_79131C.1.pep
KLTYLSFIYXHSMSIYHLTHALYYNNDGMYSATSFSGIHFRKIWGDQVHMVY

SEQ ID NO: 262581 - protein, 104 aa, Glycine max
  unsure (1)..(104): unsure at all Xaa locations
  Clone ID: PAT_MRT3847_79132C.1.pep
MSIWPGISSINPSCLCXKKKNKKKKKKKKKKKKKKKKKKKKKKKKKKKKKKKKKRGGPPPMDLSPPEINSGPDPEGFQLFLMGRLLKVGGKKGKSCSLGKIVFP

SEQ ID NO: 262582 - protein, 38 aa, Glycine max
  Clone ID: PAT_MRT3847_79133C.1.pep
DCSLTSCWVLLELVGYYQLSSCFFHTPWCGWWVKTNFV

SEQ ID NO: 262583 - protein, 34 aa, Glycine max
  Clone ID: PAT_MRT3847_79134C.1.pep
GFIMLIFFWFLFYFSLITKYELDFINGDFPEEIS

SEQ ID NO: 262584 - protein, 54 aa, Glycine max
  Clone ID: PAT_MRT3847_79135C.1.pep
NALMYIEILETHFLLSSRALIYCSLNVNVQMKCADYITSVYFGEKCIHVHMSSI

SEQ ID NO: 262585 - protein, 117 aa, Glycine max
  unsure (1)..(117): unsure at all Xaa locations
  Clone ID: PAT_MRT3847_79136C.1.pep
LEPQEVKKTIGIFTEKAWAGATFNLFLFTLASHMVGAVWYMLSIESEXVFVYDFIRVNERTSFIEKLKDTFNFGIFFDALDSGVVESTTDLHQKFFYCFWWGLRNLRWPNNLLFLYI

SEQ ID NO: 262586 - protein, 524 aa, Glycine max
  unsure (1)..(524): unsure at all Xaa locations
  Clone ID: PAT_MRT3847_79137C.1.pep
MVAGRRVMGMAMDAFQHQTLISVILALLVGVLIYDLKKTHGPNGKICTAPQAGGAWPIIGHLHLFGVHQHTHKTLGIMAEKHGPIFTIKLGSYKVLVLSSWEMAKECFTVHDKAFSTRPCVAASKLMTYNSAMFGFAPYGPYWREIRKLXTTIQLLSNHRLELLKNTRTSESEVAISEHYELCPIGCGRRVCPGSSLALRVGHMILARLLHSFNVASPSDQAVDMTESIGLTNLKATPLEVLLTPRLDTKLYENXIIYYASXSSKLGEASNRGLPSCNKCSTGLRCCYTHIIGFVLKDAEISGYDSDTIIKATCLNLILAGSDTTMISLTWVLSLLLNHQMELKKVQDELDTYIGKDRKVEESDITKLVYLQAIVKETMRLYPPSPLITLRAAMEDCTFSGGYHIPAGTRLMVNAWKIHRDGRVWSDPHDFKPGRFLTSHKDVDVKGQNYELVPFGSGRRACPGASLALRVVHLTMARLLHSFNVASPSNQVVDMTESIGLTNLKATPLEILLTPRLDTKLYEN

SEQ ID NO: 262587 - protein, 196 aa, Glycine max
  unsure (1)..(196): unsure at all Xaa locations
  Clone ID: PAT_MRT3847_79138C.1.pep
LKLENRFPSMPHETVLYVIKRLDKNPEKASCFFXWVCKKVWFRPSCSVYSLIVRILAAKDTMKQFWVTLRMMKENGFFLDEETYLTLSVGFKREKMDSDSVALTHFYYRMLEENAMQSGVSNVGGIISRSEWGXRVVGELXKLXIQLSDNFXIRVLKELSKTPVEAYKXFLWVGKQSXFGPDAVTYNAXARRFPAG

SEQ ID NO: 262588 - protein, 153 aa, Glycine max
  Clone ID: PAT_MRT3847_79139C.1.pep
GLNNNSQRKEKPHAKLLKTENHESKEDANDMKVNNTKHQVTNSGSNIYSQKILDEIRQSEENEQSQVQENWNKGHINKVDRNAAQTKSKVLLEGLEELKEVLDVQKQEKDSIDSGQDDEDNDYDFFKELHSEFEDEKDEYKGEIDESEFQTGL

SEQ ID NO: 262589 - protein, 40 aa, Glycine max
  Clone ID: PAT_MRT3847_7913C.1.pep
FTSKVRCFFVFESVLNYVSLIEGRVFFLLSNSNHSCCLSL

SEQ ID NO: 262590 - protein, 89 aa, Glycine max
  Clone ID: PAT_MRT3847_79140C.1.pep
FRCLRFESSPHWEGRGWSSRIPISGAKIVWGHALMTFQVEGFHISSASFPPKLFLARSGRTDSGVSYKGRVFVGFFFPPLTPLGGFFPW

SEQ ID NO: 262591 - protein, 147 aa, Glycine max
  Clone ID: PAT_MRT3847_79141C.1.pep
EQDWHEVTEEWEQRRNWVFLDLVEEQKRKSFVAVSAKQIWYDVRIKNGFEKIQEWTCNMKYLRRNLVMEVINDYLSLTINEVISVLNLQLFPPTISSSLVEDEVEDVPMFCPEAVEQYYRSYISNMSRADKKQWILKAKNHLLAEGW

SEQ ID NO: 262592 - protein, 52 aa, Glycine max
  Clone ID: PAT_MRT3847_79142C.1.pep
CTLPSDGSLYSGQRSPFFFFFQRYDFTINTKNKLRVEVQCGSNQGRLTLYYN

SEQ ID NO: 262593 - protein, 134 aa, Glycine max
  Clone ID: PAT_MRT3847_79143C.1.pep
APPPSHSVRFALDRSISPNRSHVIARKHQHHRHVTAQKKTCMCSPTTHPGSFRCSLHKNNNQNAQTGSFPSNRLNMRRSAMKNSLVRIGGVEGEWVKRALTALIRPSSHQQRRRSAFEPRPSRLSIMSKAEEEE

SEQ ID NO: 262594 - protein, 66 aa, Glycine max
  unsure (1)..(66): unsure at all Xaa locations
  Clone ID: PAT_MRT3847_79144C.1.pep
MVNGKILVSGVSLILVVGVAIGVVVVVNRKDTSDPEVAAQQKSVKAMCEXTDDPKLCHDTLSTVKS

SEQ ID NO: 262595 - protein, 82 aa, Glycine max
  Clone ID: PAT_MRT3847_79145C.1.pep
PTFNNIITLCNKKIISLLKNIKFIIKKTKGEALKAKEEPGDTHCHTHETPLICYYPPFFYNLTPYKYYPSPPHAFLSDSVSQ

SEQ ID NO: 262596 - protein, 81 aa, Glycine max
  Clone ID: PAT_MRT3847_79146C.1.pep
FSEVLPLARKGSQNLVLPLRVSSPMASYTAPTSHAEKLDDIMQKLTQFQTTNPTKMDSCSLVQQKPLDCFSPGYSLIEMGK

SEQ ID NO: 262597 - protein, 124 aa, Glycine max
  Clone ID: PAT_MRT3847_79147C.1.pep
MEAEVVEAELVLPSYLSFKRVQMYDKYPKGQARGRHWKHLKQIIQAENYQNYPPDEPNYANIESPPSMHPCKRICDITGFEAPYHDPRTNLRYANAEVFKIIRSLPNEYVQRYLSLRNAAIVLK

SEQ ID NO: 262598 - protein, 81 aa, Glycine max
  unsure (1)..(81): unsure at all Xaa locations
  Clone ID: PAT_MRT3847_79148C.1.pep
SKLGSYIYIFSPGLATSLIKVHIGKYKGRLLVFGILVMRLRGVSGKPGLCNFRLGIAKKGRPMVVKLEGLWFWLDYQXXKF

SEQ ID NO: 262599 - protein, 114 aa, Glycine max
  Clone ID: PAT_MRT3847_79149C.1.pep
APPLLILAPPSIGGLGPPRGWDSIFERGGGGLPMVPWPMFSEQFFNKKLLVYVFKIGVPVGGKKNKFWASLGKEEVLGREKFSKALGPFLAKKKTQGVFFKRPPGGAGPRKPGV

SEQ ID NO: 262600 - protein, 67 aa, Glycine max
  Clone ID: PAT_MRT3847_7914C.1.pep
TLRKMNCFPCFSKTKRTNSKSEQQGVIPQENVVTRTPPDVKKQKADDPNQVDTSNIQAQNFTIRELA

SEQ ID NO: 262601 - protein, 90 aa, Glycine max
  unsure (1)..(90): unsure at all Xaa locations
  Clone ID: PAT_MRT3847_79150C.1.pep
QDTGFDACNAYLLFSGYLMSNMHTXWACADTXCIRARSTMNMMLTNVLNTDVAGRFYYLXGYAWISASXCNSFIGKHLYGLKDRRSSCYD

SEQ ID NO: 262602 - protein, 78 aa, Glycine max
  Clone ID: PAT_MRT3847_79151C.1.pep
HSSVAGVNARKRDKPLPPIVIDDPSDIVAMKRARNTLAARKSRERKAAKLEELEDKIAKLEAERDHWKRIALAQTGMQ

SEQ ID NO: 262603 - protein, 68 aa, Glycine max
  Clone ID: PAT_MRT3847_79152C.1.pep
HPYQIRTRIYLLTGLIRLCRILNDCTLLPVNKLTPDYAAPNWAHKKYIVSLRNCTENHDMWTTSLKKI

SEQ ID NO: 262604 - protein, 46 aa, Glycine max
  Clone ID: PAT_MRT3847_79153C.1.pep
CCLEESEREGVYMLVQPGAHSGLDQDQFLFYYFKFFLKTLCRLSNI

SEQ ID NO: 262605 - protein, 69 aa, Glycine max
  Clone ID: PAT_MRT3847_79154C.1.pep
FRKRQSPSFWMPYETILSFKVGRKLSSFNYTYFFHPKATYQRPSNNVINILISFKCPHCTGAYCERQHH

SEQ ID NO: 262606 - protein, 125 aa, Glycine max
  unsure (1)..(125): unsure at all Xaa locations
  Clone ID: PAT_MRT3847_79155C.1.pep
AGPFRIFLLTPRALDRRGKXTXGGGFFSGENPLFPIPLMEQEEILSFSASDFRTCYGEXNSKPXATAVHVGAIEIIIDSFSSPDCNIVGAMLLVDTYNTNPENAVRSIFXAPFKGRRSTRVVTFP

SEQ ID NO: 262607 - protein, 264 aa, Glycine max
  Clone ID: PAT_MRT3847_79156C.1.pep
MKVIVFFVAIIILGAEWQCNGSEHEHEHGHSYQIFPLRMKTGPGGHYIPEVSCKSWRLGVEAHNVIDWRTIPQDCEGYIGNYMLGHQYRSDSKTVCREAYFYAKTINITAKTTWVFDVDETTLSNLPYFADHGFGVELYNATAFNEWVDLGEAPALPESLKLYNKLLSLGIKIVFITGRPLYQQAVTATNLKLAGYYKWEKLITKDTDKYNGKTAVTYKSTERQKLEENGYNIIGNIGDQWSDILGTNTGLRTFKLPDPMYYIS

SEQ ID NO: 262608 - protein, 39 aa, Glycine max
  Clone ID: PAT_MRT3847_79157C.1.pep
KIIKKKKKKKKQKKKKKKKKKIKKKKNKLKKFKQKTNLF

SEQ ID NO: 262609 - protein, 75 aa, Glycine max
  unsure (1)..(75): unsure at all Xaa locations
  Clone ID: PAT_MRT3847_79158C.1.pep
ISFTINMVELRVCLLILFLVEVRAALLKLRYXTTDNSSFYDKDDYSTPCCDLYKYTRSIPHICIYKYIKHSSCNS

SEQ ID NO: 262610 - protein, 110 aa, Glycine max
  Clone ID: PAT_MRT3847_79159C.1.pep
SSSGVKKVPKKRIAAILEPAGEEVEKGEGDTLDESEEENSSDNEELEGTKGEKLQSELQSYNSKATQIQLELKGTGNSSSKKTSGGRGKGASASGKKVAQAPKTTAKRKW

SEQ ID NO: 262611 - protein, 117 aa, Glycine max
  Clone ID: PAT_MRT3847_7915C.1.pep
PALVPGFGLIPGLGSRPMLFSRHTFVAPRSWSRCGPCTPSECCRFWPWASPWSPLPWLHYFKDMVSPSYRSPILGLSLASQSIYCPRCRKFVSPWSDRVIAYLHLSSIALGASCCAA

SEQ ID NO: 262612 - protein, 132 aa, Glycine max
  Clone ID: PAT_MRT3847_79160C.1.pep
ALPKHTKEQSTSRVVRVADLITLPGVKKVPKKRIAAILEPAGEEVEKGEGDALDESEEENSSDTEELEGTTKGEKLQSELQSLNSKATQVQLELKGTGNSSSKKTSGGRGKGVSVSGKKVAQAPKTTAKRKR

SEQ ID NO: 262613 - protein, 62 aa, Glycine max
  unsure (1)..(62): unsure at all Xaa locations
  Clone ID: PAT_MRT3847_79161C.1.pep
VGXSAFFXRRGALAXLASVSRGSXLAXSSFGSRFLXXGXRALAPPXSXAXRVXXCLLCVSVS

SEQ ID NO: 262614 - protein, 96 aa, Glycine max
  Clone ID: PAT_MRT3847_79162C.1.pep
RPTIDTESTTPSHRQGTRGGTPAGADIRRNPQQIESLRTQHSGRRSDRCSCRRRGRKRMGQASAWRSPAHRRTPAACGSRRCLGRGGGPCGASCRR

SEQ ID NO: 262615 - protein, 53 aa, Glycine max
  Clone ID: PAT_MRT3847_79163C.1.pep
SNSGVFLCRSCGSVATNPKSKKKKKGRLDFEKVGRLKITRIRGSTLDMIRYLF

SEQ ID NO: 262616 - protein, 125 aa, Glycine max
  unsure (1)..(125): unsure at all Xaa locations
  Clone ID: PAT_MRT3847_79164C.1.pep
INWARNRKDTRRGHTHNTGRVRGKSGEHNNNRGGPTQGGRWVQHRRDGKPCGASRENEPAIRPEGRGAXGHGRAAANAEAGAEGARNKSGRAQENRRTAERTQRENKHPRRRDQAKRKTSKDMIR

SEQ ID NO: 262617 - protein, 65 aa, Glycine max
  Clone ID: PAT_MRT3847_79165C.1.pep
MGQEHMIYAFVSGSTVILAEDTEFSGILNFIGYQCRDKLPASDNMVSYDCDARRLNYLVDDGYTY

SEQ ID NO: 262618 - protein, 91 aa, Glycine max
  Clone ID: PAT_MRT3847_79166C.1.pep
IHKKKKKTYGEGEDNRFTFKLCCKKGSQKKGLGGGGRVSHYLNYLIYKHLTFRLLPKSWEATKLRGLLWELCFQQKNWFNNFIKFFQLKIQ

SEQ ID NO: 262619 - protein, 96 aa, Glycine max
  unsure (1)..(96): unsure at all Xaa locations
  Clone ID: PAT_MRT3847_79167C.1.pep
LGFFSTWFFFGFPVAIXLPLLFWCTVCFLYVPKDSSRALSSLSFDIPGWGACFHGLVGDGSVSVIVXXLLFIIPNKKQEXEKLMDWNERKKLPWNL

SEQ ID NO: 262620 - protein, 83 aa, Glycine max
  Clone ID: PAT_MRT3847_79168C.1.pep
WFHPPIICCVDYQHVPIIIFPHIKVWSSMPGPDQIRTRSVLCSSSLWPLIRISPSIWWPVVYQIRGPHPLMDCSRNAEPWQCF

SEQ ID NO: 262621 - protein, 73 aa, Glycine max
  Clone ID: PAT_MRT3847_79169C.1.pep
CVEHCSYQCCMVLIHSYLIRLTLNFSNRESLRGFRSLVQFGAADLRALCPVFLPLSRFGPCEWEGTLINGSPK

SEQ ID NO: 262622 - protein, 35 aa, Glycine max
  unsure (1)..(35): unsure at all Xaa locations
  Clone ID: PAT_MRT3847_7916C.1.pep
NMQTFTQKMKFVLDNCQRKLXLKVYDLCNIQIPNQ

SEQ ID NO: 262623 - protein, 317 aa, Glycine max
  unsure (1)..(317): unsure at all Xaa locations
  Clone ID: PAT_MRT3847_79170C.1.pep
VLMSPFAILGFVMKPLQLKGFAPTDSEKALTLGTVASEVSDVGASNGKDEALSLKAEFRDKSSHEPSRSKCTILDQFSRFLKDMKELLLDKVFVVNVLGYIAYNFVIGAYSYWGPKAGYSIYNMTNADMMFGGITVVCGILGTVAGGFVLDFMTNTISNAFKLLSIATFIGGACCFGAFLFKSQYGFLALFAVGELLVFATQGPVNYVCLHCVKPSLRPLSMAMSTGPVHCSGLVPSSPPVGLMQDKINNWRTTALILTTIFFPAAAIWFIGIFLPSVDRFNXDSEHEVSSVERTSTAPLLEENTAETSASGQSREC

SEQ ID NO: 262624 - protein, 66 aa, Glycine max
  Clone ID: PAT_MRT3847_79171C.1.pep
KKKQRSLKKLLKQNQQQQHHQQLAHFNTQLPEFLMSPRGKHADVEPSVVLTRRCTLHNTTKDLSII

SEQ ID NO: 262625 - protein, 57 aa, Glycine max
  Clone ID: PAT_MRT3847_79172C.1.pep
NKPTNYKMKTTRKISSKSLTLDRIIFSLLCMAEFLLTFPSYLTWWQETRRNYSCRPG

SEQ ID NO: 262626 - protein, 98 aa, Glycine max
  Clone ID: PAT_MRT3847_79173C.1.pep
YPIKLSPGGGGPNQPNPSFFALDLAPSSPPNFSLLVFSLINGSQDGEKGKNNRVGDRIKEIHKNQPLIGGGEKWGNRGGEPFQPGAQFFSQFLVSGGK

SEQ ID NO: 262627 - protein, 102 aa, Glycine max
  Clone ID: PAT_MRT3847_79174C.1.pep
HNVYRWGDTKLIRFLCYLGTKKKNWVTYLITPSFVFFGILKTNRWLKKPQPEKKKNFFKKKGGVKKKGTPWEKPFFQHMTPKCLLGWPQKIGGRLYFLCAPP

SEQ ID NO: 262628 - protein, 189 aa, Glycine max
  unsure (1)..(189): unsure at all Xaa locations
  Clone ID: PAT_MRT3847_79175C.1.pep
MSTPAKLVSTPIRLMSATPALRSPKRHYMSPDDHSISSLNKLARRPPRSRSLKFDTPVKNKDDIFDTLQEXLIQSIREKERLAMEERDPAITEAKKRKKNIASLPKLFDMIRGLLRQRNCITKAELVSKIISSRCDIADRSEVEEQLNLLQELAPEWISEKQVSSGDLLLFINKMLSPETVRASLEEAT

SEQ ID NO: 262629 - protein, 96 aa, Glycine max
  unsure (1)..(96): unsure at all Xaa locations
  Clone ID: PAT_MRT3847_79176C.1.pep
RRGEXIVGKSQQADXGSPXLYSLLSAPPPLLSSXRVXXPKCDVXIXMTMMGXXXQSVPCGSALGXPXFRXLXNQCPWGRXVFLTXXKXXGPSPGWQ

SEQ ID NO: 262630 - protein, 100 aa, Glycine max
  Clone ID: PAT_MRT3847_79177C.1.pep
GSSYTSSAPASHESAGDDDGAISVNIERDASLSGQSDEMSSGGGLTADAAEETEHDTNTDSDDDDVLKPAMPILMKKRRLQSTASETERCTTLADGDDED

SEQ ID NO: 262631 - protein, 155 aa, Glycine max
  Clone ID: PAT_MRT3847_79178C.1.pep
FSSNVPSKTHPSDQILCFRALSRQQSKNSRTLFDRNANANRLPSEERASLLDGPLKHLADLDSTIPTSAHSTSTMTNSDPSLATSAFLTTNFDSTMDPLFSPPPAPIVPDLTAEEGTTLMSAGDSHDPPELRHWANIGETNAFHFLHQLENELRR

SEQ ID NO: 262632 - protein, 65 aa, Glycine max
  unsure (1)..(65): unsure at all Xaa locations
  Clone ID: PAT_MRT3847_79179C.1.pep
ATXAARATFKFLFSILFHPPKPPRKKFSTTIEPPNTLPNTIFISSQLQTLSLSNNIILFQPPPLF

SEQ ID NO: 262633 - protein, 60 aa, Glycine max
  Clone ID: PAT_MRT3847_7917C.1.pep
KTHVCFQYHSHCLCTTRCKFLPVLIRNDVNHITRFPSERTRHSIHHIYYISIRHPCSYAW

SEQ ID NO: 262634 - protein, 220 aa, Glycine max
  unsure (1)..(220): unsure at all Xaa locations
  Clone ID: PAT_MRT3847_79180C.1.pep
MTDPQSNLFHEWFNFMLLHPHYSSSQSNYPFANNYSNNNRFGIQLQQGAASSSSSSFYAAPPSSPPLREALPLINKISLKSSEQHQQNEPSSNVVEEKEEDKNKVDNNKHHESGEDGDEETVTVALHIGLPRMDTSSSDLGPSRVVSTTCMEISEKEEVNMISKHPLDNRLNKGQYWIPTPSQILIGPTQFPCPVCSKTFNRYNNLXMHMWGMDLIQKGP

SEQ ID NO: 262635 - protein, 90 aa, Glycine max
  Clone ID: PAT_MRT3847_79181C.1.pep
TKEGLGRPTKKREGRDPAHSRPKPVLPVQRGKTNYSFQYAKQKNMTMSHTLSDTSSSESSSEGKTSTLEDMDSSTKGKANPPIVSLERLQ

SEQ ID NO: 262636 - protein, 52 aa, Glycine max
  Clone ID: PAT_MRT3847_79182C.1.pep
PVPGISRVRPTRVARPHTLELFSFFFFSSPSLERSRSRSSLVYIHLLVIGSV

SEQ ID NO: 262637 - protein, 685 aa, Glycine max
  Clone ID: PAT_MRT3847_79183C.1.pep
MAETVRLRVVFEDRGMLSKSKKKQGLKRCWFLLKPQHTTISDVASHLLNTFRLHRTCPHGIVLSMDGFVLPSFEFTCILKDKDIVCVKRKGSVSTDDKSAMLRPATCENQAIELQKLLTIEGLQEEESGAEETMSQKDDDDQLEDAVYVESKSDGNVVFKKRKASKKLKSPSQKKIKLSTAENLSVTPKVHEKENGSSEGHEEENGSFDGYIHHQLSLVKKDKKKSSNLSSQPNKSSNLNKQKNDKSDPTSDETRSARRKKAKRRWLRELKLEKEKEKVICGATVLLCCGIPWFAIMTLFAIAASQSIDGCGTACDLFPNQSQCPTPPTHLHQTPVLEKGGQELPINDNNCVVSDVHQQPDEESEEEDDIAPVEIRPGHIRINCFHDLIYVHGLFDADQDQAVPQNQFPVETFQWNGITNKKKGQKWGKERMPFRKQDGYEDSGQDCPTVQNAEKEQTSNVIDFDKLKHYTSLPKEGDVIAYRLIELTASWTPELSSFRVGKISRYDAKSNRIWLEPVLEYPFDFKKKIDEDASSVQYDPSPYQEDGSLEIEYTLLADVRMVKHGIPDLKSDALVNPTKATNDITNEKLAAKAINGSTGEKLAGDQTTVGSCHPERGHITAKENGEVNVWDKINEALKAKKAKLSQEDCWSRGGESSSTRSWSHRAMRCSALGPTMALLRSNNGL

SEQ ID NO: 262638 - protein, 253 aa, Glycine max
  unsure (1)..(253): unsure at all Xaa locations
  Clone ID: PAT_MRT3847_79184C.1.pep
TRPARRKKAKRRWLRELKLEKEKEKLHQTPVLEKGGQELPINDNNCVVSDVHQQPDEESEEEDDIAPVEIRPGHIRFEPLKKDQDQAVPQNQFPVETFQWNGITNKKKGQKWGKERMPFRKQDGYEDSGQDCPTVQNAEKEQTSNVIDFDKLKHYTSLPKEGDVIAYRLIELTASWTPELSSFRVGKISRYDAKSNRIWLEPVXEYPFDFKKKIDEDASSVQYDPSPYQEDGSLEIEYTLLADVPMVKHGIPD

SEQ ID NO: 262639 - protein, 2613 aa, Glycine max
  Clone ID: PAT_MRT3847_79185C.1.pep
MYGHPFQFRGGYRHPPPPQQSANPNNNFFQQPALPNVPNPNSVFFQPPLPPSFSFPNTSCPFPPQNPSPPPPPPPNPNLAIEHADRAIANACRALLAAGDSVSAWTVSQNALLTLQVDSWNTLGIKMQQVPSLHRLMMTEGKVNAFVHCFVGVQRITSLYDLEVAICKNEGVDDFEELGLGPFLRHPLVIHYFSLRSDVTQVYKITTEEIIQLLIEFLDASRSNEFIKVEQFLDFIANKRLVECKEWLGIRIQNLGMHIYAIREARNSEQSAMREVRKLGQSARREARKLGQSARREARKLGQSARREARNSEQSAIQEARNSEQSAVQEASNSEQSAYEKCLESFLKNGKFRYRTIPSSQKKQLDERFNAITQRVESFSPVKKSFCGKHKRFMSSASEDEDSDSSTDEQSNNIIKGSQSNPSSQFTRSSERVSSCPYPSATEEKARLGVRSDMAGHSLVNSNLKKGFSEQPRKKRKFENATSTRSAPYKLRKRNKLGVVTPINTGNKTKMFVTTWKMACSEHKVAEVLEMMLQFSKVNRFQKRKIKNLFSSYPFIGLLNAAVSSIKSGMRNNIYDTFQAIIDNGLGNSPTKGSEYDTIDVGPGQENVPVITKDNTENTKCISSDDVIRKIGTYFDHGNDINRNSNDSLVQYRIMLWRKFCSCENWVAEQFGMKKFDSLGYGDFLSFLEKHPNLLPHELLKLLVGDTCENSSFRACMSSNQLIALVSQALSGLWENETITKQMISMLLMRQFPSINFELVENGSLVDLLDTVKGHTSSVTSKCVVFSATIIEKNYNGDSSSDRDNNWSEIPTDRSETSHKKSTETVIAKNAIEVLLKAPMLSDLSKWSHWDLRFAPFLGPFISWLLNDVNTKELFCLVTRDGKVIRIDHSATLDSFLEAAVQGSSFQTAVHLLSLISLVGGEKYVPLSLLKCHSCHAFEVMFRNSVEDVEVSNDGNALHQSVEALSKTKFLTEISTAKMRSVFSKHMHKVSKVASILSRFVLDCLGNLPAEFHSFASDVLLSGMQSVFKDAASTILCECSNMEQRLMLHEIGLSLGISEWINDYHALISNNSSDIHCARVSCLKDATTDINTSLKLDQVTLDKSPIPEANMVTSLVPHRLIEGCTEIIETVDPEKSNDESNTCCLGNSFQHVEDMDASRLIESIRRDEFGLDSSLSDIDSCMLKKQHARLGRALHCLSQELYSQDSHFILELVQNADDNNYPENVEPTLTFILRDSGIVVLNNERGFSAQNMRALCDVGNSTKKGSTAGYIGKKGIGFKSVFRVTDAPEIHSNGFHVKFDISEGQIGFVLPTVVPPCDIGVLRRMASTDTELCDDNPWNTCILLPFRSHLSEGMAMNSVLSMFSDLHPSLLLFLHRLKCIKLRNLLNDTLTVMKKEISGDGIIKVSHGKEKIVWFVVSQKLQTNSIRFDVQTTEISMAFTLQESDNGYIPCSDQQPVFAFLPLRTYGLKFILQGDFVLPSSREEVDGDSPWNQWLLSEYPNLFVRAQREFCELPCFRSEPGKGLSAFMSFVPLVGEVHGFFSSLPRLIISKLRMMNCLLVDGDNNEWAPPCKVLRGWTEQVRNLIPDNMLLEHLGLIYLDRNIVLSDELARALGIEEFGPNILVRVLSSLCHTKSGLISMDMSWLASCLNILSVTMFNSSGSVPINFEMKDVQKNLQKMPFIPLSDGTYSSVDEGTIWLHFNHLNTGFDGEHKIEAFPNICAKLRTVSPFLFSASSGTPSLNVTFLDNVTRLLQSIGVQQLSVHDVVKLHILPALSDETMANKNRVLMIEYVCFVMLHLNSSCSDCFIEREHIISEFRCKSLLLTNYGFKCPAEIPIHFCTGFGNPVTPKMLADSVSMRWHEVDISYLSHPVNESVSSALIKWRDFFEKFGITDFAQVVQVDKSVVDICDVTFKQMMWDRGLISAESIVKDWESSEIVQLVSLLSKSGNLENCKYLLEVLDTLWDVCYSNKTTGYFYLKSVGDGHPFKSTFICSLITQMTKLYAFIWNEMASSKKKTMEGLMSGPFIFIPYSSVYDHDDAACGTFVSPNEVYWHDSTGSIQKMKEFHPQCGSSSSPINKSLCNIYPSLRGFFVDECQVQEAPPLCSYIQIMLQLSTVTLPSQAADKILQVFLKWADGLKSGLLSVEDVTYLKECLSKLEFPVLPTVQDKWVSLHPSFGLVCWCDDKKLKKEFKHSDNLDFLYFGELVEDDKEMGQEKISILMKNLGIPAISEVVTREPIYYGLADCSLKKSLVNWTLPYAQRYIHKFHIDKYDKLKQSGFDIFNHLNVIVVEKLFYRNVIKTCGSVSKKRVECSCLLQGNILYTIKESDYHSLFMELSSLLLNGTSELHLANFLHMITTMTESGSSEEQIEFFILNSQKVPKLSDEETDDNSASIISPPVCAEQGSVTVDWTFKEDPPASSVALVLHENDNFEDQSCHDFDPTAFSIHADSDPVSLDESLDEAHFSSPAFGKRDQLQTGTFDAAQAKETGRLGEFLACKYFVDKVGNTAVRWVNKDNETGLPYDLVIGEDNSQEFIEVKATRSPRKDWFNISAREWQFANERGQSFSIAFVAIMGNNVARVTIFKDPVKLCQRGELQLAVMMRRQQKQFSVVS

SEQ ID NO: 262640 - protein, 768 aa, Glycine max
  unsure (1)..(768): unsure at all Xaa locations
  Clone ID: PAT_MRT3847_79186C.1.pep
MAETVRLRVVFEDRGMLSKSKKKQGLKRCWFLLKPQHTTISDVASHLLNTFRLHRTCPHGIVLSMDGFVLPSFEFTCILKDKDIVCVKRKGSVSTDDKSAMLRPATCENQAIELQQLLTVEWLQEEESGAEETMSHNVDDDQLEHAVYVVSKSDGNDVFKKSKASKKLMSPSHKKIKLXTAVNLSVTPKVHEKENGNSEGHEEENGSFDGYIHHQLSLVKKDKKKSSNLSSQPNKSSNLNKQKNDKSDPTSDETRFVQPQDESETKKEFPFLWISFWTLHLTWSFYSVSIVNTSISSQKNRGCQLPSRSGRRKKAKXRWLRELKLKKXKEKVICHYSGATVPLCCGIPWFAIMTLFAIAASQSIDGCGTACDLFPNQSQCPTPPTHLHQTPVLEKGGQELPINDNNCVVSDVHQQPDEESEEEDDIAPVEIRPGHIRFEPLKKGLHADLSYKFLKVAVVFLGFRINCFHDLIYVHGLFDADQDQAVPQNQFPVETFQWNGITNKKKGQKWGKERMPFRKQDGYEDSGQDCPTVQNAEKEQTSNVIDFDKLKHYTSLPKEGDVIAYRLIELTASWTPELSSFRVGKISRYDAKSNRIWLEPVLEYPFDFKKKIDEDASSVQYDPSPYQEDGSLEIEYTLLADVRMVKHGIPDLKSDALVNPTKATNDITNEKLAAKAINGSTGEKLAGDQTTVGSCHPERGHITAKENGEVNVWDKINEALKAKKAKLSQEDCWSRGGESSSTRSWSHRAMRCSALGPTMALLRSNNGL

SEQ ID NO: 262641 - protein, 231 aa, Glycine max
  Clone ID: PAT_MRT3847_79187C.1.pep
MASTVASAMASTSAAEPDPDAAARKRYEGLLTVRTRAIKGKGAWYWAHLEPMLLNNAVKLKCSLCDSLFSASNPSRTASEHLKRGACPNFNHSSLPSPSPISTVLSHSHSNNGRKRTSTSTSNSPNQDHSVQHLVLSGGKDDLCALAVFEDSVKKLKSPRNLSHVAPPELTKDQVNSAVELLADWFYESCGSVPLSALEHPKFQSFLTQLGLPVTLLRREIYGSRLDDRFG

SEQ ID NO: 262642 - protein, 370 aa, Glycine max
  Clone ID: PAT_MRT3847_79188C.1.pep
VRIPGSTHASASSNHFLLTSSSSSSSISLHHFSKSSLGAVSSETNDKQEIRCRAISKPRTQECSDIFQGSLATLKFREINVEDDIEEEQDIGALVANEIKKRVDTIKSILGSMEDGEITVSAYDTAWVALIEDVHGTGVPQFPSSLEWIAKNQHPDGSWGDKELFSAHDRIINTLACVIALKTWNMHPEKCEKGMAFFRENLGKLQNENVEHMPIGFEVAFPSLLDMARGLDIEVPNNSPILNKIFAMRNVKLTRIPRAMRHKVPTSLLHSLEGMSGLDWKELLKLQSQDGSFLFSPSSTAFALMQTKDQNCHNYLNKVVKRFNGGVPNVYPVDLFEHIWVVDRLERLGISQYFQQEIKDCLSYVYRYWT

SEQ ID NO: 262643 - protein, 130 aa, Glycine max
  Clone ID: PAT_MRT3847_79189C.1.pep
EFNLPQYREFQLGTPQELRCHILWIQDRLNKKTNNSDSHIHIFASIFLENVKLEIPEEFRSHFRWLQDRPNKQTNNSYSHMHNCASLFLRNVVLEFHEESRSHFLWHQDRPNNDNKSFLFRYVQDCLLTY

SEQ ID NO: 262644 - protein, 48 aa, Glycine max
  Clone ID: PAT_MRT3847_7918C.1.pep
KWKLTYILIKYKEVTVPLSLNLWGYHMNYDPFEWFKLQDMSCCIRYMP

SEQ ID NO: 262645 - protein, 86 aa, Glycine max
  unsure (1)..(86): unsure at all Xaa locations
  Clone ID: PAT_MRT3847_79190C.1.pep
IFDKEGNRYTAADLLEYADPKRISVYLHATVQKILFKYNTEKRRQQAYGVIFKDALGVMXGGVLSTTGRSEMFLSAGALGCPPLLV

SEQ ID NO: 262646 - protein, 152 aa, Glycine max
  Clone ID: PAT_MRT3847_79191C.1.pep
ALFFFFFFFFFFFFFFFFFFFFFFFFFFNPKSLLILTWKKKKKGVYGSHGKILLYYRVTKKPKKGWGGNGKTQINYNPQKGANWGPKKTHRGTTWNLDSKNGVGHWVFFTKSPLGGPQPAKKNHLLGEGTQASLNTTTGKKGGKKKKKSFRL

SEQ ID NO: 262647 - protein, 50 aa, Glycine max
  Clone ID: PAT_MRT3847_79192C.1.pep
SVKLSRSFCCACSEITVRAQTSQVLAMSLTDIGCDKLRKDMLSLEFAFTV

SEQ ID NO: 262648 - protein, 87 aa, Glycine max
  Clone ID: PAT_MRT3847_79193C.1.pep
PSPKGPAGSLTPKGSCPPIKKWEKENCPCGVGGPRLPQEILRGAPGGNSLMKPPPKGLKSLGVKKPNPFWSGGPFFNPQKKIPFFFP

SEQ ID NO: 262649 - protein, 58 aa, Glycine max
  Clone ID: PAT_MRT3847_79194C.1.pep
FSTSMSAIDAGTRPTLFDGTPSTLEVNSAPCSRSNSAGEANSIMRTTTPDRAGVHVGR

SEQ ID NO: 262650 - protein, 225 aa, Glycine max
  Clone ID: PAT_MRT3847_79195C.1.pep
MINLNQRLSIVCSFIKRGTLADIGSDHAYLPIYAIQNDLCTKAIAGEVIQGPYKAAKRNIANYELNQQVDVRLGDGLSVINSKDQIDNITVCGMGGPLIAKILNDGKDKLVNHPRLILQSNIQTQALRQTLNKLSYEIVDERIIEEKGHIYEIVVAEFNNNLVKLNILQEKFGPFLLRECNNIFQKKWQRELEALRDIKSQLNSTSHHERLKEIEDEFNLIQEVL

SEQ ID NO: 262651 - protein, 114 aa, Glycine max
  Clone ID: PAT_MRT3847_79196C.1.pep
LHAYAPLNSARGYKMMGFEARTSLRPRLVFTFLGITLGWVNILLNRALTTVLAQPKHKLLSHNKWAVRKILQAGTTDPVGTIIYEQYDTFISGTINKAPGRVPKTMLQYQVHRQ

SEQ ID NO: 262652 - protein, 79 aa, Glycine max
  Clone ID: PAT_MRT3847_79197C.1.pep
LSPCARPCLEYLVHWPTLAHVECHLFLLLYIFVVPSLLYILSHAPLKQQYYISTTVNIIEIQNIPYSNVNMYTSLSFSL

SEQ ID NO: 262653 - protein, 97 aa, Glycine max
  Clone ID: PAT_MRT3847_79198C.1.pep
RGALIISCASLKQRTRPCRWTIPLPLFRELKNEFLDDDDTKVLQSQYPTLSLTGYAESFPEYKTLIFCDPILFNPRQVPFVGRGVKELPTDLGENML

SEQ ID NO: 262654 - protein, 61 aa, Glycine max
  Clone ID: PAT_MRT3847_79199C.1.pep
LFCFHETHFLSSKPHSLPDNQSLPKYFSLSIKIRTSSPICHCPQKNIYQQYLGDGTFEMRC

SEQ ID NO: 262655 - protein, 176 aa, Glycine max
  unsure (1)..(176): unsure at all Xaa locations
  Clone ID: PAT_MRT3847_7919C.1.pep
STPFLKDQQXXRLXXCFNLXSAKKSXXLEXQQXKXLHNPLNFLSGXXSAXXILSGSEGSQLNXRRXPKXQKXRFXCPSPMFLXXQNXARGXXAGSXGPXXWXXGDXEQXGXEPNKXFVLFYWVGGHYXLFFSSXKXXXXTXXKXXCGRLXXKXXKIXXLXTSGGXXRQXLQSXXTA

SEQ ID NO: 262656 - protein, 48 aa, Glycine max
  Clone ID: PAT_MRT3847_791C.1.pep
RAFFIPFNSPPSLVLGGPPRVPTPPWRLEFIQGMFFSGRKFIVSFVEK

SEQ ID NO: 262657 - protein, 83 aa, Glycine max
  Clone ID: PAT_MRT3847_79200C.1.pep
TRSSTHTRNPSGLSTNIDFTMSVRSAYQKITTAGGLGLARISMNTAPCKGIQMLTSPSQKILMQRCLLVPGTTTRRGLKIHIL

SEQ ID NO: 262658 - protein, 51 aa, Glycine max
  Clone ID: PAT_MRT3847_79201C.1.pep
GGGGGRAGEAEKFRPGARETPSCFKGEMIKTWGKTSPTGKRLNKGASSAYQ

SEQ ID NO: 262659 - protein, 69 aa, Glycine max
  unsure (1)..(69): unsure at all Xaa locations
  Clone ID: PAT_MRT3847_79202C.1.pep
LYFSQQPPAMPSQPRPSYLEGXASGDLPYKPLPWAEPPQHLSRITELVLMHYQRALQAEPGILATEASG

SEQ ID NO: 262660 - protein, 94 aa, Glycine max
  Clone ID: PAT_MRT3847_79203C.1.pep
PTGALTTLLCCRPRLRKTSTMVLPSSLATALTVFFGATAITPPYLLISSGSPLRVNLFPGTCLPLVLYCSSPPLTSPYPTLTYPSPPPPPPPST

SEQ ID NO: 262661 - protein, 60 aa, Glycine max
  Clone ID: PAT_MRT3847_79204C.1.pep
TDKQETSGGGGFLFLFLFILCFLSMHWMTQISEIPLVICFCQYWCVDGSGLGHCRVGLLV

SEQ ID NO: 262662 - protein, 43 aa, Glycine max
  unsure (1)..(43): unsure at all Xaa locations
  Clone ID: PAT_MRT3847_79205C.1.pep
RSQVIXXTXXXEXRXXXXPXARNNSDSSNVEKTCGRYNXSRGL

SEQ ID NO: 262663 - protein, 75 aa, Glycine max
  unsure (1)..(75): unsure at all Xaa locations
  Clone ID: PAT_MRT3847_79206C.1.pep
CSFICFTMLFTVALSRESHVHASIPXEKYWKAACPNTPIPTALPEFIKPHPTGVEIYELTKQNDDDQDPKKSFYI

SEQ ID NO: 262664 - protein, 66 aa, Glycine max
  Clone ID: PAT_MRT3847_79207C.1.pep
SIYNQLCPFLSALNRWNFQTGGFYPIPPPPISICLLHSLPTQKASHYLLFWHCTSGNSKTSSYDDC

SEQ ID NO: 262665 - protein, 121 aa, Glycine max
  unsure (1)..(121): unsure at all Xaa locations
  Clone ID: PAT_MRT3847_79208C.1.pep
ALSTTGGASSYDAKVMDMANACMIMGRXKGPISHYEGSMLAPTYRNSTNDIFIALEGLIDDTMNIEATTYKLQPTGETKEKAELKWLQEVLITAWSTEVRSATTMLADGSCILECNGACKI

SEQ ID NO: 262666 - protein, 44 aa, Glycine max
  Clone ID: PAT_MRT3847_79209C.1.pep
SVTHHPQAPKQPCFKVPFWCLTRPRPTDQGDRRCSSQVGHQRPL

SEQ ID NO: 262667 - protein, 66 aa, Glycine max
  Clone ID: PAT_MRT3847_7920C.1.pep
LMGNKYHLGPQMENDSSFRMPVCNTLTSNFPQSAKRVHSRKMNCLLQQPAKPLGEDESSPSSHSST

SEQ ID NO: 262668 - protein, 41 aa, Glycine max
  Clone ID: PAT_MRT3847_79210C.1.pep
NRPKFLDSTFYQLHCSIHDNICNKNCISLASILIIHFVSGH

SEQ ID NO: 262669 - protein, 67 aa, Glycine max
  Clone ID: PAT_MRT3847_79211C.1.pep
VKKITVKILVKGNLKPFLSKKKKECKSLFYCKYILNTCLVGIVFEKKKSLIFKKKICNFVFHQLFFS

SEQ ID NO: 262670 - protein, 79 aa, Glycine max
  unsure (1)..(79): unsure at all Xaa locations
  Clone ID: PAT_MRT3847_79212C.1.pep
YYSHRSTPCGVLITEGXTFISPTSSWFPHVPXIYSNKQVEALINLFYSLHSNSHFIFYNFCIFALHKIQFLTFCWFPLF

SEQ ID NO: 262671 - protein, 127 aa, Glycine max
  Clone ID: PAT_MRT3847_79213C.1.pep
YPTGKFNIPKHFLYFVQDSALSSKITVHPDGQMTFMGTAIELKDLLSVVAESCLSKWSRRDEKQSMLVPHFSWVNINELERSHSSTLKNRTRRTETNKRKKNALMTWLDAFLSFSTKVKLGNLTKYY

SEQ ID NO: 262672 - protein, 99 aa, Glycine max
  Clone ID: PAT_MRT3847_79214C.1.pep
FLTSQQRIELMGGNNSKEDNNNWRQNSSVRSSSSASSWESYPDPQSGYGHIGYAYEPQQPYCGGRFVSLAQLFCWLCFMMYFGPYLMYIVYWLNVGHAE

SEQ ID NO: 262673 - protein, 325 aa, Glycine max
  unsure (1)..(325): unsure at all Xaa locations
  Clone ID: PAT_MRT3847_79215C.1.pep
MAPSSKAEKKAAVDAAAWMFNVVTSVGIIIVNKALMASYGFSFATTLTGMHFATTTLMTVVLRMLGYVQPSHLPLPDLLKFVLFANFSIVGMNVSLMWNSVGFYQPLXIAKLSMIPVSCLLEVVLDKIRYSRDTKLSIGVVHISISVCTVTDVSVNGRGFIAAFIAVWSTSMQQYYVHFLQRKYSLSSFNLLGHTAPAQAASLLLLGPFLDYWLTNKRVDRYDYNTASLIFIFLSCTIAIGTNLSQFICIGRFTAVSFQVLGHMKTILVLIMGFFFFGKEGLNLQVVFGMIIAVAGMIWYGNASSKPGGKERRSHTLPTNKTETR

SEQ ID NO: 262674 - protein, 586 aa, Glycine max
  unsure (1)..(586): unsure at all Xaa locations
  Clone ID: PAT_MRT3847_79216C.1.pep
TAARRRQKGEAVVDKISSHQKEDEVRSGGTVDMEDELVGKDRYIGSIESLIRNNIQQYKIDMADEVINAGRFDQRTTHEERRLTLETLLHDEERYQENVHDVPSLQEVNRMIARSKEEIELFDQMDDELDWIEEMTRYDDVPKWLRANTREVNAAIGALSKRPSKNTLLGGSIGMESSEFGSERKRGRPKGKKHPNYKELDDEILEYSEVSSDERNEYAHEGEIGEFDDDGYSVADGAQTIDKDQLEDGLLCDAGYEFPQSLESARNNQMVEEAGTSGSSSDSQRVRQIVSPSVSSQKFGSLSALDARPSSISKRMTDELEEGEIAXSGDSHMDHQQSGSWIHDRDEGEDEQVLQKPKIKRKRSLRVRPRHATERPEEKPRVRMASHLAVQADHKYQAQLRTDPESKLFGDSNASRHEQNSPSLKNKRTLPSRRVANTSKLHGSPKSSRLNCMSVPSQDGGEHSRESWEGKPINSSGSSAHGTKMTEIIQRRCKNVISKLQRRIDKEGHEIVPLLTELWKKDWNTLLGGSIGMESSEVGSERRRGRPKGKKHPNYKELEDENGEYSESNSEDRNEDSAQEWENGEF

SEQ ID NO: 262675 - protein, 726 aa, Glycine max
  unsure (1)..(726): unsure at all Xaa locations
  Clone ID: PAT_MRT3847_79217C.1.pep
LEKTLNNRCMELRKTCNHPSLNYPLLSELSTNSIVKSCGKLWILDRILIKLQRTGHRVLLFSTMTKLLDLLEDYLNWRRLVYRRIDGTTSLDDRESAIMDFNSPDSDCFIFLLSIRAAGRGLNLQSADTVVIYDPDPNPKNEEQAVARAHRIGQKREVRVIYMEAVVDKISSHQKEDELRSGGTVDMEDELVGKDRYIGSIESLIRNNIQQYKRESSXEGNVINAGRFDQRTTHEERRLTLETLLHDEERYQETVHDVPSLQEVNRMIARSKEEIELFDQMDDELDWIEEMTRYDHVPKWLRANTREVICSKKXPSKYIIRKIAQRMKERGSPLARDLIDTVVPDVSSDRNTLQNEGEESSLTSLKNKQKLSSRKVANTSKLHGSPKSNRLNCTSAPSEDGNEHPRESWEGKHLNPNGSSAHGTKTTEIIQRGCKNVISKLQRRIDKEGHQIVPLLTDLWKRIENSGHAGGSGNSLLDLHKIDQRIDRMDYSGVMELVFDVQFMLRGAMHFYGYSYEVRTEARKVHDLFFDILKIAFPDTDFVEARGALSFSSQVPAGTAASSPRQVTVGPSKRHRVTNDAETDPCPSQKPSQSGSTTNGENTRFKGHLPQKNSRTGSGSAREQPQQDNPPLLAHPGQLVVCKKKRNERDKSLGKGRTGSTGPVSPPSAAIRSPGSGSTPKDARLAQQGRVSQPSQHSNGSAGSVGWANPVKRLRTDSGKRRPSHM

SEQ ID NO: 262676 - protein, 229 aa, Glycine max
  Clone ID: PAT_MRT3847_79218C.1.pep
FPQSLESARNNQMVEEAGTSGSSSDSQRVRQIVSPSVSSQKFGSLSALDARPSSISKRMTDELEEGEIAVSGDSHMDHQQSGSWIHDRDEGEDEQVLQKPKIKRKRSLRVRPRHATERPEEKSGSEMASHLAVQADHKYQAQLRTDPESKLFGDSNASRHEQNTPALKNKRTLPSRRVANTSKLHGSPKSSRLNCMSVPSQDAGDHSRESWEGKPINSSGISAHGTKMT

SEQ ID NO: 262677 - protein, 195 aa, Glycine max
  unsure (1)..(195): unsure at all Xaa locations
  Clone ID: PAT_MRT3847_79219C.1.pep
THILPFSQSELHAWQPILTPXCSISVFTALGLILFPVGLASLFVIHSGVEGTFRYEDECLPPDHKDDAMASITDVWSSXSCTKKLTAKNLMNAPASVYYQVANFYHXHSPMHSEVTDEXKLRRNAHENDASSCRPEDYTPNDMAHTPSVPXALYAWSLCIDTYRLTSFNKDSVINTPNIACRSDQNGTFVTDAYP

SEQ ID NO: 262678 - protein, 109 aa, Glycine max
  Clone ID: PAT_MRT3847_7921C.1.pep
PGFQKTQNGKGGEKKNKGPGIFTPKIIKKDGRAQKKVWVLVTRKKNHWLTNMGTTKGANQGGGTILKTLRKIFQKKNFFFFKRGGEKPKKFWIKGEEITKKKNWDSNPV

SEQ ID NO: 262679 - protein, 66 aa, Glycine max
  Clone ID: PAT_MRT3847_79220C.1.pep
KMHTVKRPLTALDYLLVKCNDKLCEEFKEFCPKFKNDYQQNCPNAEYEAICPLLKHAIQICCQKHA

SEQ ID NO: 262680 - protein, 164 aa, Glycine max
  Clone ID: PAT_MRT3847_79221C.1.pep
TVDFIFGNAAVVLQNCNIFARNPPNKVNTITAQGRTDPNQNTGISIHNSRVTAASDLRPVQNSVRTYLGRPWKQYSRTVFMKTYLDGLINPAGWMEWSGNFALDTLYFGEYMNTGPGSSTARRVKWSGYRVITSASEASKFSVANFIAGNAWLPSTKVPFTPSL

SEQ ID NO: 262681 - protein, 41 aa, Glycine max
  Clone ID: PAT_MRT3847_79222C.1.pep
YWPLNRFPNYTSPALVHKMVLMYVSFSLSWAKYMFLLSESM

SEQ ID NO: 262682 - protein, 64 aa, Glycine max
  Clone ID: PAT_MRT3847_79223C.1.pep
WGGCKCYLSSGGGKVFFIFGGGIRVCLFEKGNHLISRFGVIPFFPPFFPFQVIPLEGEKKPAGI

SEQ ID NO: 262683 - protein, 57 aa, Glycine max
  Clone ID: PAT_MRT3847_79224C.1.pep
KIKQNIHYTPNTISKWQFQKDQHSHMTNTLQDYTTKAPSPAQQSQAQGSIKAQIGRV

SEQ ID NO: 262684 - protein, 89 aa, Glycine max
  unsure (1)..(89): unsure at all Xaa locations
  Clone ID: PAT_MRT3847_79225C.1.pep
MAAASSMALSSPSLAGKAVKLGPLSXQKLGRVRHXEDRQPSKVSSGSPWYGPDRVQVFGGPFFXRXPGLTLTXEXPRGXKGXXIAGLSA

SEQ ID NO: 262685 - protein, 321 aa, Glycine max
  Clone ID: PAT_MRT3847_79226C.1.pep
ANKNPPQDPPIPHDVRLPGSTHASEAGFIVMADLLHHSPSFFKPPQNSTIFAIKDSAIKNTSHPLWFLKTLLLYHTTTSNAYSFNDLVKIPQGTCLPTLLRDKNVSLTKLDLDHAPNSVEINHVLISNPNIFLGEQLAVHGVLAPFSPLQPQDLLQRGFGFAIRTPTCRSNDVNVSVSKNGVEWNRVVHLLRAKGYASFSIALHSVLDGIKRDFSGSLGYVTIFAPRDLTLLGYPLTILDRAVRLHILPQRFVYKEISSLPVRSLLKTLMPDEHLEIDGVLDFVPGMVVNGVVIVAPDMIISEKFVVHGISRAFKMAEVTS

SEQ ID NO: 262686 - protein, 97 aa, Glycine max
  Clone ID: PAT_MRT3847_79227C.1.pep
AGFCIASGEIPSHPLSLIYGDYAYLLAFGNYILLISRSRTKLVHKITVILERDCERMFGPQKSSLKDAKPNTADHAHNRLDNDEETSDPRYNFSKKT

SEQ ID NO: 262687 - protein, 101 aa, Glycine max
  unsure (1)..(101): unsure at all Xaa locations
  Clone ID: PAT_MRT3847_79228C.1.pep
MWKKWDNNDSNILYCHFQRVLSDWSATFFTIFKLVPQKLGDSNASXFEAGKLVSIDEYLDGYLMERRNRYXKKLEVLELGMQEIRTXFKLFLLSSVVLLFM

SEQ ID NO: 262688 - protein, 79 aa, Glycine max
  unsure (1)..(79): unsure at all Xaa locations
  Clone ID: PAT_MRT3847_79229C.1.pep
PKKRYGRGYKKKEDCDCIDGITIGSLDDXLPAGPVTSFFRSVRNTLDFDFEDDNEGRWQSTEPPSLYIFINCSTRELAY

SEQ ID NO: 262689 - protein, 393 aa, Glycine max
  Clone ID: PAT_MRT3847_7922C.1.pep
KKENNFEDKVKRERKEERVRGGNGCKVGDDNGSLMLMWEDGFCRGRVSDCLEEIDGEDPIRKSFSKMSIQLYNYGEGLMGKVTSDKCHKWVFKEPTECEPNISNYWQSSFDALPPEWIDQFESGIQTIAVIQAGHGLLQLGSCKIIPEDLHFVLRMRHTFESLGYQSGFYLSQLFSSTRNTSSSTSLSSKPSSIPTRPPPPLLNWGQRPLGSSASMLPSPTFQHAARMGFPQAKDETHMFLMPHASEHARMGDIMGEHENDIKWPNGLSIFNALTGRSDDAKLLFNQESLGGKPSDDHNHHHHHHHSLNPNNPTSSVQNANSVANPNEFLSLDSHTEGGGARKLDKFKRCFTLPARMTSSSSSTSMDHHQQAGVEYRNSGGSMYQDVMETFLE

SEQ ID NO: 262690 - protein, 92 aa, Glycine max
  Clone ID: PAT_MRT3847_79230C.1.pep
GKGDFPMDCPLHDSLLRVHYKGTVLNEEKRVFYDTRVDNDGQPLEFCSGEGLVPEGFEMSVRLMLPGEIALVTCPPDYAYDKFPRPLNVPEG

SEQ ID NO: 262691 - protein, 88 aa, Glycine max
  unsure (1)..(88): unsure at all Xaa locations
  Clone ID: PAT_MRT3847_79231C.1.pep
ILKSKSAGRKACSFADAYHEYXRMDHFGTSSNFNPYLTTHINSSLLSSAHTCINCLGTILKTPTXHTYVTFTILDLYWTAMTHSTIYL

SEQ ID NO: 262692 - protein, 106 aa, Glycine max
  Clone ID: PAT_MRT3847_79232C.1.pep
HIFIFFKSINYLKGDKHFNETKKNSYLQQKHIKYFKQIKKNGGKKHKRTTFTKFSLVRKSHKNILNKGKPITKSKPSWGRPQKIYYPKGNNNPMHPRLNMVSKLKG

SEQ ID NO: 262693 - protein, 63 aa, Glycine max
  Clone ID: PAT_MRT3847_79233C.1.pep
GPAVIFNTDKAWDDQWTYWVGPCVGAAVAACHHHYILKAAALTALQSFMTTASLSVSTTETSI

SEQ ID NO: 262694 - protein, 110 aa, Glycine max
  unsure (1)..(110): unsure at all Xaa locations
  Clone ID: PAT_MRT3847_79234C.1.pep
DSTKHYIDTKNRILVVGGTGYIGKYLVTANVSLGHPTLVYTRPLIAQTPPSKAQLCNELNSIRVKRVHGELEHQQILAVIKHVDIVICPLASPPRXLIHLKIIYAITVAG

SEQ ID NO: 262695 - protein, 155 aa, Glycine max
  Clone ID: PAT_MRT3847_79235C.1.pep
MCYVNYAKKTKLGLYALGTELLKRKRTENDTTPVPEPKKTSTILSLPKDSKCYSSSGDDSSSDDLLSDDSSSDDSSSEDSSSDDSSSDDLSSDDSSSDDSSSDDDSSDPSISNESIKKDEDYAESVGSCSVESVGSCSVDSETSDATSGTTQVLK

SEQ ID NO: 262696 - protein, 80 aa, Glycine max
  Clone ID: PAT_MRT3847_79236C.1.pep
PCLIQLVGKDALAEGDKITLETAKLLREDYLAQNAFTPYDKFCPFYKSVWMMRNIIHFYNLANQVWWCKQSPSFWCFIYI

SEQ ID NO: 262697 - protein, 69 aa, Glycine max
  Clone ID: PAT_MRT3847_79237C.1.pep
FPFEDLIQLHIWDSNTRPVGKLKQPVLVDLCARWLGLLYLFLWARTASLMRICLWILLVAKEFLSLWPL

SEQ ID NO: 262698 - protein, 117 aa, Glycine max
  unsure (1)..(117): unsure at all Xaa locations
  Clone ID: PAT_MRT3847_79238C.1.pep
TKEKXHRRNQPRDKGDAQATTXPRTPQNXXAGERTPKAQKEAGEXRKGTXRHAHSHHQGSGSTMSKRIERPAWAEPLKGEYRGAHGPGPPRREPAKTQNGAGARGQRGQGALKHRAR

SEQ ID NO: 262699 - protein, 119 aa, Glycine max
  Clone ID: PAT_MRT3847_79239C.1.pep
PPGGTEPEQPGRPTRPICHTTTHRLWGDNTARASGSNAHPGEPNNHDGDDTRDPASTGKDKSRKKNNQLQLNQKRGTSEPEANTLRGEPHKTNGSTLAGTRVRNKNTETKAKRQARTTP

SEQ ID NO: 262700 - protein, 419 aa, Glycine max
  unsure (1)..(419): unsure at all Xaa locations
  Clone ID: PAT_MRT3847_7923C.1.pep
MVGSGTTTTTDRSKEAVGMMALHEALRSVCLNSDWTYSVFWTIRPRPRVRGGNGCKVGDDNGSLMLMWEDGFCRGRVSDCLEEIDGEDPIRKSFSKMSIQLYNYGEGLMGKVTSDKCHKWVFKEPTECEPNIXNYWQGSFDALPPEWIDQFESGIQTIAVIQAGHGLLQLGSCKIIPEDLHFVLRMRHTFESLGYQSGFYLSQLFSSTRSTSSSTSIPSKPSTIPIRPPPPLLNWGQRPLESSASMLSSPSFQHAAARMGFPQAKDETRMFLMPNASSEQLARMGDIMGEHENDIKWPNGLSIFNALTGRSDDAKLLFNQDSLGAKPSSDHNHRHTLNPNPNAGSVANPNEFLSLDGHTEGRGGARKVDKFKRCFTLPARIKTSSSSSTSMDPHQQQAGVEYRNSEGSMYQDVMETFLE

SEQ ID NO: 262701 - protein, 78 aa, Glycine max
  Clone ID: PAT_MRT3847_79240C.1.pep
CFVGVAEFDGSHQKKGGLFNFNGIKGVACGILAACAVTSAAFPVTAATQVLIELKILNAFARISYFDLWKFNKESYNN

SEQ ID NO: 262702 - protein, 62 aa, Glycine max
  Clone ID: PAT_MRT3847_79241C.1.pep
QTDSQIIRLTESCDLQYLRRRGNGKGHALHPDHDRRANDLSLLENHTDQYCTSSMNSSQWTG

SEQ ID NO: 262703 - protein, 91 aa, Glycine max
  unsure (1)..(91): unsure at all Xaa locations
  Clone ID: PAT_MRT3847_79242C.1.pep
VLLGVLQGQQQSLQQGAHSTGSSRLHDLYWQAMKTLGVQRPKSEKKXAKEIPSATQSPISKKRKKKGFLPETKKRKKRKSEDGTPAEDGTP

SEQ ID NO: 262704 - protein, 62 aa, Glycine max
  Clone ID: PAT_MRT3847_79243C.1.pep
SASQSDVSKLLADQSFVSSILASLPGVDPNDPSVKDLLASLQNQSEPQQKNEDKPPNEEEKK

SEQ ID NO: 262705 - protein, 77 aa, Glycine max
  Clone ID: PAT_MRT3847_79244C.1.pep
RASRGTFTLSKMSNYDEPVYMLTNLKIGIKSRSVLELKNIWITSYYSVCDFLRERKSLSALDTDLVNHYFFHYKNIC

SEQ ID NO: 262706 - protein, 162 aa, Glycine max
  Clone ID: PAT_MRT3847_79245C.1.pep
AAAKKASEDASKQEKDGEQQASPQDTTMTEGASAAASEAETKRTDLTDDENALLQQALAMSMDDPTINHEVRDTDMSEAAAEDPELALALQLSVEDSSKDSASQSDVSKLLADQSFVSSILASLPGVDPNDPSVKDLLASMQNQSEPQQKNEDKPPNEEEKK

SEQ ID NO: 262707 - protein, 54 aa, Glycine max
  Clone ID: PAT_MRT3847_79246C.1.pep
RSSCPVATTPASLNAQLQSASPWASRLRNCQEGPPVLTCCGIRHVVKCGFPARL

SEQ ID NO: 262708 - protein, 42 aa, Glycine max
  Clone ID: PAT_MRT3847_79247C.1.pep
RGRPFFFFFMKPGYAIGIGRLGPKHLIFIFYHQKPTFKNWPN

SEQ ID NO: 262709 - protein, 72 aa, Glycine max
  unsure (1)..(72): unsure at all Xaa locations
  Clone ID: PAT_MRT3847_79248C.1.pep
MMKALSHRHTIIGSXVLYLDTHMSDLIQHYADVXVEVADPVVSFGDTVVESSSVECFAETPYKGNKVTMVAD

SEQ ID NO: 262710 - protein, 785 aa, Glycine max
  unsure (1)..(785): unsure at all Xaa locations
  Clone ID: PAT_MRT3847_79249C.1.pep
MAQSNWEADKMLDVYIYDYLVKKKLHNTAKAFMTEGKVSPDPVAIDAPGGFLFEWWSVFWDIFIARTNEKHSETAAAYLEAQQIKAKEQQQLQMQQLQLMRQAQMQRRDSNHPPLGGPVNAITTEGVLGQSTASALAAKMYEERMKHSNPMDTETSQPLLDARMALLKSTNHPGQMVQGNSGSVTATLQQIQARTQQTPQDIKPEVNMGTMQRSLPMDPSSIYGQGGMQSKPGIANAGLNPGVGSLTLKGWPLTGIDQIRPGFGAPVQKPLLQSANQFQLLPQQQQQQILAQVRAQGNIGNSPAYGDMDPQRLRGLARGSLNAKDGQSIANDGSIGSPMQSTSSKINMPQIQQSTSHQQQDPLHPQQLVQNNRKRKGPTSSGPANSTGTGNTLGPSNSQPSTPSTHTPGDGVAMAGNLQNVAGISKGLIMYGTDGVGCLASSTNQLDDMEHFGDVGSLEDNVESFLSQDDGDGRDLFGTLKRNPSEHATDASSSISFDDGRVVRXSFTSDGKLXASAGRDKKVVLWNVETLQTWNMETLQTESTPEEHSLIITDVRFRPNSTQLATSSFDTTVRLWDAADPTFPLHTYSGHTSHVVSLDFHPKKTELFCSCDNNNEIRFWSISQYSSTRIFKGGSTQVRFQPRLGHLLAAASGSVVSLFDVETDRQIHTLQGHSAEVRCVCWDTNGDYLASVSQESVKVWSLASGECIHELTSSGNMFHSCVFHPSYSTLLVIGGYQSLELWNMAENKCMTVSAAHECVISALAHSPVTRMVASASHDKSVKIWK

SEQ ID NO: 262711 - protein, 159 aa, Glycine max
  unsure (1)..(159): unsure at all Xaa locations
  Clone ID: PAT_MRT3847_7924C.1.pep
SPDTSKTIKLMRYNSYLRRLNSFKLLKTSFILLLLLYTLSTHHLLLSSAFHGPAWENQVRHSALPRRPHGMSVLVTGAAGFVGSHCSLSLKKRGDGVLGLDNFNSYYDPXILIIEADLNDAPLLAKIFDVVSFSHVVASNIAGFVTFLEASKNANPQPA

SEQ ID NO: 262712 - protein, 36 aa, Glycine max
  unsure (1)..(36): unsure at all Xaa locations
  Clone ID: PAT_MRT3847_79250C.1.pep
SAGAIVELPLRLNGFPSFLKLGMLNNFGGIGPANWX

SEQ ID NO: 262713 - protein, 105 aa, Glycine max
  Clone ID: PAT_MRT3847_79251C.1.pep
MAQSNWEADKMLDVYIYDYLVKKKLHNTAKAFMTEGKVSPDPVAIDAPGGFLFEWWSVFWDIFIARTNEKHSETAAAYLEAQQIKAKEQQQLQMQQLQLMRQAQM

SEQ ID NO: 262714 - protein, 297 aa, Glycine max
  unsure (1)..(297): unsure at all Xaa locations
  Clone ID: PAT_MRT3847_79252C.1.pep
GNTLGPSNSLPSTPSTHTGGDGVAMAGNLQNVAGISKGLIMYGTDGVGGLASSTNQLDDMEHFGDVGSLEDNVESFLSQDDGDGRLGIRLTLKRNPSEHATDASKGFSFSEVGSIRKSNSKVVCCHFSSDGKLLASAGHDKKVVLWNMETLQTESTPEEHSLIITDVRFRPNSTQLATSSFDTTVRLWDAADPTFPLHTYSGHTSHVVSLDFHPKKTELFCSCDNNNEIRFWSISQYSSTRVFKGGSTQVRFQPRLGHLLAAASGSVVSLFDVETDRQMHTLQGHXAEVHCVCWGSN

SEQ ID NO: 262715 - protein, 60 aa, Glycine max
  Clone ID: PAT_MRT3847_79253C.1.pep
NFVKEAQRGRVHSFKCNERSSVLLSVHLCSIMIKLCHYKELYHVLSQVFFLLWFKLWIIF

SEQ ID NO: 262716 - protein, 77 aa, Glycine max
  unsure (1)..(77): unsure at all Xaa locations
  Clone ID: PAT_MRT3847_79254C.1.pep
VAAKKTKKTHESINNRLALVMKSGKYTXLGYKNXVSNLFRTSKGKLIFMLNHCPPLRKPEIEYYPLFAKVGIHLSNG

SEQ ID NO: 262717 - protein, 88 aa, Glycine max
  Clone ID: PAT_MRT3847_79255C.1.pep
SEANKLKDGEEEKGEMNGKDLEYAKEIVAMAEYTAAEEKIRAHKPQKQRFDEGGSRTITHENGYERKERTGIKDGKSIQEVGGEGGDG

SEQ ID NO: 262718 - protein, 118 aa, Glycine max
  unsure (1)..(118): unsure at all Xaa locations
  Clone ID: PAT_MRT3847_79256C.1.pep
WGPKKAPFLCGKRGGKKNGKKKIGCFLEKKPPPPLFFFPLFFPPKGKRPFFLKKIPPFYYKKIFSPPPLKGGGPPPGFFFFFSPQGGGEKKKGGGGAPPPFLKKEXPPPPPXXPLFFF

SEQ ID NO: 262719 - protein, 118 aa, Glycine max
  Clone ID: PAT_MRT3847_79257C.1.pep
PKWWERAAKVKGRAPLCWGGGPLGTLFFSKFVGCPGCFSPDYAPLFPSFKGGKSPLETFQVFPAPFFFSRGFCPGFSKVGFFPKGFFSGVSVRDRVFLDLSPFANVRGGPIFGGGGFP

SEQ ID NO: 262720 - protein, 48 aa, Glycine max
  unsure (1)..(48): unsure at all Xaa locations
  Clone ID: PAT_MRT3847_79258C.1.pep
XCVDFXLXGFIXPEYXXXFXAITQPLHSFAXHAQQKLRLIXXXTVASD

SEQ ID NO: 262721 - protein, 99 aa, Glycine max
  Clone ID: PAT_MRT3847_79259C.1.pep
REEEVISEAVPVAPAVGMEFDSYDDVYYFYNWYAKEQGFGVRVTNTWYRKTKERYRAKLSCSSAGFKKRTEANRPRPETKTGCPAMIKVKLMDSTRWRI

SEQ ID NO: 262722 - protein, 74 aa, Glycine max
  unsure (1)..(74): unsure at all Xaa locations
  Clone ID: PAT_MRT3847_7925C.1.pep
LGAQPSLHREDEGPIAQVPQHVEDASSEATVPEPFXXEEEAGETQVRQEVAATPERSREVTSDPSTPVVDLSSP

SEQ ID NO: 262723 - protein, 77 aa, Glycine max
  Clone ID: PAT_MRT3847_79260C.1.pep
LVSHGSIIVPYYSIVQVVHCLARSFASAHLIVRSMMIPHGYFLAFVTVKASLWCQVKTSVREGCHDTSAIRSNGTSV

SEQ ID NO: 262724 - protein, 123 aa, Glycine max
  Clone ID: PAT_MRT3847_79261C.1.pep
REEEVISYDDVYYFYNWYAKEQGFGVRVTNTWYRKTKERYRAKLSCSSAGFKKRTEANRPRPETRTGCPAMIKFRLMDSTRWRIIEVELDHNHLINPTSGKFYKSHKHIPLGTKRTFHLDDDH

SEQ ID NO: 262725 - protein, 76 aa, Glycine max
  unsure (1)..(76): unsure at all Xaa locations
  Clone ID: PAT_MRT3847_79262C.1.pep
ELCDACADPVVAVPXEKERVYYFRQGHMXEGEASTNHVADDHSAGDERPHNEVCQMISYHMDAGHDTDDMYAEVSV

SEQ ID NO: 262726 - protein, 90 aa, Glycine max
  Clone ID: PAT_MRT3847_79263C.1.pep
RSFFSFDRTDYNFVSLHRMSVQHLSSLLKLNVPRKTELIVSPNHIFFSPQNSPSRLLKRTESSTIQALLMIPLIPWFVISNKKYKCGKVV

SEQ ID NO: 262727 - protein, 204 aa, Glycine max
  Clone ID: PAT_MRT3847_79264C.1.pep
MDKVCLNSEAVPVAPAVGMEFDSYDDVYYFYNWYAKEQGFGVRVTNTWYRKTKERYRAKLSCSSAGFKKRTEANRPRPETRTGCPAMIKFRLMDSTRWRIIEVELDHNHLINPTSGKFYKSHKHIPLGTKRTFHLDDDHDHHHHLDAAAAQQVHKITMFRTVIVDAQDEGESQNALYSNQLKLNKGDSQAILKFFSHQHLADPH

SEQ ID NO: 262728 - protein, 36 aa, Glycine max
  Clone ID: PAT_MRT3847_79265C.1.pep
MLGGILHRGHKIKGTVVLMRKNVLDVNSDTSDWGTS

SEQ ID NO: 262729 - protein, 47 aa, Glycine max
  Clone ID: PAT_MRT3847_79266C.1.pep
TVKSQELGGATSIAEDFGYQPGDGILGLGWPALSADNAIPPMQNRLS

SEQ ID NO: 262730 - protein, 67 aa, Glycine max
  unsure (1)..(67): unsure at all Xaa locations
  Clone ID: PAT_MRT3847_79267C.1.pep
RSKYSFHTYHTYHYTNXTGCYRTNQPRETYYIFISSKPPTAIINCITXLSTSTYSLTVLYPTLSKHI

SEQ ID NO: 262731 - protein, 74 aa, Glycine max
  Clone ID: PAT_MRT3847_79268C.1.pep
PMELHAYKTLVGLIGIFLKRLGANKTLDLWGKNQRTEATQCTLILSGIRCSRSRCTYKVSHSCMMHACRYGQCS

SEQ ID NO: 262732 - protein, 86 aa, Glycine max
  unsure (1)..(86): unsure at all Xaa locations
  Clone ID: PAT_MRT3847_79269C.1.pep
MQRMITAPDSIDHIDLLASIDLMGLQGAGQAFPYKIDCDDKFGSTNTQDFFDGNYAEDAWLPIIGNCLYAVGQLPXEAVKDNATCG

SEQ ID NO: 262733 - protein, 46 aa, Glycine max
  Clone ID: PAT_MRT3847_7926C.1.pep
IFTIQTKHLKYSHLTLASFIIKIIDNNLTKLLTIQTNSNSKIFKPN

SEQ ID NO: 262734 - protein, 57 aa, Glycine max
  Clone ID: PAT_MRT3847_79270C.1.pep
IAHVNRIGNRKIILIGNLPVDHCPIAVRKRYTKICMMEIYGALKGIQGPCAKGSKVS

SEQ ID NO: 262735 - protein, 162 aa, Glycine max
  unsure (1)..(162): unsure at all Xaa locations
  Clone ID: PAT_MRT3847_79271C.1.pep
LTRTLRSPKTPSTAPDDHTRMLDESSPFKGQGIIAYSIPWMDHVCLTXPYQRMNALTXKTDMFMDLFLHDHIERKTAVADYAAMDMADDFLTLDEDPTLDVNAREAXVRAFTHDLITSETASSTATPNRALTQLWRRPLIIKIAAEELXQPVRGDRWIEDMD

SEQ ID NO: 262736 - protein, 56 aa, Glycine max
  Clone ID: PAT_MRT3847_79272C.1.pep
LSLLDFKSLSMSSYFFLYCVLRDRESLSVLATDCVNRILFHTSYGFKTIRAVGSTF

SEQ ID NO: 262737 - protein, 70 aa, Glycine max
  Clone ID: PAT_MRT3847_79273C.1.pep
KFKLKNQNGESFSSMVVVISKSEIMYLKLLSIHTFNESVGETFTSVVHYLAHDFNAYTFSTKIVLTLTLL

SEQ ID NO: 262738 - protein, 52 aa, Glycine max
  Clone ID: PAT_MRT3847_79274C.1.pep
QKKDGAGPPQHRATDKPRTDGPRPAKTKNRRTAHPRPTGKASAHSGPNSRKP

SEQ ID NO: 262739 - protein, 75 aa, Glycine max
  Clone ID: PAT_MRT3847_79275C.1.pep
LGDTYILTTPKLYQPYDLDSGYYKNPLMQHGDADPHGPLTNALQHDGDHGNSEHSINEAYATVTVMEPQTMRNMF

SEQ ID NO: 262740 - protein, 112 aa, Glycine max
  Clone ID: PAT_MRT3847_79276C.1.pep
MGLAISGLFSRLFGKKEVRILMVGLDAAGKTTILYKLKLGEIVTTIPTIGFNVETVEYKNISFTVWDVGGQDKIRPLWRYYFQNTQGLIFVVDSNDRERVGEAREELMRMLA

SEQ ID NO: 262741 - protein, 59 aa, Glycine max
  Clone ID: PAT_MRT3847_79277C.1.pep
AESYYDACGINKAIFYIYRFFAKERSPPIHSHRTILKDYLLLLLGKNIATLFPEHGNLN

SEQ ID NO: 262742 - protein, 53 aa, Glycine max
  Clone ID: PAT_MRT3847_79278C.1.pep
VSTVFPPLVKKNTLCSCGKPVLFYRCLPILFKNAFLIFSSESSSIGRGFRFIF

SEQ ID NO: 262743 - protein, 60 aa, Glycine max
  Clone ID: PAT_MRT3847_79279C.1.pep
DFLCLSACTWYSVKCETFSVFLVLRRTSVCLIDCMYVVGTYVLCLYSLSFDLKNLLLMLK

SEQ ID NO: 262744 - protein, 106 aa, Glycine max
  Clone ID: PAT_MRT3847_7927C.1.pep
IRLEGGKKHGAAQLRVYNLGNTSPVPVGKLVSVLETLLRVKAKKHVIKMPRNGDVPFTHANVSLAWRDFGYKPTTDLATGLRKFVQWYVGYYGVRLGVEKEKISLD

SEQ ID NO: 262745 - protein, 92 aa, Glycine max
  Clone ID: PAT_MRT3847_79280C.1.pep
KPELRFREAVMDQTGLATGSPRPHRQEQRILLTEPLLKRPSPQIPDPMPCQPVADVPGLKPQDLTSPTLILMTYMEVRMAVRNGDYGCEDEF

SEQ ID NO: 262746 - protein, 50 aa, Glycine max
  Clone ID: PAT_MRT3847_79281C.1.pep
FYFTRVVTRSNHVVFFALELGIVVTCHAMSLYYPHSPSGCWIEESIMPGF

SEQ ID NO: 262747 - protein, 227 aa, Glycine max
  Clone ID: PAT_MRT3847_79282C.1.pep
MAMMWIRVILILAACMLPLSVEAMVRHYKFNVVVKNVTRLCSTKPIVTVNGKFPGPTIYAREDDTVLVKVVNHVKYNVSIHWHGVRQLRTGWADGPAYITQCPIQPGQAFVYNFTLTGQRGTLWWHAHILWLRSTVHGALVILPKLGVPYPFPKPHTEKVIILSEWWKSDTEAVINEALKSGLAPNVSDAHTINGHPGSVQNCASQGGYELQFNLETLLTKNINAAL

SEQ ID NO: 262748 - protein, 53 aa, Glycine max
  Clone ID: PAT_MRT3847_79283C.1.pep
MSPTPTTTMTPKTPTTPRSARRGDNVWWSLPHPVRKSATNITPCSYVLDYHFP

SEQ ID NO: 262749 - protein, 63 aa, Glycine max
  Clone ID: PAT_MRT3847_79284C.1.pep
PKSPPICPKISAKVKILNNEFYSYKSTFFNFCFFIKTQNTLFPFLVLFTKSIYSNLLTNNFSF

SEQ ID NO: 262750 - protein, 75 aa, Glycine max
  Clone ID: PAT_MRT3847_79285C.1.pep
ASSSYQDIPDYPNSFFICSIKMIRSRHGIWSSTSTFLNVATPPAATPAVAGCLYAILSTSTSAISEISLPFGIPL

SEQ ID NO: 262751 - protein, 153 aa, Glycine max
  Clone ID: PAT_MRT3847_79286C.1.pep
AKFEFLVRKMVYSKAPTAYYSTLHDSISSLCKTILPFGLKKHRCLVSAEQKLWQLQSDNLKWQRDSLYQMLNLVALHRDDILSEAEVSAFRTHLLETLLASPPPHQDHALIIKDQLMFLHELLNAKCISDGEYHSSRRPLLVRLAVLGGETEG

SEQ ID NO: 262752 - protein, 40 aa, Glycine max
  Clone ID: PAT_MRT3847_79287C.1.pep
MPLMLFADPRESETFRPLDMHHGMEVRLGLSKGPVYPSII

SEQ ID NO: 262753 - protein, 140 aa, Glycine max
  unsure (1)..(140): unsure at all Xaa locations
  Clone ID: PAT_MRT3847_79288C.1.pep
MDRIREARRSTMAANGLTRRRHRTNSLRDSPEEDGGMELQEPSRLRDRGGSGKKDRDRERERERERDRLGRSKKRRGDRLMHSSREDGGEDTSEESINDEDDDDDENXGGGGGSASVRMLPLNPSSLSNHHHRKSFPAKV

SEQ ID NO: 262754 - protein, 252 aa, Glycine max
  Clone ID: PAT_MRT3847_79289C.1.pep
MVEETQMKGIVVLPLCSPMAAPLQVVLYGNQPHPEAKFLFLRSTGRCTNFQVHSSRRAPPGVDTRIHWENEDEGWIGGTNTKHQQTHKPNNMLQADDFPDLLSASLGSHYEFLGVSPDADLEEIKVAYRKLSKEYHPDTTSLPLKTASEKFMKLREVYNVLSNEESRKFYDWTLAQEVASRHAEKMKMKLEDPREQQLKNWEPVPDMVDRLGGRNMKLSDQAVSAITIDLFIIVFAICCIIYVIFFKEPYYY

SEQ ID NO: 262755 - protein, 148 aa, Glycine max
  Clone ID: PAT_MRT3847_7928C.1.pep
MASSPDTSKTIKLVRNNSYLRRLNISFKILFLLLALLLLYTLSTHHHHLPLSSAWENQVRHSALPRRPNGMSVLVTGAAGFVGSHCSLALKKRGDGVLGLDNFNPYYYPSLKRARQHLLAKHRILIIEADLNDAPLLAKLFDVVFFSH

SEQ ID NO: 262756 - protein, 58 aa, Glycine max
  Clone ID: PAT_MRT3847_79290C.1.pep
STQVNFSLGEKLSAWSEPNVQRASSPSLDVYQKQCEVASASIEPTELIFLLLMWNGGL

SEQ ID NO: 262757 - protein, 69 aa, Glycine max
  Clone ID: PAT_MRT3847_79291C.1.pep
HITGRHLFLYRLVKSQEPYMRHPIKLLCLRIPWLLVPCSTMWMIFQEIDESLLPNHTHACLFEDPVSHL

SEQ ID NO: 262758 - protein, 74 aa, Glycine max
  Clone ID: PAT_MRT3847_79292C.1.pep
VRNLIMILFKDQLNTWHGFVLEASSCYLPRVYVFSSFEMETKSVSLVLLLLLPPKKNFQGLQGYHHFSHKGQGT

SEQ ID NO: 262759 - protein, 66 aa, Glycine max
  Clone ID: PAT_MRT3847_79293C.1.pep
ITSMTKAMTKAMTRALVDQPSPPLQYHQPRCQVNMNLDHLSHYINCHHFIHQQDNLQPPTVHTRLS

SEQ ID NO: 262760 - protein, 263 aa, Glycine max
  unsure (1)..(263): unsure at all Xaa locations
  Clone ID: PAT_MRT3847_79294C.1.pep
MACNGSGCQSGGCYKDEDATCKQPPKSEEADSKNPSNVCIKCKLNDAVSGYGGIDDGRFCADCFKTNLFGKFRFAVTSNAMITPTDKVLVAFSGGPSSRVALQFVHDMQERAQRNFDASRDRSLPVFGVGVVFIDESAVLPIPSNEMEEAVEVVSEVVSSLAPPRKELHIVPIETVYSSDSGDGKERITKVVNTVIDPTGREDVLLCLRMLALQKVASEFGYNRIILGSCISRIACHVISATVKGXGYSLPADIQDVDARWED

SEQ ID NO: 262761 - protein, 56 aa, Glycine max
  Clone ID: PAT_MRT3847_79295C.1.pep
IQLSAHDLIHHPSNRPDIVYPQQLLETLRAYCSNKCVKCYGSPTLSSYCRCTHLSA

SEQ ID NO: 262762 - protein, 47 aa, Glycine max
  Clone ID: PAT_MRT3847_79296C.1.pep
KFNTKHLNVDILTKFKYFLLIIKMFHIFSNNILLTKIFLLIIEIIQI

SEQ ID NO: 262763 - protein, 77 aa, Glycine max
  Clone ID: PAT_MRT3847_79297C.1.pep
SQVLEAQLSTIESLIRPLTYHMGVTKPHVLMLLIIMVVSIAEKPSVIEGRALSLISGQGNFTPSLIVLADFVVESSF

SEQ ID NO: 262764 - protein, 67 aa, Glycine max
  Clone ID: PAT_MRT3847_79298C.1.pep
PSDCHIPSIVMSIVCPNSCSSAGFNHPDVVPKVKSQLSASREVPEAPEWRVPCFGQSIVEACEVVTS

SEQ ID NO: 262765 - protein, 79 aa, Glycine max
  Clone ID: PAT_MRT3847_79299C.1.pep
ISSNERVSVDAPLNDNVTIIVKPKCQVPVKKKEYSPITLLWYSWVDGEVDSFYSCYNDKVNILHFINCVNICTFTDEEV

SEQ ID NO: 262766 - protein, 421 aa, Glycine max
  Clone ID: PAT_MRT3847_7929C.1.pep
MASSPDTSKTIKLMRYNSYLRRLNSFKLLKTSFILLLLLYTLSTHHLLLSSAFHGPAWENQVRHSALPRRPHGMSVLVTGAAGFVGSHCSLSLKKRGDGVLGLDNFNSYYDPSLKRARQHLLAKHQILIIEADLNDAPLLAKIFDVVSFSHVLHLAAQAGVRYAMQNPHSYVASNIAGFVTLLEASKNANPQPAIVWASSSSVYGLNDESPFSELHRTDQPASLYAATKKAGEAIAHTYNHIYGLSLTGLRFFTVYGPWGRPDMAYFFFTKSILQRKPIDVYQTHDEREVARDFTYIDDVVKGCLGALDTAEKSTGGVVGKKRGPAQLRVYNLGNTSPVPVGKLVSVLETLLGVKAKKHVIKMPRNGDVPFTHANVSLAWRDLGYKPTTDLAAGLRKFVQWYVGYYGVRLGVEKEKHADLA

SEQ ID NO: 262767 - protein, 68 aa, Glycine max
  unsure (1)..(68): unsure at all Xaa locations
  Clone ID: PAT_MRT3847_792C.1.pep
QAPSIPTGWIGETVHSIKSHQIWEIITNSVSRCTIVTSSLQIRKALIXVYGTESPVVVVLSGIMQPRL

SEQ ID NO: 262768 - protein, 85 aa, Glycine max
  Clone ID: PAT_MRT3847_79300C.1.pep
ILVVFLHYALVHSYVLVLPSVSYLNLNKGNDQVQEVAHSNLDFFHLQSYFSYAFGASSFSLLQCGSQIALVLPLKQLERNEDIIN

SEQ ID NO: 262769 - protein, 75 aa, Glycine max
  Clone ID: PAT_MRT3847_79301C.1.pep
PTLTEVFQTYRASHRFGRRFCDWRIDLFLRYITFLFFLILLRPIYCLGVTGNFLDSKILSVLIYYKRCRGRASVR

SEQ ID NO: 262770 - protein, 98 aa, Glycine max
  Clone ID: PAT_MRT3847_79302C.1.pep
ELSLKVMHAYVDSFNFQGMEFDEAIRVFLQGFRLPGEAQKIDRIMEKFAERYCKCNPKAFSSADTAYVLAYSVIMLNTDAHNPMVKNKVCSQSYSSVN

SEQ ID NO: 262771 - protein, 48 aa, Glycine max
  Clone ID: PAT_MRT3847_79303C.1.pep
RKNTREQAEQTILIPCLGNEPLPNPEWKNSMFGFTSHLRYSFSHLLRS

SEQ ID NO: 262772 - protein, 54 aa, Glycine max
  Clone ID: PAT_MRT3847_79304C.1.pep
MLILTAADCANNLSLFSQNAERFRLVLASGLVVRATKGSTNQMSLIGMMIEPIQ

SEQ ID NO: 262773 - protein, 58 aa, Glycine max
  Clone ID: PAT_MRT3847_79305C.1.pep
VFHNLQFKPMYKMSNKRVYYLGFHVACLFKLLTPIGCNWFPNVFKHDGQTKDKYQYQV

SEQ ID NO: 262774 - protein, 168 aa, Glycine max
  unsure (1)..(168): unsure at all Xaa locations
  Clone ID: PAT_MRT3847_79306C.1.pep
MGPWMIFTDWGGHINPAVTFGLFLXRKLXLXRAIFYIVMQCLGAICGVXVVKGXEGKTKYGXLNGGXNFVGPGYTKGDGXGAEIVXTXVLVYTVLXXXDGKRNARDCXVPILXXLGIGLXVLLXYLGXIVXXGTGIKLGRSVGGGXMXXKDLGWDDEWILWRGTLIGG

SEQ ID NO: 262775 - protein, 264 aa, Glycine max
  Clone ID: PAT_MRT3847_79307C.1.pep
MFFESRSLLFPLLFSLFLASAFASESDHKYQHDEQVNLWVNKVGPYNNPQETYNYYSLPFCHPSSSASAAHKWGGLGEVLGGNELIDSQLEIKFQRNVDKTVFCQIDLDEAKVKQFKDAIENNYWFEFFMDDLPLWGYVGELHPDKNSDNGKHVIYTHKNIIVKYNNDQIIHVNLTQDIPKPLEVGKHLDMTYSIKWDSTNVTFGRRFDVYLDHPFFEHQIHWFSIFNSFMMVIFLTGLVSMILMRTLRNDYAKYAREDDDLES

SEQ ID NO: 262776 - protein, 58 aa, Glycine max
  Clone ID: PAT_MRT3847_79308C.1.pep
TIPYLTLRISCMQSPHEGLLLTLSKEILLFFSPEFYTHRGEGITMKSVGDKLLNPPNM

SEQ ID NO: 262777 - protein, 180 aa, Glycine max
  Clone ID: PAT_MRT3847_79309C.1.pep
MSLSCILKHRIFPPPPSPFTLFIQFGSRKPTVSAQTRLEDRVRDPHLDKLMSHLKRLDLVLRIHHLMSARKRGPFVSLTLLSRWRNILGLHIPVGLFLRKYPHVFLVFVHPFRKNTCCRITKRMKELILLEGLVVKQQETEAVKRVKKLLMMSLNGTLRLHALRLFKKRMGLPEDFKDSI

SEQ ID NO: 262778 - protein, 138 aa, Glycine max
  Clone ID: PAT_MRT3847_7930C.1.pep
LGPRGSNVVLASKYGSSKIVDDGVTVAKEVDMVDPDENIAAKIVRQAVAKTHYWIVDGTTTFVVLAQALIAEGVKGDACGASPVLITHGIEKTAKALVCQLKQRPGEDEYRELAYVLAHTARDTCEERNLIADSLSRA

SEQ ID NO: 262779 - protein, 56 aa, Glycine max
  Clone ID: PAT_MRT3847_79310C.1.pep
LAWISMCGMCLAALVVGIGVSIFQVCTALCVGQWHGNVILMSKVCSNLDRHFVLVV

SEQ ID NO: 262780 - protein, 91 aa, Glycine max
  Clone ID: PAT_MRT3847_79311C.1.pep
EFEFQICVYGKKGHMLKEISISNKSLYISRNFYSRLKNTLSTQNLTVTIISTLTVTIISTFFFIPTTISGYVRLQKVIVSGFFFSSFKKIT

SEQ ID NO: 262781 - protein, 85 aa, Glycine max
  Clone ID: PAT_MRT3847_79312C.1.pep
PPPIYCWATRALIPGFSPPPLSLSVDGVKLPPFFFSFMVCLFFFCSPMFPPGKKKRFSAAARKFLLPPPPFSPFGARAPTNTRSD

SEQ ID NO: 262782 - protein, 51 aa, Glycine max
  Clone ID: PAT_MRT3847_79313C.1.pep
RNLSLFFSSVRWREGAVAAEALAWVANHNGECCCLISSSQWFRSFFFRHFT

SEQ ID NO: 262783 - protein, 59 aa, Glycine max
  Clone ID: PAT_MRT3847_79314C.1.pep
LQNQRVRVDENSLYSCIGIAGAQAAQEIAAPLEEEVADDVYPGVIPVGRGLSTMTRPTT

SEQ ID NO: 262784 - protein, 107 aa, Glycine max
  unsure (1)..(107): unsure at all Xaa locations
  Clone ID: PAT_MRT3847_79315C.1.pep
VNAYWLDYSYLQASSVPXKDISCIKDLTFLYEVATIEDIYRAYEQLKVDENSLYSCIGIAGAQAAQEIAAPLEEEVADDIFGLCFGLLALRSGGVSGSLMTSYRSKD

SEQ ID NO: 262785 - protein, 45 aa, Glycine max
  Clone ID: PAT_MRT3847_79316C.1.pep
GSARISAETKGKALKLYNSVNAPPFKFISPICTAPNGNFSPRSLT

SEQ ID NO: 262786 - protein, 377 aa, Glycine max
  unsure (1)..(377): unsure at all Xaa locations
  Clone ID: PAT_MRT3847_79317C.1.pep
GSRLKTLDLSLNLVGDEGAKCLCDILVNNSSIEKLQLNSADLGDVGAKAIAEMLKKNSSLRVLELNNNMIEYSGFSSLAGALLENNSIRNIHLNGNYGGALGANALAKALESNKSIRELHXNSIGDEGICSLMTGLSSHKGKLTLLDIGNNSLGSFHVAEYIRKSRNLLWLNLYMNDIGDEGAEKIAVALKENRSISTLDLGGNNIHVDGVNAIAQVLKDNLVITTLELSYNPIGPDGANALAEVLKFHGNIKTLKLGWCEIGAKGAECIAGALKYNTTISRINVRDQRLSWGVAQVIARSLIVVNEALIFLDLGFNEIRDDGXAFAIAQALKSNDDVAVTSLNIASNFLTKFGQGALADARDHVLEMTEKEINIFL

SEQ ID NO: 262787 - protein, 738 aa, Glycine max
  unsure (1)..(738): unsure at all Xaa locations
  Clone ID: PAT_MRT3847_79318C.1.pep
LFNTRYKSSNPPFTSSSLDSRDSGREGCTVTTLTITAEPKNWQNAIRVAVQEVRRLKEFGVTQGELTRYLDALLKDSEHLAAMIDNVSSVDNLDFIMESDALGHKVMDQRQGHESLLAVAGTVTLEEVNSVGAKVLEFIADFAKPTAPLPAAIVACVPKKVHNEGAGETEFKISSTEITDAIKAGLDEPIQPEPELEVPKELIQSTKLEELKKLRKPAFIPVNPETDATKLHDEETGITRRRLANGIPVNYKISKTETQSGVMRLIVGGGRAAESPESRGSVIVGVRTLSEGGRVGNFSREQVELFCVNHLINCSLESTEEFISMEFRFTLRDNGMRAAFQLLHMVLEHSVWVDDAFDRARQLYLSYYRSIPKSLERXTTAHKLMVAMLDGDERFIEPTPKSLENLTLQSVKDAVMNQFFGDNMEVCIVGDFTEEDIESCILDYLGTAQAARNHEREKEFNPPLFRPSPSDLQFQEVFLKDTDERACAYIAGPAPNRWGFTVDGVDLLESINNASIINDDQSKSDAQQTQGLQKSLCGHPLFFGITMGLLSEIINSRLFTTVRDSLGLTYDVSFELNLFDRLKLGWYVISVTSTPSKVHKAVDACKNVLRGLHSNKITERELDRAKRTLLMRHEAEIKSNAYWLGLLAHLQASSVPRKDISCIKDLTFLYEVATIEDIYLAYEQLKVDENSLYSCIGIAGAQTAQDIAAPLEEEVADDVYPGVIPVGRGLSTMTRPTT

SEQ ID NO: 262788 - protein, 118 aa, Glycine max
  unsure (1)..(118): unsure at all Xaa locations
  Clone ID: PAT_MRT3847_79319C.1.pep
MGHAAPGMAVHDDCNLKLWEVKAKRTHRLIVNKSEEQQKQVMVNKLEQPGLGYEHLTAGLPESREEXGVHDLEYLTERNVPKSRVIHVARSLDTSPVSEQDDRLRADKDSMLRGEPGS

SEQ ID NO: 262789 - protein, 156 aa, Glycine max
  Clone ID: PAT_MRT3847_7931C.1.pep
MEGVSEGEKKKEPVEGENKSKRKMKTASQLEVLEKAYAAEAYPSEALRAELSVKLSLSDRQLQMWFCHRRLKDRNAKKLQNDSSLAGAPAVGEEGVEQVTGADVGRDCGLASGPFNHLDSRKIAPRPGMTAFPSMGAGLPAVVGSSYYEPPQNMDV

SEQ ID NO: 262790 - protein, 90 aa, Glycine max
  unsure (1)..(90): unsure at all Xaa locations
  Clone ID: PAT_MRT3847_79320C.1.pep
MVMQTTLMSLILLLALYTIDVSAWTGDIHRRVVXHVCGESSLGPEYHILECADVAVLCITKSGETLNYHAFTDAKGIYTVAETILYSDHW

SEQ ID NO: 262791 - protein, 98 aa, Glycine max
  Clone ID: PAT_MRT3847_79321C.1.pep
DEYINAENATYRAYVEISTATPILYRVTSFIVLGYALQINGILGYMKHSVSLLKQKLGCEGLQHLLGGSGIMMDKNASCCTNIEQSTSLWGCIIIDRR

SEQ ID NO: 262792 - protein, 46 aa, Glycine max
  Clone ID: PAT_MRT3847_79322C.1.pep
KSVHDFTVKDARGNNVNLADYKGKVLSLSMLPQWVAINNGYMRIKK

SEQ ID NO: 262793 - protein, 44 aa, Glycine max
  Clone ID: PAT_MRT3847_79323C.1.pep
HTHAMKHGPALLFMNGKRSSGLADYYGGWGILPITSTHTQPIPT

SEQ ID NO: 262794 - protein, 35 aa, Glycine max
  Clone ID: PAT_MRT3847_79324C.1.pep
ARKYVKLLFSNLTLHLIHHLFIELLRKFKNYKFFW

SEQ ID NO: 262795 - protein, 131 aa, Glycine max
  unsure (1)..(131): unsure at all Xaa locations
  Clone ID: PAT_MRT3847_79325C.1.pep
DEARLFPGRGSSHFSLTEIKKKLKHAMGKERHRNPEGISKRHPAAECQNKWPTSKAIGKDNVGMRSPNKDHFFIEKIARPTTGAMQGDKTGTAKDSELIVEHENGTYSKQRVSNLYIEANKHLCEIVGXGD

SEQ ID NO: 262796 - protein, 431 aa, Glycine max
  Clone ID: PAT_MRT3847_79326C.1.pep
MDISLPFTVLLIISILCNLKGLEHSSLVEGEGMDFSELRKAVEEVELVDGHSHNIVALNSTSISGFVQAFTVGAFVDADAIAFAQTSLSFKRSLRDVAELYGTEVSLQGVEEYRKASGIESISSTCLKAAKFSAILIDDGIEMDKKHDMQWHKNFTPFVGRILRTERVAEQILEQGLPNGSSWTIDSFTEAYVSKVKSVAKEIHALKSIAAYYGGLEINLNVTKTDAEESLKEVLTNTAKPIFLLKYKNYKNLVDYLFLQSLEIALSYDLPMQIHTGFGDRLLDLRKTNPLHLRSVLEDKRYSKCRFVLLHASHPYSKEASYLASVYSQVYLDFGLAIPKLSVHGMTSAVKDLLNLAPLDKVMFSTDAYTFPETFYLGAKNSREVVFSVLHDACIDGELSIPEAVEAAKDILARNAIRFYKISSPNNAGPP

SEQ ID NO: 262797 - protein, 49 aa, Glycine max
  Clone ID: PAT_MRT3847_79327C.1.pep
LRDHYTCPGNKGTRPRYVSSSSLEHQAFVLKKAHHGRQYASLRQLIWLI

SEQ ID NO: 262798 - protein, 102 aa, Glycine max
  Clone ID: PAT_MRT3847_79328C.1.pep
LIHFSIDVFIFDWPVEHCYPLEFLFGVLSCLSLLLLVLCYDDPWIKNQPYCYSLVHTSCNRFNQNSYSAIPFGLSYCFPLTYLLSLFYECFWHLCFLHSSPA

SEQ ID NO: 262799 - protein, 62 aa, Glycine max
  unsure (1)..(62): unsure at all Xaa locations
  Clone ID: PAT_MRT3847_79329C.1.pep
VVRIFENHVIVGEFWXQKQVSMLXXTRXNXLQXDVNWNPDYEASXSXPEVHXIGFSLXVLXE

SEQ ID NO: 262800 - protein, 60 aa, Glycine max
  Clone ID: PAT_MRT3847_7932C.1.pep
YYTQSFSNYFFFLGFFLLSIKFDSTMSSNLRTRKDRRKIEMKMTNKSNLQVPFSKRTNGV

SEQ ID NO: 262801 - protein, 92 aa, Glycine max
  Clone ID: PAT_MRT3847_79330C.1.pep
FNLIPFFVFFCPPGVLGGASISFSPSDFGFFPFCEKEIIGVMLLPFFCQSSKKLWGYNLPYGSKISVGNFPLAKKKKKKKKKKKKKKKKKKK

SEQ ID NO: 262802 - protein, 77 aa, Glycine max
  Clone ID: PAT_MRT3847_79331C.1.pep
TTDVNDYAKVGFWVEGMRRLIGLGTTTHIAEGRDIKPYAVDLGVFSKISINVRQNFVSNTRRHIILTIESCTCRWAW

SEQ ID NO: 262803 - protein, 79 aa, Glycine max
  Clone ID: PAT_MRT3847_79332C.1.pep
MNYQGNITAPHYEGYTDTARTICDANKNKVTVNAINTDSDAQRMIVHKGNDFSVHTAIKEWTFKAISGVDNKPLITRNY

SEQ ID NO: 262804 - protein, 74 aa, Glycine max
  Clone ID: PAT_MRT3847_79333C.1.pep
RKLGIRLESRDRWLPHLITGSQSNRCLMPRISQISYYLYAYGCLKGKRITSLCWPQTTWIMILCTLRLYAEHST

SEQ ID NO: 262805 - protein, 96 aa, Glycine max
  Clone ID: PAT_MRT3847_79334C.1.pep
RSVFIAHNVITLTSHYVLTCWAGCALTGSWPDEHASELPSTYRESVPLCYYNLRRDAIKYVEKRSLSIQIYHAPIRTLAEASYKVFSLLNQSSGTT

SEQ ID NO: 262806 - protein, 50 aa, Glycine max
  Clone ID: PAT_MRT3847_79335C.1.pep
QKFDNREKWEQETKRQIPMTLYEPTSLQIQLHWDDIFYRGVLWGTKKAFH

SEQ ID NO: 262807 - protein, 42 aa, Glycine max
  Clone ID: PAT_MRT3847_79336C.1.pep
KKKKKKKKKKKKKKKKKKKKKKKKKKKKKKLKKKKKKKGGPF

SEQ ID NO: 262808 - protein, 48 aa, Glycine max
  Clone ID: PAT_MRT3847_79337C.1.pep
LSASPNTLFFPNPVFPYVWCILLASPQSLLIWKFTSFEQKKKKRAAAD

SEQ ID NO: 262809 - protein, 124 aa, Glycine max
  Clone ID: PAT_MRT3847_79338C.1.pep
MDQMQDDQLQDMQLRRSKSCGEGRASCAPSDEFDLWWAKPGAVERNNMHRNSFSKTEAILVSGKNVETCEDEGFKCTALCMYLPGFGKAKAVKTRKELGSEVEGCAVISRTVSLSVVFSQPYSS

SEQ ID NO: 262810 - protein, 228 aa, Glycine max
  unsure (1)..(228): unsure at all Xaa locations
  Clone ID: PAT_MRT3847_79339C.1.pep
MEQAVSLIGALNLVSRNLPLPPDLFDTVSSIYHRSNPLSSEADAPEQDLLADLQNALLEQRPNYASASKLNKTRESRYHTQIRHRLTQLQGLPSSRGEDLQTMCLLELYGLKLAELQRKVQTDVNSEYWLNVKCAYPDRQLFDWSMMRLRRPLYGVGDPFSMDADDQIRKKRDAERLSRLEEQAKNHMETRKRRFFAEILNAVREFQLQIQAFXKRRKQRNDGCTGHG

SEQ ID NO: 262811 - protein, 228 aa, Glycine max
  unsure (1)..(228): unsure at all Xaa locations
  Clone ID: PAT_MRT3847_7933C.1.pep
FGSSFQINSRKLLQYYDIIPRRVLATKGYDKCDEKGKVAFVSAYGIHQLHIFIFVLAIFHILQCIVTLALGRTKMRKWRAWENETKTIEYQFYNDPERFRFARDTTFGRRHLNSWSQSTISLSIVSFFRQFFGSVNKVDYLTLRHGFITAHLAPGSHARFDFQKYIERSLEEDFKVVVGISPIIWFFAVLFLLTNTHGWYSYYWLXIHPISIILLVGAKLQMIITKMG

SEQ ID NO: 262812 - protein, 154 aa, Glycine max
  unsure (1)..(154): unsure at all Xaa locations
  Clone ID: PAT_MRT3847_79340C.1.pep
MEQAVSLIGALNLVSRNLPLPPDLFDTVSSIYHRSNPLSSEVLLLPFFLTRNTTFLFSSFLYFAGRCTGXDLLADLQNALLEQRPNYASASKLNKTRXXRYHTQIRHRLTQLQGLPSSRGEDLQTMCLLELYGLKNREMTRTVSFLGRTILAAS

SEQ ID NO: 262813 - protein, 46 aa, Glycine max
  Clone ID: PAT_MRT3847_79341C.1.pep
SEILQSHARHVIGLLLPPLWVFGSTHFHSHSLLTINYKILPSSSGI

SEQ ID NO: 262814 - protein, 118 aa, Glycine max
  unsure (1)..(118): unsure at all Xaa locations
  Clone ID: PAT_MRT3847_79342C.1.pep
CVPRTHSGIKPHKTFEXNQCQGKLTLPQGTHPRAKRMPMAIGGGAEAKNAMPTNMTKAGITMWRNKGGHLGHQGTKMTATYIKCTVSLXLACGRMDDDTTNYWATPHKMVQLGEIQRK

SEQ ID NO: 262815 - protein, 103 aa, Glycine max
  Clone ID: PAT_MRT3847_79343C.1.pep
LLLSLTNFTMFSFYLVVPSGLDLTRCATYCVYIFNIIYIHISLPSDSNPIYNLFQAYIYINMKYLEVPFIYFLLEKPLLPSYMDLPRYVSLSLFKGLLLGFDS

SEQ ID NO: 262816 - protein, 120 aa, Glycine max
  unsure (1)..(120): unsure at all Xaa locations
  Clone ID: PAT_MRT3847_79344C.1.pep
ICQTTPKAAPRAATGPTTGEDTQAPTRNSEGAAKATSRKETDXQDEPEKKARESHQLKPEKQEQTSTPEGKTSGGRKPAPAASTAGALRKATSATPKSPWGAPAHPGPKAKKRSTGPRNT

SEQ ID NO: 262817 - protein, 78 aa, Glycine max
  Clone ID: PAT_MRT3847_79345C.1.pep
YPLGVSSELSWQLIQFTVGIVGTQHRPASFPISRYFKLIRWRTQFGKAIVLRPSDYARSISSMIHARWRYVILQSITI

SEQ ID NO: 262818 - protein, 207 aa, Glycine max
  Clone ID: PAT_MRT3847_79346C.1.pep
MASRTVAKDIITLRGSAAIVSEFFGYAANSILYNRGVYPEESFVKVKKYGLPMLLTEDEGVKTFLANLTAQLSEWLEAGKLQRVVLVIMSKATSEVLERWNFSIETDCEVVEKGVSREKSDKEIMREIQAIMRQIASSITYLPCLDEPCIFDVLAYTDKDVAVPFTWVESDPKLIANPQMVKLHSFDTKIHKVDTLVSYKNDEWDEQ

SEQ ID NO: 262819 - protein, 207 aa, Glycine max
  Clone ID: PAT_MRT3847_79347C.1.pep
MAARTVAKDIITLRGSAAIVSEFFGYAANSILYNRGVYPEESFVKVKKYGLPMLLTEDEGVKSFLANLTAQLSEWLEAGKLQRVVLVIMSKATSEVLERWNFSIETDSEVVEKGVSREKSDKEIMREIQAIMRQIASSITYLPCLDEPCVFDVLAYTDKDVAVPFTWVESDPKLIANPQMVKLHSFDTKIHKVDTLVSYKNDEWDEQ

SEQ ID NO: 262820 - protein, 59 aa, Glycine max
  Clone ID: PAT_MRT3847_79348C.1.pep
GCEKTTEGDKSKAQRTHPAAAVCSDRHLHSPCTLIPLINYGFLLLLCCSPLELKCDGFR

SEQ ID NO: 262821 - protein, 102 aa, Glycine max
  Clone ID: PAT_MRT3847_79349C.1.pep
FTGPNHASHGQNLNCLFSPGASYELGIPSFGYCAPFCPRPYRVGFMVDSPRAHFIVYLTFIRGCALAIMWPRVCRLNLPKCLNCLAVPFLMWHQLQRVEIHH

SEQ ID NO: 262822 - protein, 120 aa, Glycine max
  Clone ID: PAT_MRT3847_7934C.1.pep
LIIFLGIKNPNFGAFSYNNNRVSVLYAGVKIADRQINGGRVRFRETKEINVTVKLMSAKAPISENLSIDISSGSLNLTSNVKFSGTVHMLKIINIRKTIEMACAMKLNLTSHTIQGIQCQ

SEQ ID NO: 262823 - protein, 54 aa, Glycine max
  Clone ID: PAT_MRT3847_79350C.1.pep
PVRKLWALKRAVVALPEAPRHVFVDGRDRLDTACDCEAVIGGDGIVLSIAAASI

SEQ ID NO: 262824 - protein, 47 aa, Glycine max
  Clone ID: PAT_MRT3847_79351C.1.pep
QHTLNFHYNHYLLNIVITKLFHLTFLKIFPPSEAPNNSLYKFPISNL

SEQ ID NO: 262825 - protein, 47 aa, Glycine max
  Clone ID: PAT_MRT3847_79352C.1.pep
HASSTIDQEPHQLNCLPFFAYPPPSYLIQTPHNSFPTLFHVFSTIKS

SEQ ID NO: 262826 - protein, 207 aa, Glycine max
  Clone ID: PAT_MRT3847_79353C.1.pep
FANKLVQFFQKVWEESSGESLLQIQLLVALRNFVVALGYQSPICYNILLPILENGIDINSPDELNLLEDSMLLWEATLSHAPSMVPQLLQYFSRLVEIMERNFDHLQVAVNIIEDYIILGGNNFLSMHATNIAKILDLVIGNVNDKGILSVLPVVDILIQCFPMDVPPLISSTLQKLIVICLSGGDDHDPSKTSVKASSLPSWLGFW

SEQ ID NO: 262827 - protein, 151 aa, Glycine max
  Clone ID: PAT_MRT3847_79354C.1.pep
PASAEPKRPSVYSFLSLINENHISLINTHSRSKHNKVSLNLVGRLEIMSSTTQNRRSSFTSSTASSLAKAKRLPSSVSLWSSSGKAKRVTTQNVAVKRAPLANLTNQRNASSSSSSSLVQVVQLKFPRPRKRLLQEPASQNQQFLGTNYPE

SEQ ID NO: 262828 - protein, 40 aa, Glycine max
  unsure (1)..(40): unsure at all Xaa locations
  Clone ID: PAT_MRT3847_79355C.1.pep
DHGIHLLDLCAWLLKKYXLVHSQTWGYXLFHPSSRIPSLR

SEQ ID NO: 262829 - protein, 175 aa, Glycine max
  Clone ID: PAT_MRT3847_79356C.1.pep
MQATSFWVAKFPFGVRAQQHPTVKRDSMAECTVPKWAQKTVSLPPLRRGCHLVTSKIVKEIEQDLSGFKCGLAHLFLQHTSASLTINENYDSDVREDTETFLNRIVPEGSSAPWKHTLEGPDDMPAHIKSSMFGCTLTIPITNGKLNMGTWQGIWLCEHRDHPTSRRVVVTLNGI

SEQ ID NO: 262830 - protein, 48 aa, Glycine max
  Clone ID: PAT_MRT3847_79357C.1.pep
THPHKLSLKLLQSKKELTDKTLFKRAHPTPILILTPYLTPHKTTLTPY

SEQ ID NO: 262831 - protein, 155 aa, Glycine max
  Clone ID: PAT_MRT3847_79358C.1.pep
MKIAFIALLLIIGSAIASDYVTLKATTYEKDSLIHSLRQIGYEYVLQKGIFESTSVPLENGSWKLNCTESVTRRINGSNVYYQFIVKLQSQTAPTLIRARYTVRYDSNTGNALVTYFIYTILSNNPRGPFLADLPSYVDVRKLSDIDSELQDKLD

SEQ ID NO: 262832 - protein, 113 aa, Glycine max
  unsure (1)..(113): unsure at all Xaa locations
  Clone ID: PAT_MRT3847_79359C.1.pep
PQHKVQHTSASLTINENYDSNVRDDTETFLNRIVPXGFFLSITNLMHSSAPWKHTLEGPDDMPAHIKSSMFGCTLAVPITNGKLNMGTXQGIWLCEHRDHPTPRRIVVTLNEI

SEQ ID NO: 262833 - protein, 37 aa, Glycine max
  Clone ID: PAT_MRT3847_7935C.1.pep
IVHDPLLCIKSSNCAMINRRLHSVSIQPCEAASPFDR

SEQ ID NO: 262834 - protein, 356 aa, Glycine max
  Clone ID: PAT_MRT3847_79360C.1.pep
MSDAAMAVVKPEMKSYIWLQTVDGSIQQVEEEVAMFCPMICQEVLQTGMGSSKNYAISLPQRVNPAILGLILDYCRFHQVPGHSNKERKTFDEKFIRMDTKKLCELTSAADSLQLKPLVDLTSRALARIIEGKTPEEIRETFHLPDDLTEEEKLEPLRNITDDPRIRLLNRLYARKRKELKERKKLKDVEVEEEPKDERSVEDLLSFINGADGDMKGTRTNKNKKKNRRRKAHAKDISSENTNENDKELNPLPSAYHDVNFDNALEASASKHSRTQNLPAINFSPKFEFIDGDVDDDLDPAMKEELDREVEDFARRLNSDWPERMQILSLGQDRRLVPISMNSNGSTHLYTGFDQR

SEQ ID NO: 262835 - protein, 60 aa, Glycine max
  Clone ID: PAT_MRT3847_79361C.1.pep
TGVTLFNPCDLACSCKQARQWPKLKNLKPSHDGSLLTFRKKTFGPLWHLYLKTCRNLPNE

SEQ ID NO: 262836 - protein, 80 aa, Glycine max
  Clone ID: PAT_MRT3847_79362C.1.pep
MASVGVAPTSSGLRESSGVDRLPEEMNDMRIRDDKEMEATVVDGNGTETGHIIGTTIGGRNGQPKQTISYMAERIVGQGS

SEQ ID NO: 262837 - protein, 134 aa, Glycine max
  unsure (1)..(134): unsure at all Xaa locations
  Clone ID: PAT_MRT3847_79363C.1.pep
LNIWRTIGTSGTKEFMEAGGAGADVSMILQPRVKNDTLYITTAYXVIVTSAHNDDEQYLWESQAGGSFTATRDTSGEDVGRVTKITFLLNEDQLKYLVERLFKDFIKKHSELIIYPISLWVVKTTHIDTSDDYD

SEQ ID NO: 262838 - protein, 131 aa, Glycine max
  Clone ID: PAT_MRT3847_79364C.1.pep
KLRGINPLKNGKGQLLRNRSSEIKCTTQETVSTSISNVPSVESLPMIRNCNRKICLKVEALAILKVTFLIKSHVNFISRRMASGYTCTKEGAFPDQACYISPKRGYFKKGGLPSTRKGLNYKSIEGPPFGF

SEQ ID NO: 262839 - protein, 53 aa, Glycine max
  Clone ID: PAT_MRT3847_79365C.1.pep
FFFLIGECVNHQITISYINNVMSLYRRPFFKRTNVFNRITQILPSNGNSMFHF

SEQ ID NO: 262840 - protein, 87 aa, Glycine max
  Clone ID: PAT_MRT3847_79366C.1.pep
NGLENCIPDNQSYGDESRTSRGDGCITDSFNDDDSSSSSSKDAFGSFSSKCLTMKRDDHGLEEWELTESPQHFYLKDKSAFDVVNCS

SEQ ID NO: 262841 - protein, 397 aa, Glycine max
  unsure (1)..(397): unsure at all Xaa locations
  Clone ID: PAT_MRT3847_79367C.1.pep
MITPVVRRISECFVKPHGLTEMSNQTCHLTHWDIAMLSMHYIQKGLLFKKPTPLVDPHDFIGNLLGKLKHSLSLTLSHFYPLAGRLVTHQTQNPPSYTVSVDCKNSDGARFIYATLDMTISDILSPVDIPLXVIPSLFDHHXALLHDYATMPLLPIHNRWFPKDCAPPINLPFIHHDEIISRYEAPKLRERIFHFSAESIAKLKAKANSESNTTKISSFQSLSALVWRSVTRARSPPNDQRTTCRLAANNRSRMEPPLPQEYFGNSVHVVSAETTGELLENGIGWAAWKLHMSVVNYNDGGSRVGVYDLGRYFDPYCVMMGSSPRFNMYGNEFGMGKAVALRSGYANKFDGKVTSYPGHEGGGSVDLEVCLSPAVMSALESDEEFMNIALVSVYNPL

SEQ ID NO: 262842 - protein, 46 aa, Glycine max
  Clone ID: PAT_MRT3847_79368C.1.pep
TNFLALWINIHILVMRNFQATISKDYKLLMGWSVRYLAVHLRSHMF

SEQ ID NO: 262843 - protein, 57 aa, Glycine max
  Clone ID: PAT_MRT3847_79369C.1.pep
AHASELYSFLCDCKTEEAKLVYSRCSRMNLLSASFTGLTPIVLTLHDSSVIKVIRTL

SEQ ID NO: 262844 - protein, 70 aa, Glycine max
  unsure (1)..(70): unsure at all Xaa locations
  Clone ID: PAT_MRT3847_7936C.1.pep
CALXVXGHNCADGHIVLLLPFSRPCLTPVPQLLVCSSSGPPDSQSITGEGHIEWIVISDGKFGIGDDVQM

SEQ ID NO: 262845 - protein, 59 aa, Glycine max
  Clone ID: PAT_MRT3847_79370C.1.pep
GSSTTHQANAVLNVINPGLHNTISYIMGALDKHQREDNNRLKKMHVYIQMDIERLHAAV

SEQ ID NO: 262846 - protein, 117 aa, Glycine max
  Clone ID: PAT_MRT3847_79371C.1.pep
YFENVGGKTLDAVLPNMRVLGRIPVCGMVSQYNLTQPEGVTNLANLIFKRIRMQGFIVGEFYHLYPKFLEFVLPHIRERKVVYVEDIAEGLENGPAALVGLYSGRNVGKQVVVVARD

SEQ ID NO: 262847 - protein, 141 aa, Glycine max
  Clone ID: PAT_MRT3847_79372C.1.pep
TSLDPTLPPPTPLDHRSSDNTNSQLHGGAAATSTVTASRGNYNLWGSIIDQSALNIMAATTHTPSSNMGCVASSVMSTQIGFHRPNHLSLSLSSQQTPYRSLSGEIHAISPASRGGGGDDMRGLHNGVSSMHSVALGFQLV

SEQ ID NO: 262848 - protein, 60 aa, Glycine max
  Clone ID: PAT_MRT3847_79373C.1.pep
RAPWRHVFPHPRSVIKPFFFVSDHSFLPPPYHRGSSLLVFSKFSMFMPPSNFLVFISEPP

SEQ ID NO: 262849 - protein, 166 aa, Glycine max
  unsure (1)..(166): unsure at all Xaa locations
  Clone ID: PAT_MRT3847_79374C.1.pep
FVAWVEIVDRYDIDCVPEDFRSNKVAYIKDDSIAKNCSRLLKVLKPMKAPIYIYYQLDNYYQNHRRYVKSRSDLQLLHGLGYNDTSSCKPLESSHNLPIVPCGLLAXSLFNDTXTFSRGPSELKVNRKNFAWKSDXRDHKFGNHVYPFNFQNGTLIXGGKLDPSIP

SEQ ID NO: 262850 - protein, 105 aa, Glycine max
  Clone ID: PAT_MRT3847_79375C.1.pep
RRWKIYRIDCSDHPNRDSLIQSYMGARGHYLNLWHIFSYIMHNHIIVLVNTVSGSAPIISALSVALSGISKSWDDLDPDYLRLDAYCEDTTPADCTGTTDPADLK

SEQ ID NO: 262851 - protein, 91 aa, Glycine max
  unsure (1)..(91): unsure at all Xaa locations
  Clone ID: PAT_MRT3847_79376C.1.pep
HPCRRISASAPANVTADDSVYTGLAEAADVTDIINAAVTPASDAQFPTLNGLELSATRIDLGPRGVIPLHNDPGCXELLIVLXGHILAGFI

SEQ ID NO: 262852 - protein, 78 aa, Glycine max
  unsure (1)..(78): unsure at all Xaa locations
  Clone ID: PAT_MRT3847_79377C.1.pep
KSAKRKSHPEPKKFLPTPKRFKWAFFQFXKVEILEKVQRLAKKLPNAKGGAGPFMATHFVRHYCGKCGLTLVSPKAEA

SEQ ID NO: 262853 - protein, 343 aa, Glycine max
  unsure (1)..(343): unsure at all Xaa locations
  Clone ID: PAT_MRT3847_79378C.1.pep
MQSRGSSHRVSSMGNNRSRIPALLISMFAAFASIYVAGRLWLDAENRVYLIKELDRITGQGQSAISVDDTLKIIACREQHKKLDALETELAGARQEGFVSNPLIETNGTYSTRRPLVVIGILTKFGRQKNRDAIRKAWMGSGASLKKIEEGKGIIVRFXIGRSENRGDSQDKDIDHENRLTNDFIILDNHVETNDAFPKKAKLFFAHAADKWDAEFYAKVNDDVYVNIDALGATLATHLDKPRVYMGCMKSGEVFSELNHKWYEPEWWKFGDKKSYFRHASGEMYVISQALAKFISINRSILRTYAHDDVSAGSWFIGLDVKHVDEAKFCCSSWSTGAIGGFI

SEQ ID NO: 262854 - protein, 95 aa, Glycine max
  Clone ID: PAT_MRT3847_79379C.1.pep
MQIRGSSHRLSSMGNNRSRIPALLISMFATFASIYVAGRLWQDAENRVYLIKELDRITGQGQSAISVDDTLKIIACREQHKKLDAIETELAGARQ

SEQ ID NO: 262855 - protein, 347 aa, Glycine max
  Clone ID: PAT_MRT3847_7937C.1.pep
MESGVPFLDCLLQNTLRSICSFPTSSTSSKWVYAVFWRIVPRNFPPPRWEFGGTALDRSKGNKRNWILVWEDGFCDFNECEQGRNGCLNYKFGADVFFKMSHEVYSYGEGLMGKVAADNNHKWVYSDTQNGCESSYIGAWNASMDHQPKTWEFQLNSGIQTIAVIAVREGLVQLGSFNKIAEDLNFVVSIQRKFSYLHSIPGVFSIQRPHLPIQHPCIAKPNLQMMESNEMTLSAYNATNQVTRVNGVHEEKSSFFSMISINLGRNPPPQNGTTTTQGSPLWSAPPSLPNMSCSFGAMLSKLPYVTPSNNPPQVLETNKTNHKVKIEECRFHGAANGDQNKNAGWNP

SEQ ID NO: 262856 - protein, 183 aa, Glycine max
  Clone ID: PAT_MRT3847_79380C.1.pep
GRGGHPGNPGRDPGGEPLSPKGRQKKAGGKKGKRGSRGKMVTRQKSHKKNNREEKRENPGGPKGGPNPKKGGGPNGPFSRGKTGGPSGKKKPPNPREKGVGKWAPRGVFFSPRETGKRGGPLTAGPKKSGKKGPTRVAPKRKKPGWRGENGGKKKERVWESANPTTEKSPQTPNRNWERAPMA

SEQ ID NO: 262857 - protein, 77 aa, Glycine max
  Clone ID: PAT_MRT3847_79381C.1.pep
IFNQIFKLIRECPDPNPGAKFPKRGLRRGLLTIFFFWPTYSIQTTRGCDALPFTPHPVLIKTGGRFNFFFHGKQPET

SEQ ID NO: 262858 - protein, 71 aa, Glycine max
  unsure (1)..(71): unsure at all Xaa locations
  Clone ID: PAT_MRT3847_79382C.1.pep
LSHVATYYDRDGKTFHTTVGGMKYPVTINLWQPDXNAIESATCLQAHHTEDAFRVNYWTPNFLIRVASYST

SEQ ID NO: 262859 - protein, 76 aa, Glycine max
  Clone ID: PAT_MRT3847_79383C.1.pep
QNNQIHLFHTLLHPSWFCAINLPTFSHKLSHYPFPYHSVISSFIIPLCIYPTYPILLFSSLMIHSYFIHTYLSLLT

SEQ ID NO: 262860 - protein, 162 aa, Glycine max
  Clone ID: PAT_MRT3847_79384C.1.pep
GIDPFLGGIQKEAILMMPLDEYILPAEAQDMVEEWLDCVDEEDSFEEVSLSAALNGVEGSDYMERIPLATLEVLSHVLLRKTGVMGIRRLDCGDGENMTLIPGTSVEKAYNKLMSTLEKCAPTLVGIECTKDEKLTRILILDKPNTRCFTILPMEFNLVVRQ

SEQ ID NO: 262861 - protein, 98 aa, Glycine max
  Clone ID: PAT_MRT3847_79385C.1.pep
TRYELIPPPQLSFVWAHSVLQPTAISDCLIYLFLIISTTLIFFLLLLALSPLSPLSFSLISLPLSPFTHPGGACCPPPPPPKEGGRHTVMTGNLPGTE

SEQ ID NO: 262862 - protein, 46 aa, Glycine max
  Clone ID: PAT_MRT3847_79386C.1.pep
RLMRPYVSLHALERVPYERSVVGGKRQRCNHQCGSTKRSFPALHFF

SEQ ID NO: 262863 - protein, 47 aa, Glycine max
  Clone ID: PAT_MRT3847_79387C.1.pep
ILFLFWYKASLGCIYVFHLNTILLSLKDPRSLFTIIFFRLHTGLFQT

SEQ ID NO: 262864 - protein, 98 aa, Glycine max
  Clone ID: PAT_MRT3847_79388C.1.pep
EGVLKVLDPRLPSVPLHEVMHVFYVAMLCVEEQAVERPTMREVVQILTELPKPPDSKEGNLTITESSLSSSNALESPSSAPKEDQNPPQSPPPDLLSI

SEQ ID NO: 262865 - protein, 43 aa, Glycine max
  Clone ID: PAT_MRT3847_79389C.1.pep
LSASRAMHTIVGLWSQLSLKVFQQCFNIAQHMIPYSRFMHRCL

SEQ ID NO: 262866 - protein, 63 aa, Glycine max
  Clone ID: PAT_MRT3847_7938C.1.pep
GSAFQVFLNFLYSVHLPLSFSVPFQTCKFSFVKAYRGTTTWHLVFIIGYGNRVITFFKTGAML

SEQ ID NO: 262867 - protein, 61 aa, Glycine max
  unsure (1)..(61): unsure at all Xaa locations
  Clone ID: PAT_MRT3847_79390C.1.pep
STQGKAXAIRWTLRANRKRPGRQMARQXSSGGRDAANGRGEARRKKEESPRMAEANRAFAH

SEQ ID NO: 262868 - protein, 248 aa, Glycine max
  Clone ID: PAT_MRT3847_79391C.1.pep
RVEEGLSCVVKLLFRQRLYAYRSRLPFIGRSSSWFFWLCIKNPHVEEKILHELCSVLKFTRGDDISTWLEEPLVFEEVDRLVYLKAALSETLRLYPSVPEDSKHVVKDDVLPNGTFVPAGSAVTYSIYSVGRMKFIWGEDCLEFKPERWLSPEGDKIQVQDSYKFVSFNAGPRLCLGKDLAYLQMKSIAAAVLLRHRLAVAPGHRVEQKMSLTLFMKYGLRVNVYPRDLKPVLEKLTTTEGAITVGQK

SEQ ID NO: 262869 - protein, 136 aa, Glycine max
  Clone ID: PAT_MRT3847_79392C.1.pep
PKKYKKKKKKGGGGGEKKKKKKKKKKKKKKKKKKGGGPFKGAKFTYPGVRTKNFFLGGPKLNSLGRGLKPGKWKNPWVTQFNPLWENPLFAKWGKNKKAPPNPPSQKVPTLNGERDPPFNRPLNPGGGGGTPKLTL

SEQ ID NO: 262870 - protein, 222 aa, Glycine max
  Clone ID: PAT_MRT3847_79393C.1.pep
MEADEKKAMIRDVALQVVFISLTIFSFLWMHGLPQNLYAKLRHRPPNSRAVQAKRHFVQGAQLLAQARRSKSASAATSLAKQALAEAEKALALDPKDAASHLLKSMALDLQGFRTNALDALDAALSPLAAGSLAEDERGDALLKRAELKIAMSERRGVDSVLADLTESVKLSPRNAKAWCMLGETYEGNKMGEEAKKAYKEALELEPQLNVAQEALSRLGSS

SEQ ID NO: 262871 - protein, 395 aa, Glycine max
  Clone ID: PAT_MRT3847_79394C.1.pep
MDASTALMILSAIAAYLIWFTFVTRSLKGPRVWPLFGSLPGLIQHANRMHDWIADNLRACGGTYQTCICALPFLARKQCLVTVTCDPKNLEHILKLRFDNYPKGPTWQSAFHDLLGEGIFNSDGDTWLFQRKTAALEFTTRTLRQAMARWVNRAIKHRFCPILATAQKENKSVDLQDLLLRLTFDNICGLAFGQDPQTLAVGLPDNAFALSFDRATEATLQRFILPEILWKLKRWLRLGMEVSLSRSLKHIDNYLSHIIKNRKLELLNGTGSHHDDLLSRFMRKKESYSEEFLQHVALNFILAGRDTSSVALSWFFWLCIKNPHVEEKILHELCSVLKFTRGDDISTWLEEPLVFEEVDRLVYLKATLSETLRLYPSVPEDSKHVVKDDVLPNGT

SEQ ID NO: 262872 - protein, 132 aa, Glycine max
  Clone ID: PAT_MRT3847_79395C.1.pep
ALALDPKDAASHLLKSMALDLQGFRTNALDALDAALSPLAAGSLAEEERGDALLKRAELKIAMSERRVDSVLADLTESVKLSPRNAKAWCMLGECYEGNKMGEEAKKAYKEALELEPQSNVAQEALSRLGSS

SEQ ID NO: 262873 - protein, 235 aa, Glycine max
  Clone ID: PAT_MRT3847_79396C.1.pep
MALYMDEEEIWKCPKHPSKRRRSGICPTCLRDRLVTLCPDCANVRPCSCYATSSSSSSSSSSSLSRFSGAGDGVGSVGRVHNLIEQEPGLRRSRSMAIPFLRSRSRFSGGGDRVSDLDSTRDSPAMNGSRSARSFWSMFKSQKSSRHGGGGGGAPEQEWEAKKILAEERDGDGGINPMMVRSRSVAVTAVTVVSGDGELRPRTKGRGWFFPSPMKAFRQSKVSKVIQEGSPLYRG

SEQ ID NO: 262874 - protein, 528 aa, Glycine max
  Clone ID: PAT_MRT3847_79397C.1.pep
MDAATALMILSAIAAYLIWFTLVTRSLKGPRVWPLLGSLPGLIQHANRMHDWIADNLRACGGTYQTCICALPFLARKQCLVTVTCDPKNLEHILKLRFDNYPKGPTWQSAFHDLLGEGIFNSDGDTWLFQRKTAALEFTTRTLRQAMARWVNRAIKHRFCPILATAQKENQSVDLQDLLLRLTFDNICGLAFGQDPQTLAAGLPDNAFALSFDRATEATLQRFILPEILWKLKRWLRLGMEVSLSRSLKHIDQYLSHIIKNRKLELLNGNGSHHHDDLLSRFMRKKESYSEEFLQHVALNFILAGRDTSSVALSWFFWLCVKNPRVEENILNELCTVLLSTRGDNISTWLNEPLVFDEVDRLVYLKAALSETLRLYPSVPEDSKHVVKDDVLPNGTFVPAGSAVTYSIYSVGRMKFIWGEDCLEFKPERWLSPEGDKIQVQDSYKFVSFNAGPRLCLGKDLAYLQMKSIAAAVLLRHRLAVAPGHRVEQKMSLTLFMKYGLKVNVYPRDLKPVLEKLTTIKSVTVGQK

SEQ ID NO: 262875 - protein, 73 aa, Glycine max
  Clone ID: PAT_MRT3847_79398C.1.pep
SSFFFFLFIFFCFFFFILGWGGKKIPPSSFNLSSKSSTSLKLTCIGGQSYLTPSIEKQHLQPSSFPTNIRGYF

SEQ ID NO: 262876 - protein, 54 aa, Glycine max
  unsure (1)..(54): unsure at all Xaa locations
  Clone ID: PAT_MRT3847_79399C.1.pep
GGRNTLHTFLFTFILNPXHVQGWFFLASWAPSNSEPLSTIFTIYYSKTLLQLSH

SEQ ID NO: 262877 - protein, 69 aa, Glycine max
  Clone ID: PAT_MRT3847_7939C.1.pep
RHQSGMACTASRTIDQIIHNLHNANKQLMVAFIWVGYIHALISLPLGATEGSMRRKSQLDEVCLSKCYA

SEQ ID NO: 262878 - protein, 200 aa, Glycine max
  Clone ID: PAT_MRT3847_793C.1.pep
MGTPETSREPCPDRILDDIGGAFGMGAVGGSAFHFLKGLYNSPKGDRFVGATQAVRLNAPRVGGSFAVWGGLFSAFDCTMVYARQKEDPWNSIVAGAATGGFLSMRQGLGASARSAAFGGVLLALIEGAGIMLNKFLSAQQPMPMIMDELPPQSSTEQSWLGGWFGGGNKEETATTAGSGSETKILESFDAPPVPNFEYK

SEQ ID NO: 262879 - protein, 58 aa, Glycine max
  Clone ID: PAT_MRT3847_79400C.1.pep
MTLAPTQAYNAFVDTTKRKTTNLRAAEGVALFDTCYDQTALQSVREPTETFHSNCDRT

SEQ ID NO: 262880 - protein, 223 aa, Glycine max
  Clone ID: PAT_MRT3847_79401C.1.pep
HYFPSRNPYDTNKIAGGSSSGSASLVSAGLCPVALGVDGGGSVRMPAALCGVVGLKPTFERIPNEGVLPLNWTVGMVGILAGTVEDALIVYAAISGEIPYHKTFSVSTKINLPRLSLTKSISDIKLAKYGKWFDDCSDDVRICCTKTLHMLQDHYSWKIIDVTIPEIEAMRLAHYITIGSECSTALDSFKEKNFAELGWDVRVAQSIYGAFSGLEYLKAQKMR

SEQ ID NO: 262881 - protein, 71 aa, Glycine max
  unsure (1)..(71): unsure at all Xaa locations
  Clone ID: PAT_MRT3847_79402C.1.pep
RKGKGKGVLQFVDKYGGNVDGYSPICDTKEWSSTGDVXDGGKTGLGNWAVTLIGFLTGGALFVYKTSGLVQ

SEQ ID NO: 262882 - protein, 63 aa, Glycine max
  Clone ID: PAT_MRT3847_79403C.1.pep
FFFFLFFFFFFFFFFFFFFFFFFFFFFKKNFHPSNIFKKPNGTPKTVNFPITQFQTPIKPPVN

SEQ ID NO: 262883 - protein, 160 aa, Glycine max
  unsure (1)..(160): unsure at all Xaa locations
  Clone ID: PAT_MRT3847_79404C.1.pep
DLDIFLTIVDMIEGAFLLPHLRAQAIGLLVINEGDALIELGGLKEQRQDQPQEDQPLQLRNYRAALSEHDIFGVPACYPVVVIATSNLXFFAIGINADNIHRNFLACSQDNVISQILYQVQELALPESAQAVEKLLKIQREYYSVDAHPKNREEGNHGLK

SEQ ID NO: 262884 - protein, 95 aa, Glycine max
  Clone ID: PAT_MRT3847_79405C.1.pep
SPRSIVPFQSTRLRVYVATCSVFGAYLIVSSYAQPLPIVTYCLGSFPKPRPSYWATFSAPLSCGCLSCLLLCSLLPRLWLFHHMFPLVSGYRPRG

SEQ ID NO: 262885 - protein, 63 aa, Glycine max
  Clone ID: PAT_MRT3847_79406C.1.pep
GFIKMARFLGLRGRSLASAISITCGLCFLCFGYAQGVMGGLLTVQQFLDRFPQVDIVNESSFH

SEQ ID NO: 262886 - protein, 77 aa, Glycine max
  Clone ID: PAT_MRT3847_79407C.1.pep
PQRIVSSLGSKLPLSTEIQPSVTLIRLQGIIPYARWELPLKASHTTNPPQQGHQRHVPLGSLGLLLLINKRTDYAHI

SEQ ID NO: 262887 - protein, 304 aa, Glycine max
  Clone ID: PAT_MRT3847_79408C.1.pep
MAFLRSIATTAIATIPAALAFSSSSSSSFPRSSQSPNPQNRLGLVKTLATPPSALHMDHKLSSQPDAVLPELLTEFMVDMKCEGCVNAVKNKLNEINGVKNVEVDLSNQVVRILGSTPVKTMTEALEQTGRKARLIGQGVPEDFLISAAVSEFKGPDIFGVVRLAQVNMELARIEANFSGLSPGKHGWSINEFGDLTRGAASTGKMFNPVNEENSKEPLGDLGTLEANEKGEAFYSGVKEKLRVADLIGRSVVVYATEDKSEHGITAAVIARSAGVGENYKKLCTCDGTTIWEATDTDFVTSKV

SEQ ID NO: 262888 - protein, 137 aa, Glycine max
  Clone ID: PAT_MRT3847_79409C.1.pep
KSNVYSFGVLLLELLSGKKNKGFIPPDHKLNLLGHAWKLWNEDRALKLMDALLKNQFPTSEALRCIQVGLSCIQQHPEDRPTMSSVLLMFDSESVLVPQPGRPGLYSERFFSGTNSSSRGGLNSGSNDITVTLVEGR

SEQ ID NO: 262889 - protein, 69 aa, Glycine max
  unsure (1)..(69): unsure at all Xaa locations
  Clone ID: PAT_MRT3847_7940C.1.pep
MADNTLISTAISAFASLITSSKSRFAIAVPLTRFGVTNVSSTRFFIRADWMLGQXRSPYLDGSAPGAFG

SEQ ID NO: 262890 - protein, 90 aa, Glycine max
  Clone ID: PAT_MRT3847_79410C.1.pep
ERATLLCDRIKREDKILIIVRDLQHKIGLAEIGIPFGNDHKGCKILLVAENKKMLSLKTLKTQKPIYVDHEEPKIRDLTRSHKVQTCVII

SEQ ID NO: 262891 - protein, 48 aa, Glycine max
  Clone ID: PAT_MRT3847_79411C.1.pep
IPASNLFFTPPTQSLEAVISLSGASGDYTYTSCSTHYTLDRGKKKCTP

SEQ ID NO: 262892 - protein, 56 aa, Glycine max
  unsure (1)..(56): unsure at all Xaa locations
  Clone ID: PAT_MRT3847_79412C.1.pep
SVLALTNHRFPLLXVFLRVTKFDFTXXLFIXFSXNSDTFYAGHSVSLSFFCVLSXF

SEQ ID NO: 262893 - protein, 161 aa, Glycine max
  unsure (1)..(161): unsure at all Xaa locations
  Clone ID: PAT_MRT3847_79413C.1.pep
DCTLPSYLRLGIRIAKTENLWFVGGGSYAVALRAWLRLXIPQLTCGSLASSAVALADYNCSEHDQHNGESAGAECEAVLHATTRLIEHKLAANGLELSAYANADDLEGDXDYLYAIADAAAXAFQYADPDAVCKPMDEAQNATXDLLDAYAKYITEYYPGT

SEQ ID NO: 262894 - protein, 64 aa, Glycine max
  Clone ID: PAT_MRT3847_79414C.1.pep
AASPACSGPTSPLRARPPLLLQVEIIKDAYIYSSGRSSSLAAWYVGGVVLVSFHSSGDQRRVYL

SEQ ID NO: 262895 - protein, 360 aa, Glycine max
  Clone ID: PAT_MRT3847_79415C.1.pep
MTRRCSHCTNNGHNSRTCPSRGGGGVKLFGVRLTDGSIIKKSASMGNLNLSSSSSSAAAAHLQFRSSPSSSNLPAASSPNPSSPCSDPPQGYLSDDPAHVSTFANRRGDRKKGVPWTEEEHRLFLIGLQKLGKGDWRGIARNFVVSRTPTQVASHAQKYFIRQSHATRRKRRSSLFDMVPDMSSDQPSVPEEQVLLPPPENSQPCNGKSQPSLNLSLKSEFEPMETTSQENVQQTNEPMMGSNRLTPMAPHGCFPAYLPVPFPVWPSTWVHPFEEVKGGETCHHQIHKPIPVIPKEPVNVDELVGMSHLSIGEAQVRDREPSPLSIKLLGEPSRQSAFHANVPVGSSDLNNGKDNAIQAV

SEQ ID NO: 262896 - protein, 356 aa, Glycine max
  Clone ID: PAT_MRT3847_79416C.1.pep
MTRRCSHCSNNGHNSRTCPSRGGGGVKLFGVRLTDGSIIKKSASMGNLNLSSAAAHHQFHSSPSSSNLAAAPSSPNPSSPCSDPPQGYLSDDPAHVSTFANRRGDRKKGVPWTEEEHRLFLIGLQKLGKGDWRGIARNFVVSRTPTQVASHAQKYFIRQSHATRRKRRSSLFDMVPDMSSDQPSVPEEQVLLPPSQNSQPCNGKSQPSLNLSLKSEFEPMETTSQENAQQTNETMMGSIGLTPMAPHGFFPAYLPVPFPMWPSTVAPPFEEVKGGETSHHQIHKPIPVIPKEPVNVDELVGMSHLSIGEAKVRDREPSPLSLKLLGEPSRQSAFHANAPVGTSDLNNGKDNAIQAV

SEQ ID NO: 262897 - protein, 108 aa, Glycine max
  Clone ID: PAT_MRT3847_79417C.1.pep
MTLKISQDLDGTSDIQKFTQMRVQLQAVSLRMQTLRSNEQMATAMKGATRAMGQMNRSLNLSQIQKIMNDFEKESSTMDMKEEMMSDAVDDAIDGEDEGEGEEMESDT

SEQ ID NO: 262898 - protein, 110 aa, Glycine max
  Clone ID: PAT_MRT3847_79418C.1.pep
SLLGAYNFLWDRMRAIRMDLRMQHIFNQRAITMLEQMIKLHIIAMHELCEYTKGEGFSEGFDAHLNIEQMNKTSVDLFQMYDDHRKKGINIPTEKEFRGYYALLKLDKHP

SEQ ID NO: 262899 - protein, 55 aa, Glycine max
  Clone ID: PAT_MRT3847_79419C.1.pep
SDTYLNPMRHDTSVSTVPRDCDICANKTTINNMCAYGLKPGMLRSTLLRTIPQDM

SEQ ID NO: 262900 - protein, 74 aa, Glycine max
  Clone ID: PAT_MRT3847_7941C.1.pep
VFESWRQVCLCVPGSFLFCLLTGGLPPFPFLCVVRFGSVQSGGLCLVCCSLPPGVGLWGFGGERSVFLFTPPRL

SEQ ID NO: 262901 - protein, 76 aa, Glycine max
  Clone ID: PAT_MRT3847_79420C.1.pep
FTFFSYGGGVYLGNTIFFYELKNGELDTFSHHFHVYITTTFIFQTILYKLIPLLLRLNTKSNSNDKTRVINLVLFF

SEQ ID NO: 262902 - protein, 168 aa, Glycine max
  Clone ID: PAT_MRT3847_79421C.1.pep
MENRGVSADAELQLADFGPDPAQTCTGNEKGDKAFRIPQSRRPNLSSLQIPARSLDIALSTFAKTDGPLVSRSSPGSTRGLPPRPNSAKVRSSMRGLLPQRSFKINTCSQDIERTGLIVPNTPPSDAPLDKPSSSTHLSLNNKVISPSTKVSHSLPVTPFATSAAENG

SEQ ID NO: 262903 - protein, 136 aa, Glycine max
  unsure (1)..(136): unsure at all Xaa locations
  Clone ID: PAT_MRT3847_79422C.1.pep
LPEKVIAKLTDGKETHIPYRDSKLTRLLQSSLSGHGRISLICTVTLASSSSEETHNTLKFAHXIMDEKSLIKKYQKEISELKQELQQLKRGMVENPNMATSSQEDLITLKLQGCADAYILDYLISVTVLGGRLYNM

SEQ ID NO: 262904 - protein, 74 aa, Glycine max
  Clone ID: PAT_MRT3847_79423C.1.pep
ASTFPAQILSTNTPALPHVIRLAMVTTHGTTMHIIATTHATLKLVIINQRKKQTTKQIKTSNIMRICFACNGNS

SEQ ID NO: 262905 - protein, 141 aa, Glycine max
  Clone ID: PAT_MRT3847_79424C.1.pep
LSKIECYEHGRLITKVQGDGVIVATPTGSTAYSTAAGGSMVHPKFPCMLFTPICPHSLSFRPVILPDSAQLELKIPEDARSNAWVSFDGKRRQQLSRGDSVRISMSQHPLPTVNKFDQTGDWFHSLIRCLNWNERLDQKAL

SEQ ID NO: 262906 - protein, 100 aa, Glycine max
  Clone ID: PAT_MRT3847_79425C.1.pep
FQSVPQLHDGAALFVPVAKYLSPALLDIDQVGVTPHVQCAPQMLSSPTGISNSPKDKASVSSLGADSCIMVAEHELFLEESLGTAFFTFHFLISPFLFNV

SEQ ID NO: 262907 - protein, 229 aa, Glycine max
  unsure (1)..(229): unsure at all Xaa locations
  Clone ID: PAT_MRT3847_79426C.1.pep
SSQPKKNNNGKSNGKKNRNVKRTIIKIIGFMIIAFFVLLLLGILLFAYYAWKAPAFSESKLDDPIPAKIYDKNGELVKTLDNGQRHEHVNIKDVPKDMKNAVLATEDNRFYQHGALDYKRLFGAIGKNLTGGFGSQGASTLTQQVVKDSFLTQQKSIGRKAQEAYLSYRLEQEYSKDEIFQVYMNKIYYSDGVTGIKAAAKYYFNKDMKDLNLAXXAYXXGLPRVPSRD

SEQ ID NO: 262908 - protein, 56 aa, Glycine max
  Clone ID: PAT_MRT3847_79427C.1.pep
STSPSSSTLSLPDQHPTTTSYTTAGEDHHLHLVLLSHFLLLPKARALTKLKRPDIL

SEQ ID NO: 262909 - protein, 56 aa, Glycine max
  unsure (1)..(56): unsure at all Xaa locations
  Clone ID: PAT_MRT3847_79428C.1.pep
LLYXXCRFMHADVGGCLGSXCXVNQRLGAXISXHSLXPXXSLHKLLXLSSLXXCIX

SEQ ID NO: 262910 - protein, 28 aa, Glycine max
  Clone ID: PAT_MRT3847_79429C.1.pep
KVHRYDLSTKPVNILILNSIINNYSTTT

SEQ ID NO: 262911 - protein, 62 aa, Glycine max
  Clone ID: PAT_MRT3847_7942C.1.pep
MCSMSDVSIDYTLCIIALNIRATDKLLVEIRVTYRIRIVGIENYAVVFDFLATLIAFDWTFV

SEQ ID NO: 262912 - protein, 147 aa, Glycine max
  Clone ID: PAT_MRT3847_79430C.1.pep
MGSDDRDGNTLIKANFTADGAGRLKESVMEKLKEFMGDYTDDTLVDYVIVLLRNGRRKEQARNDLNVFLGENSYSFVSWLWDHLDMYLNLYVQPEALQDEAPKKKLTAEVQAGDDDSQYLNSQSERGKSSKLSRSRHNKDWKGLMKE

SEQ ID NO: 262913 - protein, 74 aa, Glycine max
  Clone ID: PAT_MRT3847_79431C.1.pep
PLPLRQKQGGPQIGPFGSYKNQSKKAFRVFGHLIHGKFATMANAFLEIHLKQGFVGQIISALKVEEPQGGAPFY

SEQ ID NO: 262914 - protein, 65 aa, Glycine max
  Clone ID: PAT_MRT3847_79432C.1.pep
PKLVHNKHSNYRKQIPNDKLHKNNIIYKENNVNYTVGIQSTIYLSLLVPKWVYGCLTCVHILGFR

SEQ ID NO: 262915 - protein, 74 aa, Glycine max
  Clone ID: PAT_MRT3847_79433C.1.pep
ITDNTPNQLQACNTVTGPHAMLKFCIVINSVVTITKFHSKSFSSPQIDSKFPITTNTNNLSPFCRLLAAVRTRG

SEQ ID NO: 262916 - protein, 108 aa, Glycine max
  unsure (1)..(108): unsure at all Xaa locations
  Clone ID: PAT_MRT3847_79434C.1.pep
ISGEQVVQHQWLVQFLCGPFLRGSISVHLIWSGRCTPSQRAILSDFITSLSSSPISTAHPSVATWWXRLCKILPSHQVGSXPSLTLALGAQILGANYSLGTSLTTDYI

SEQ ID NO: 262917 - protein, 68 aa, Glycine max
  Clone ID: PAT_MRT3847_79435C.1.pep
IVTFNFLQNGLHIIDINTHHLSTKNENCIDPNKQLMAFTICTYIELITLAYSPILLTDQSELLFRIHA

SEQ ID NO: 262918 - protein, 78 aa, Glycine max
  Clone ID: PAT_MRT3847_79436C.1.pep
ALNSTPLILIHELFKSFKILSLPKKKKIKKTTILSFNNTLYIGMLPKYLINSQLYSKYLMLIIGITNKTSGSLYMKMI

SEQ ID NO: 262919 - protein, 104 aa, Glycine max
  unsure (1)..(104): unsure at all Xaa locations
  Clone ID: PAT_MRT3847_79437C.1.pep
PKRKPKEPKDEKKDPPTTSRAGPDQEEKXHRQATIFFIKERPYAGGAFLATINFPPDYAVKPYKVASRTKAFHPNINSNGSNXLDIWKEQRSPAITIYKGAHYK

SEQ ID NO: 262920 - protein, 49 aa, Glycine max
  Clone ID: PAT_MRT3847_79438C.1.pep
SSRAAAFFFFFFFFFLAIVDNLRISLKKDWDTYIQLCKSSNGSQKRVTN

SEQ ID NO: 262921 - protein, 84 aa, Glycine max
  Clone ID: PAT_MRT3847_79439C.1.pep
MLTCIARPKKPDESDPNNATSAAKSQAVKSLTSQIRDMALKASGAYKHCAPCTGPATQGRFQSNTTESDADSDRFRWSYRRTGS

SEQ ID NO: 262922 - protein, 42 aa, Glycine max
  Clone ID: PAT_MRT3847_7943C.1.pep
LSCKIDNLDRRCTDKSNFNYDKLENYDIRIPRNHLVLKTKEF

SEQ ID NO: 262923 - protein, 39 aa, Glycine max
  Clone ID: PAT_MRT3847_79440C.1.pep
LLEDIYPTQARFYKWISCPTAAVPKAVAEMFTGLAQSKG

SEQ ID NO: 262924 - protein, 46 aa, Glycine max
  Clone ID: PAT_MRT3847_79441C.1.pep
LPYVEQQTVLLPELDEQQLIGLMFWIHAFFMLNATFIYSVQLAYMN

SEQ ID NO: 262925 - protein, 53 aa, Glycine max
  Clone ID: PAT_MRT3847_79442C.1.pep
EKGAVYYIQKFFYEGGSLSWSFAAVPFVVFLQPYLSVVFCKRYLSVVFCNRYL

SEQ ID NO: 262926 - protein, 143 aa, Glycine max
  Clone ID: PAT_MRT3847_79443C.1.pep
VNRNIDTDVIVAEVRETSRKPDEMYPMLERISPGPRKLELFARMHNTHAGWMSLGNQLSGVRLVDEGLRARFKAAYPDVEVQPASPPRAFAMEVDTSVAAHSGRPFSATESKSTSTQFAEPAAAPETAFVSEDKPLAIDVDIG

SEQ ID NO: 262927 - protein, 51 aa, Glycine max
  Clone ID: PAT_MRT3847_79444C.1.pep
IEVIALPGYARVEKLQGAMRHFIPRVLDPHGLRLECLQISDAMVNLAIQRC

SEQ ID NO: 262928 - protein, 147 aa, Glycine max
  Clone ID: PAT_MRT3847_79445C.1.pep
RPRVRLSIGGSFGKHTVEKPAPDSEARVSNSDSRDGMRVVVEPSDKHDIQALRRMEAKKKTEQKRERVREPSEPELKRDFKREKTEYGNGVSGAWNATTTPFDLHQFPTVQYLPLNNGSPLPCWVGGEKIVGAGVDGVNGGRGGNIK

SEQ ID NO: 262929 - protein, 54 aa, Glycine max
  unsure (1)..(54): unsure at all Xaa locations
  Clone ID: PAT_MRT3847_79446C.1.pep
HASAEYXLTFLAFSYLTKNGLICIFQRFCDPTNPNSTPMNLFHISKLAITILNT

SEQ ID NO: 262930 - protein, 40 aa, Glycine max
  Clone ID: PAT_MRT3847_79447C.1.pep
LDNYKIVNNYQAYASISLPLLHDTQMHIGKCASLCSNTHY

SEQ ID NO: 262931 - protein, 80 aa, Glycine max
  Clone ID: PAT_MRT3847_79448C.1.pep
HPLHKKPHYYIITTYSTILHATKRAESLPSYITETTHFHVPTHKPSIILYMGAATSTPASITNEHAYNLDSVLTTNENAL

SEQ ID NO: 262932 - protein, 62 aa, Glycine max
  Clone ID: PAT_MRT3847_79449C.1.pep
VVQLNTVVLSNLQLTVTISMYMLIPCLLSFSLTCRALLPCPILRFSPPPPPPPPPPPPPPPQ

SEQ ID NO: 262933 - protein, 124 aa, Glycine max
  unsure (1)..(124): unsure at all Xaa locations
  Clone ID: PAT_MRT3847_7944C.1.pep
LITAYLGLLQTMASYVGPYLIDGSVQIHSGQRLYENHGYKLEPAFDVATIVMCLTRRHCMFRLQQVGLRIRALIDTTIYNKALTLYXSSKQGQTSGEIMNFMTVDAVXQGVISWFMHEWWMEGM

SEQ ID NO: 262934 - protein, 73 aa, Glycine max
  Clone ID: PAT_MRT3847_79450C.1.pep
QIICMRSSTTCSANVSCFQWCGKGEMPNRTNHVTLGNLSNSYTSCVGYSLSHMSIDLSQTLPYVSVRVTMFSH

SEQ ID NO: 262935 - protein, 133 aa, Glycine max
  Clone ID: PAT_MRT3847_79451C.1.pep
MHQAISHRSFIPIGARGMPHAGGIKESNGTYPSKAATMVSENAVVIIGKRGCCMCHVVKRLLQGLGVNPPVYEVDEDHEAAVALHLSPQGAETVQFPAVFLAGKLFGGLERVMATHISGELVPILKDAGALWL

SEQ ID NO: 262936 - protein, 178 aa, Glycine max
  unsure (1)..(178): unsure at all Xaa locations
  Clone ID: PAT_MRT3847_79452C.1.pep
MATLSPFSTFNSKPLCASLPNPSFLTHQQQQQHPYPLTTTTTSDHKPLSVSTLPRKLLCKPPKGKYVREDYLVKKLSAQEIQELVKGERKVPLIIDFYATWCGPCILMAQELETLAVEYQNKALIVKVDTDDEXFARDMQVRGLPTVFFISPDLNKEAIRTEGLLPIQMMRDIIDKDM

SEQ ID NO: 262937 - protein, 267 aa, Glycine max
  unsure (1)..(267): unsure at all Xaa locations
  Clone ID: PAT_MRT3847_79453C.1.pep
EKTTEGIDTYVFWNVHEPSPGNYNFEGRYDLVRFIKTVQRVGLYVHLRIGPYVYAEWNFGGFPVWLNYVPGISFRTDNGPFKAAMQGFTQKIVQMMKNEKLFQSQGGPIILSQIENEYGPESRQLGADGHAYTNWAAKMAVGLGTGVPWVMCKQDDAPDPVINTCNGFYCDYFSPNKPYKPNLWTESWSGWFTEFGGPIYQRPVQDLAFAVARFVQKGGSLFNYYMYHGGTNFGRSAGGPFITTSYDYDAPIDEYGXLIREPKYGSF

SEQ ID NO: 262938 - protein, 87 aa, Glycine max
  unsure (1)..(87): unsure at all Xaa locations
  Clone ID: PAT_MRT3847_79454C.1.pep
QKTIMVLSXGILXFVAVHVGXVRERKKARKLFXGSRKIQAXXNLIGSVYCCRLIVTIIGIVSXGSYGQSYXVVXXVVGKXXRXGPPW

SEQ ID NO: 262939 - protein, 739 aa, Glycine max
  unsure (1)..(739): unsure at all Xaa locations
  Clone ID: PAT_MRT3847_79455C.1.pep
METNSVSKLLLLVFTVLFVGSELIHCSVTYDRKAIIINGQRRILISGSIHYPRSTPEMWEDLIGKAKDGGLDVIDTYVFWNVHEPSPGNYNFEGRYDLVRFIKTVQRVGLYVHLRIGPYVCAEWNFGGFPVWLNYVPGISFRTDNGPFKAAMQGFTQKIVQMMKNEKLFQSQGGPIILSQIENEYGPESRQFGSAGHAYTNWAAKMAVGLATGVPWVMCKQDDAPDPVINTCKGFYCDYFSPNKPLLLSSSYSLLDIRFTEFGGPIYQRPVQDLAFAGARFVQKGGSLFNYYMYHGGTNFGRSAGGPFITTSYDYDAPIDEYGLIREPKFGHLKDLHKAIKQCEHALVSSDPTVTSLGTYEQAHVFSSKNGACAAFLANYHSNSAARVKFNNRNYDLPPWSISILPDCRTDVFNTARVSFQTSQIQMLPSNSRLLSWETYDEDVSSLAESSKITASGLLEQISTTRDTSDYLWYITSADISSSESFLRGRNKPSITVHSSGHAVHVFVNGQFSGSAFGTSKDRSCTFNGPANLRAGTNKIALLSVAVGLPNVGFHFETWKAGITGVLLNGLDHGQKDLTWQKWSYQIGLRGEAMNLVAPNGVSSVDWEKDSLAVRSQSQLKWHKAYFNAPEGVEPLALDLSSMGKGQVWINGQSIGRYWMVYAKGSCSSCNYAGTYRPAKCQLGCGQPTQRWYHVPRSWLRPTKNLIVVFEELGGNPWKIALVKRTTHTPAXSEPDSKN

SEQ ID NO: 262940 - protein, 144 aa, Glycine max
  unsure (1)..(144): unsure at all Xaa locations
  Clone ID: PAT_MRT3847_79456C.1.pep
KIGVCFPPRPKIKLPPFDKKTTXXVRFPLFHKEKFSLFKXXFPGXXIPCLNLSFSKNKMGAPKNFFLKKFSPLTPRXXFFLXTPPPNFLPPPPKKKTQKVLLFXXPPIXLRSPDLKTKFSKGFPGXKKKKKKKKKKXXKKKALP

SEQ ID NO: 262941 - protein, 29 aa, Glycine max
  Clone ID: PAT_MRT3847_79457C.1.pep
STKNMTDPPLYYSLYMFLIVQIITRPRYY

SEQ ID NO: 262942 - protein, 98 aa, Glycine max
  Clone ID: PAT_MRT3847_79458C.1.pep
ISQIAKLMEVQSPAAKRHYDITMSRRTRKQQQQQQQQFPVQGNEKTKSEMDDEATTPKDVHVHVTEETKSSQTNVSIADEVKEGGGESDHKSLKQLII

SEQ ID NO: 262943 - protein, 220 aa, Glycine max
  unsure (1)..(220): unsure at all Xaa locations
  Clone ID: PAT_MRT3847_79459C.1.pep
QSERLGYXFAKWMGVQTPQGRVIHNTCLEWQQIKEAAEKAREAANSEGDEIGEVTCFELLEALELSRCLFFMSYVHGSPLLENSSAFESRESAERTSEALGRVLMLDLVIRNEDRLPCHELKWRGNPANLLLAGKNICANTDALESAFDSAVNRYRPKVIRAFQKERKSTSVDCRLNSHNPGLISQSYDLSDITESPRSADMSFQTSGESLSSDFNIGAI

SEQ ID NO: 262944 - protein, 35 aa, Glycine max
  Clone ID: PAT_MRT3847_7945C.1.pep
EAHIFSRRVMSKVDFKFSYLGVVYRHGFILIMSKQ

SEQ ID NO: 262945 - protein, 286 aa, Glycine max
  Clone ID: PAT_MRT3847_79460C.1.pep
ELGAARVNKDGADVKELKEQIACLKAALARKEGESEHSLSGSSEKYRTMASELSPYHANQQGADIVSPGCRQPMLDVGNIELHSSTTLRQKTQSYDFDEMSTNSPPWPPVNNPRQLYGDDDRETGSKEWVDKVMVNKQDANKTENILGCWEAHSGNLSDVFYQKYLQGSSKMFSERSYNMFMGGNNQFNVAGSDDMDDLDDTTTDSSEPDLLWQFNHSKLTSIANGNGSKARRPVSKPTNSPVLSKNNVHSSLGPSPSRKQSNSVSHRTARHPPPVDMKRKTGSRK

SEQ ID NO: 262946 - protein, 32 aa, Glycine max
  Clone ID: PAT_MRT3847_79461C.1.pep
NKECYFLWQSATDREMNLHLLLKIHFVQYIVY

SEQ ID NO: 262947 - protein, 265 aa, Glycine max
  Clone ID: PAT_MRT3847_79462C.1.pep
MMLTLSLSVPLQKQYPFSISQLPSSAYITLCKWGLFILSLLLTALIFRFRQNATPFPLIIAHCDYSHTDDDDEIYSTSEFEDDDDEEEEEEEEEEEEERRDEYFRVRGSTNDERCRSIGDFLSLSEIANTKSVVKLWDTIGFGLGFGFEHFDRSSEGSSVVSVYDGELPDPAVVVSAGQNASGNLAVRIWDTRLRRRIPAMMAEWGPSLGKTVGVESSEVHKVFVKDDGRYEFTVGNMRNAMSPLQYVTDSHLDLWWPNSLIVKI

SEQ ID NO: 262948 - protein, 57 aa, Glycine max
  Clone ID: PAT_MRT3847_79463C.1.pep
ILYEVRFLFYNFVSCLSCFGVGPHPMMSFLICNCAPHYLTCQSCHWPLYSSNFAQNI

SEQ ID NO: 262949 - protein, 73 aa, Glycine max
  Clone ID: PAT_MRT3847_79464C.1.pep
GNKTNSHKKNKHVNEKQRMDDYSRRKKKFFSWNPNAKHERAYDDYFNIRKPLLRIDKCNLAFAFYFCFPCFYL

SEQ ID NO: 262950 - protein, 82 aa, Glycine max
  Clone ID: PAT_MRT3847_79465C.1.pep
ADDEVDAAAAGGAPPPKKTTFKKFILGGVVLDPLVVMSTDQLMKMFIAPALRMLQRGLTKNPVAFIKKLRASKEAPPGGEKP

SEQ ID NO: 262951 - protein, 100 aa, Glycine max
  Clone ID: PAT_MRT3847_79466C.1.pep
KARGPQVQNYRPDFTHTRRVYRWECWGPHCWINRCTPQQRVLTHHAIACPSTHCRGHTTIDSVSNTMPLCSCTYYADYICNKTDIDNESNAGSDADSHKT

SEQ ID NO: 262952 - protein, 71 aa, Glycine max
  Clone ID: PAT_MRT3847_79467C.1.pep
MVSKWTHLRTYRIGLAQPNQCPPPDLKKDPKVKSGLYVCGDHLTSATFNGALVFGRRPPESLLKDKALTAA

SEQ ID NO: 262953 - protein, 86 aa, Glycine max
  Clone ID: PAT_MRT3847_79468C.1.pep
ISFFQWWSPESPGYEVFFFPDSKKFLGVCPYPPDSLVDFLVPPVHPRRALFKGPPLFFLSSFPPGPLTIKILVLSLHNERGFLSFA

SEQ ID NO: 262954 - protein, 35 aa, Glycine max
  Clone ID: PAT_MRT3847_79469C.1.pep
VDYIKHTIILTVHTIKRTKTTSYTKRFSWSILSNS

SEQ ID NO: 262955 - protein, 66 aa, Glycine max
  unsure (1)..(66): unsure at all Xaa locations
  Clone ID: PAT_MRT3847_7946C.1.pep
MTLQRVVTVPHIILEMADIPPDDYSWRKYXHKPIKGAPHPMGHYECSRVTGCPARKHVERALGDPA

SEQ ID NO: 262956 - protein, 55 aa, Glycine max
  Clone ID: PAT_MRT3847_79470C.1.pep
KLLEDSSERWELVILKEISSLYASVLNQHTTMSDSLSYRAIYVLNDSISRERTRG

SEQ ID NO: 262957 - protein, 36 aa, Glycine max
  unsure (1)..(36): unsure at all Xaa locations
  Clone ID: PAT_MRT3847_79471C.1.pep
XHXCXISRYXSDSHSIXTLEASHGMEDKRXRVEKWK

SEQ ID NO: 262958 - protein, 102 aa, Glycine max
  Clone ID: PAT_MRT3847_79472C.1.pep
FVDRDNHHQCDEHDSVLGFFAATILASWQCHAYYMFPLRLNTGYGARTPEVKCTYWKPAVKAHIIIGFETIPEQCVDAAMDYIHDEYYISYSTTVNQQAYIY

SEQ ID NO: 262959 - protein, 176 aa, Glycine max
  unsure (1)..(176): unsure at all Xaa locations
  Clone ID: PAT_MRT3847_79473C.1.pep
AFDGFKALGFPSKQGEDKGHFPMFFXLPKTKNGLLPLAKKLAFKFGFLEPKFLNNKLEVGDFGFPKFKIFFGFEPFNVFKELGGVFPFPVGGFPKMVGFFVGQNLFVSDIFYKFFLKVNKKGLXVSGAPPANKQFGCGMFPPEIDFVVAPPFLFLFKKVFFGPVLFFGRVLNPRAE

SEQ ID NO: 262960 - protein, 71 aa, Glycine max
  Clone ID: PAT_MRT3847_79474C.1.pep
RLLERICAAKKRAYDTRNIRQPTRSPMDRGFNSGPGPSGSQACQKAGPFQLPGNRGLTISRRGLIPRSHSQ

SEQ ID NO: 262961 - protein, 154 aa, Glycine max
  Clone ID: PAT_MRT3847_79475C.1.pep
SKLNYETDDKPMLSLDLMQELSCNLGTIQATVIGKLYNELEKGIPSMVGHFLSSLASLHSMIICVSINYVPGPMVPHSERFLFPPVCQRSYHLFRCIANHGDKDVSSENHSTYYPLLMESLQNVIRLDAQYRSAESEWDDQLDYQDDLYSATVL

SEQ ID NO: 262962 - protein, 82 aa, Glycine max
  Clone ID: PAT_MRT3847_79476C.1.pep
QTSGSVKACFSTIPKKGVILGGLEAPGRAFGEKKPMANPIVRIKVPSSSPGRSLRPPVDQLLGGGVNLGFSVNPGTIVWFCS

SEQ ID NO: 262963 - protein, 65 aa, Glycine max
  Clone ID: PAT_MRT3847_79477C.1.pep
FDIHWITIRRFNEHGVFILFIRIGRGCPIKRGLSMFYQGKAQSFSSLASVESIEDLPKKKERFYI

SEQ ID NO: 262964 - protein, 57 aa, Glycine max
  unsure (1)..(57): unsure at all Xaa locations
  Clone ID: PAT_MRT3847_79478C.1.pep
VKGAQIHPTCYVSVSFLNEGLASSFIRVCAXAVPLIGVIFEPFKRLKRSEHAAPFAS

SEQ ID NO: 262965 - protein, 423 aa, Glycine max
  Clone ID: PAT_MRT3847_79479C.1.pep
MGCVHGKCCCGDSSSSDDGSRDYRELDFINGHPTRPLAQRSLKHVPVPSHNFILEYTFLSQRGYYPDSPDKENQDSFCITTQLQGNPNVHFFGVYDGHGQFGSQCSNFVKHRLVEKLSNDPALLEDPVQAYNSAFLATNQELRSTSEIDDSMSGTTAITVLVIGDTLYVANRADSRAVLAVKDGNHIVAEDLSSDQTPFRRDEYERVKLCGARVLSVDQVEGLKDPDIQHWGDEESRGGDPPRLWVPNGMYPGTAFTRSIGDNLAETIGVIAIPEVKTVQLTPNHLFFVVASDGIFEFLTSQTVVDMAASYMDPRDACSAIAEKSYKLWLELENRTDDITIIIVQIKGLSNSGTSGVGSDEINGGGTVMNSRTGTHEISATPGSNVYRSVRNSLSDLHSCQHVASVTSAAIEVHSPACPRPIE

SEQ ID NO: 262966 - protein, 246 aa, Glycine max
  Clone ID: PAT_MRT3847_7947C.1.pep
MAIPSPKIFLLLTFFFSHSIAVKSSNVSTTPTLHATFPFPEVSSFNSSKLSISININPNIINTLLQSLQAAISEATKLSDLLNNAGHNIIENKIGAVQDCRELQQSTLASLKRSLSGIRSQDSRKLVDARTYLSAALTNKDTCLESLDSASGTLKPVLVNSVINSYKDVSDSLSMLPKPERKASKGHKNRRLLGGVNEKSPSLAKHDGRELVVAADGTGNFSTITEPINFAPNNSGGRTVIYVKEG

SEQ ID NO: 262967 - protein, 163 aa, Glycine max
  Clone ID: PAT_MRT3847_79480C.1.pep
PTRADQLAKLVCNCMGGSADVWEDDLFAIWRERINDLRDCLGSVVVPIGSLSTGLCRHRAVLFKVLADTIDLPCRIAKGCKYCSRDDASSCLVRFGLDREYMGDLIGKPSCLCKPDYTINGPFNISYASPLLFGHMGRAWPTIGLRSLAKQYLSDWMSAELGF

SEQ ID NO: 262968 - protein, 108 aa, Glycine max
  Clone ID: PAT_MRT3847_79481C.1.pep
MSRPMLLVFLLIILIITSQFEWKQQLVADVDSNPSVSQKQHQISKAGETVKEKIILVQEKNIRRLNELVRHLQEQLQQCRGRNGTINGTVSPLAERILELERQQILED

SEQ ID NO: 262969 - protein, 105 aa, Glycine max
  unsure (1)..(105): unsure at all Xaa locations
  Clone ID: PAT_MRT3847_79482C.1.pep
MIIPEPNLVVICNFVFEDGVRCAKKDFCLADRPXIDVPYLHVMKLMQRYXSRXISRDTFPWMHYSWWLTXDGNEILMTYLNLPYEIGPATCDNQAEPAGRPFCGP

SEQ ID NO: 262970 - protein, 81 aa, Glycine max
  Clone ID: PAT_MRT3847_79483C.1.pep
LPHASLHGITMDMSFLHFSFIIFVHCICINHCITTHLHLACSFVLTTAYILFSSFAYHDHSCMTLAFSLCIKKGENKTKNK

SEQ ID NO: 262971 - protein, 110 aa, Glycine max
  Clone ID: PAT_MRT3847_79484C.1.pep
PISRTSAASVRISMQWGFINSPSSLPKERCKITHFSSVSSVFSRFVPLSWSSQSVPFRFLYATLLPSQSRVCLLASTLTMHIFHSRCSFPMQTFFVSILPPPFCRLLAAV

SEQ ID NO: 262972 - protein, 75 aa, Glycine max
  Clone ID: PAT_MRT3847_79485C.1.pep
GGFTNWESLDQLVASQLNGQTPTYCSDLQFPAFLSSSYIATTTHIAPTIQDYPSYDIDLWNHCASRVSNTPNVTL

SEQ ID NO: 262973 - protein, 60 aa, Glycine max
  unsure (1)..(60): unsure at all Xaa locations
  Clone ID: PAT_MRT3847_79486C.1.pep
YDTLHPLHHXLANSCGQNIQDYIAVKLVVYTCKFDDXSNLLYTIYGTTIADLRAIGYDLY

SEQ ID NO: 262974 - protein, 140 aa, Glycine max
  Clone ID: PAT_MRT3847_79487C.1.pep
MAAKLNTAYLSSHRGIIKILQIDFGLIVCTLLCIGSYGFFSGCFYDGKIGAASGINAVIAILNIVFFVLNLMDTHNNKWERIYTLVALILFVVAFALMLWNLLETHSYYGQTKIPATVFIGIQTALFIRDYRILHGQAYT

SEQ ID NO: 262975 - protein, 66 aa, Glycine max
  Clone ID: PAT_MRT3847_79488C.1.pep
WKNQRHRFNYMAISDERQRSMPTIRDREAGQILAFPEAVLLTRPISQKFRGEVCNITKLCETFINF

SEQ ID NO: 262976 - protein, 452 aa, Glycine max
  Clone ID: PAT_MRT3847_79489C.1.pep
EYRFFQLPRSNNFDSAIFVPASLLSYFFGSSLLLFSPKTQEREERRMEGEGAAVWQGAVLGGIIFWLVSASYLNATRKLRSFLQPWVTHHVDTQTPIILKIQSYGFGFLDTLFSGLSCVVSVPFYTAFLPLLFWSGHGKLARQMTLLMAFCDYIGNCTKDVGSAPRPASPPVKRVTATKDEEDNALEYGLPSSHTLNTVCLSGYLLRYVLTHTQIQGAYVTYLGVSLACMLVFFIGLGRIYLGMHSVVDVLAGLLIGLVVLAFWLTVDEYMDSFVISGQNVTSFWAALSFLLLFAYPTPELPTPSFEYHTAFDGVALGIVSGVQQTYHQFHHANVPRLFSSELTIPVFLGRMLLGIPTILIVKFCSKTLAKWTIPVVANTLGIPIKSTGYIPTLNGSVTGKMSDKLKQGYLQKLLSQHKAFDVDTGIRFVQYAGLAWSVVDLVPSLFSYMSL

SEQ ID NO: 262977 - protein, 74 aa, Glycine max
  Clone ID: PAT_MRT3847_7948C.1.pep
FLDMYIWKLTCISVSSVIYAINEKLINTQWHSFLYSLTVNQIEKYSNCCLKFPMPYRKQSTHVKPEADKYLKFT

SEQ ID NO: 262978 - protein, 173 aa, Glycine max
  Clone ID: PAT_MRT3847_79490C.1.pep
MEGLPQGYRPNVGVCLINSDDQIFVASRLNVPGAWQMPQGGIEDGEEPKSAAIRELREETGIVSAEIIAEVQKWLTYDFPPAVKAKVNRLWGGEWHGQAQKWFLMRLTKDDSEVNLTNGEAEPEFAEWKWADPEEVIEQAVDYKRPTYEEVIRTFKPYFQGSGISAKCKSTKW

SEQ ID NO: 262979 - protein, 173 aa, Glycine max; identical to SEQ ID NO: 262978
  Clone ID: PAT_MRT3847_79491C.1.pep

SEQ ID NO: 262980 - protein, 88 aa, Glycine max
  Clone ID: PAT_MRT3847_79492C.1.pep
KCTPCPHVNKEYIFFFLRKNKKSYEKKKRTVWKRILKTNITYLIKLLTANFQKILTMRAAPQLLTSSPLNLFPTQTSRPSHFSFLWTF

SEQ ID NO: 262981 - protein, 144 aa, Glycine max
  unsure (1)..(144): unsure at all Xaa locations
  Clone ID: PAT_MRT3847_79493C.1.pep
RGGLGQLGQSITRRLAHGYNKAVARQXLTHKLNCKXTACYDLLVSHGGKIVPSVWSNMPIQYNDSIMDSTINCXENGTLFDVSHMCGLILRGKDAATXLEKLVIANVCWLAPATGTKTVFTXNEKGVHMDDSAXTRVNAYHIYL

SEQ ID NO: 262982 - protein, 47 aa, Glycine max
  Clone ID: PAT_MRT3847_79494C.1.pep
FVGVIKTGKDNYLIACSSLSPIIDKTKYKNEYDPLRVVLTQLLSMHT

SEQ ID NO: 262983 - protein, 123 aa, Glycine max
  Clone ID: PAT_MRT3847_79495C.1.pep
VEDITDTHAIQSRHVLNSHTECTVSHTTQHFTVQLARVKTTVSFVSPVQEEFSKCALGTNHKIEEIAAVKAVSTRGKRFTVHPDQRKSGVHTECNREEIAIQQECTIHEAVVEPVSVHNEVNG

SEQ ID NO: 262984 - protein, 100 aa, Glycine max
  Clone ID: PAT_MRT3847_79496C.1.pep
QTLKCSAPLMFMGVLVSYRSHSQVCDTKFHLTYNSICSFLRPLGHPRQNDARSLVQRRRRQEHWQSNTDLDHRSSLDAVAVGATFTYDECRDVFIGSLGP

SEQ ID NO: 262985 - protein, 113 aa, Glycine max
  unsure (1)..(113): unsure at all Xaa locations
  Clone ID: PAT_MRT3847_79497C.1.pep
RTMLELLNQLDGFSSDDRVKVIAATNRADILDPALMCSGRLDXKIEFPHPTLXIHSRKMNVHPDVNAAQLKAVCVEAGMLALCRDATEVNHEDFDEGIIQVQAKKKASLDYYA

SEQ ID NO: 262986 - protein, 86 aa, Glycine max
  Clone ID: PAT_MRT3847_79498C.1.pep
FFFFFFLFFFFFFLHLLNQTLNYLPSKSIWGDFRPYPHLKGVPPLQPFPQFFYFLNDPLKKHLYYNKKKKEWESLKPGPTHPNLLT

SEQ ID NO: 262987 - protein, 275 aa, Glycine max
  Clone ID: PAT_MRT3847_79499C.1.pep
LNRNYVNYAPDRDSPEIGDVIVRDEPHITSLPGSLSCNPPSYPPLSGDCWYNCTSEDISGEDKKHRLRKALGQTADWFRRALFVEPVKGNLRLSGYSACGQDGGVQLPRGYIEEGVSDADLVLLVTTRPTTGNTLAWAVACERDQWGRAIAGHVNVAPRHLTAEAETLLSATLIHEVMHVLGFDPHAFAHFRDERKRRRNKVTEQVMDEKIGRMVTRVVLPRVVMHSRHHYAAFSGNFTGLELEDGGGRGTSGSHWEKRLLMNEIMTGSVDTSLS

SEQ ID NO: 262988 - protein, 106 aa, Glycine max
  unsure (1)..(106): unsure at all Xaa locations
  Clone ID: PAT_MRT3847_7949C.1.pep
MCLCHTRRAHLLSSSSGLEMSLRPKYPSATDFPRESEARPLPLPIGLSRGAPVNILMNESYWSNGTGSVFAVDHDHHTRCPDVVXATXVYYARVSSHNCAMDEIAY

SEQ ID NO: 262989 - protein, 440 aa, Glycine max
  unsure (1)..(440): unsure at all Xaa locations
  Clone ID: PAT_MRT3847_794C.1.pep
MTSPYTPRRRSSSDHRTRPERAPPSPGYASSEFSTSSTVSAHRNSVSAVAKSFAGIFAGCFSPPDSDNSKSLGDSEEFKSSSTVSNASRAGSQRGHGSKRGTSISSYNILPAKEPGSVEFTMEEIFRVTRNFSPSFKIGXQGGFGAVYRAKLLDGTVVAVKRAKKSVYEKHLGVEFQSEIQTLSRVEHLNLVKFFGYLEQEDERIIVVEHVPNGTLREHLDCIHGSVLDLAARLDIAIDVSHAITYLHMYIDHPIIHRDIKSSNILLTENFRAKVADFGFARQAPDSDSGMTHISTQIKGTAGYLDPEYLKTYQLTEKSDVYSFGVLLVELVTGRRPIEPKFELRERITAKWAMKRFIDGDAISVLDPRLDQTTANTLALEKILELALQCLAPRRQIRPTMKRCAEILWSIRKDFRKQLSASNFRSFSTSSQRSTSIKEK

SEQ ID NO: 262990 - protein, 62 aa, Glycine max
  Clone ID: PAT_MRT3847_79500C.1.pep
KVSIYDGLRDDYSHVSGVYFEVRDECFGYLIRRGIVYGPEVGVVKVQSIRVVCGISTGHEYA

SEQ ID NO: 262991 - protein, 102 aa, Glycine max
  Clone ID: PAT_MRT3847_79501C.1.pep
MLPSCFWICGLFQLSLKYNVSFLLANCGCSVLLNYFIFQIFEKNPTKIKNYGIWLRYQSRTGYHNMYMEYRDTTLNGAVEAMYNEMASRHRVRSPCIQIIKT

SEQ ID NO: 262992 - protein, 71 aa, Glycine max
  Clone ID: PAT_MRT3847_79502C.1.pep
ISNPRGFLHKPPGGKGGCPKGCLIFRSGVFIRGIYLKRRFGIPYKVFSPPMGIGECTLTPGAGGVSRAGKI

SEQ ID NO: 262993 - protein, 148 aa, Glycine max
  Clone ID: PAT_MRT3847_79503C.1.pep
PGLKREKKIKRKKNSPLLLGKRGRNKKKTSFGTRGKPRKEWHWHKRKTLDQFLIQTSPNHQQTDPEKTTPPGGVHVCLQNPRVKSHPLLSKQINIYGKMGGEGLKRKTNGGPKGNREAKRTPHRTWRPKWHSQEFLKTLGGHRGKIGI

SEQ ID NO: 262994 - protein, 258 aa, Glycine max
  unsure (1)..(258): unsure at all Xaa locations
  Clone ID: PAT_MRT3847_79504C.1.pep
MVVLSLSPPSLSTAFLAKKLSPQEHAVKLATFRNNSFRIRCAVDTPYGGNVQKFPRTNVWDPYRRLGISPDASEEEIWGSRNFLLQQYSGHERSEESIEAAFEKILMASFVQRRKTKINLLNKLXKEESPPWVKNLMSFVELPPTEVILRRFYLFGFMCGWSIMNSAETGPAFQVAISLAACIYFLNEKTKSMARAXHLLGLVALVFRNGSQFPSCYLIXPSMLLGLLTSLVVYLFMFGVCIFVQCFCAFLFEVIDYY

SEQ ID NO: 262995 - protein, 251 aa, Glycine max
  Clone ID: PAT_MRT3847_79505C.1.pep
MVVLSLSSPSLSTALLAKKLPPREHTVKLATFRNNSFRFRCAVDTPYGGNAQKFPRINVWNPYRRLGISPDASEEEIWGSRNFLLQQYSGHERSEESIEAAFEKILMASFVQRRKTKINLKSKLKKKVEESPPWVKNLLSFVELPPTEVILRRLFLFGFMGGWSIMNSAETGPAFQVAISLAACIYFLNEKTKSLARAFIIGFGALVAGWVSGSLLVPNIPSMLLRPTWTLELLTSLVVYLFLFVACTFLK

SEQ ID NO: 262996 - protein, 93 aa, Glycine max
  Clone ID: PAT_MRT3847_79506C.1.pep
VRRMTTSPHRADILSSSLEAFRKIQQERASLQSGTTENAMSKCVTSESIGNTNKSRVNDGTDVAKYSVTKSRKQVGSSDAKQGNLNGKKRNIE

SEQ ID NO: 262997 - protein, 162 aa, Glycine max
  unsure (1)..(162): unsure at all Xaa locations
  Clone ID: PAT_MRT3847_79507C.1.pep
GHERSEESIEAAFEKILMASFVQRRKTKINLKSKLKKKVEDLHPWXKNLLSFVELPPTEVILRRLFLFGFMGGWSIMNSAETAPAFQVAISLAACIYFLNEKTKSLARAFIIGFGALVAGWVSGSLLVPNIPSMLLRPTWTLELLTSLVVYLFLFVACTFLK

SEQ ID NO: 262998 - protein, 67 aa, Glycine max
  Clone ID: PAT_MRT3847_79508C.1.pep
LSPPQGHIYVWVPVISCFGFSFFHSFRCQYVGYDVCSLSSKCSISNGVSIIIFNHMPMVQKKNRIDQ

SEQ ID NO: 262999 - protein, 39 aa, Glycine max
  Clone ID: PAT_MRT3847_79509C.1.pep
RPHRLNCVTYSQTEHAFIIMDHNWDSPALDAEWSWESCS

SEQ ID NO: 263000 - protein, 55 aa, Glycine max
  Clone ID: PAT_MRT3847_7950C.1.pep
TMWKLTMFGCTDASQVLKDLLEVKTVFPNGFMRVIGFLIVGQLHCITCIAYKPPG

SEQ ID NO: 263001 - protein, 59 aa, Glycine max
  Clone ID: PAT_MRT3847_79510C.1.pep
RTAGLSVIFGVFFAGAGHSSLASRHLRAGDSLCPIGRCPGRRRSVPPENSCLQMEGAGF

SEQ ID NO: 263002 - protein, 44 aa, Glycine max
  unsure (1)..(44): unsure at all Xaa locations
  Clone ID: PAT_MRT3847_79511C.1.pep
XXVFFFFFFFCGERPRFSCTHALNLPSKVGRDAPNLLMKNIQLP

SEQ ID NO: 263003 - protein, 144 aa, Glycine max
  Clone ID: PAT_MRT3847_79512C.1.pep
MDKDARVEETVDLRTNVELVRSVSDKHHDLLRPSARNYSRGQSTDTTGRGKGKYALIRDPEDFQMGVYDKPLPCFGCGIGWFSFLFGFLCPPMWFYATILYFGNHYRKDPRERAGLGAAAIAALVCSVTLETIGLMYIRTSIYF

SEQ ID NO: 263004 - protein, 60 aa, Glycine max
  unsure (1)..(60): unsure at all Xaa locations
  Clone ID: PAT_MRT3847_79513C.1.pep
YFFFPIYSFFKTNILSQLIINIILNNFLIMYFINSKKYLYIPTYLILFIXQTRMITLILS

SEQ ID NO: 263005 - protein, 36 aa, Glycine max
  Clone ID: PAT_MRT3847_79514C.1.pep
IYSFVKIFFYLKTTWFGPCNRGKGTYRCTQISSIVR

SEQ ID NO: 263006 - protein, 39 aa, Glycine max
  Clone ID: PAT_MRT3847_79515C.1.pep
VYKTSHLPPNLNLVYTMALSQLDRAKAKFRGALSTIANF

SEQ ID NO: 263007 - protein, 81 aa, Glycine max
  Clone ID: PAT_MRT3847_79516C.1.pep
MSPGPVVDASPEVDAEQQLPSLDDATQKKIPQPQEDDAPLVEDLKDDDKDDDDEDDDDDDEDDKEDDAQGPLLFHCVFLLA

SEQ ID NO: 263008 - protein, 347 aa, Glycine max
  Clone ID: PAT_MRT3847_79517C.1.pep
NYPAIVSAKPKTKNQTQTKPTKISPTSLSASCSFCVPNSFSRLYPDSPESTLKPALMANNPSDAPADDFLEQILGLPNFASADSGLSAADVGLAGAATQAPMMLQLNSADANAHLAGAAFHAPVYQLGLSLDQGKGGFMKPEEASASGKRFRDDVVDNRAKNVFHGQPMPTTMPAAPHPPAIRPRVRARRGQATDPHSIAERLRRERIAERIRALQELVPSVNKTDRAAMLDEIVDYVKFLRLQVKVLSMSRLGGAGAVAPLVTDIPLSSVEEEGGEGRNQPAWEKWSNDGTERQVAKLMEENVGAAMQFLQSKALCIMPVSLASAIYQSQPSDTSSIVKPETNPPS

SEQ ID NO: 263009 - protein, 261 aa, Glycine max
  unsure (1)..(261): unsure at all Xaa locations
  Clone ID: PAT_MRT3847_79518C.1.pep
ARATKSVQTEEIKNQTQTASCRFCVPNSFSRLNPDSPDSKLKLALMANNPSDAPADDFLEQILGLPTFASADSGLSAADVGLAGAATQSPMMLQLSSADANAHLAGASFHAPVYQLGLSLEQGKGRFMKPDEASASGKRFRDDVVDNRAKHVFHGQPMPTTMPAAPHPPAIRPRVRARRGQATDPHSIAERLRRERIAERIRALQELVPSVNKTDRAAMLDEIVDYVKFLRLQVKVLSMSRXGVGAGAVAPLGTDIPLSSV

SEQ ID NO: 263010 - protein, 120 aa, Glycine max
  Clone ID: PAT_MRT3847_79519C.1.pep
VKKRENIKIGGNIFLLFYSPSLIRTHHVSLLSFLHHRGWWTDNLHIENKSLCFIERRLYVHSFLPTGFMKNRPAPSFFFERKEFELFLNALCRGPLMMTSHSFWGGKKSNGGPRSWRSEI

SEQ ID NO: 263011 - protein, 54 aa, Glycine max
  Clone ID: PAT_MRT3847_7951C.1.pep
MAGCDKEDYFSAPNAEQGAGVNQQSTATVETLRPKLQRTPHQQLPPRRPACTSG

SEQ ID NO: 263012 - protein, 273 aa, Glycine max
  unsure (1)..(273): unsure at all Xaa locations
  Clone ID: PAT_MRT3847_79520C.1.pep
MANHPSQASTDDFLDQILGLSTFASADASPMMLQLNSGDAATHLASFHAPPYQLGLSLDQGKGPFLTPEDASGSGKRFRDDAVDTRPNNVFDGQPMPTTVPTAPHLPAVRPRVRARRGQATDPHSIAERLRRERIAERIRALQELVPSVNXDRAAMLDEIVDYVKFLRLQVKVLSMSRIGGADAVAPLVTDIPLSSVEEEGGEGXNQPAWDKWSNDGTERTGSKLMEENVGAAMQFLQSKALCIMPISLASAIYQSQPPDTSSIVKHETSPPS

SEQ ID NO: 263013 - protein, 283 aa, Glycine max
  Clone ID: PAT_MRT3847_79521C.1.pep
MANHPSEAPTDDFLEQILGLSTFASADPAADASPMMLQLNSGDAATHLAATHLAAFHAPPYQLGLSLDQGKGPFLTPEDASGSGKRFRDDVVDTRPKNFFHGQPMPTTVPTAPHPPAVRPRVRARRGQATDPHSIAERLRRERIAERIRALQELVPSVNKTDRAAMLDEIVDYVKFLRLQVKVLSMSRLGGAGAVAPLVTDIPLSSVEEEGGEGRNQPAWEKWSNDGTERQVAKLMEENVGAAMQFLQSKALCIMPVSLASAIYQSQPSGTSSIVKPETNPPS

SEQ ID NO: 263014 - protein, 224 aa, Glycine max
  Clone ID: PAT_MRT3847_79522C.1.pep
KQRYDIILGTAKGLAYLHEDFHVCIIHRDIKTSNILLDDEMQPRIADFGLARLLPEDQSHLSTRFAGTLGYTAPEYAIHGQLSEKADAYSFGVVVLEIVSGQKSSELRADADGEFLLQRAWKLHVQDMHLELVDKTLLDPEDYDAEEVKKIIEIALLCTQASAAARPTMSEIVAFLKSKNSLGQIRPSMPVFVETNLRTRAETSTSTGSSTSNATASISMLSAR

SEQ ID NO: 263015 - protein, 179 aa, Glycine max
  unsure (1)..(179): unsure at all Xaa locations
  Clone ID: PAT_MRT3847_79523C.1.pep
MVAFGKKLKERQIQEWQGYYINYKLMKKRVKQYAQQIQLGTLDRRHVLKDFSRMLDNQIEKTVLFLLEQQGLLASMIAKLGQEHELIQHEPHISRIAELRQAYXALGQELLKLLFFVELNAXGLRKILXKKFDKRFGYKFTDYYVKTRANHPYSQLNXVFKHAGFGXLLCGALSRNLHE

SEQ ID NO: 263016 - protein, 167 aa, Glycine max
  unsure (1)..(167): unsure at all Xaa locations
  Clone ID: PAT_MRT3847_79524C.1.pep
DDLFDQACCCQSCKEPAEAHVLCFTHQQGNLTINVRCLPSVKLPGERDGKIWMWHRCLRCPFEDGVPPATQRVVMSNAAWGLSFGKFLELSFSNHATANRVATCGHSLQRDCLRFYGFGSMVAFFRYSPIDILSVHLPXSVLEFGHIQEEWIIKEAGELFIKVETLY

SEQ ID NO: 263017 - protein, 77 aa, Glycine max
  Clone ID: PAT_MRT3847_79525C.1.pep
PMQMVKKGFKKRGTVGVGQKKLSLPLCPLPIHYCLAWKPLIKFFQEGPPFFPIKKIMIVIKSFWKKKYFFWGKNGGH

SEQ ID NO: 263018 - protein, 40 aa, Glycine max
  Clone ID: PAT_MRT3847_79526C.1.pep
LCLKILVSCLCYVLNSDLSPTKRLTFIDLGITPSVVFSQP

SEQ ID NO: 263019 - protein, 46 aa, Glycine max
  unsure (1)..(46): unsure at all Xaa locations
  Clone ID: PAT_MRT3847_79527C.1.pep
LFDKKIKSMSHTKIPISRNPFFFFYFNGCIFXFSFLPRNLXYIFMA

SEQ ID NO: 263020 - protein, 53 aa, Glycine max
  Clone ID: PAT_MRT3847_79528C.1.pep
DIVSWENVLRNKEESRKHRMLFTTQHALNQNTVDLFSEVVKIYTLIWNWNGFM

SEQ ID NO: 263021 - protein, 44 aa, Glycine max
  Clone ID: PAT_MRT3847_79529C.1.pep
QIQVASYQSNASNFGRVDMLYIRDVHTPVDDSRYRPYTAGKVFK

SEQ ID NO: 263022 - protein, 81 aa, Glycine max
  Clone ID: PAT_MRT3847_7952C.1.pep
CSQHVTFSEFFRSFYLFLFLTFLFFFLCLFFLPLFIILIIDNLFFLFFFILLIFLIIFYILFILFFSFLLIFFSLFIYFFF

SEQ ID NO: 263023 - protein, 53 aa, Glycine max
  Clone ID: PAT_MRT3847_79530C.1.pep
TGVFGTGWNPGYPGRVLVNKPTGASSNAHGANETRSLVPPMWDPQVWTCKPLV

SEQ ID NO: 263024 - protein, 87 aa, Glycine max
  Clone ID: PAT_MRT3847_79531C.1.pep
FLGTTNLLGRACGGIHSRDTPPRGSMWLVHSSLQSQIHNISFFFSPFQKIQLTFGCRGGFKFDTQFYHKRNNLREESVCSHFQPNRA

SEQ ID NO: 263025 - protein, 29 aa, Glycine max
  Clone ID: PAT_MRT3847_79532C.1.pep
GHYFSLIGLRGYFRYTLLLCLHLPALFMC

SEQ ID NO: 263026 - protein, 137 aa, Glycine max
  Clone ID: PAT_MRT3847_79533C.1.pep
RGEKKKKRLVPIAGGVSLSSPSRVFVNVKGIDSAQKAQAVRFPALSGPFQKWPGLVKTRPVRGPPEKISEKVKESLKSPEKACSEAAGSPECPAAWDKVEELSPAATPPRENQNQFDPLENFCKANPEIFECRPFDN

SEQ ID NO: 263027 - protein, 43 aa, Glycine max
  Clone ID: PAT_MRT3847_79534C.1.pep
VLHLDYLDSVRSLIRCTQCRFRTLFDQRSRILGGSNCIGTFPF

SEQ ID NO: 263028 - protein, 96 aa, Glycine max
  Clone ID: PAT_MRT3847_79535C.1.pep
NNFSLQFRFLINRNRKQHFNESSYYFNRKVEYSKSPYSLVPLNSKWQLLSLSISLRNVTNVSKASSGSSFLISCSATTAGVTSNFSNSPSISSKSG

SEQ ID NO: 263029 - protein, 109 aa, Glycine max
  Clone ID: PAT_MRT3847_79536C.1.pep
GYAWCFPPKIIIFMLRRGSDLFIQFPNLGSFVFSFHQLQFLGVFGKKGQNPGGMPPIVNKQACVQGGILDPPRGFSFSFSFFKKNEENSLRVPFLFWAPLVISPFTLQK

SEQ ID NO: 263030 - protein, 49 aa, Glycine max
  Clone ID: PAT_MRT3847_79537C.1.pep
DQNMRHHALDLDTLKGDGDAQAGVCFSRDGRDLATGCADGIARVFKTDD

SEQ ID NO: 263031 - protein, 103 aa, Glycine max
  Clone ID: PAT_MRT3847_79538C.1.pep
FVSSRIMCELLCFSFSSWDVVSVCLRLAQGLKKTDCMLKSMLFLVVYLRRQSRDGVIRHMGARILRTSLIRTSWFSGFSSRKPGREKEVYKEICMQENNVEVG

SEQ ID NO: 263032 - protein, 70 aa, Glycine max
  Clone ID: PAT_MRT3847_79539C.1.pep
VFNEQQMAQLKKSEAFSIEREKVIQQVSKKSVNELAQIMKYLSVLVIEQVSRYPLLRKFTIFFIPHSFNH

SEQ ID NO: 263033 - protein, 90 aa, Glycine max
  Clone ID: PAT_MRT3847_7953C.1.pep
MAGCDKEDYFSAPNAETTSEGKYGRLAPKKKPLISKDNERAFFDSADWALCKQGAGVNQQSTATVETLRPKLQRTPLQQLTPRRPACTSG

SEQ ID NO: 263034 - protein, 89 aa, Glycine max
  Clone ID: PAT_MRT3847_79540C.1.pep
KRKHKERNKRVSFTLTHNTRHSFFSRVIAFSPMGARCSKFSLCWWPSHLKSNLHNLSDNDDDGKRNEKDPCGGFNGVQFGSVKIATLRF

SEQ ID NO: 263035 - protein, 59 aa, Glycine max
  Clone ID: PAT_MRT3847_79541C.1.pep
RHLPSLAPHNTNIMLPRKQELKIKPTKVFIDAIHFNIHYPNTNHPMAYFWAQLKAFQLH

SEQ ID NO: 263036 - protein, 57 aa, Glycine max
  Clone ID: PAT_MRT3847_79542C.1.pep
IFGKKSMTRARLSQKLLQIKKKIGIKPSNHWNSHMYLFPLFFLLILPTLFSSSEYIS

SEQ ID NO: 263037 - protein, 537 aa, Glycine max
  Clone ID: PAT_MRT3847_79543C.1.pep
MGCSVRVCCVLFLVLLVACVRGEDPYRFYTWNVTYGDIYPLGVKQQGILINWQFPGPQIEAVTNDNLIINVYNSLDEPFLLSWNGVLQRRNSWQDGVYGTNCPILPGHNFTYVLQVKDQIGSYFYYPSLAFHKAAGGYGGFKIASRPGIPVPFPTPAGDFTILAGDWYKRNHTDLRAILDGGSDLPFPDGIIINGRGSNAYTFTVDQGKTYRFRISNVGLTTSINFRIQGHKMTIVEVEGTHTLQNVYDSLDVHLGQTYSVLVTADQPPQDYLIVVTTRFTSQVLNATSIFRYSNSGGGVTGLFPWGPTIQVDWSLNQARSLRRNLTASGPRPNPQGSYHYGLINTTRTIRLQNSGPVINGKQRYAVNSVSFIPADTPLKLADYYKIQGVFSLGSIPDYPTGSGGYLQTSVMEADFRGFIEVVFENTEDTVESWHVDGHSFFVVGMDGGQWSSASRLNYNLRDTVSRSTVQVYPKSWTAIYMPLDNVGMWNVRSENWVHQYLGQQFYLRVYSPANSWRDEYPIPSNAIRCGKAVGHY

SEQ ID NO: 263038 - protein, 69 aa, Glycine max
  Clone ID: PAT_MRT3847_79544C.1.pep
RDQLIVVDDVSHLAWLLSSGVNAQEGVFISEIGFAMAVDTHMAREKLVIGFASREALEEVVGIKYKFIL

SEQ ID NO: 263039 - protein, 114 aa, Glycine max
  unsure (1)..(114): unsure at all Xaa locations
  Clone ID: PAT_MRT3847_79545C.1.pep
LIMRARGGTNRRVSTPPAHPTPDASTKLSYKCSVCNKKLAXLYQALGGHKASHHRLADSGDQDQPTMTYFGGSFINTDSRGRTHECYICHKSFLTRQALCGHRRRHYEGNSNGN

SEQ ID NO: 263040 - protein, 171 aa, Glycine max
  Clone ID: PAT_MRT3847_79546C.1.pep
PVCHLEEVLSAVRLRSSYRKMSDMLTTFTKKKEVDTIIRDTFDKVVVLRFGRASDLVCLQQDHILSKAARDVSKFATVALVDVDSEEIQVYLKYFDITLIPSTVFFFNAHHMKMDYGTADHTKWIGAFYAKQDFVDVVEAIFRGAMKGKLIVNCPLPPESIPKFQILYKDV

SEQ ID NO: 263041 - protein, 135 aa, Glycine max
  Clone ID: PAT_MRT3847_79547C.1.pep
MALSFNSLTLSPLFSSSSTFALPTTAASRVHVILPPKPLNGVRFSAPKRRTDAVVVSAAAEDSISPPVPPAESEKENVSVEKLPLESKLKEREEQKLRMKLAKKIRLRRKRLLRKRRLRKKGRWPPSKMKKLKNV

SEQ ID NO: 263042 - protein, 438 aa, Glycine max
  Clone ID: PAT_MRT3847_79548C.1.pep
HGWAHEIAQLPCDSDGVCMLCKLKPSPSQTLSCGTCATPWHLPCLPSPPLSLSDSHWDCPDCSDTFCHHPVAPTAHLVSAIHAIQADTSLTDQQKAIKRQQLLAGSAHPSKDKTKAKDIFDGSLNCSICMQLPDRPVTTPCGHNFCLRCFEKWIGQGKRTCANCRAQIPTKMASQPRINSQLAMAIRLAKAAKSEGSSGPPKVYHCPRNQDRPDTAFTTERAKKTGKANACSGKIFVTVPPDHFGPIPAENDPTRNRGVLVGDTWEDRMECRQWGAHLPHVAGIAGQSAYGSQSVALSGGYEDDEDHGEWFLYTGSGGRDLSGNKRTNKLQSFDQSFIKNRACGGGRTLRAQKNVMKCPSCSNDIADFLQNPQVNREMLAVIESLQRQAEENSEELSDKNDENLHDPTEVSKPSDSTDKVLEEIKDNELNQPHKRRKE

SEQ ID NO: 263043 - protein, 69 aa, Glycine max
  Clone ID: PAT_MRT3847_79549C.1.pep
TFSIIITIISLSILNHHSHKYTFSPYSSLKYNQHNFSITYFHLHLYSTYFFLKFIPPLLITSNLSSFKL

SEQ ID NO: 263044 - protein, 241 aa, Glycine max
  Clone ID: PAT_MRT3847_7954C.1.pep
MEGPLSVFGDRSTGEAVRSQNVMAAASIANIVKSSFGPVGLDKMLVDDIGDVTITNDGATILKLLEVEHPAAKVLCELADLQDKEVGDGTTSVVIIAAELLKNADELVKQKIHPTSVISGYRLACKEAVRYINENLIINTDELGRDCLINAAKTSMSSKIIGINGDYFANMVVDAVLAVKYTDARGQPRYPVNSVNILKAHGRSQIESMLINGYALNCVVGSQGMPKRIVNAKIACLDFSL

SEQ ID NO: 263045 - protein, 81 aa, Glycine max
  Clone ID: PAT_MRT3847_79550C.1.pep
MDYIEPKNGIYYKPRISKGMILLIQLSIKSWPKINSQIDLKGSSTVSCQPLHHTYRHVLISVNEKDKYLTVVGHTLVTKPL

SEQ ID NO: 263046 - protein, 141 aa, Glycine max
  unsure (1)..(141): unsure at all Xaa locations
  Clone ID: PAT_MRT3847_79551C.1.pep
VRNSRXRPTRPVMHCLYLARGRARTHGGHGALTLLGRLDAAHHNVGSSTKTTPSRMGRTLTCGNRCSGGRRNTTWSTVLCLLTESLGRLGLVYLTPPTPATGHDGSSTLTTNDALTSRAGGHEWNGNPDLCTRFRSEKAVI

SEQ ID NO: 263047 - protein, 93 aa, Glycine max
  Clone ID: PAT_MRT3847_79552C.1.pep
KNTPYMCMGHFCFHACSKNKNSLCRHDCHKQNSSLFFSNEFVAGVNCSLLVINNLAGYVKSQAPTHCLHITLFISKWVIHEENPTYANGSPLI

SEQ ID NO: 263048 - protein, 37 aa, Glycine max
  Clone ID: PAT_MRT3847_79553C.1.pep
CITLSSFKVLAPLLALSTWIHISCVIFDHIARIKVCS

SEQ ID NO: 263049 - protein, 36 aa, Glycine max
  Clone ID: PAT_MRT3847_79554C.1.pep
TANIFFFTKKKKYNRSHLIHLQNQRIKKMLFLKTKK

SEQ ID NO: 263050 - protein, 68 aa, Glycine max
  Clone ID: PAT_MRT3847_79555C.1.pep
IFRRGASVKKRPKEATHPYTFNAAIYNFISTFIFFFNPQILITFSILSIFHYLLLSPLFYLIFSLNPP

SEQ ID NO: 263051 - protein, 91 aa, Glycine max
  unsure (1)..(91): unsure at all Xaa locations
  Clone ID: PAT_MRT3847_79556C.1.pep
MMSRAAVLLHAQEEEEEECSTSTSSSIGRNSDPSTDRSMEEGRNEAESAHQGPLPAMETLEEALSIRRGIXSNFHNGQSKHSTTLADATAS

SEQ ID NO: 263052 - protein, 85 aa, Glycine max
  Clone ID: PAT_MRT3847_79557C.1.pep
MVMVYSAAVMFSLLSRFHLLAEFDDGKRSCRKRLAGHNERRRKPQVGIHSGKAGRLLQPYAGNYLFLKLCYDKASLLSSILLGST

SEQ ID NO: 263053 - protein, 103 aa, Glycine max
  Clone ID: PAT_MRT3847_79558C.1.pep
MDMYIRVKRSKTTYFIRCKPSDKILDIKQKLQELVDQPANNQRLILPVTGEVLEDSKTLADQKVENDAVVALTLRKDDNEFEEVNIVRPNDFYQARDADGANW

SEQ ID NO: 263054 - protein, 45 aa, Glycine max
  Clone ID: PAT_MRT3847_79559C.1.pep
IAYSPLKLGPQLTLDATSGTSSYALGSSLYEDHCPEAGGQKSPGF

SEQ ID NO: 263055 - protein, 141 aa, Glycine max
  Clone ID: PAT_MRT3847_7955C.1.pep
LRALCYPQTDVFLMCYSVISPSSFENIKIRWYPELQHHCPGTPCLLVGTKIDLREDAAVIEGLRNHGLAPISKEQGESMCREIGAAGYVECSALTQKGLKTVFDEAARIVVGTSSGSKDTGNGGDSRSSVTKKKKKTCIIL

SEQ ID NO: 263056 - protein, 82 aa, Glycine max
  unsure (1)..(82): unsure at all Xaa locations
  Clone ID: PAT_MRT3847_79560C.1.pep
LGPPDLSAFLFPGPFFFGGFSAEKFFPREKGIFFFGPGLFSHSYKEKVVFPPVPGGISGLTPVFLPGFVPGVCXVKKKIKKQ

SEQ ID NO: 263057 - protein, 50 aa, Glycine max
  Clone ID: PAT_MRT3847_79561C.1.pep
ARRTKRTTLNRSRYTIDRAVYEACIEVRLMIPIQTLYRLVHLHPTIRARY

SEQ ID NO: 263058 - protein, 41 aa, Glycine max
  Clone ID: PAT_MRT3847_79562C.1.pep
PARGLNRFSDVISGASPVHQRGATSPQSSTCDIVEGGLFFH

SEQ ID NO: 263059 - protein, 224 aa, Glycine max
  Clone ID: PAT_MRT3847_79563C.1.pep
RLRRRQKGEKTTDFLEFGKKSLSGKVEPLLLSLYLKLTPNEFNGFEEVQRLYDQEGGIKLPISTTMGTENVLKFPTPHVIQASTFAWMTDEEFAREMIAGVNPNVIRLLKREDLAPRRRLDCKCNHSTITKEKLEINMGGVTVDEAFCNKRLFILDYYDAFMPYLRKINELDSAKAYATRTFLFLKDDGTLKPLAIELSKPHQCVYVLPHPPHMRSSSFLHYYF

SEQ ID NO: 263060 - protein, 113 aa, Glycine max
  Clone ID: PAT_MRT3847_79564C.1.pep
TCPCCWSQCHHQATAPRTSCSASSLPLDELQQFTQQIRDQLEEFITEKVTRQVMASFSHMQSQLQSQMQSQGLAVPPDPLVGPSGPRVSTQGSCVNPSGNDPETGDSDRCGLY

SEQ ID NO: 263061 - protein, 236 aa, Glycine max
  Clone ID: PAT_MRT3847_79565C.1.pep
RLEHLVEQALVLQREAGLFHNSLDKEMSLYSDHHCGKTQIPSRTSQISEAHDDEVWYVQFSHNGKYLASASNDRSAIIWEVDMNGELSIKHKLSGHQKSVSSVSWSPNDHGLVGCGVGEAVRRWDVSTGTCLQVYEKNGPGLISCAWFPSGKYILSGLSDKSICMWDLDGKEVESWKGQRTLKISDLEITGDGEHMLSICKDNSILYLNKETRDERYIDEDQTITSFSVSKDSRLL

SEQ ID NO: 263062 - protein, 47 aa, Glycine max
  Clone ID: PAT_MRT3847_79566C.1.pep
KGGKGLGKGGAKRHRKVLMDNIQGITNPTFLLLTTHNSINHIISLIY

SEQ ID NO: 263063 - protein, 73 aa, Glycine max
  unsure (1)..(73): unsure at all Xaa locations
  Clone ID: PAT_MRT3847_79567C.1.pep
NNQQHLGDLHGEHNGFPNVLHHGEHKGEHXGHQHHAEHKXALVHKIKAKIHGDGHDKGEKKKKKDKKKKEHGH

SEQ ID NO: 263064 - protein, 157 aa, Glycine max
  unsure (1)..(157): unsure at all Xaa locations
  Clone ID: PAT_MRT3847_79568C.1.pep
KSLTSSPLVPGSVTHNTVAYLNMAPVHDISTMPLPPLVXLTHDLGMAFPYAHGPITTQAXPRTKLSHRLYPCGAIGRLILQVLSVVAHYDRHLSHTDFLGTPSLTLLTTSNSDMEVAASAFGTTIHTVTPTMQALPPPPPKEGGRHTVMTGNLPGTE

SEQ ID NO: 263065 - protein, 64 aa, Glycine max
  Clone ID: PAT_MRT3847_79569C.1.pep
HVNWCEPHGVHTMRANVFGTLTLSNMCRDHGLILIIYTTGCILQYDSNHPFGSGVGLKETDSRD

SEQ ID NO: 263066 - protein, 82 aa, Glycine max
  unsure (1)..(82): unsure at all Xaa locations
  Clone ID: PAT_MRT3847_7956C.1.pep
FVVPGGXLARVQRAVCILIGGPAVVEVFSRLAHEFDLMYAKRAFVPWCVGQGMKEGEFFEAREALAALEKDYEEVGADWSGR

SEQ ID NO: 263067 - protein, 47 aa, Glycine max
  Clone ID: PAT_MRT3847_79570C.1.pep
GSLQRENPPTVMQLHAIGPMMPHTESPSAYSKQCSSNDDATLYQLFY

SEQ ID NO: 263068 - protein, 75 aa, Glycine max
  Clone ID: PAT_MRT3847_79571C.1.pep
LSLFKISRNSDVLEMFSQMGVPTKKTPYEVSEASDVVITMLPTSAQKKLAISSNWHSLTCECITSFLYSSSNWLR

SEQ ID NO: 263069 - protein, 229 aa, Glycine max
  Clone ID: PAT_MRT3847_79572C.1.pep
TNLTDLDLSSNGFTDLPETIGNLSSLKRLNVETNELEELPYTIGNCSSLSVLKLDLNQLKALPEAIGKLECLEILTLHYNRVKRLPSTMDNLCNLKELDVSFNELEFVPESLCFATNLKKLNLGKNFADLRALPASIGNLEMLEELDISDDQIKALPESFRFLSKLRVFRADETPLDLPPRELVKLGSQEVVQYMADFVTKRDAKLVPSKKKKKGFWFWFCSIFCPQLK

SEQ ID NO: 263070 - protein, 85 aa, Glycine max
  unsure (1)..(85): unsure at all Xaa locations
  Clone ID: PAT_MRT3847_79573C.1.pep
IVTTCALHATINFKHYPYGNLILNRPTLNKQCMPDKSGAEYXKLEKNPQKTDVETITPKCQTLINLSIIKMLWEHTSNEMDLKEK

SEQ ID NO: 263071 - protein, 55 aa, Glycine max
  unsure (1)..(55): unsure at all Xaa locations
  Clone ID: PAT_MRT3847_79574C.1.pep
HSTQTSXSSKPPSSNFHFSHLTPLFIFFHSSPKPKXRKLSLDGLQSIQDRERGSG

SEQ ID NO: 263072 - protein, 102 aa, Glycine max
  unsure (1)..(102): unsure at all Xaa locations
  Clone ID: PAT_MRT3847_79575C.1.pep
LTLVRYIQFNITFGAHRKIYIVKHTSNIKRSQGYSYTILSKHTSFTVLTDNISIITNPSIRPLTIHYFVKLITDIIYXQTSEVLKILLXNHIRDTFTYTEHS

SEQ ID NO: 263073 - protein, 81 aa, Glycine max
  Clone ID: PAT_MRT3847_79576C.1.pep
EVFFLLFFYLLKLQLGGSDGRSAAWNAVRATIHFHSSCSARFCPPSHLPILHTLEHKCSISAGQKIQNNCSTPNHYLLVDL

SEQ ID NO: 263074 - protein, 47 aa, Glycine max
  unsure (1)..(47): unsure at all Xaa locations
  Clone ID: PAT_MRT3847_79577C.1.pep
VLTTDGGGYLINEQEITGSRSILDQVASLPXCHXRPSKGRSGHLKSI

SEQ ID NO: 263075 - protein, 37 aa, Glycine max
  Clone ID: PAT_MRT3847_79578C.1.pep
GIYLYFKEIITKYNTHNESHIMLYFFPLINYVNTKMF

SEQ ID NO: 263076 - protein, 236 aa, Glycine max
  Clone ID: PAT_MRT3847_79579C.1.pep
MFNVFTLLRLICICWDMNKAVAIALIDLAPRLDYFQSAQQATTFPFVEAIKSVQTDNEMEPLLREMIAYGSKLDTAAAESSSSTSGGAGTSVGGGGGGGTGGRAATETATRAFALFISATVELNPRLMQRNLAFIMPFLKSDPPMLRNSVLFVFTEILLHCFDCQQLDQTMSDQRDMLFALLLDHMVDKSALVRARVLHLWAKLASKKGAIPPVQFRLGLLWEARGRLNDDSESVR

SEQ ID NO: 263077 - protein, 96 aa, Glycine max
  unsure (1)..(96): unsure at all Xaa locations
  Clone ID: PAT_MRT3847_7957C.1.pep
ESEELQEKYGSKELSXNCFEEQEPSLEEVKQDFDVFDENKDGFIDDEELQRVLCILGLKEAAKLENCHKMIRIFDTNQDGRIYFIEFVKIMENCFR

SEQ ID NO: 263078 - protein, 154 aa, Glycine max
  Clone ID: PAT_MRT3847_79580C.1.pep
MEPSAMYGHSQPLSMPSQIGGGESDDGSGNEHAVDGHHHHIQYETHALEDGAAVVVEDVTSDAVYVSGGGGPVESSQLTLSFRGQVYVFDAVTPDKVQAVLILLGGCELSSGGSPCVDPGAQHNQRGSMEFPKCSLPHRAASLHRFRQKRKERC

SEQ ID NO: 263079 - protein, 310 aa, Glycine max
  Clone ID: PAT_MRT3847_79581C.1.pep
MEPSAMYGPSQPLNIPSRIGAGERDDGSGNEPAVDGHHHHIQYETHALDDGAAGGAVVVEDVTSDAVYVSGGGGPEESSQLTLSFRGQVYVFDAVTPDKVQAVLLLLGGCELSSGGSPCVDPGAQQNQRGSMEFPKCSLPQRAASLDRFRQKRKERCFDKKVRYSVRQEVALRMHRNKGQFTSSKKQDGANSYGTDQDSGQDDSQSETSCKHCGTSSKSTPMMRRGPSGPRSLCNACGLFWANRGALRDLSKRNQEHSLPPVEQVDGGNDPDCRTAAADPAQNNLAAFSEPVNPALVADRKVFQSQKMLE

SEQ ID NO: 263080 - protein, 80 aa, Glycine max
  unsure (1)..(80): unsure at all Xaa locations
  Clone ID: PAT_MRT3847_79582C.1.pep
TLTAYNIQKESALHLPLRLCGGALKRLTKTYAKPKNIKHKHTKVKLCILQFYKGDQSXKVQRLRXECPNAECCAGTFRAT

SEQ ID NO: 263081 - protein, 102 aa, Glycine max
  Clone ID: PAT_MRT3847_79583C.1.pep
FLFFFLGLGAKRGGFGPPKRFFFSPREASVRFFFFLWKCCFFPGGCGGWGSFFCQEGALIFVEAAPTQMQFVLGGGGFYILVTQENGPVFLPGGVPVLFSNF

SEQ ID NO: 263082 - protein, 68 aa, Glycine max
  Clone ID: PAT_MRT3847_79584C.1.pep
VYMSREVIYEGAETQSQAYITRVLGLFQHKSMRITLAHGATHARANNHNFTSKHTKYKDFKLSLKKKR

SEQ ID NO: 263083 - protein, 60 aa, Glycine max
  unsure (1)..(60): unsure at all Xaa locations
  Clone ID: PAT_MRT3847_79585C.1.pep
EWNAWVGRSPPFEIRNENFPPREGILPSVPWDSRLLFRGFSWPVPAXRELTNGALVAGDV

SEQ ID NO: 263084 - protein, 106 aa, Glycine max
  unsure (1)..(106): unsure at all Xaa locations
  Clone ID: PAT_MRT3847_79586C.1.pep
VFDDKLGALCMQWLEDKVFSIRDAAANNXKRLAEEFGPEWAMQHIIPQXVLEKSTTPHYYTDDDLQXSPCXSXMGAEIHCQKCFKRHNSSKARFQQSCAKDYTVPC

SEQ ID NO: 263085 - protein, 513 aa, Glycine max
  Clone ID: PAT_MRT3847_79587C.1.pep
MKTQSASLLCLFLSLAILLASGTAASATPRSAVPSHHVSTFNRSLFPSTFLFGIGSSAYQAEGAASVDGRGPSIWDTYTRQHTEKIWDHSTGDMGADFYHRYKGDIKIAKEIGLDSFRFSISWSRIFPKGKGAVNPLGVKFYNNVIDEILANGLKPFVTLFHWDFPQALEDEYGGFRSPKVVADFRGYANFCFKTFGDRVKYWVTLNEPLSFSLNGYNGGTFAPGRCSKYVANCSAGDSSTEPYIVGHYLLLAHESAATLYKTKYQARQKGQIGITNPTHYFLPKSQSAADYKAASRALDFFFGWYSDPVFYGDYPESMKSSVGSRLPKFTKAESEGLKNSIDFLGVNYYTTYYAEHAEPVSANRTFYTDILASLSTERNGLHVGTPTDLNWLFIFPKGIHLLMAHIKDKYKNLPIYITENGMAESRNDSIPVNEARKDSIRIRYHDGHLKFLLQAIKEGVNLKGYYAWSFSDSFEWDAGYTVRFGLIYVDYKNNLKRYPKFSAFWLQKFLLK

SEQ ID NO: 263086 - protein, 78 aa, Glycine max
  Clone ID: PAT_MRT3847_79588C.1.pep
GLLNEDAYYNSVMAFMVKAVDEGLVSPAARLIIVSAHTAQDIMCKLEEYVPQHCGVAPKISWEMEQQLVNPAKSDISR

SEQ ID NO: 263087 - protein, 253 aa, Glycine max
  Clone ID: PAT_MRT3847_79589C.1.pep
NDFQPCVQSGRTRSLCPLIFPLLLLPPPPSSTKHSPNCAFAAMDYSDYSYQQQPQQHSYGYDPSQIPIQPYDQSYAAYQQYYAYNPQYAYYPNAHQTQFQFQPETAPLHPPGVNPAAPEPAPTGPSQYRGRGGRGGRPFRGAGRGRGHGRGHGMGGGRHIPSHSSGPAFSNVPARVQPPVPPRKVCCEICKVECNSPEILEQHKVGRKHQKNMRVHEESQRRNAINGQQSGKIPTSQLNLTVQPQGSSGVREK

SEQ ID NO: 263088 - protein, 190 aa, Glycine max
  unsure (1)..(190): unsure at all Xaa locations
  Clone ID: PAT_MRT3847_79590C.1.pep
MATVERILLALQNEGAGGESLLGSIKIAVMPIVKVFTMCSLGLLMASKYVNILPASGRKLLNGLVFTLLLPCLIFSQLGQAVTLEKMLAWWFIPMNVVLSSIAGSLIGFVVATIVRPPYPFFKFTIVQIGIGKFGNVPLVLISACAFRPIQSFXDMEKCSTDGXVYVSFGQRVFAFILYSYVFQMLAPSP

SEQ ID NO: 263089 - protein, 67 aa, Glycine max
  Clone ID: PAT_MRT3847_79591C.1.pep
FNTHPPLFLRSLHTHFTFHSFSKLLRKSNFQHNTKIISILKPPTNTQHQIHSLLLLDFLIIEGPSIL

SEQ ID NO: 263090 - protein, 130 aa, Glycine max
  Clone ID: PAT_MRT3847_79592C.1.pep
GPLKGVSLLRILGFKKNIFFQKLEKGFVLRGPTKFALYFLLAFFWEGYPLYLFLSISSSYYCGLEHPSFRKKVFKTVNFVPLKQLYTQNLYGLIGEVLDEVNAIPGLGGGGGGGGGGGGGGGGGGVGGRF

SEQ ID NO: 263091 - protein, 65 aa, Glycine max
  Clone ID: PAT_MRT3847_79593C.1.pep
TYISLNNIILTHFSHIPILQFFFLFYFHHIGYLILHSSICLSHTHTFSCKMCIIKLSYEQHFSSK

SEQ ID NO: 263092 - protein, 303 aa, Glycine max
  Clone ID: PAT_MRT3847_79594C.1.pep
LREDDRRGEGMWENILGKHQQSLKSLFLRSKPSSPNADAADDYANSPKPIPQLSPLANSVVSRCSKILGMSTQELQHCFDSELPMGVKELLTYARHLLEFCSYKALHKLIQISDFLNDKDFHRLTFDMMLAWEAPSVHTLPDTPSSSSSKEETAGDEDDASLFYSSSTNMALQVDDKKTVGLEAFSRIAPVCVPIADVVTVHNLFHALTSTSAHRLHFLVYDKYLRFLDKVIKNSKNVMAASAGNLQLAEGEIVLHVDGTIPTQPVLQHIGITAWPGRLTLTNYALYFESLGVGVYEKAVRYD

SEQ ID NO: 263093 - protein, 83 aa, Glycine max
  Clone ID: PAT_MRT3847_79595C.1.pep
GVRALTPVTMVVADCDARIMELAARNWCDVESDAPVLKPLTLTRPVLKMPCGTSKRQYGSLALRTPVPSSRMRISRAHEWTLC

SEQ ID NO: 263094 - protein, 85 aa, Glycine max
  unsure (1)..(85): unsure at all Xaa locations
  Clone ID: PAT_MRT3847_79596C.1.pep
TNNNNNNCHFGKRPRQAGPNFLAHSYGDKKNHSTDITKKRGPIITHQIHQPLLPNYKFKTNQVGNWFNGKRIIPHQKPSXHSYNN

SEQ ID NO: 263095 - protein, 50 aa, Glycine max
  Clone ID: PAT_MRT3847_79597C.1.pep
GEFFSGLRVYNFPIFSFGKFPPPRFVWPLITKDPFFATPAIIFLKQPKFM

SEQ ID NO: 263096 - protein, 93 aa, Glycine max
  Clone ID: PAT_MRT3847_79598C.1.pep
ASSNMAPPTDLRVIASEGFDLIDKFCGPSAPRRPNNMNGVFPARQGRWVVQVPNDELEEPMSVINSREAAARYGGIMIVNYPKKPKLGRSFKP

SEQ ID NO: 263097 - protein, 194 aa, Glycine max
  unsure (1)..(194): unsure at all Xaa locations
  Clone ID: PAT_MRT3847_79599C.1.pep
GPESPGRPTRPASASVVEQSVKGHDXNFSSRPLNSMTTYMXYNXENLAFAPYDPRGRFLRXISSVHMFSVKALADSIQLRXEEVERLTXNLARSGSTAXNLGRLANVCTTNTLASSIXMDGVLFNDSCSIWDAKADEFKSMAEELMVMNRVLNIGDFIPILDRVDLQRVKSKTKKLLKRFDTFLTSILEEHKDL

SEQ ID NO: 263098 - protein, 62 aa, Glycine max
  Clone ID: PAT_MRT3847_7959C.1.pep
LVTVSFVNSSKCSQLYELLQPILSLRLINNVTHGMIQHTSLRSKPWPTRPPTRLRTRGRTRG

SEQ ID NO: 263099 - protein, 94 aa, Glycine max
  Clone ID: PAT_MRT3847_795C.1.pep
CDLLKWGKSRNFLSSLIKICSFFSHFASNIVFNITILPPHDPTRPVKGVRVSRFPLYTAKQELCPGTFTFRNRFLQKFAIVERSVRALVVQDES

SEQ ID NO: 263100 - protein, 111 aa, Glycine max
  Clone ID: PAT_MRT3847_79600C.1.pep
MALCRRPYAYSKVDKEDPEDIIHRRAQFLIHKVLEQADSRRKPSCLRIRISKMKVKIGKRLRRLRRRIMSGVSAARLGFHGHVMSQIKTWKRLFSRGRQSQTLITLPPLIK

SEQ ID NO: 263101 - protein, 75 aa, Glycine max
  Clone ID: PAT_MRT3847_79601C.1.pep
KKKARKKRRTYDRHDDGDDELLDYDSASQKLVFPSNTRSWLLSTDGYSSAWSSVDLPEYLHRHCLSRWMTWLFEK

SEQ ID NO: 263102 - protein, 76 aa, Glycine max
  Clone ID: PAT_MRT3847_79602C.1.pep
YYRVAHCFVSIIFRFRSEWVRASPHRSSVGIIFMSTASCNRVKVDALAGCPCPSAFNVDLSLFLSHRTMYLRIRKF

SEQ ID NO: 263103 - protein, 153 aa, Glycine max
  Clone ID: PAT_MRT3847_79603C.1.pep
MCSHSPNHRSKCSAPAPATIIFLFVPLLCSVSFTNVNSQILEACSAATDCGPGLFCGNCPALGLKQPICTRGQATLPTSIVNGLPFNKYTWIVTHNFFSIVDAPPLPGVQRITFYNQEDTVTNQLRVCVVWLLCKLQMLAFLLNFCFSCVLVA

SEQ ID NO: 263104 - protein, 207 aa, Glycine max
  unsure (1)..(207): unsure at all Xaa locations
  Clone ID: PAT_MRT3847_79604C.1.pep
IRLXSAFLTENPTEIVTIIIEDYVHTPKGLTNVFTSAGLDKYWFPVSKMPKKGDDWPTVTEMVQANHRLVVFTSDASKEAGEGIAYQWKHMVENESGDPGVQQGSCPHRKESKALNSKSHSLFLMNYFPTYPVEADSCKEHSAPLAEMVNTCYKAAGNLMPNFIAVNFYMRSDGGGVFDIVDKMNGHTLCGCSTVTACQVGVPFGSC

SEQ ID NO: 263105 - protein, 116 aa, Glycine max
  unsure (1)..(116): unsure at all Xaa locations
  Clone ID: PAT_MRT3847_79605C.1.pep
VGGLPSLSRYSSSFIVVAGGGXPLPTVGPYGFPGGLAFRDGVDASGGSGLGMGVYHLVVAYCADVFGRRPICVSLGWSPPCDVYAGRPTGLAFWAVTALGVLACGALVAYGTRAVG

SEQ ID NO: 263106 - protein, 69 aa, Glycine max
  Clone ID: PAT_MRT3847_79606C.1.pep
SNFANHNYCKLENRNNTPLCNEKRKNVTHPELQYLEFDLYIQEYKYNYNIPELLIAPDKFLVSHDYQLK

SEQ ID NO: 263107 - protein, 158 aa, Glycine max
  unsure (1)..(158): unsure at all Xaa locations
  Clone ID: PAT_MRT3847_79607C.1.pep
MCSHSPNHRSKCSAPAPATIIFLFVPLLCSVSFTNVNSQILEACSAATDCGPGLFCGNCPALGLKQPICTRGQATLPTSIVNGLPFNKYTWIVTHNSFSIVDAPPLPGVQRMTFYNQEDTVTNQLRNGVRGLMLDMYDFXDDIWLCHSFRGQCYNFTA

SEQ ID NO: 263108 - protein, 175 aa, Glycine max
  Clone ID: PAT_MRT3847_79608C.1.pep
MLERCLGPRRVRQMQRGCRHSTVTFLCLFLTLVVLRGTIGAGKFGTPEQDFNEIRHHLSAARARRVLEETKPESSSESNSNSNNYATFDLSKILVDEPPSDDEKPNPNAPYTLGPKISNWDEQRASWLSNNPDYPNFIGPNKPRVLLVTGSSPKPCENPVGDHYLVKSIKNKIDY

SEQ ID NO: 263109 - protein, 98 aa, Glycine max
  Clone ID: PAT_MRT3847_79609C.1.pep
KCQMKLEVIMICHENPPQMGLGFHLVHKALVVCNCNKIYVFESHKVEGRCLRSTHLTQPYWPFIWLACFLGIICFPLTMAKSTTREHDCEANTYVAFE

SEQ ID NO: 263110 - protein, 151 aa, Glycine max
  Clone ID: PAT_MRT3847_7960C.1.pep
MGRHLRMMVRAEEQVSKPGEFSHQENESKGSIDSENYLERDEVKMVMAKLGFFCSSESEELQEKYGSKELSELFEEQEPSLEEVKQAFDVFDENKDGFIDAEELQRVLCILGLKEAAKLENCHKMIRIFDTNQDGRIDFIEFVKIMENRFR

SEQ ID NO: 263111 - protein, 416 aa, Glycine max
  Clone ID: PAT_MRT3847_79610C.1.pep
MCSSHSPNHRSKCRAPAPANAIIFLLVPLLCSLSFINVNSQILEACSAATDCGPGLFCGNCPALGLKQPICTRGQATLPTSKVNGLPFNKYTWIMTHNSFSIVDAPPLPGVQRLTFYNQEDTVTNQLRNGARGLMLDMYDFENDIWLCHSFRGQCFNFTAFQPAINTLREVEAFLTQNPTEIVTIVIEDYVHTPKGLTNVFTSAGLDKYWFPVSEMPKKGEDWPTVTNIGQMVQANHRLVVFTSDASKEAGATIAYQWKHMAKAESGKRHSLFLMNYFPTYPVEVDSCKEHSAPLAEMVNTCYKAAGNLLPNFIAVNFYMRSDGGGVFDIVDKMNGHTLCGCSTVTACQAGAPFGSCKNISVPSTSPVTNTAGSFTGSVQFSKSASSVHLPNFLLLVVFYFLQSLAAAVMTISTVL

SEQ ID NO: 263112 - protein, 50 aa, Glycine max
  Clone ID: PAT_MRT3847_79611C.1.pep
RVLRIGVLSRPSPVSPCTAFIGTHGDSVVFAPFSLGVLGCSYRRKPPLGM

SEQ ID NO: 263113 - protein, 113 aa, Glycine max
  Clone ID: PAT_MRT3847_79612C.1.pep
MGCSHSRLDDEEAVRPCKDRKKFIRQAVEQRTQFATGHIAYIESLKRVSAALRNYIEGDEPREFSLDTVITPPFTPVKRKTGSGFIPISAKPFATTGAIEFGIGPNSTLKVNY

SEQ ID NO: 263114 - protein, 59 aa, Glycine max
  Clone ID: PAT_MRT3847_79613C.1.pep
RLEGRSTPYNEVEGKRQSFDHEVCVEKESVRERERSVCEQRKTLRKKKATVKTQGGRKQ

SEQ ID NO: 263115 - protein, 80 aa, Glycine max
  unsure (1)..(80): unsure at all Xaa locations
  Clone ID: PAT_MRT3847_79614C.1.pep
RERLWKGNLSFDIRSRSRXENVSSTKAHFVSGSTFQYDIVRAGXHSSEDFPDKEDLEEPKKIGVTLSRRMDPPCNEVHGQ

SEQ ID NO: 263116 - protein, 54 aa, Glycine max
  unsure (1)..(54): unsure at all Xaa locations
  Clone ID: PAT_MRT3847_79615C.1.pep
LSYPXXXXXNMXLXSKCXRXGGKGXADXXLXLLIFRGTXLWXKHQNTXTAWPSL

SEQ ID NO: 263117 - protein, 116 aa, Glycine max
  Clone ID: PAT_MRT3847_79616C.1.pep
CSSPGRSAPPAGGCSRIFYATSDVSHSLFVDDSLSLHTIPFRRRLFQYHLNSRGCCFLQSRFPPWASSFIQVCLFQLCRIDLFMFPKRGGRLFRTGKQHLVPSSVWALIHVKEQNK

SEQ ID NO: 263118 - protein, 50 aa, Glycine max
  Clone ID: PAT_MRT3847_79617C.1.pep
RLLIQSLSPLPLIWVHFFCEGKDPLFPPLKNVSSFELIQQNMAIKQIFCH

SEQ ID NO: 263119 - protein, 69 aa, Glycine max
  Clone ID: PAT_MRT3847_79618C.1.pep
SLRCWRVGLSSLKMDTRSEQKNSLLHQHRAHTKKGIRKPTPVCLPYGNSKEQNYQSCLLEFSTWAFQDI

SEQ ID NO: 263120 - protein, 62 aa, Glycine max
  Clone ID: PAT_MRT3847_79619C.1.pep
SIKSIRNTNLHLCTSPLHKYKQLLPYEHNFLKVTYQVRTFVFVRKKNKYKPLDYIGMVKSQD

SEQ ID NO: 263121 - protein, 207 aa, Glycine max
  Clone ID: PAT_MRT3847_7961C.1.pep
MVILREIDFLISEGKASQNDGNSTSPLLGLVDLSLYYTCFYKLQSFFLSFWVFLLYQLFPNDSKVRAEEQVSKPGEFSHQENESKGSIDSENYLERDEVKMVMAKLGFFFSSESEELQEKYGSKELSELFEEQEPSLEEVKQAFDVFDENKDGFIDAEELQRVLCILGLKEAAKLENCHKMIRIFDTNQDGRIDFIEFVKIMENRFR

SEQ ID NO: 263122 - protein, 34 aa, Glycine max
  Clone ID: PAT_MRT3847_79620C.1.pep
HAFALIVSLRVIIYPITWALSQFSGALGSEKDLP

SEQ ID NO: 263123 - protein, 87 aa, Glycine max
  Clone ID: PAT_MRT3847_79621C.1.pep
VGSPPRAPKVKAGVFPPRGLPNAPPAPGSFFPFVRGNPPVDLVRVPDALRAFKAFSQLRLDPPPHPPFGAPLKKAPQPGKEPQKGGP

SEQ ID NO: 263124 - protein, 93 aa, Glycine max
  unsure (1)..(93): unsure at all Xaa locations
  Clone ID: PAT_MRT3847_79622C.1.pep
KNPEICPRAPLLKFFRGTKTFFNFWTPLGPPPGGPNFWPRGXKPKNAPPKKKPLLGGNNLSPQGPVFPNKNRPPQGPHFCGRKKPRLTHHGPQ

SEQ ID NO: 263125 - protein, 55 aa, Glycine max
  unsure (1)..(55): unsure at all Xaa locations
  Clone ID: PAT_MRT3847_79623C.1.pep
MPMRNIAVGRPEEATQPETLKAALARFISGLSGGCAGSGSGIAXNKLSDNGAATP

SEQ ID NO: 263126 - protein, 107 aa, Glycine max
  unsure (1)..(107): unsure at all Xaa locations
  Clone ID: PAT_MRT3847_79624C.1.pep
EVEVPEAKKEVQVTPEKTAPEVAEEKKAVAVQVREEKKESEVKEEEKGREVPEEKKEVEVPEEKTEAAVIVQEKXXVEVPGDKKEVEVTEGKKEVEPPEEKKEPEVP

SEQ ID NO: 263127 - protein, 63 aa, Glycine max
  Clone ID: PAT_MRT3847_79625C.1.pep
RLVIVPLEASPVEGKSSMPGMSSRPALMFCSESNMRTQCLLWSSTLSSSSNNEVWHLGREEWS

SEQ ID NO: 263128 - protein, 66 aa, Glycine max
  unsure (1)..(66): unsure at all Xaa locations
  Clone ID: PAT_MRT3847_79626C.1.pep
GSKFGSGENKLVMCHRLKFXSCTSCACHEIRETTAFMDQLWAVDGTKAQALAICHSHTFELQHEML

SEQ ID NO: 263129 - protein, 63 aa, Glycine max
  Clone ID: PAT_MRT3847_79627C.1.pep
WAKMQEPTLSTKFPKALNNPHYFFSLNKKIKLIVFVPCNSQIPKWLIFNNPHKVWCEHGIMSV

SEQ ID NO: 263130 - protein, 393 aa, Glycine max
  Clone ID: PAT_MRT3847_79628C.1.pep
METVVGIEDNDDGKFEDSGVDRSSSALSSPKQIANPIVYKLVRVEGDGRLVPATDDEVMEVGDFLEYENSEMHVVANTGQSLECISIERSSSGKLRLECKEGTAEADLGELNAKLQILQKVKEEKQRISCGSPAHSHVNIDSQCSADKFPVMDGKVQSETPFQEIPPEASSLNYTHSNQSGSIDQCSRPSEGVIESGSSASAVYSNLKSDLSMSDGEICLDKLSIRELHELFKVTFGRETTVKDKQWLKRRIAMSLTNSCDVSATTFIIKDNKIVRKFEEDSSGNMNAGSLISSENMTEEDVNFKDSSAVDACGIDDNQVVSETRSENGLEYENYQTGQRAAKRIRRPTKRYIEELSENESREHNPRLSISNKPMGLGHVSPILMSGLLEMLF

SEQ ID NO: 263131 - protein, 77 aa, Glycine max
  Clone ID: PAT_MRT3847_79629C.1.pep
NKRTAILILHSLMLIYCNIYMEFIQIFLPRGLPPKNKHLPKKREKKGCGEGNLANKHLRQGYNKYMKNPGGNRINRP

SEQ ID NO: 263132 - protein, 93 aa, Glycine max
  unsure (1)..(93): unsure at all Xaa locations
  Clone ID: PAT_MRT3847_7962C.1.pep
SASLFLHLFFHFPQIFQTPTCPIFFCIFTNHFFKSSQQKKKXHFLXYXXGIYHSIXGXWNETFXVXXCGPSSSSXLTYLHLFLKXVSPXXAXP

SEQ ID NO: 263133 - protein, 114 aa, Glycine max
  unsure (1)..(114): unsure at all Xaa locations
  Clone ID: PAT_MRT3847_79630C.1.pep
METVVGIEDNDDGRFEDSGVDRSSSALSSPKQISNPIVYKLVRVEGDGKLVPATDDEVMEVGDFLEYENSEMHVVTNTGQSXECISIERSSSGKLXLECLEGTRADLKLNAKLQ

SEQ ID NO: 263134 - protein, 43 aa, Glycine max
  Clone ID: PAT_MRT3847_79631C.1.pep
HASDHASEKKTTTKKKKNGVPDNLDDRILGSHAFDVITTQSDS

SEQ ID NO: 263135 - protein, 65 aa, Glycine max
  Clone ID: PAT_MRT3847_79632C.1.pep
LYCHYTGITKQQITITLKDMPPLITQTDEECPKISLEKYLTIVDYQMGKEVLITKLIGFKLFPKS

SEQ ID NO: 263136 - protein, 166 aa, Glycine max
  Clone ID: PAT_MRT3847_79633C.1.pep
FPLACHLIKVQKNLIRGLNQNGGNLPRSLGREGPVEKEGGPPPLAIRPHPPETILEPLPGPAQGEVIDQPLENHTWGSKTLQRSPAPPQNHERPPPIPPKPKGRPLMNKMLAFAPEKNRPIGSKKHQLVKNSPRPPPNWKTGRMTLESQPPKRRPMGGMETFRALP

SEQ ID NO: 263137 - protein, 85 aa, Glycine max
  unsure (1)..(85): unsure at all Xaa locations
  Clone ID: PAT_MRT3847_79634C.1.pep
MPRQLLATRYVAIPEDVKLVLDGRKVTVSGKRGELRRDFRHLTXDMRRVNKEQLRVDLWFGNRKQLACVRTICSLIENMITGVRV

SEQ ID NO: 263138 - protein, 163 aa, Glycine max
  Clone ID: PAT_MRT3847_79635C.1.pep
MDAFRLSHSFMLSTNIHSPSSLCTLRSLSTNPRNRWFKVEATAGGSQKKNNNKAFDAAAFEAERLALDAEARRTMADAADPKAWKWIIRKRIWDMMEARNFANNPRPVHHRIPNFVGASVAAEKMRELDVFQDAQCVKVNPDSPQKQVRFLTLSDGKKVLTPQ

SEQ ID NO: 263139 - protein, 253 aa, Glycine max
  Clone ID: PAT_MRT3847_79636C.1.pep
DIGGCDIQKQEIREAVELPLTHHELYKQIGIDPPRGVLLYGPPGTGKTMLAKAVANHTTAAFIRVVGSEFVQKYLGEGPRMVRDVFRLAKENAPAIIFIDEVDAIATARFDAQTGADREVQRILMELLNQMDGFDQTVNVKVIMATNRADTLDPALLRPGRLDRKIEFPLPDRRQKRLVFQVCTAKMNLSDEVDLEDYVSRPDKISAAEIAAICQEAGMHAVRKNRYVILPKDFEKGYRTNVKKPDTDFEFYK

SEQ ID NO: 263140 - protein, 74 aa, Glycine max
  Clone ID: PAT_MRT3847_79637C.1.pep
FQVCTANMHLSDEVDLKKYVSRPHKISAAEISAICQEDEMHAVRKNRYVMLPKDLQKGYRTNVKKPDTDFEFYK

SEQ ID NO: 263141 - protein, 422 aa, Glycine max
  Clone ID: PAT_MRT3847_79638C.1.pep
MGSSAMVLDPKPSSEPPPFLPSTKSDYLQGSFGGDATASDEDDLYSRLKSLQRQLEFIDIQEEYVKDEQKNLKRELLRAQEEVKRIQSVPLVIGQFMEMVDQNNGIVGSTTGSNYYVRILSTINRELLKPSASVALHRHSNALVDVLPPEADSSISLLSQSEKPDVTYNDIGGCDIQKQEIREAVELPLTHHELYKQIGIDPPRGVLLYGPPGTGKTMLAKAVANHTTAAFIRVVGSEFVQKYLGEGPRMVRDVFRLAKENAPAIIFIDEVDAIATARFDAQTGADREVQRILMELLNQMDGFDQTVNVKVIMATNRADTLDPALLRPGRLDRKIEFPLPDRRQKRLVFQVCTAKMNLSDEVDLEDYVSRPDKISAAEISAICQEAGMHAVRKNRYVILPKDFEKGYRTNVKKPDTDFEFYK

SEQ ID NO: 263142 - protein, 84 aa, Glycine max
  Clone ID: PAT_MRT3847_79639C.1.pep
RFCGASYFFLFNINICAKNYTLPTDIAKLLQSHLPILTKLHAVFLFFLFFFLLFNFIFFFFFILYFIMFFFLLFLFFFIFFVFR

SEQ ID NO: 263143 - protein, 271 aa, Glycine max
  Clone ID: PAT_MRT3847_7963C.1.pep
MCTLTTVPVLPSKLNKPSLSPHHNSLFPYCGRRVGKKNKAMVPVARLFGPAIFEASKLKVLFLGVDENKHPGNLPRTYTLTHSDITAKLTLAISQTINNSQLQGWYNRFQRDEVVAQWKKVKGRMSLHVHCHISGGHFLLDILARLRYFIFCKELPVVLKAVVHGDENLFNNYPELQDALVWVYFHSNIPEFNKVECWGPLKEASAPIGGAKEESEQETLLSKEGLAIPQPCQEECECCFPPLTLSPIQWSQQVPSHHYEPCDGIETQQSL

SEQ ID NO: 263144 - protein, 47 aa, Glycine max
  Clone ID: PAT_MRT3847_79640C.1.pep
RRQTNISIPYTWFIFLFIHILSLDPDGSMHAGRGQTVPSAPNSLLFL

SEQ ID NO: 263145 - protein, 274 aa, Glycine max
  unsure (1)..(274): unsure at all Xaa locations
  Clone ID: PAT_MRT3847_79641C.1.pep
MLQVESLVSACAGGSSDRKIACETLSDNVHPTDPPEPHPDSPPESFWLSRDEEYDWWDRNAVYERKESTKASNNNSTNLNPAINSNNNSQRFSLNFKSKASTIIGLPKPQTTSFVDAKRRRNNNKPSSIFXPQTQRLXSKSGFGLPASPSVYGTCMVRSKSNRDRKLRSSRKFALFLFSGPVEKINRTGKKPIFWPRTQILRXKSGAINYSSRARHSTSSLNEVSLEEPVSRNSVSESEPPGLGGMMRFASGRRSESWGVGDSEGHVAHSIGRS

SEQ ID NO: 263146 - protein, 40 aa, Glycine max
  Clone ID: PAT_MRT3847_79642C.1.pep
ASVFIYEHLDTLRDLLGHPSKKLLSLDFSQSFCSQFGASR

SEQ ID NO: 263147 - protein, 205 aa, Glycine max
  unsure (1)..(205): unsure at all Xaa locations
  Clone ID: PAT_MRT3847_79643C.1.pep
NFKSKASTIIGLPKPQKTSFVDVKNRRNHNKPSNIRLFPKRSVSVGKSESGLVEPSSPKVSCMGRVRSKRDRNRKLRSSRKSSPDTDAKEKHSRSGKKPGFFESFRXSIFRSGRKDKSDRKKTDLLATDSNIETKSGAINYSSRARHSTSSLNEVSLEEPVSRNSVSESEPPGLGGMMRFASGRRSESWGVGDSEGHVAHSIGRS

SEQ ID NO: 263148 - protein, 47 aa, Glycine max
  Clone ID: PAT_MRT3847_79644C.1.pep
FEKHCAVKAICISKKFSGPIIESSCQFVHKQRAPSHGNFLQLRQFES

SEQ ID NO: 263149 - protein, 43 aa, Glycine max
  Clone ID: PAT_MRT3847_79645C.1.pep
EKRGQNPPLIFRFHGANFYQTGFNLPPDNQKGEAGPKLAFYFG

SEQ ID NO: 263150 - protein, 60 aa, Glycine max
  Clone ID: PAT_MRT3847_79646C.1.pep
KAPVVLKHGMFELVVCKHFSLFPKSHNKLTFLKKFFSPGFKIKFPLIIVIIWPVFWELIN

SEQ ID NO: 263151 - protein, 143 aa, Glycine max
  Clone ID: PAT_MRT3847_79647C.1.pep
CFFSSDQFRGYDGWFETSKKILGYRGFYPEIGMKVLVEKSLISYHRGKICMHDLLKELGKTIVREKTPKEPRKWSRLWDYKDLQKVMIENKEAKNLEAIVIDIEKYQEEFLQRTMTVDALSKLIHLKLLMFKNVNFSGILNYL

SEQ ID NO: 263152 - protein, 111 aa, Glycine max
  unsure (1)..(111): unsure at all Xaa locations
  Clone ID: PAT_MRT3847_79648C.1.pep
VVFQHRFFSRKPASVVFPSMRAVAHSLGFQARTCSYRMRVWGLSADEASSVSVILEICAVAPAFXMVVIQDAAADAGAFLKFGQIFCSHVEGIIWNPPHGASLSRLSTADS

SEQ ID NO: 263153 - protein, 92 aa, Glycine max
  Clone ID: PAT_MRT3847_79649C.1.pep
HVASHYKFLKFSVQILLVHYFQPYYSYIVFNQLNKPEIPVPTRKHMLNVVKLSRGKLSGKLLKKLWHNTAAIHGFHQRFNELSREAVLRKVA

SEQ ID NO: 263154 - protein, 293 aa, Glycine max
  Clone ID: PAT_MRT3847_7964C.1.pep
MGTLTTVLCSLSFIKVLFYLRIFLLKDWNNRNMGTLTTVPVLPSKLNKPSLSPHHNSLFPYYGRRVGKKNKAMVPVARLFGPAIFEASKLKVLFLGVDENKHPGNLPRTYTLTHSDITAKLTLAISQTINNSQLQGWYNRFQRDEVVAQWKKVKGRMSLHVHCHISGGHFLLDILARLRYFIFCKELPVVLKAVVHGDENLFNSYPELQDALVWVYFHSNIPEFNKVECWGPLKEASAPTGGVQEEGLAIPQPCQEECQCCFPPLTLSPIQWSKQVPSRHYEPCDGIGTQQNL

SEQ ID NO: 263155 - protein, 124 aa, Glycine max
  Clone ID: PAT_MRT3847_79650C.1.pep
MDLIHKFLNIVASITTFFFLCLFLPPYWTFKFFLYITNYIFSENVAGKVIHITGASSVIGEHLAYEYAKRGACLALSARRETAVLREVADRTRDCGSPDVIIMRADVSKVEDCFRLVDETVNHF

SEQ ID NO: 263156 - protein, 53 aa, Glycine max
  Clone ID: PAT_MRT3847_79651C.1.pep
KKTIQAVISYALPLIIIQQSSLMLRLATSSKVEVLVFEAIDTAYGIAAAVLQK

SEQ ID NO: 263157 - protein, 114 aa, Glycine max
  Clone ID: PAT_MRT3847_79652C.1.pep
SPLDSLCQFSPKVLGMMAKESAQINILLPSLVVPEEAATDHELQKPVEEEESLWRAHMMACILRTLRVTTDILYTKICWNPGAKDYHHRVVDACFSMVTHYERRALSTSSIQSD

SEQ ID NO: 263158 - protein, 119 aa, Glycine max
  unsure (1)..(119): unsure at all Xaa locations
  Clone ID: PAT_MRT3847_79653C.1.pep
AKDVEAQEQGGEHSAKDYQDPPPAPLIDPEELTQWSFYRALIFVFIETPLFLYVTVLTIIGHQRQTDTTVCAPDCDGDGILGIAWANGGMIYILAYXNAGISGGHLPPAATFGMPLGSK

SEQ ID NO: 263159 - protein, 47 aa, Glycine max
  Clone ID: PAT_MRT3847_79654C.1.pep
SWRFFGRFMGLGKFHKCPTGNSVITHKLVKMGTRQIFPISTLLNLGQ

SEQ ID NO: 263160 - protein, 85 aa, Glycine max
  unsure (1)..(85): unsure at all Xaa locations
  Clone ID: PAT_MRT3847_79655C.1.pep
WLDHPQXLXSSPXXPSXLSLPVRLSXXSPXSXXSXLLVSKXLPLGPSXYGLTFSFAXDSXPLXNIXTXXXNXCXIHSXHXXXIPX

SEQ ID NO: 263161 - protein, 97 aa, Glycine max
  unsure (1)..(97): unsure at all Xaa locations
  Clone ID: PAT_MRT3847_79656C.1.pep
XFXPLETVITPLEAEIKMYRNEIASLQEDKKALERLTKSKEAALLEAEKILRSXALERVLIVEEVQNENFDLKRQIEICQEENKILEKTLRQKILEV

SEQ ID NO: 263162 - protein, 715 aa, Glycine max
  Clone ID: PAT_MRT3847_79657C.1.pep
MGSKWRKLKLALGLDSCVHIPRAFDDSSAAAARFSGGISPTVVSPAGDTSGYRPSTPTPSSSGLWLPKSGTKSPKGTCAICLYTMKPGQGHAIFTAECSHSFHFHCITSNVKHGNQICPVCRAKWKEVPFQNPASNMPHDQLNQVSPREEGWTTVLRRLPSPQGDAARQISSLYHVTEPAIFDDDEALDQQTSVTHPKNEIDNDVINTVEIKTYPEVSSVPKSASRDAFAVLIHLKAPHSGRKQNIDANSTESSPLVENSRASVDLVTVLDVSGSMAGTKLALLKRAMGFVIQNLGPSDRLSVIAFSSTARRIFPLRQMTDTGRQQALQAVNSLVSNGGTNIAEGLRKGTKVFSDRRWKNSVSSIILLSDGQDTYTVNSRPNVGTDYLSLVPNSIHRNNGTGMQIPVHAFGFGSDHDATLMHSISEISGGTFSFIEAEDVIQDAFAQCIGGLLSVVVQELQVQVRCVHPQLQLSSVKAGSYQTSLMGNARLATISVGDLYAEEERDFLVTVNVPVDQSSDETSLLTVRCLYRDPITKEMVAGSRNSEVRILRSDVGGGELVVSIEVDRQRNRLRAAEAMAEARVAAERGDLSTAVSVLDSCHTALSETVSAKAGDRLCVALSAELKEMQERMANQRVYEQSGRAYVLSGLSSHSWQRATARGDSTDSTSLVQAYQTPSMVDMVTRSQTMVFGAPVPQNKRVLRPAKSFPERQRRQ

SEQ ID NO: 263163 - protein, 203 aa, Glycine max
  unsure (1)..(203): unsure at all Xaa locations
  Clone ID: PAT_MRT3847_79658C.1.pep
SINSTDQYLTNVLLKINSKLGGINSLLTIEHSGHLPLIKDIPTMILGMDVSHNLPGRLDSPSITAVVGSRHWPLIXRYRASVRTEXQASKEEMIDALYKPLENESDDGIIXAYQHLGEVNVPKFTVIVAQXNHHTKLFLPNGPENVPPGTAVDTTITHPXYDFYMCAHAGMLEPKEHNCNLSCGTHMLCSPCCSSDGTTFEFR

SEQ ID NO: 263164 - protein, 52 aa, Glycine max
  Clone ID: PAT_MRT3847_79659C.1.pep
AFVHNTSKVRFLKLIQRLTYSIIIKFYTIGIFLILYEEYLESKHIMFNNYGA

SEQ ID NO: 263165 - protein, 110 aa, Glycine max
  unsure (1)..(110): unsure at all Xaa locations
  Clone ID: PAT_MRT3847_7965C.1.pep
MKSAMFFAPYVFSDYTTLIXYLSXAIEAMLFIEGSXFENGGTYDIXRDVTKHDGTRAAITGNDRCPITAAQSLIELERGKETIIFVEYIIRFIVEGQPTSRRFDAFTNIK

SEQ ID NO: 263166 - protein, 45 aa, Glycine max
  Clone ID: PAT_MRT3847_79660C.1.pep
YATSYVQFLAIDNNAENELRYLLAGLIDIVISQICAQAHVLAFAG

SEQ ID NO: 263167 - protein, 71 aa, Glycine max
  Clone ID: PAT_MRT3847_79661C.1.pep
TGQTEVEAFFIGPPTRKGLSNSKAQTGVCPRCFKVELDFARVLCCQWGSHPQGSPAFFSSKKRNGKFFSWG

SEQ ID NO: 263168 - protein, 95 aa, Glycine max
  Clone ID: PAT_MRT3847_79662C.1.pep
KPIIYIQFIPTHIPTIITCIHSAKQFVQKLITKQTKIFQTSNKTTSTRGKQTRCISIRHVFPTRDKNRYLHALIHRTNFLTNTIQVTTTIYKKIS

SEQ ID NO: 263169 - protein, 62 aa, Glycine max
  Clone ID: PAT_MRT3847_79663C.1.pep
VVKCSRNGTSFNLGPKASSVEATGVWGPVQLCIQSLEVSVGGEVPPHLKMIRVGNIGLFLMR

SEQ ID NO: 263170 - protein, 63 aa, Glycine max
  Clone ID: PAT_MRT3847_79664C.1.pep
FSLVFSLGGFEELFYIELCFLFLSADFGGEMSSYLGVGVSPGNVPVYHSTNVKVLDRKIKITE

SEQ ID NO: 263171 - protein, 112 aa, Glycine max
  Clone ID: PAT_MRT3847_79665C.1.pep
YLLLAALQLSITDSAKDQSSQSDMSKLLADQSFVSSILASLPGVDPNDPSVKDLLASMQNQSEVSLSMKKNILDLKGISFRKFQCRPVNANLEHLCPNCVMHTLEFYKLDYM

SEQ ID NO: 263172 - protein, 90 aa, Glycine max
  unsure (1)..(90): unsure at all Xaa locations
  Clone ID: PAT_MRT3847_79666C.1.pep
RAESARVSSFVVHPVTMSQTVVLKVGMSCXGCVGPVKKVLGKLDGVESYALDLKEQKVVVKGNVQPDPVLQPVSKTGKKTPFWEGEAAPF

SEQ ID NO: 263173 - protein, 141 aa, Glycine max
  Clone ID: PAT_MRT3847_79667C.1.pep
LQHIILLLLLLLLLLLLLPRINHSLTIMGRDSHDPTSFHSSIALLQERFRQLQRVKEMREERELQKMLNEPKQFSSNTTTSMSRTYHNSNNSILSHPELIMPSKSPPHVSLSLWPTSQGKQEDYRSAQTPVSMNYAHSQSM

SEQ ID NO: 263174 - protein, 93 aa, Glycine max
  Clone ID: PAT_MRT3847_79668C.1.pep
SNISSFVVHPVTMSQTVVLKVGMSCEGCVGAVKRVLGKLDGVESYDIDLKEQKVVVKGNVQPDTVLQTVSKTGKKTTFWEGEAATSETSTATA

SEQ ID NO: 263175 - protein, 63 aa, Glycine max
  unsure (1)..(63): unsure at all Xaa locations
  Clone ID: PAT_MRT3847_79669C.1.pep
PTLXKTXNSLTIINTYISQHRSFYIPFSPSYSLFYSFIFSFHISIISLTFNFFYLFSSYPFSF

SEQ ID NO: 263176 - protein, 77 aa, Glycine max
  Clone ID: PAT_MRT3847_7966C.1.pep
KSKAINLPKKENTMYMIDSKTTFISNHHNALSLSLSLSLYIYIYIYIYNIPNFFLINIMLFYLLMIYNYSITIFNID

SEQ ID NO: 263177 - protein, 59 aa, Glycine max
  Clone ID: PAT_MRT3847_79670C.1.pep
KLNQPSRNAGLFEVVISWHYLCSGLVMIVSPVANAQDSPTDYVNAHNGCSSDVSVHNLA

SEQ ID NO: 263178 - protein, 53 aa, Glycine max
  Clone ID: PAT_MRT3847_79671C.1.pep
RSCQNNHRNRHISKTLETESINPKTLIPSEEYLNLHSPFCRLLAAVRTRGSTR

SEQ ID NO: 263179 - protein, 45 aa, Glycine max
  Clone ID: PAT_MRT3847_79672C.1.pep
VAERYLQEHYSKEGHASSCFLVVDARTRICRGYASVTMVSAEDAD

SEQ ID NO: 263180 - protein, 100 aa, Glycine max
  Clone ID: PAT_MRT3847_79673C.1.pep
MGVNMSVEGKGSPRCAILIPYVAPAEQAQSADTYFDSFPGEVRWQKGATDIDDWKSVVYEPLHTKTRLMETAKAWELNLPSDKISDVATTTDERLRGTEH

SEQ ID NO: 263181 - protein, 66 aa, Glycine max
  Clone ID: PAT_MRT3847_79674C.1.pep
KQVGVTAIKPTFQPLFCLLELIPGARMHTMKHVFQNHQQSGLYFYNVIHILQIQNSSRMQHINCLC

SEQ ID NO: 263182 - protein, 99 aa, Glycine max
  Clone ID: PAT_MRT3847_79675C.1.pep
ARIRLRPFYYQPFLLQKTNSNGEGYQRFPRLMPLHSPSISLKYTKIWPALHPLVTKSLPRHRPYHPHYFCSYQAATLCRTHVPLDTIHTYCAYIALARE

SEQ ID NO: 263183 - protein, 60 aa, Glycine max
  Clone ID: PAT_MRT3847_79676C.1.pep
FTKIKFHLTPNLLIHHSSINYYKWVLDNPIHNSPTKIQLKSPPKFLIKALKIYIPILFFK

SEQ ID NO: 263184 - protein, 65 aa, Glycine max
  Clone ID: PAT_MRT3847_79677C.1.pep
GFRPQEPWVLENGKPRTLTNESRPGRAAHRMSFTSMSKKSSRTLVAQVPCATVRNFLSNLHEVIL

SEQ ID NO: 263185 - protein, 57 aa, Glycine max
  Clone ID: PAT_MRT3847_79678C.1.pep
ACLQYFFYTNLLQYLNDQTSYIEEKPACKKIILKVLKVIYRYLSSTIMLMIMTQLAG

SEQ ID NO: 263186 - protein, 91 aa, Glycine max
  Clone ID: PAT_MRT3847_79679C.1.pep
FDGYQWFYVLPLVVSTLAWFRLFPFVCMLGVENYWVVVDLNSAVIKNFGFWSSHFYFLTNGWSGSRVFEVWWIQIFWFVVLLGILIKAVYL

SEQ ID NO: 263187 - protein, 64 aa, Glycine max
  unsure (1)..(64): unsure at all Xaa locations
  Clone ID: PAT_MRT3847_7967C.1.pep
AICIVHNETATGVTNDLAKVXQILDSYQHPALXXVDGXSSXCAXXFRXMDESGXDVAITGSXXX

SEQ ID NO: 263188 - protein, 61 aa, Glycine max
  Clone ID: PAT_MRT3847_79680C.1.pep
FVDAFLFEFMAIHVLDADMDMEQKKVIVVFKQCMPLSDGSVLRFFFLSNEIANACQRVAFP

SEQ ID NO: 263189 - protein, 73 aa, Glycine max
  Clone ID: PAT_MRT3847_79681C.1.pep
VHLRLKCCSDAICHALASLFRDSILDLPPRTTALASAIFCDEGMHVLSIAHCKPLNDVVVIFYVLSMAQGLFI

SEQ ID NO: 263190 - protein, 53 aa, Glycine max
  Clone ID: PAT_MRT3847_79682C.1.pep
RTPVGGTILRRDQWANFWPEGNLKAGVILHPPNRLKGMFKMGAQVGFPENPGF

SEQ ID NO: 263191 - protein, 263 aa, Glycine max
  unsure (1)..(263): unsure at all Xaa locations
  Clone ID: PAT_MRT3847_79683C.1.pep
NHRQRLPLPRKLSVEHHXSSXIRKSIITMFGASATYGTADGSTIVASCSEGTDIILWHGKTGKSVGHVDTNQLKNNMATISPNGRFIAAAAFTADVKIWEIVYAKDGSVKEVLNVMQLKGHKSAVTWLCFMPNSEQIITASKDGSMRLWNINVRYHLDEDPKTLKVFLIPLHDSSGTTLHYDRLSVSPDGKILAATHGSTLQWLCVETGKVLDTAEKAHDSDISCISWAPKPIPMGNEQVLVLATASADKKVKLWASPSIPSS

SEQ ID NO: 263192 - protein, 111 aa, Glycine max
  unsure (1)..(111): unsure at all Xaa locations
  Clone ID: PAT_MRT3847_79684C.1.pep
FPGGVSTAPRGRKFFQSGPSPRYGDEEDSKPCCDSXMGTRPKPPQSSCEKNRVNSAPPNCKSCMGPRSQPGQGSCFNPNEFCDKPCEVQKLKKLIAPSKGNPFIFFLIKIK

SEQ ID NO: 263193 - protein, 27 aa, Glycine max
  Clone ID: PAT_MRT3847_79685C.1.pep
VYYGAFRATTLWVLESSVFYYIPLSVR

SEQ ID NO: 263194 - protein, 118 aa, Glycine max
  unsure (1)..(118): unsure at all Xaa locations
  Clone ID: PAT_MRT3847_79686C.1.pep
PKNRDLYVHCFKEGDFITTPTGVAWWMFINENTTAVTILIIVIYWSXNHLHQMPTRFYIGVNHDHXSLKYDHDHRGGSHSQNGKQQEEEDDGTDILSGYAFDXFKEAYGVNMLIXEKL

SEQ ID NO: 263195 - protein, 154 aa, Glycine max
  Clone ID: PAT_MRT3847_79687C.1.pep
MRKCELCNSPAKLFCESDQASLCWKCDAKVHSANFLVTKHPRILLCHVCQSLTAWHGTGPKFVPTMSVCNTCVNNNSTETCSQQNHEDDDDDGTGEDHAENDDGGVAEDDDDDDDEENQVVPWTSTPPPPASTSSNSVTTSSTRFSDVEEGGSD

SEQ ID NO: 263196 - protein, 106 aa, Glycine max
  Clone ID: PAT_MRT3847_79688C.1.pep
WFQVALIALLVRHVFACFCLFPGCPPGLTLRTRFNFRPRPSRGVTLFLPGDFCCHYSFSPAIPVMFRLYNPWLIPVYTVVFTPCNLGTPFSFDAPKLFTLAPLMRL

SEQ ID NO: 263197 - protein, 124 aa, Glycine max
  unsure (1)..(124): unsure at all Xaa locations
  Clone ID: PAT_MRT3847_79689C.1.pep
SNVDPXPIINHALQTRWGPTVANAYTINGLASPLHYCAXKHTYTVKVXPGQTYLAXLINAALNEELLFTLDHLTLTEVEAHAIFTNPFDTYTLLLAPGQTTNXLLKTKPYNAEATFHMSATPYF

SEQ ID NO: 263198 - protein, 78 aa, Glycine max
  Clone ID: PAT_MRT3847_7968C.1.pep
PAQNVVIVLYCGITANCLSIERSADNCRCLYHKPSRNLEMEKKYKCTIQFGEFSSINDESHMKYPGVQAQFNLASYHA

SEQ ID NO: 263199 - protein, 96 aa, Glycine max
  Clone ID: PAT_MRT3847_79690C.1.pep
GWEGKRIRPVLCITTCELVNGTMALIHDNLPYMDNDDLYHGKPTNHKVYDEDVAVLAFAFEHVALSTEGVSASRVVCAIGELAKSIGTEGLVAGQV

SEQ ID NO: 263200 - protein, 123 aa, Glycine max
  Clone ID: PAT_MRT3847_79691C.1.pep
GSGKKTGRKGLVGKLKPKGGRVTNTPEGEETVADLRGSELYNYFTRILEEDLKAINKPRDEDLFFFEEKGNEEEAAFSTHDREKKEELRADHGAERAKERKAGELTGGELQRIALADEATRKA

SEQ ID NO: 263201 - protein, 69 aa, Glycine max; identical to SEQ ID NO: 147364
  Clone ID: PAT_MRT3847_79692C.1.pep

SEQ ID NO: 263202 - protein, 50 aa, Glycine max
  Clone ID: PAT_MRT3847_79693C.1.pep
NSKPKPCFNQAPCYLCWFCLNIISFKQKIANISFHFKHNKRLHLVYLDLN

SEQ ID NO: 263203 - protein, 166 aa, Glycine max
  unsure (1)..(166): unsure at all Xaa locations
  Clone ID: PAT_MRT3847_79694C.1.pep
DCFGDPQTNGNIGPEIEAFQCSWLVVKALEFSNEQPKXVLHEHSGKADPQHVGQLKALYNELNPQAAIXSIRTGRYPKLVSSSEGHPNKPVQAELKSLLGQISKRHKQSRVKVRARTVAHAIQTSVVISIYPRIRFPGMEIFEKMILLPVTLFNISFLRIRSCGFL

SEQ ID NO: 263204 - protein, 150 aa, Glycine max
  Clone ID: PAT_MRT3847_79695C.1.pep
GIFQFCLVPQGRPPLISLPLFRGPGVRAKSPPFGGWVRVFKTPGGIFSIFFSGGVGGFLNLFFSPPAAKAPPPKAKFSLPLVPPNPRLVSFFLSPLAGVLKPVGKFFRFQDFPRFPRGGKTLLFGKAGWGFLFFFSIYWGTLKFSPPFFG

SEQ ID NO: 263205 - protein, 46 aa, Glycine max
  unsure (1)..(46): unsure at all Xaa locations
  Clone ID: PAT_MRT3847_79696C.1.pep
MLXYQDXLTGDELLSDSFRYKEIEXGXLWXVEGKXVXXGGVXXXIG

SEQ ID NO: 263206 - protein, 88 aa, Glycine max
  Clone ID: PAT_MRT3847_79697C.1.pep
MNKHQKPVLTGQRFKTRKRDEKEKFEPTVFRDTLVQGLNEAGDDLEAVAKFLDSTGSRLDYRRYADTLFDILVADSMLAPGGTRIDDG

SEQ ID NO: 263207 - protein, 172 aa, Glycine max
  unsure (1)..(172): unsure at all Xaa locations
  Clone ID: PAT_MRT3847_79698C.1.pep
LRLRSYWGLNVYNANTNPIFSXHLYTVQGQKYNIPKIVDDHIELNVAEYEXQGIIHLRVLFDLTYSFGFATITSTLTHAVCFYGKEIMERYRASSRGIEYMHTLLFIRYDDIPXRWYHSLLLETLLVTVALCMFIKDQVQMPWCGLLYAGVLAFGCTLPISLITATTYQTPG

SEQ ID NO: 263208 - protein, 50 aa, Glycine max
  Clone ID: PAT_MRT3847_79699C.1.pep
KTMFNIIEELKLVNVETLKVNACKRMMHLKISLPKTIICRCYIRLHEVIT

SEQ ID NO: 263209 - protein, 119 aa, Glycine max
  Clone ID: PAT_MRT3847_7969C.1.pep
PIPHKWETGVEPRTPKATGTLTPRNCGNQTVTLLGKRTSRPAQHMQVEALGPAHLTPPHWVSCLLPASYKQPARLEVWFTSTAVPPEPRAGRGQYKFFSSKTDWSPVSLSSDAWVDPGI

SEQ ID NO: 263210 - protein, 44 aa, Glycine max
  unsure (1)..(44): unsure at all Xaa locations
  Clone ID: PAT_MRT3847_796C.1.pep
LXSLRETYDSFERGLKACLLYVGTANFYFYMVKARCGCLNHNSC

SEQ ID NO: 263211 - protein, 46 aa, Glycine max
  Clone ID: PAT_MRT3847_79700C.1.pep
FTKANNPPPPSLLLLLLQVYYEHLACHCSLGNDLGSLPSYYILMFI

SEQ ID NO: 263212 - protein, 67 aa, Glycine max
  Clone ID: PAT_MRT3847_79701C.1.pep
CSNIRYCSLLIKKSSSASPYPFCIHDPTTVDVSPLLIRNNRVCPTYCPASGFPTAPSPMTTKYNMLA

SEQ ID NO: 263213 - protein, 43 aa, Glycine max
  Clone ID: PAT_MRT3847_79702C.1.pep
RPRVRRHGIYGKFMLRYSWSMMCLFIHLSQITLINTSYSTSNR

SEQ ID NO: 263214 - protein, 112 aa, Glycine max
  unsure (1)..(112): unsure at all Xaa locations
  Clone ID: PAT_MRT3847_79703C.1.pep
GAYKYVSELWRKKQSDVMRFLXRVKCWEYRQQPFIGRLTGLPAPDKLVRWGFRLNQGFXIFPGSVKKGWPKETIPKGFFLGNPPPRGFPHFNFPQTKGFFPRKPFAKKGGEF

SEQ ID NO: 263215 - protein, 65 aa, Glycine max
  Clone ID: PAT_MRT3847_79704C.1.pep
STDWSPFVAPFWPPVIRTALTWNGLTSLLRSGLKTIKGALAMPLMIKGYKKDLIKFSIITCRKPE

SEQ ID NO: 263216 - protein, 95 aa, Glycine max
  unsure (1)..(95): unsure at all Xaa locations
  Clone ID: PAT_MRT3847_79705C.1.pep
MASATLSVAKPXFKPMGKGSFXFFCLPNLSSFLPFSRKSSKDFHSGIAFQTYSSGNQGRFQKGGTEAKLKGAINRFGKNGKNFLRGLHRRKDFPF

SEQ ID NO: 263217 - protein, 98 aa, Glycine max
  Clone ID: PAT_MRT3847_79706C.1.pep
YRKNKQYWGLITCLCSCIRENTIPVQLYKKLRTPLPRGSSLCEGMGEGCCTQPYPCICKEAVSGFEPMTNKSPRHNFTVAPGLALNLNPIDTHKNYLQ

SEQ ID NO: 263218 - protein, 51 aa, Glycine max
  Clone ID: PAT_MRT3847_79707C.1.pep
MRECISIHIGQAGIQVGNACWELYCLEHGIGPDGRMPSDTTAGGGDDASKT

SEQ ID NO: 263219 - protein, 87 aa, Glycine max
  Clone ID: PAT_MRT3847_79708C.1.pep
MKYTVYKLKEKLILLLSYHTATKTFHVLKIKGYFIVLITSKPPHVITTDTNLQCMEVRLNILLPWAMFIKMATLMVILGASNRMILK

SEQ ID NO: 263220 - protein, 48 aa, Glycine max
  Clone ID: PAT_MRT3847_79709C.1.pep
QFKFLQMMHMQVMLLDFEKYWTREYDRPSIKYATVLPYKTIKHHENVI

SEQ ID NO: 263221 - protein, 61 aa, Glycine max
  Clone ID: PAT_MRT3847_7970C.1.pep
CEERCGFFGLKTTHKSLTRDIVGKAMHRLIIFFLFEIFGEVGVGYTSHILLVCTHSKTFFR

SEQ ID NO: 263222 - protein, 51 aa, Glycine max
  Clone ID: PAT_MRT3847_79710C.1.pep
LFYDFSEICAATNNFLAKRHSSSTPCWRCTLRGADVIVFQRKVPAVCSKTP

SEQ ID NO: 263223 - protein, 82 aa, Glycine max
  unsure (1)..(82): unsure at all Xaa locations
  Clone ID: PAT_MRT3847_79711C.1.pep
HPPGARTCSRPSGCFYSTAXGGAQRYDNPKNKITAVPANDEEICGATLKAEWPPAGVPEHRFSFLLVRCHIMINGGDCQRPS

SEQ ID NO: 263224 - protein, 55 aa, Glycine max
  Clone ID: PAT_MRT3847_79712C.1.pep
RIVKVLELAGGVMDELASPVGPRKDVVQNHCLEFMQLIKVLVSQKSIYSFVYSCI

SEQ ID NO: 263225 - protein, 68 aa, Glycine max
  Clone ID: PAT_MRT3847_79713C.1.pep
FICRSIDCKHFDFGEGNCPFGTSCFYKHAYRDGRLEQVVLRHLGAADGDTVIAKDIRLSDFLSNMHLR

SEQ ID NO: 263226 - protein, 57 aa, Glycine max
  Clone ID: PAT_MRT3847_79714C.1.pep
FGLESSIIAAVCLIVNGSGKHVIQSFMLEIGEFGVCCYHCNCDILMIFRRPWLCCVK

SEQ ID NO: 263227 - protein, 44 aa, Glycine max
  Clone ID: PAT_MRT3847_79715C.1.pep
SICISYNLSLHGSILCGGNATLYLRIFKNKIGCILLYFTGIVSI

SEQ ID NO: 263228 - protein, 139 aa, Glycine max
  Clone ID: PAT_MRT3847_79716C.1.pep
KPGVKKLFFFSKKINGGSPPKNMAVAKIKIFKRKGQTHFYGTFFYKKTNPGGSNPLMAGGLFWAFGGKKNQFLFRKENPFKKIGPGSRGKIETTAGGITLGKTQCFCFGLLLRRVPCQKIFYHYLKRIWSHQKTSFSTT

SEQ ID NO: 263229 - protein, 760 aa, Glycine max
  Clone ID: PAT_MRT3847_79717C.1.pep
LVCGASETADLPSNFVKLAKDAYTPDIIAASDCMLGKIGYGTVSEALAYKCPFVFVRRDYFNEEPFLRNMLEFYQGGVEMIRRDLLTGHWRPYLERAISLKPCYEAGINGGEVAAHILQETAFGKSYASDKLSGARRLRDAIVLGYQLQRAPGRDITIPEWYATAENQLGRSTPGSPMDDGRSAFSLDIENFDILHGDIQGLPDTVAFLQNLSELQDKHTRRERKAAANLFNWEEEIFVTRAPGRLDVMGGIADYSGSLVLQMPIKEACHVALQRNHPSKHRLWKHAEARQNDKGGNPTAVLQIVSYGSELSNRGPTFDMDLSDFMDEEDKPISYEKAKKYFAQDPSQKWAAYVAGAVLVLMTEMGVQFEDSISMLVSSAVPEGKGVSSSASVEVASMYAIAAAHGLNISPRDLAILCQKVENHIVGAPCGVMDQMASSCGEANKLLAMICQPAEIVGLVDIPSHIRFWGIDSGIRHSVGGADYGSVRIGAFMGMKMIKAKASEELSESWAANGLNYDEVEQDDIELLKQETSLDYLCNLPPHRFVTLYAKTIPESIVGETFLEQYQNHNDPVTTIDPKRTYGVRAPTMHPIFENFRVVTLKALLTSAASTYQLTALGELLYQCHHSYGTCGLGSDGTDRLVNLVQELQHSAASKAEGGTLYGAKITGGGSGGTVCVVGRNCLKSSEHIFEVQHRYKKATGYLPFIFEGSSPGAGKFGYLKIRRRATPKKANAIKDDGALTSEKANASKDDGAVTMKNNS

SEQ ID NO: 263230 - protein, 426 aa, Glycine max
  Clone ID: PAT_MRT3847_79718C.1.pep
HYLDISVSFSFSDNKTFLLCIFNESGSFQVSYGSELSNRGPTFDMDLSDFMDEEDKPISYEKAKKYFAQDPSQKWAAYVAGAVLVLMTEMGVQFEDSISMLVSSAVPEGKGVSSSASVEVASMYAIAAAHGLNISPRDLAILCQKVENHIVGAPCGVMDQMASSCGEANKLLAMICQPAEIVGLVDIPSHIRFWGIDSGIRHSVGGADYGSVRIGAFMGMKMIKAKASEELSESWAANGLNYDEVEQDDIELLKQETSLDYLCNLPPHRFVTLYAKTIPESIVGETFLEQYQNHNDPVTTIDPKRTYGVRAPTMHPIFENFRVVTLKALLTSAASTYQLTALGELLYQCHHSYGTCGLGSDGTDRLVNLVQELQHSAASKAEGGTLYGAKITGGGSGGTVCVVGRNCLKSSEHIFEVFFIIINLTH

SEQ ID NO: 263231 - protein, 161 aa, Glycine max
  Clone ID: PAT_MRT3847_79719C.1.pep
MSSFVFLSLLFLLLQRPLPSLSNSEGDALYAFKTRLSDPNNVLDSWDPSLVTPCTWFHVTCDSNNYVTRLDLGRYNLGGTLAPELAHLPYLQYLELYGNNITGNIPQELGNLINLISMDLSYNRFQGNIPKSFGNLKSLKFLWLNNNQLTRSIPIVVSTLN

SEQ ID NO: 263232 - protein, 88 aa, Glycine max
  Clone ID: PAT_MRT3847_7971C.1.pep
IGYRPRGRRLGIRLELKQEEDQDLDEGAWNIAMAGGTCLGSVARTVGDDIVPLVMPFIEEYITKADWRLREADWYAFRKIPKKKNTIE

SEQ ID NO: 263233 - protein, 69 aa, Glycine max
  Clone ID: PAT_MRT3847_79720C.1.pep
QKGIPVLGFSPMKKTPFLFHDPNEPFKDIVFLKGIQVFFFLKKHLFFFYRDSHERHELLISKKNHPLFL

SEQ ID NO: 263234 - protein, 164 aa, Glycine max
  Clone ID: PAT_MRT3847_79721C.1.pep
TQKHWKALYEELKEGKARVLLKTLPPKGETIFFFWGLESLQRNKRGTKPPLILGHIWTFSPGRARRGHKTQKELAGKGGNKKNLPSSGGGGAFSRGFKHKQEQTPRVSTNFHGRVQEALKSLGATRAIQLLRGFLTSEGLTYPNLYILHKLATSVLLRATGGTF

SEQ ID NO: 263235 - protein, 76 aa, Glycine max
  Clone ID: PAT_MRT3847_79722C.1.pep
SNGSNATDQSLESANFETFEEDSYRAIIKGCLKSKIRAKFRRFLHCSDMVCICQRQKLILQSLGKKKLAEYCTRHE

SEQ ID NO: 263236 - protein, 130 aa, Glycine max
  Clone ID: PAT_MRT3847_79723C.1.pep
MGKLYSLQSHTPTGDSENEGTPHTSSEDTDQSHYDPSSIILGMNMPAKVERTIRRSGCELQLVEEPIGEFYNGVLTFGIIDILQDYDISKKLEHAYKSIQYDPTSISAVDPIQYSRRFRDFIFRIFTEDS

SEQ ID NO: 263237 - protein, 40 aa, Glycine max
  Clone ID: PAT_MRT3847_79724C.1.pep
DTSTWKLLLYYQNRSLFRSCYMFNLLSFTCVECLYLLEEL

SEQ ID NO: 263238 - protein, 34 aa, Glycine max
  Clone ID: PAT_MRT3847_79725C.1.pep
HILGHSYNPNIYQKDIERAAVIDYTGDMKPWLEI

SEQ ID NO: 263239 - protein, 65 aa, Glycine max
  Clone ID: PAT_MRT3847_79726C.1.pep
IPCKQPYPVRKGLVVCPITLLRKLLYFEIEGFNWKIVAHLKVNKLLKGFFKFRNSFFDKKYFKFF

SEQ ID NO: 263240 - protein, 55 aa, Glycine max
  Clone ID: PAT_MRT3847_79727C.1.pep
YYTKLLQAFFSNTINSIKMNFAKNLNQTWLTWEDRNREVATSNAGNPCRVVHVLD

SEQ ID NO: 263241 - protein, 64 aa, Glycine max
  Clone ID: PAT_MRT3847_79728C.1.pep
TQHCSISVPRPTHNRNLIARLNLIKFPFKIMRKRSNKLSFNFIFLLRIQEVSHKRFLRELKTFS

SEQ ID NO: 263242 - protein, 84 aa, Glycine max
  Clone ID: PAT_MRT3847_79729C.1.pep
VREVMEMLEEYKRLAKIWSKMKGLKIPKKGEMSALSRNMNAQHMSKVLPPQMLKQIGGMGGLQSLMKQMGSAKDMMGMFGGGGD

SEQ ID NO: 263243 - protein, 305 aa, Glycine max
  unsure (1)..(305): unsure at all Xaa locations
  Clone ID: PAT_MRT3847_7972C.1.pep
MMKKKVQWFWTWVLGSVVLRLILLFFPKNLNLSSRPEVSTPLTSLRRLAEGYWLKQSSLSPYAGSMYHGSPLLLTLLGPLTVRRIEGQPDHLLCSLVFVIAYVVSAMLICAAGEKLKVAYISSLQSLGLHNLTENSEFLPSGDFAALVYLWNPFTIVACVGLSTSAIENLMVVLSLYGACSRLAPLAAFGWVMATHLSLYPAILIIPVILLLGYGPDAPPRKLFCQRKNLEGGNSIPSDSCSEEEAKNQLKVLNVFSWRPVVLFLXSLLWSSYVLVLCGIYVPQYGGLQELFQRFCLNTITGIHF

SEQ ID NO: 263244 - protein, 45 aa, Glycine max
  Clone ID: PAT_MRT3847_79730C.1.pep
TSTVKFEVQNGVVASRDICLLCSRSDLLSAQRISTAARARAEGRA

SEQ ID NO: 263245 - protein, 119 aa, Glycine max
  unsure (1)..(119): unsure at all Xaa locations
  Clone ID: PAT_MRT3847_79731C.1.pep
QILVETLTGKTITLEVESSDTMDNVKAKIQDEEGIAXDQQRLIFAGKQLEDSRTLGDYNMXKESTLHLSLRLHSGIQILVKTLTDKTITLEVESSDTIDNVEAKMQDKEGMPPDXQHLI

SEQ ID NO: 263246 - protein, 116 aa, Glycine max
  Clone ID: PAT_MRT3847_79732C.1.pep
LFFFLLMLFLHIRQKNDNTARLMSWLTKNNTVNTHSMARQNKLRKLYRKERTDPQRDREHVEQNSSFLSPNNYKIYTHSIAKPNLDDHNVNLMFLPFPSQISLTPQFFIYFGVPQL

SEQ ID NO: 263247 - protein, 60 aa, Glycine max
  Clone ID: PAT_MRT3847_79733C.1.pep
RVKGDPCRKLGRKVRFGVFKSLAETVLRPWAGDGVVPQVVEKAHMDQAYSSRSGVWRSQR

SEQ ID NO: 263248 - protein, 41 aa, Glycine max
  Clone ID: PAT_MRT3847_79734C.1.pep
RKAEEEGLFFFRFPPFMLKIVSHPVSQSCKIFGWKFYFSGV

SEQ ID NO: 263249 - protein, 138 aa, Glycine max
  unsure (1)..(138): unsure at all Xaa locations
  Clone ID: PAT_MRT3847_79735C.1.pep
PALSRHAEKHGVQVIGNLKKGLNPPXVTDSGFVSTYMGTAVYTVLVSGIIALAXGIAPVRSFAVFKNYHIDGNKEMIAIVTMNIFGYATSCYLTTGPFFRSAVNYNAGCKTAASNILMAIAAMLSLLFLTALFHFTPL

SEQ ID NO: 263250 - protein, 85 aa, Glycine max
  Clone ID: PAT_MRT3847_79736C.1.pep
KTLWHKKVVLEPMFRKTYTSVVIYSESIPTNTVTQTRILFHSLDKLTIYYIRSIYRYHSEKLFWQPAKLQQSCSWHPFCRLLAAV

SEQ ID NO: 263251 - protein, 76 aa, Glycine max
  unsure (1)..(76): unsure at all Xaa locations
  Clone ID: PAT_MRT3847_79737C.1.pep
NQIHPSQLILVASPHSNFNVEWXSLKPMFSADIIGPSVGIWEIASGGGITVAACGTISLAPPVRTAMSGCVRHDVR

SEQ ID NO: 263252 - protein, 58 aa, Glycine max
  Clone ID: PAT_MRT3847_79738C.1.pep
IVYYFLVFDFLLFLSLSVSPLGLGVFRLCKCQWWIWRAQKVTYLPQSMWKTATKHSLT

SEQ ID NO: 263253 - protein, 88 aa, Glycine max
  Clone ID: PAT_MRT3847_79739C.1.pep
NLSCFTFKALIPCLCRYFKNALLKKCGSLLMQGELIPLVELPFQGGKVLISFKWRLFLCQNMRLNISPCVLASSQRVKEDYISMCFHI

SEQ ID NO: 263254 - protein, 165 aa, Glycine max
  Clone ID: PAT_MRT3847_7973C.1.pep
YVFPGYIFQMLTSLSWICWLYPNNVLAQQLGSGLNGLGIGAIGLDWSTISSYLGSPLASPWFATANVAVGFVFVMYVLTPLCYWLDLYNAKTFPIFSDELFTEKGQVYNITAIIDSNFHLDLAAYERQGRLYISTFFAMTYGVGFAALTATIMHVALFHGREIWE

SEQ ID NO: 263255 - protein, 191 aa, Glycine max
  Clone ID: PAT_MRT3847_79741C.1.pep
MPSNSKQKKKQSKLLQQSSLSSNAATTPSKTLQPSELASLCEEASRKFPSLIAKSAFIAELAQVDDTVPVSNRIWLSAPSMLSLSLPPGSTVSVSIPSSGEKISQLHSFPLASLANECEKLYGLESSKALDDYAGNYLVLATVFPSSKVLKNGVRLSSNLYHAMGCPALGTSVFVHPISSAANGINEQHST

SEQ ID NO: 263256 - protein, 94 aa, Glycine max
  Clone ID: PAT_MRT3847_79742C.1.pep
FYLANTNLLILFGHFFSNIKIMYSVEMAPYGRFIANILIAVMFVCLFFVTNIVAQDSEIAPTGQLEAGTGFDLPVSKVMMCSSVLASLLAFMLQ

SEQ ID NO: 263257 - protein, 39 aa, Glycine max
  Clone ID: PAT_MRT3847_79743C.1.pep
LHFLPQKIYHQTPCSVLHRVRKRQVVGSLYLHQHIYARV

SEQ ID NO: 263258 - protein, 48 aa, Glycine max
  Clone ID: PAT_MRT3847_79744C.1.pep
SEAVFFHFFFFVFCFFCFFFFFLILNELYLPLKSCAFYLCSSPLPSSS

SEQ ID NO: 263259 - protein, 65 aa, Glycine max
  unsure (1)..(65): unsure at all Xaa locations
  Clone ID: PAT_MRT3847_79745C.1.pep
RLIIXNYTDSCTRVSRVIQSYLRYHCQTSFFNHVLPSHMDKEYPQPLPFPMPLMLYVFTFPGWSI

SEQ ID NO: 263260 - protein, 183 aa, Glycine max
  Clone ID: PAT_MRT3847_79746C.1.pep
MALETAWYDLVCYGIIGMALLGALWVLEMNEGASRRDFETTFASLLLSRPEDEVVVSVLHRGHVSTPQLWTSCWRGLHPFCLLVTRFLSFVIMLLFLLWDVLAYDASIFFYYTEWTIILVTIYFALGTIVSAHGCWRCFNKPLIHNGAKAEFLRRDVEETMSTNLIASNKLESHMLKRTFNKE

SEQ ID NO: 263261 - protein, 69 aa, Glycine max
  Clone ID: PAT_MRT3847_79747C.1.pep
YKCFVSGQLNKLFLWESVDNKTSVENIVKVALWCIQIEPFFRPTMKSVVLMFEGIPDIAIPPCPNSSYV

SEQ ID NO: 263262 - protein, 59 aa, Glycine max
  Clone ID: PAT_MRT3847_79748C.1.pep
MKEDEFLCCQLGFWVFLIICLVLVSLAGIASGLALGLLSFSQVDLEVLIKAGRPKDTKH

SEQ ID NO: 263263 - protein, 112 aa, Glycine max
  Clone ID: PAT_MRT3847_79749C.1.pep
MNTLISPPCTHRYLGGVPYSFLSPLINITTNLKFSRITFTVCYQLSDTLFSASHTLADVPLSDEFVTQSLVDELSIGPIKWKDNTIEDNTCTIPSPTKSNSNMQMRRMLVPL

SEQ ID NO: 263264 - protein, 72 aa, Glycine max
  unsure (1)..(72): unsure at all Xaa locations
  Clone ID: PAT_MRT3847_7974C.1.pep
XLFFFFFFFWPKLTPAFFFNENGIFWDFGPTTPSNFYLENQPFEIKFPSLFWLRAILWTGETIWKHSPYPFF

SEQ ID NO: 263265 - protein, 41 aa, Glycine max
  Clone ID: PAT_MRT3847_79750C.1.pep
IHPTILFYLPRFPDNILWTLFFGSGMAPTSINGTGFQPGLY

SEQ ID NO: 263266 - protein, 77 aa, Glycine max
  Clone ID: PAT_MRT3847_79751C.1.pep
LTPYSSREMMCHLFHIPIIMEESTIISFGGCDDDTTPSDLFISDYDLLMCEALSHKSEAVNVKELARSSSKLLPSTA

SEQ ID NO: 263267 - protein, 347 aa, Glycine max
  unsure (1)..(347): unsure at all Xaa locations
  Clone ID: PAT_MRT3847_79752C.1.pep
SVSILNPSVSLSFPPPKTPPFRPAAPSIGHCPRDRRVSKRHCQVLFDASLRKLYILNGVLPHGHGDSTATCRLVHEFRKRAMISFHGNGDDGDGVALLREASNGVLVNGVEIQKGKAVXFSVGDRVSLACGNEKGSCGVGNEIEFVVERIDFEECGGEIDGLKTFAGHSQSGKGNKRVFAVTANDPRYEGVVGRARFLQDRCRDILLSNDPVSRILRDESKCAPGNAEVQSNLELIGESKVKNLDPKAVADEVPNTVRVLDSVGKDNCNPPSVGGDWWQGTIGGGGCNYPPPGKKFYLNRLEFMDHNSSVCHLSISLLELIHPVESVSRMFIATFTSDIKWRDCPKI

SEQ ID NO: 263268 - protein, 92 aa, Glycine max
  Clone ID: PAT_MRT3847_79753C.1.pep
SKETGTLPTPLDLFRFKHQLSDNTWVDIQEEFARTLEQLTKSAFAQGNPPPSESDVWHAIVRKKGLGMVGRPCYHGSSSSMEWVKRQDFDEL

SEQ ID NO: 263269 - protein, 44 aa, Glycine max
  Clone ID: PAT_MRT3847_79754C.1.pep
ADLSGSSYHKNKISAVIIENRIYVNESWSWVSGVLRTRGQVRCG

SEQ ID NO: 263270 - protein, 88 aa, Glycine max
  Clone ID: PAT_MRT3847_79755C.1.pep
MMEWPACTDEYEKLVIRMSTPRVVIDNAVCSTATIVKVDSARKHGILIDAVQVLSDLNLSIKKAYISSDGRWFMDVFHVTGQNGNKLT

SEQ ID NO: 263271 - protein, 282 aa, Glycine max
  Clone ID: PAT_MRT3847_79756C.1.pep
LALDMARRKSIASRKLTKRQMVLAEKDHNKGKASNSHPMKQHTRHLGQTTSEIPPCASSHAISRPTDPFARTSDVIPPPSIQGIHSPHTSQPTNPDAGHTIDILPKMSSAIGRKFVRQQMALAEKYRNKGNDSKGHPMKQCTTRPVPMTSQIPPCASSHAISRPTDPFARTSDVRDPPSIQGVHSPCTSQPTNLDAGHTLRSFVALETQNNDGKPIIYLSGQGFLPSRPVANEIGDILKSHYTDPWSSWKKIPIITRDLWLGEFLRKFSICPPDYNWAKKEF

SEQ ID NO: 263272 - protein, 107 aa, Glycine max
  Clone ID: PAT_MRT3847_79757C.1.pep
MNGQLREPRGIWRISQGSRCASASPCHINGRQCQDPHEALSQAQSQRGPSDLSESWSTPSGNNSSNTLVYTHVIVLTLYELATMTKSFLACYILGEGGFRTLYKGYI

SEQ ID NO: 263273 - protein, 91 aa, Glycine max
  Clone ID: PAT_MRT3847_79758C.1.pep
WLSGLISNLRFPQEKAIIFCDNLSAICLAKDQVHHERTKHIDIRYHFIHFEKRVKVQKVDTRENPTDMFTKPVLRNKFMHYLDLLTVDCWK

SEQ ID NO: 263274 - protein, 73 aa, Glycine max
  Clone ID: PAT_MRT3847_79759C.1.pep
GAGDYYQILQEKHDASDQKVKNAYKKLTLKRHPDHNLENSLRNQEFDAKLKRVPEAYDVLMDPTNRHIYYLYG

SEQ ID NO: 263275 - protein, 119 aa, Glycine max
  unsure (1)..(119): unsure at all Xaa locations
  Clone ID: PAT_MRT3847_7975C.1.pep
RRRSSLCRSKNLNPLGAKLXKALXXHCFWRYHEYXESIFSSSQXWFXILLTREFTLKLPAQLTXILKQVSLLRFSYLKLSRTRITLEYTQLHTSYVLVTXASTAILXLNHLKHIIVGGA

SEQ ID NO: 263276 - protein, 52 aa, Glycine max
  unsure (1)..(52): unsure at all Xaa locations
  Clone ID: PAT_MRT3847_79760C.1.pep
HSRRALXFPPSLSSDSASSSNVLNSFGFPSGPLARVNYSSLSQNQKNVPREV

SEQ ID NO: 263277 - protein, 77 aa, Glycine max
  Clone ID: PAT_MRT3847_79761C.1.pep
IIRIIRSVYTDRHAVPHGLANPSPTLLLCLYVFCLCFSLYLSTSSVHYRLPTPTNNTKILYYIFGDRTLDSSIEIAR

SEQ ID NO: 263278 - protein, 89 aa, Glycine max
  unsure (1)..(89): unsure at all Xaa locations
  Clone ID: PAT_MRT3847_79762C.1.pep
ARNSARXXXXXXXAXLAXXXSXXXNXXLXXXFXXHYSSXXRPMXELDGSTXXXXPPRXXXXXXXXSSAXPVSXGXSXRVXXXSMMXGXG

SEQ ID NO: 263279 - protein, 133 aa, Glycine max
  Clone ID: PAT_MRT3847_79763C.1.pep
KIPWKFVFRKGKGKKKNKTVKKKGPGTPFFVLNPRGNKTPRGNKKGGGRKKKGPQKKGSAPGIYTPKGTNPLVTKKEFVFPKKDKTSPGLKKKNGLPKGVKKSGGHYKRTTRWGGALMGPTGGGTPPLFSEKH

SEQ ID NO: 263280 - protein, 77 aa, Glycine max
  unsure (1)..(77): unsure at all Xaa locations
  Clone ID: PAT_MRT3847_79764C.1.pep
MKVLVFFVAIVLAAWHCHGSDHDHDHGHTYQIFPLRIETGHGGHYNSEGTSQXWRLVLEPHTVIAWKTVPQDSEGYI

SEQ ID NO: 263281 - protein, 50 aa, Glycine max
  Clone ID: PAT_MRT3847_79765C.1.pep
ERERERDGYIRASASFKFPLRHHRMILYFRFLICPIYILHSLPMPEFSKS

SEQ ID NO: 263282 - protein, 41 aa, Glycine max
  Clone ID: PAT_MRT3847_79766C.1.pep
KAQAAQTRMTRCSNDLITFQFLNTLLSSAPKNVDVSNGDGG

SEQ ID NO: 263283 - protein, 90 aa, Glycine max
  Clone ID: PAT_MRT3847_79767C.1.pep
ELLLLLSLQVYIFLCVRKMACISKSRAMFFFMAFFVGLLFAAGVSAQTSEFPQAPAPAPTMDAGAGFLVTYSGAFVCSSLLLSLIALLCH

SEQ ID NO: 263284 - protein, 40 aa, Glycine max
  Clone ID: PAT_MRT3847_79768C.1.pep
KPSIVGEGRCFWSKCDGLGQPNIYPQFLEWVDKGSKSPYF

SEQ ID NO: 263285 - protein, 72 aa, Glycine max
  Clone ID: PAT_MRT3847_79769C.1.pep
VFILFTPYPEVNIIFNAPISQWFIIPCGFQRRAQPFVPSRCKFDRPGFKDLVHKSVQMTGFLWESKNRLLNI

SEQ ID NO: 263286 - protein, 222 aa, Glycine max
  Clone ID: PAT_MRT3847_7976C.1.pep
ERVGDLNINVLKDVSVASYKIDTKIDRVEATGVNQKDLLERNILKGITADENTAAHDITTLGVINVRYCGYVVTVKVERGVNENVDSPSQQNIELFDQPEGGANALNINSLRLLLHNTTPPENNKPMSQIQTFESEEFGASHAFLEKLIKESLAKLEEEEPGIDYFVRWELGACWIQHLQDQNNTEKDKKLSLEKAKNEMKVEGLGKPLKAPKEKGRGGGGG

SEQ ID NO: 263287 - protein, 51 aa, Glycine max
  Clone ID: PAT_MRT3847_79770C.1.pep
TASVCTGLYGKGPHPGFARDFWLNPTSAASSNAMAVNHGKYLFPSLFYPTT

SEQ ID NO: 263288 - protein, 94 aa, Glycine max
  unsure (1)..(94): unsure at all Xaa locations
  Clone ID: PAT_MRT3847_79771C.1.pep
DASCVTAYYVTYLYXYVPAHEQRMYFEVRVNDXRTMLFCENEVTEFGXMHPDERRWGETDTEFXVEEYTGDLTDMDKVAAHLKGGAKNVVISAP

SEQ ID NO: 263289 - protein, 43 aa, Glycine max
  Clone ID: PAT_MRT3847_79772C.1.pep
VKCNTKRHKPNLRCFNISNNYMQLGSAKHMGTQQYTVTLRPAQ

SEQ ID NO: 263290 - protein, 210 aa, Glycine max
  unsure (1)..(210): unsure at all Xaa locations
  Clone ID: PAT_MRT3847_79773C.1.pep
MVMMMKKHLLFSLSLLLMVLFTSAQTTPAPSPSSAPTDIIRILKKAGGFTTLIRLLTTTQVSTQINAQLLNSNNGLTVFAPNDNAFQSLKPGFLNSLNDQQKNELIQFHVLPTFVSISNFDTLSNPVRTQAGDDPDRLALNITSSGNQVNLTTGVVNTTVGGSVYSDHQLAILSSGTNGFFLPRXVIVPKPPPPAPSPAKAKARSAKKST

SEQ ID NO: 263291 - protein, 98 aa, Glycine max
  Clone ID: PAT_MRT3847_79774C.1.pep
PLQNPFPLFLTPSSRSSQSSIFARPVIWFTSFLCVIRYPFVSKPSFDDIASESMRSFLQQDGPHLSDSALAPIWVSKALVKLKGDPKSALKFFKEAGA

SEQ ID NO: 263292 - protein, 61 aa, Glycine max
  Clone ID: PAT_MRT3847_79775C.1.pep
KQLLLRPFFFLLVLKKIVENKLMKCDLCEILIKLCVQLCMVVDLLFFYSQASILSWFKWQS

SEQ ID NO: 263293 - protein, 251 aa, Glycine max
  Clone ID: PAT_MRT3847_79776C.1.pep
MMGSMLLSLRPFLTTIFFLTLTVLKVSASSSVIFYNKCQHPVWPGIQPSAGKPVLARGGFKLAPNRAYSLQLPALWSGRFWGRHGCSFDAGGRGRCATGDCGGSLFCNGIGGSPPATLAEFTLGNEQDFYDVSLVDGYNLPISITPFKGSGKCSYAGCVSDLNTMCPVGLQVRSRDNKRVVACKSACSAFNSPRYCCTGSYGSPQACKPTVYSKIFKTACPKAYSYAYDDPTSIATCTKANYLVTFCPHRR

SEQ ID NO: 263294 - protein, 92 aa, Glycine max
  Clone ID: PAT_MRT3847_79777C.1.pep
WSAVVIPMFRQVIFLRPSECQSDILTDILVHFFVLSHQGLDKSSAHVSVDHSCSYLTISQKVVHLDKIYDRHDPLYVHYSSTLHRCNTGRVL

SEQ ID NO: 263295 - protein, 218 aa, Glycine max
  unsure (1)..(218): unsure at all Xaa locations
  Clone ID: PAT_MRT3847_79778C.1.pep
MATGKSSRSRSAVSSAKDNGPKLEEGLNPFKSDKFDAESYVQSNCSLNDKEIKQLCTYLVDLKKASAEEMRRSVYANYAAFIRTSKEISDLEGELSSIRNLLSTQAALIHGLAEGVHIDSLSISNSDGFSVNATSDSEDKEISDLDKWLVEFPDLLDVLLAERRVEEALAALDEGEXVVSEAKDLKSINPSALLSLQNSIAERRQKLXADQLAEAACQ

SEQ ID NO: 263296 - protein, 142 aa, Glycine max
  Clone ID: PAT_MRT3847_79779C.1.pep
HASGFFVGDEFEKREDCQQYRQKCQGLKSKMLCTQHLINLHSSFNLFSRSLAPEMEAHFLGKPCKNVALTLNMSRAFTVGALWSISMATPSTIMFLPSMITKICYKDNRVSLSVSLGGFWNSEKTIYKFYSSTFVIKSEIGF

SEQ ID NO: 263297 - protein, 106 aa, Glycine max
  unsure (1)..(106): unsure at all Xaa locations
  Clone ID: PAT_MRT3847_7977C.1.pep
AASQSGDSSLLPLLFRVEPMDIVGKAKEDASLPKATMTKIIKEMLPRGGRVDRDAQDLXTSXCVEVINLDWSEGNEVCRKEERRTIAPEHLLKASRALEFGEYIRE

SEQ ID NO: 263298 - protein, 54 aa, Glycine max
  Clone ID: PAT_MRT3847_79780C.1.pep
IIFLRITLFLSKNFEIFLLKAFKLILLCSNHLKSGIFFFHQDIKLKYLLVFVDD

SEQ ID NO: 263299 - protein, 92 aa, Glycine max
  Clone ID: PAT_MRT3847_79781C.1.pep
DAASKMSSSAAIIFIHGSPPSLSRTAKPLYIVCSFMSSSVNSYILSILALEGLHVVLALAQVSDLASQHAGPHLTLQRYQVGFKRRSLYFQA

SEQ ID NO: 263300 - protein, 224 aa, Glycine max
  Clone ID: PAT_MRT3847_79782C.1.pep
MDSHLPDHFKCPISLEIMSDPVILSSGHTFDRSSIQRWLDAGHRTCPITKLPLPDHPALIPNHALRSLISNYAFLSPLHHTVSQPEALISTLASNSSSSDSKIEALKHLTRLSKRDSAFRRRLAESGAVPAVIAAVDDPSLQERALPLLLNLTLDDDSKVGLVAEGVVARVVEVLLHAPTPDCRAVAATIVTSLAVVEVNKATIGAFPAAIAALVAILRDGKGP

SEQ ID NO: 263301 - protein, 99 aa, Glycine max
  Clone ID: PAT_MRT3847_79783C.1.pep
TMHSKKASQKKGLGGGGRVSPYLNNLIYKHLTFRTLPKSWEATKLRGLHWELCFQQKNWFNKLIKFLQLKIQGAIVTKRRWLQMIDQPPKKLFVSPYSG

SEQ ID NO: 263302 - protein, 74 aa, Glycine max
  Clone ID: PAT_MRT3847_79784C.1.pep
TIFPHPINTTYSTTAFTCSYYFNYFILLFIQTQLFFQIIPPNNQSLFTLFPSHNTMFLTITFTTSNSLKFYLNP

SEQ ID NO: 263303 - protein, 90 aa, Glycine max
  Clone ID: PAT_MRT3847_79785C.1.pep
MKVSAALLCLLLIAATFIPQGLAQPDAINAPVTCCYNFTNRKISVQRLASYRRITSSKCPKEAVIFKTIVAKEICADPKQKWVQDSMDHL

SEQ ID NO: 263304 - protein, 65 aa, Glycine max
  Clone ID: PAT_MRT3847_79786C.1.pep
AYNIAFVVKRVIYGRVHGNVVHQPSHTVWLLLCNGAQFCSLSEEAQAICGVESAVVPWFGVQILL

SEQ ID NO: 263305 - protein, 90 aa, Glycine max
  unsure (1)..(90): unsure at all Xaa locations
  Clone ID: PAT_MRT3847_79787C.1.pep
MAKLXLSLCFXXFSXCLXYWREQAQQNECQXQKLNXLKPDNRIESEXGFXETWNPKNKPXQCAGVALSXCTLXRNALRXPSXTNGPQEIY

SEQ ID NO: 263306 - protein, 107 aa, Glycine max
  Clone ID: PAT_MRT3847_79788C.1.pep
CVASLSASFFFCVCSSDFPLTVTFVLFPQIYDRDGLTLGEFVKGDMYIRDLKNTKGHISGLTCGEWHPKTKETILTSSEDGSLRIWDVNDFKSQKQVWKIYLSLLPW

SEQ ID NO: 263307 - protein, 56 aa, Glycine max
  Clone ID: PAT_MRT3847_79789C.1.pep
LFKFLLKFILNMHNILLHLKKQQTFRVVHFIDYYNATKGAFTNFTFYFTIPRILLL

SEQ ID NO: 263308 - protein, 103 aa, Glycine max
  Clone ID: PAT_MRT3847_7978C.1.pep
AREVLKFCFFINLKTYERWKAVRQTGTKKKKKKKKKKKKKKKKKKKKKKKKKKKKKKKKPKKKKKNLGGGPGPQFPLLGGVLTPPPGPCFNTVGMGKPWGYPN

SEQ ID NO: 263309 - protein, 67 aa, Glycine max
  Clone ID: PAT_MRT3847_79790C.1.pep
QMTLYGKGKRIQENRLRVVEEYVTLAWTRKDIFIARKLIKNRLRESHLQLAFCVARLLVKQLCECSF

SEQ ID NO: 263310 - protein, 213 aa, Glycine max
  unsure (1)..(213): unsure at all Xaa locations
  Clone ID: PAT_MRT3847_79791C.1.pep
MVREKDVCWEYAEKLDGNKVRCKFCQRVLNGGISRLKHHLSRFPSKGVNPCSKVRDDVTDRVRGIIASKEEVKETSSAKKQKIAEVKSPSNLSASKALVSLDAASPVMKIFPTGHPMTPSSTNNQEIAERSIALFFFENKLDFSVARSSSYQLMIDAIAKCGPGFTGPSAEXPKTIWLERMKSEVGLQTXDVEKEWATTGCTILAXTWTDYKS

SEQ ID NO: 263311 - protein, 85 aa, Glycine max
  unsure (1)..(85): unsure at all Xaa locations
  Clone ID: PAT_MRT3847_79792C.1.pep
EKPTYQVIQPINGDPFIGSLETPVTSSPLIAWYLSNLPAYRDRXEPILRGIXVGLGHGXLXXGXXXRXGLLXTXXXXGKVFRLLV

SEQ ID NO: 263312 - protein, 149 aa, Glycine max
  Clone ID: PAT_MRT3847_79793C.1.pep
TRPVAPCTAQNSPQDYVDPHNAARADVGVGPVSWDDTVAAYAQSYAAQRQGDCQLIHSGGPYGENLFWGSAGADWSASDAVGSWVSEKQYYDHDTNSCAEGQVCGHYTQVVWRDSTAIGCARVVCDNNAGVFIICSYNPPGNVVGESPY

SEQ ID NO: 263313 - protein, 92 aa, Glycine max
  unsure (1)..(92): unsure at all Xaa locations
  Clone ID: PAT_MRT3847_79794C.1.pep
PVVYPLLNFLKLIQSFFFILASQPIFCLPNSRHKVNLTTNYSXLLVQQLNPLFSKHSSIITKLTTYLILKYYPHLINFNLTKKKIISQLSSP

SEQ ID NO: 263314 - protein, 47 aa, Glycine max
  Clone ID: PAT_MRT3847_79795C.1.pep
KKGNHYLNTPITSPKHLNLLKGKKWPLYSKGVCLDTKRHGCNIIHTS

SEQ ID NO: 263315 - protein, 121 aa, Glycine max
  Clone ID: PAT_MRT3847_79796C.1.pep
GEDAYANGVRVGSLGLMVNAVVLGFMSLAVEPLGKMVGGVKRLWAIVNFILAIGFGMTVVITKVAEHQRKMNPAAVGHPSEGVVVGSMVFFGVLGVPLAVMFFSLLSRQLRLNHCVFLSNI

SEQ ID NO: 263316 - protein, 33 aa, Glycine max
  Clone ID: PAT_MRT3847_79797C.1.pep
RQRLVVLSDADKVTAIPTIPVAAMRLYIFGDGV

SEQ ID NO: 263317 - protein, 80 aa, Glycine max
  Clone ID: PAT_MRT3847_79798C.1.pep
MLRMLLQEAPVLGKPTIFTSDSVGEKIQWAQCEDCFKWRKLPASALLPSKWTCSDNSWDPERFSCSAAQELTAEQLENLL

SEQ ID NO: 263318 - protein, 81 aa, Glycine max
  unsure (1)..(81): unsure at all Xaa locations
  Clone ID: PAT_MRT3847_79799C.1.pep
LLAQDNELTVQEADKNIGIWRIHRSTTGLEAVGGEGTGMICMIMRPGEDSSRGTKMLGDEWGTAXSDIERRENRQAAMGAM

SEQ ID NO: 263319 - protein, 194 aa, Glycine max
  Clone ID: PAT_MRT3847_7979C.1.pep
MDESEQYPKEYYPNDQTITRRVSSSSSTTSVHVTALDGLVNVNSLFTIAVFVGLSLTTPGQRSLENRSSCDAGVDVAKKLLVFEVVSFSFFLFSSLVAQGLKLALNLLNSKDADEAFRAHINLKALRLGMLGSAIGSVMGCLFLVLSMVNVIEIRLGMLSCGSKAAAHAVATMVVLVSSALVLYISTAIYAFTR

SEQ ID NO: 263320 - protein, 141 aa, Glycine max
  Clone ID: PAT_MRT3847_797C.1.pep
HKNFSSTKFSALLIQKLENKEKETKKRRRKKRISQTLHIIGISETRDPTLLAATGTSFPLHCNLRRSENEKKKRSNKTIARKRLLLKEPVGRKSKRNRKGKNGGSGEEERISGEVRLAGGRSLVWRENKRTRQQQRCFRTR

SEQ ID NO: 263321 - protein, 133 aa, Glycine max
  Clone ID: PAT_MRT3847_79800C.1.pep
QEQAEKVDKALQSMEEEAECIYKDERGLLLDDEAASTRDAMYEQSELIERELEQMTEQIKSIIQSLNSNQGGEHDTLDGMTPLDAVVRILNNQLTSLMWIDEKAEEFSSRIQKLANPGSASDRELTGSGIWMS

SEQ ID NO: 263322 - protein, 183 aa, Glycine max
  Clone ID: PAT_MRT3847_79801C.1.pep
RTGKFKKQANAIAEWDRRILNNRDVLLRLEIEVAKVVETQSNLERQLELIETHQQEVDKALQSMEEEAECIYKDERGLLLDDETASTRDAMYEQSELIERELEQMTEQIKSVIQSLNSNQGGEHDTLDGMTPLDAVVRILNNQLTSLMWIDEKAEEFSSRIQKLANPGSATDRELTGLGIWMS

SEQ ID NO: 263323 - protein, 69 aa, Glycine max
  Clone ID: PAT_MRT3847_79802C.1.pep
ISRHPLLWSHGLVDRTVMFEAGQAGPPFLEKIGVGCEFKAYPGLGHTINNEELLYLESWIKARLQSSSQ

SEQ ID NO: 263324 - protein, 63 aa, Glycine max
  Clone ID: PAT_MRT3847_79803C.1.pep
IKVGGQGGTSSCHILKQTGQNYAYINMRLKETIEQRDMPWADLEPCNDSCLERTGPTHRESGY

SEQ ID NO: 263325 - protein, 253 aa, Glycine max
  Clone ID: PAT_MRT3847_79804C.1.pep
MKLIKGSVVLTITITLSSAILLLLLFPQNQKPSSSSMSRARSFVLWLHGLGDSGPANEPIKTLFTSSQFRDTKWSFPSAPSAPVTCNYGSVMPSWFDILEIPVAADSPNDESSLLKAVRNVHATIDKEIAAGINPNNIFICGFSQGGALTLASVLLYPKTLGGGAVFSGWVPFNSSIIEQITPEAKQTPILWSHGLVDRTVMFEAGQAGPPFLEKIGVGCEFKAYPGLGHTINNEELLYLESWIKARLQSSSQ

SEQ ID NO: 263326 - protein, 204 aa, Glycine max
  unsure (1)..(204): unsure at all Xaa locations
  Clone ID: PAT_MRT3847_79805C.1.pep
MSRSGAKTNMEEQVSVSGSSNQKNLGFGNPLLESDDVSFPENSKSGSLSTDSDIHHYYETKVASLMRKFGILEGQLAAALASREAAEKSLASAFKSRQEMERKLADTLKEMELLREKLVNAELAQEEANNLSNMVHADNVRLEHDVAFLKAVLDDTHKELHSTRGVLAAERTRALXLQVEVFHLKQRLQSMENRVPTPRKPFQV

SEQ ID NO: 263327 - protein, 72 aa, Glycine max
  unsure (1)..(72): unsure at all Xaa locations
  Clone ID: PAT_MRT3847_79806C.1.pep
MGKVKIGINGFGRIGRLVARVALQRDXVELXAXNDPFITTDYXTYMXKYDSXHGHWKXHXVTVKDEXTXXLG

SEQ ID NO: 263328 - protein, 86 aa, Glycine max
  Clone ID: PAT_MRT3847_79807C.1.pep
GFRFGRAFQAGGIGKFGSIFLAAVDRGLYFWNRGNFFGGGFGLFFFFFSFRGGGLGVCGVRVFFWNPLKKHFQFRFNGVGGLGFIK

SEQ ID NO: 263329 - protein, 106 aa, Glycine max
  unsure (1)..(106): unsure at all Xaa locations
  Clone ID: PAT_MRT3847_79808C.1.pep
MLFVENNMFRIVIDFDFDNXTLSYSHSDYWDIDKFDLTDWIYQLLATMPWNFIMGRMMMELYXKVRPYRTSEXVLGKTNLHQKGIHAIHVAYAFGSDLTIVRDSYM

SEQ ID NO: 263330 - protein, 76 aa, Glycine max
  Clone ID: PAT_MRT3847_79809C.1.pep
CFICKATPSVGQHHAASTTLCSSRLKSAKARCLSITSMSRPQGFWQQYGFMHSHLDVWDQILSCNVKVCYTVLHII

SEQ ID NO: 263331 - protein, 178 aa, Glycine max
  Clone ID: PAT_MRT3847_7980C.1.pep
RGSKHTLNRPKILYSRLTLANPPLLAFLYSIAMLDSVIEYITQAASSYAFIFCFCNLIIVIILVDLKPKLSFDQESEEIPLSMPTNIGIQEANSKSLANKNTFSPQAIEVSQHAKEEVVVDKVENEGSDNCNCNSTEEDDDELKRRVEEFIERVNEGWKAEHLSTSSLLWGENKELLE

SEQ ID NO: 263332 - protein, 109 aa, Glycine max
  unsure (1)..(109): unsure at all Xaa locations
  Clone ID: PAT_MRT3847_79810C.1.pep
VLXSCGXXXXXXXWXXFFXXXXRXFXXDCXXXXXALXXSWCXXXXVSRASXXHXXXXXVXXXXXXXXXXXXXXSWXXXXLLXXSXXXXXXXRXXXXXXXXDSXLXXRGS

SEQ ID NO: 263333 - protein, 84 aa, Glycine max
  Clone ID: PAT_MRT3847_79811C.1.pep
SPEFLSTIQLTGLQISIILLVLFQRDPLIVLVCFCLAPFGSSMDSSFISFPLDLLVTLLWIVLTCPVKKNDCNQVLFSLLVSTT

SEQ ID NO: 263334 - protein, 318 aa, Glycine max
  unsure (1)..(318): unsure at all Xaa locations
  Clone ID: PAT_MRT3847_79812C.1.pep
MNVDLESLAEATSGAIGSLISTTILYPLDTCKTKYQAEARSSGRTKYRNLTDVLLEAISNRQVLSLYQGLGTKNLQSFISQFVYFYGYSYFKRLYLEKSGYKSIGTKANLVIAAAAGACTAIATQPLDTASSRMQTSEFGKSKGLLKTLTEGNWSDAFDGLSISLLLTSNPAIQYTXLDQLKQRALKNKQDNADKGTSPASLSAFMAFLLGAISKSIATCLTYPAIRCKVIIQAADSAEPTSKTKIKSQKTVFSVLYGIWKREGILGYFKGLHAQILKTVLSSALLLMIKEKISASTWVLILALKRYLLLPRGRIKNL

SEQ ID NO: 263335 - protein, 43 aa, Glycine max
  Clone ID: PAT_MRT3847_79813C.1.pep
KNCHTGLAWCQGNYGQYNNIFRSGAPSFPHCIRKCLVALFVTS

SEQ ID NO: 263336 - protein, 88 aa, Glycine max
  Clone ID: PAT_MRT3847_79814C.1.pep
PGAALLSLPSLLTPLIFYALAQYCVCQARWSSSLHCSTMFHRDSHPSKRSHQAVGPLTPQSCLIITKAVARICQEAPFIIGAFPDNTT

SEQ ID NO: 263337 - protein, 49 aa, Glycine max
  Clone ID: PAT_MRT3847_79815C.1.pep
MVLLQQDNRRVQQHKDHRMVRLRLTLLNGTVVIRPQHGPAVRRLHMGQA

SEQ ID NO: 263338 - protein, 73 aa, Glycine max
  Clone ID: PAT_MRT3847_79816C.1.pep
GEGWMKKLIRESHNHALAKLLVRHPYVDRLTINEKIIIGDMIKLIIKSKNCGIEGAKCYPLYNNKASNSKIHF

SEQ ID NO: 263339 - protein, 44 aa, Glycine max
  Clone ID: PAT_MRT3847_79817C.1.pep
IIYHTHALHLPKSSHYHTSSSNMFLFCQLHTFYFHRSYVMFTNA

SEQ ID NO: 263340 - protein, 96 aa, Glycine max
  Clone ID: PAT_MRT3847_79818C.1.pep
IIILYNHSREKTNHTLTFSLLIENNKLSFLHKQNNTGNQILCYESAFRHSCKGFIFFKRYDESCNFATAALTYTKIKLGNHQISNSSKLQQPMPSK

SEQ ID NO: 263341 - protein, 91 aa, Glycine max
  Clone ID: PAT_MRT3847_79819C.1.pep
YGRREGAAYISIIGVILSLPADNIIYRCIHMPAHGKNVDDIYLKSNTDVVWLSLTNSTEILFYAVPHNYTSFLILVRIRHVCWFNPSHKTW

SEQ ID NO: 263342 - protein, 79 aa, Glycine max
  Clone ID: PAT_MRT3847_7981C.1.pep
RSITSGGFFRTCVPAPASARALPTERCIRTRLQCSDSYNLWLIVIDKQFHAPNKYEPEIVNTKQGWGDRVRTLTEMVFQ

SEQ ID NO: 263343 - protein, 114 aa, Glycine max
  Clone ID: PAT_MRT3847_79820C.1.pep
MQDGVLVEELRRLSCENKRLTGMLTHLCENYKALQKQLSQLINTNFEQLDPIESRKRKAESDQWCTNKFIGVNNAECSSITEDSFRKYKDFNSSPKVSKVLVKTEASNNSLVSS

SEQ ID NO: 263344 - protein, 103 aa, Glycine max
  unsure (1)..(103): unsure at all Xaa locations
  Clone ID: PAT_MRT3847_79821C.1.pep
QGGLKLTQPNVFVEGANLFAMQLARAXRPPYGFKXVLGLDLLEIIPKVAPGVNLSPSDIVFGFPTHNPDAPVMLDRILRLWAGYNIFFFSFRTLLHGRVERLY

SEQ ID NO: 263345 - protein, 71 aa, Glycine max
  Clone ID: PAT_MRT3847_79822C.1.pep
NELKYWCTISQNSLITMVKCIYLDEIQQIHLQSTHSADRKKQIVGHLLRLFLIILINPAIYSDVCLQFPTI

SEQ ID NO: 263346 - protein, 86 aa, Glycine max
  Clone ID: PAT_MRT3847_79823C.1.pep
LSLSISVITVAQVTSAKPDYGSFRDMAFRAMMTEPPYEELARRHASDAIEHASTTGMCDFSSNLQRFIHDLILERHHNCLHRYESE

SEQ ID NO: 263347 - protein, 100 aa, Glycine max
  unsure (1)..(100): unsure at all Xaa locations
  Clone ID: PAT_MRT3847_79824C.1.pep
KESAGLETLCIKDQTLTNEMAQNIIGWSVSHHLMQNLXAKPDSKLGLSXESMPYGIGILQNIQNESKSLNKSLKDVATDHESEKRLLADVIPPSDSEGTL

SEQ ID NO: 263348 - protein, 185 aa, Glycine max
  Clone ID: PAT_MRT3847_79825C.1.pep
IHRDLKASNVLLDEKFNPKISDFGTAKAFGGDQIEGNTKRVVGTYGYMAPEYAVAGLFSIKSDVFSFGILLLEIVCGIKNKALCDGNQIHSLAWTLWKEKNALQLIDSSIKDSCVISEVLRCIHVSLLCLQQYPGDRPTMTSVIQMLGSEMELVEPEEHSFLSKQNLGVKDYLSFDPKLMTSEVE

SEQ ID NO: 263349 - protein, 55 aa, Glycine max
  Clone ID: PAT_MRT3847_79826C.1.pep
NNSFIEPQFPVPPLKSTFNLTLNFAKQELILPPLIGKYFQESFVRVLRGEFKSMR

SEQ ID NO: 263350 - protein, 54 aa, Glycine max
  Clone ID: PAT_MRT3847_79827C.1.pep
KGGTPFFFFFKIYKFVLYIFFLFFIYFFLFFFFFFLFFFFYFFFFKFKSIKLIT

SEQ ID NO: 263351 - protein, 223 aa, Glycine max
  Clone ID: PAT_MRT3847_79828C.1.pep
MGRGRVVLERIENKINRQVTFSKRRSGLLKKAFELSVLCDAEVGLIIFSSRGKLFQYSSTDITKIIERYRQCRYSKSHTGDSLEHDSQSAYHEFLKLRAKYESLERTQRHFQGEDLEPLSFKDLQSLEKQLDITLALTRQHQTKKLMARADELREKEKDEFSSLILDNNNYIQMHATQVDQFESETALNTCRFQHQEVVSKEKAIDTRTEHSQSSHNKNNGWL

SEQ ID NO: 263352 - protein, 64 aa, Glycine max
  Clone ID: PAT_MRT3847_79829C.1.pep
FNRTVTKMREHIRDFLVQIREEAGDDTADLFLEEKEAEIQRIQSLKQAIPGVRNPNELLEEDMV

SEQ ID NO: 263353 - protein, 99 aa, Glycine max
  Clone ID: PAT_MRT3847_7982C.1.pep
MVWNAFPKQRVFGSKPAERETERERGEMGYVMRVRLASFFTGAAVASFLGLYTLHKDYKVAHQSFTQQMNDLHKSLEGRISSLEKMKQTETSEQVEATE

SEQ ID NO: 263354 - protein, 138 aa, Glycine max
  unsure (1)..(138): unsure at all Xaa locations
  Clone ID: PAT_MRT3847_79830C.1.pep
MGRGRVVLERIENKINRQVTFSKRRSGLLKKAFELSVLCDAEVGLIIFSSRGKLFQYSSTDITKIIERYRQCRYSKSHWXIHWNTIHRHFQGEDLEPLSFKDLQSLEKQLDITLALTRQHQTKKLMARADELREKVSC

SEQ ID NO: 263355 - protein, 66 aa, Glycine max
  Clone ID: PAT_MRT3847_79831C.1.pep
LHLLYCRGAIFVILNTPNQFSLIQCSHAYIVMTDMLLTEWMVICALKVLILIMNIQGNLLIMLYLL

SEQ ID NO: 263356 - protein, 158 aa, Glycine max
  Clone ID: PAT_MRT3847_79832C.1.pep
GRGRVVLERIENKINRQVTFSKRRSGLLKKAFELSVLCDAEVGLIIFSSRGKLFQYSSTDITKIIERYGQCRYSKSHTGDSLEHDSQSAYHEFLKLRAKYESLERTQRHFQGEDLEPLSFKDLQSLEKQLDITLALTRQHQTKKLMARADELREKVSC

SEQ ID NO: 263357 - protein, 243 aa, Glycine max
  Clone ID: PAT_MRT3847_79833C.1.pep
MGRGRVVLERIENKINRQVTFSKRRSGLLKKAFELSVLCDAEVGLIIFSSRGKLFQYSSTDITKIIERYRQCRYSKSHTGDSLEHDSQSAYHEFLKLRAKYESLERTQRHFQGEDLEPLSFKDLQSLEKQLDITLALTRQHQTKKLMARADELREKVHKLEDLNKQLESKVFSLNNHEKDEFSSLILDNNNYIQMHATQVDQFESETALNTWFQHQEVVSKEKAIDTRTEHSQSSHNKNNGWL

SEQ ID NO: 263358 - protein, 51 aa, Glycine max
  Clone ID: PAT_MRT3847_79834C.1.pep
MLYCPWEFTCHLFVILTSSLLSFFFLVLKLLWGGCLFYISCCFFIILVLFF

SEQ ID NO: 263359 - protein, 73 aa, Glycine max
  Clone ID: PAT_MRT3847_79835C.1.pep
NYAKMSVQSIDQNSWVNFYGNIGKLLLSLVSLFFDILFMCQHYLLYPEKKRKLEGSPEPDNAKSSDRPLSENV

SEQ ID NO: 263360 - protein, 236 aa, Glycine max
  Clone ID: PAT_MRT3847_79836C.1.pep
MGRGRVVLERIENKINRQVTFSKRRSGLLKKAFELSVLCDAEVALIIFSSRGKLFQYSSTDINKIIERYRQCRYSKSQTDDSLEHDSQSSYHEFLKLRAKYESLELTQRHFQGEELEPLSFKDLQSLEKQLDITLALTRQHQTKKLLARADELREKVHKLEDLNKQLESKEKDEFSSLILDNNNYIQVHATQGDQFESGTTLNTCRFQRQDSKEKAIDTKTDGSQSSHNKNKGWLL

SEQ ID NO: 263361 - protein, 109 aa, Glycine max
  Clone ID: PAT_MRT3847_79837C.1.pep
IAVLKTKVLFVIKKFNTLRRINNSNRIRNESMSLRALKESLRPCSTLKPSSSSSITQTQPYSILRESDSLFPIHRKPPKSSLSHQLRRLDDSLTQTHSKTLQQQQQQQE

SEQ ID NO: 263362 - protein, 323 aa, Glycine max
  Clone ID: PAT_MRT3847_79838C.1.pep
MASFHILVLVVAMVTLMIPTNANLSPHFYDKVCPQALPVIKSVVQRAIIRERRIGASLLRLHFHDCFVNGCDGSILLDDTRNFTGEKTALPNLNSVRGFSVVDEIKEAVDKACKRPVVSCADILAIAARDSVAIYGGPHYWYQVLLGRRDARTASKAAANSNLPPPSFSFSQLVSNFKSHGLNVRDLVALSGGHTLGFARCSTFRNRIYNASNNNIIDPKFAASARKTCPRSGGDNNLHPFDATPARVDTAYYTNLLHKKGLLHSDQELFKGKGTESDKLVQLYSRSPLVFARDFKASMIKMGNMKPLTGKKGEIRCNCRRVN

SEQ ID NO: 263363 - protein, 74 aa, Glycine max
  Clone ID: PAT_MRT3847_79839C.1.pep
RVSLSLIAHSLVSYTQTLFSCFSTTIHSSSPCSVYSTFSSFSYFCPFAHMYPISSRFYLISNSIIFHFMCHLYI

SEQ ID NO: 263364 - protein, 29 aa, Glycine max
  Clone ID: PAT_MRT3847_7983C.1.pep
RHPYLLFEDKYSCLLFCILNYVISSFSKS

SEQ ID NO: 263365 - protein, 327 aa, Glycine max
  Clone ID: PAT_MRT3847_79840C.1.pep
MASFHIQYSFLVLVLAMVITLMNPTNATLSPHFYDKVCPQALPVIKSVVQRAIIRERRIGASLLRLHFHDCFVNGCDGSILLDDTRNFTGEKTALPNLNSVRGFSVVDEIKAAVDKACKRHVVSCADILAIAARDSIAIYGGPHYWYQVLLGRRDARTASKAAANSNLPPPTFSFSQLVSNFKSHGLNVRDLVALSGGHTIGFARCTTFRNRIYNVSNNIIDPTFAASVRKTCPKSGGDNNLHPLDATPTRVDTTYYTDLLHKKGLLHSDQELFKGKGTESDKLVQLYSRIPLAFARDFKASMIKMGNMKPLTGRQGEIRCNCRRVN

SEQ ID NO: 263366 - protein, 58 aa, Glycine max
  unsure (1)..(58): unsure at all Xaa locations
  Clone ID: PAT_MRT3847_79841C.1.pep
HRWESIYLGLQPVNRTLPRLVSVVKEPVLVPPDVVPLSFXNSSFXPCVVWCSQNICPH

SEQ ID NO: 263367 - protein, 51 aa, Glycine max
  Clone ID: PAT_MRT3847_79842C.1.pep
MQLKLKVPKAGETHDSEPYSRIGDSRFRSSSSIIIAILLRCMFGHFKHIRC

SEQ ID NO: 263368 - protein, 99 aa, Glycine max
  unsure (1)..(99): unsure at all Xaa locations
  Clone ID: PAT_MRT3847_79843C.1.pep
VSCAAEDLTSFHTLTAKPVSYLDNVTEKDDQXKKNMFLPNNNAWVQEHRDETIITFNCALKRNLAYMTPDYADTHCEENKTHSALTKMTETGSSAINLI

SEQ ID NO: 263369 - protein, 57 aa, Glycine max
  Clone ID: PAT_MRT3847_79844C.1.pep
ENLVLIRTRARGVKREKSFRNLFTSHPHPSFFYSHQWNLVGCFPLTSIKTPSLFKRT

SEQ ID NO: 263370 - protein, 56 aa, Glycine max
  unsure (1)..(56): unsure at all Xaa locations
  Clone ID: PAT_MRT3847_79845C.1.pep
LPEMNRCSVPSSACFLKLKEQXSCFCGYLKNPGLKQYVYSTNAKKTGSSCGIVCPS

SEQ ID NO: 263371 - protein, 104 aa, Glycine max
  unsure (1)..(104): unsure at all Xaa locations
  Clone ID: PAT_MRT3847_79846C.1.pep
MKHAPPNFVKKKTPKNRLPAGPPEKQPVLPIPQKRGTAGGPGKTGGGRRAPGGPKPNAGLSPQGGRRGPXGKRQKTHGPGGNSKKRVDLLGGLSPGGPGGTHPG

SEQ ID NO: 263372 - protein, 171 aa, Glycine max
  Clone ID: PAT_MRT3847_79847C.1.pep
KCPEGGAPPPPKGEYRGVASQKWGHSGGPIFAHLEKKAISGKKRWERKNLGYWGAFRPLSWERGPPLGSTTSPRTLGNGVEVPPFQKQREWANPFSHGQHPAFFWVPGPLNKHPSGSGIFQETVFFAHAPKVGQGFPVKKKKKKEKKKKKTKKKKNNQKKKKKGGHRHSEL

SEQ ID NO: 263373 - protein, 101 aa, Glycine max
  unsure (1)..(101): unsure at all Xaa locations
  Clone ID: PAT_MRT3847_79848C.1.pep
VPPLQALFMPYDXKLTPDGLPMQRMRSLLEEVNQLHCQERCMIGSGGGSVGSVDFYLNLMWMMQIFKRPSPKCLYFINVPVIYLGCQKKKTLLCLKLVQQG

SEQ ID NO: 263374 - protein, 32 aa, Glycine max
  unsure (1)..(32): unsure at all Xaa locations
  Clone ID: PAT_MRT3847_79849C.1.pep
KFIYYDFFLIFLPMILXSIYSLCTFFFIKFYY

SEQ ID NO: 263375 - protein, 80 aa, Glycine max
  Clone ID: PAT_MRT3847_7984C.1.pep
KKETRGKKKQTSHAPSYRKMFYGAFPPGKEKIPWEPGPPKRPFFFLNPRKMLKVFNPSQSRRSSKFASKKKDSSLSTLFF

SEQ ID NO: 263376 - protein, 69 aa, Glycine max
  Clone ID: PAT_MRT3847_79850C.1.pep
RGSSSSHLQNCVVFSPLGVKQAVLFMVINLILLLSCIIFIHSLFFSSQLCLCFSLLLKKIFGEKLLRMI

SEQ ID NO: 263377 - protein, 107 aa, Glycine max
  Clone ID: PAT_MRT3847_79851C.1.pep
SPSHPNALLDLPPRKPEPSAEPSFKPTNFSGKITAAETAEEQAFDPEPHGGESSGLKLLALLLQCTECVAMDNLDFANELLPEIVDAYFAQALHFTAGEVLALAHHR

SEQ ID NO: 263378 - protein, 98 aa, Glycine max
  Clone ID: PAT_MRT3847_79852C.1.pep
MAGITKTSHFSVVLIAVVALCVFPAATSDNVASAVLGLPSHVAGEGKNLCSAAAPSSCPVKCFRTDPVCSVDGVTYWCGCSEAAYASAQIAKLGFCEV

SEQ ID NO: 263379 - protein, 63 aa, Glycine max
  Clone ID: PAT_MRT3847_79853C.1.pep
LLRNIYFKYNTIFQGNKRGIQHLESIIISQPICRYRRAKTKLYFMPSQVHMQILNYINFLTIS

SEQ ID NO: 263380 - protein, 115 aa, Glycine max
  Clone ID: PAT_MRT3847_79854C.1.pep
YTKSACGASLLTASHTPLSLILKFIIKEERETLQYPRPFLLFPFQLFQLLFLFIQNISINLLFPPHYKYASLHTKHCHTTPILACVFLAITTHPVHPLNLIHPFNLVLCNCVQMR

SEQ ID NO: 263381 - protein, 51 aa, Glycine max
  Clone ID: PAT_MRT3847_79855C.1.pep
SFRKFFFTRSPFIPQENSFDTCTYTVKCGNFLTAWVFHHPQIGYFLLFSPI

SEQ ID NO: 263382 - protein, 47 aa, Glycine max
  unsure (1)..(47): unsure at all Xaa locations
  Clone ID: PAT_MRT3847_79856C.1.pep
TTPRPIAESRRLXNLQSQPANKICVDCSQKNPQWASDSYGVSMCLEC

SEQ ID NO: 263383 - protein, 110 aa, Glycine max
  Clone ID: PAT_MRT3847_79857C.1.pep
PLSGAGGLSPLASWITQCCQGIFLSVASVASLSRPIALSTPFFSHLLHPWVQAFLSLGLLHYSMLSFPSRTFPCRMVCTSMVSVQSPRLFFAVRWAHVHVFSSRRIPSFV

SEQ ID NO: 263384 - protein, 138 aa, Glycine max
  Clone ID: PAT_MRT3847_79858C.1.pep
TRPDKEGIPPDQQRLIFAGKQLEDGRTLADYNIQKESTLHLVLRLRGGMQIFVKTLTGKTITLEVESSDTIDNVKAKIQDKEGIPPDQQRLIFAGKQLEDGRTLADYNIQKESTLHLVLRLRGGMQIFVKTLTGKTIT

SEQ ID NO: 263385 - protein, 99 aa, Glycine max
  Clone ID: PAT_MRT3847_79859C.1.pep
NEIQPMAHSYESEAYYGGVTRLSSVRQLGNRHIRIYVISSSKLRSASTLRIRPSHTITSGRPHAYISKVPAKYARRHQVEPTLSRSLESLASISIRTYS

SEQ ID NO: 263386 - protein, 56 aa, Glycine max
  Clone ID: PAT_MRT3847_7985C.1.pep
SLGLRCSRVFLSSSTPHYACGIRPPSIGCEEGNVILVDKAGIVLALVFECLFSTDY

SEQ ID NO: 263387 - protein, 49 aa, Glycine max
  Clone ID: PAT_MRT3847_79860C.1.pep
RDLIISLSCKTIFVDDDHNWQKRCFLISTKSVVTYLFQLSMSKYIFFSL

SEQ ID NO: 263388 - protein, 98 aa, Glycine max
  unsure (1)..(98): unsure at all Xaa locations
  Clone ID: PAT_MRT3847_79861C.1.pep
DVGTNAVMVGFGYFSGSQCLSFKGTSHEPFGVLFWLCWSILLCYSNVEGGCGIMFMDGWRFAFGWALPAFLKNSKXVVWLGGVNYREKKFGFVXFFPP

SEQ ID NO: 263389 - protein, 47 aa, Glycine max
  Clone ID: PAT_MRT3847_79862C.1.pep
SSPDIGEGGEKSSPRTVYELRSTGAREKYCISLSKTSCKGISSSFTF

SEQ ID NO: 263390 - protein, 151 aa, Glycine max
  Clone ID: PAT_MRT3847_79863C.1.pep
MKRASMATFSPKHSSKYGVRSISLPTRSHPSTVRVEEELSKLKSLEASSSSSSTPKVETICCGLSGLAELYKCIEDLLKLPLTQQAIGQHQNEKWVNELLDCPVGFLDLLGKTRDSILLMKGSVGELQSALRRKRVGDLYMESYLPTYWRL

SEQ ID NO: 263391 - protein, 445 aa, Glycine max
  unsure (1)..(445): unsure at all Xaa locations
  Clone ID: PAT_MRT3847_79864C.1.pep
MKLLHKHGRPHHHHQQQQEKNCLYRYYKWVLWLSLSLYFFTSYLISNNNNNTTXTKQPSHVSRALIESNHTTTPQHALNSPGSLKKLKVFVYDLPPKYNTDWLTNERCSKHLFASEVAIHRALLTSEVRTFDPYDADFFFVPVYVSCNFSTVNGFPAIGHARSLIASAVNLISSEYPFWNRSRGSDHVFVASHDFGSCFHTLEDVAMADGVPEIVRNSIVLQTFGVVFDHPCQKVEHVVIPPYVSPESVRDTMENFPVDGRRDIWAFFRGKMEVHPKNVSGRFYSKKVRTVIWRKFNGDRRFYLQRHRFAGYQSEIARSVFCLCPLGWAPWSPRLVESVALGCVPVVIADGIRLPFVSAVKWSEISVTVAEKDVGRLAEILERVAATNLSTIQRNLWDPATRRALLFNSQVQVGDATWQVLRALSEKLDRSFRSSRVSRQLDFDT

SEQ ID NO: 263392 - protein, 43 aa, Glycine max
  Clone ID: PAT_MRT3847_79865C.1.pep
RVILLHARARKKQFFSLNVSLCETNFNLLFNLERKQTLVVTVC

SEQ ID NO: 263393 - protein, 101 aa, Glycine max
  unsure (1)..(101): unsure at all Xaa locations
  Clone ID: PAT_MRT3847_79866C.1.pep
PTSRPPTRPQRGEAFNKLFAELAKSGPTWAGIEXPKDEKLPRRKILDRPQTHCFTSPALAECQILLGPPRSVVXFERDIMKKRDKLRRQAGINPYSMEWTG

SEQ ID NO: 263394 - protein, 79 aa, Glycine max
  Clone ID: PAT_MRT3847_79867C.1.pep
QKPSFSSSSWLRHNNGAWSVTRVAAEESVSFTVYSVLLPSFLCVSVDATMPSVQRGSFSNRQTQFSERRQKIIQQRKSL

SEQ ID NO: 263395 - protein, 151 aa, Glycine max
  unsure (1)..(151): unsure at all Xaa locations
  Clone ID: PAT_MRT3847_79868C.1.pep
GYFTRFIVSADSEEFCCRSLPVNYVRLDQDILSPLAGKKQLYIYETNDFWEQIKTPGMSIKCSGLYLAQFRYTSPHLLANGDGIKKASITGDVYIHPSAKVHPSAKIGPSVSISANARIGAGARLKHCIILDDVEIXENALVGHAIVGWKS

SEQ ID NO: 263396 - protein, 269 aa, Glycine max
  Clone ID: PAT_MRT3847_79869C.1.pep
ARRNWRVSEGFGELVADPTTNELLHYTEKPETFVSDRINCGVYIFTPDIFTAIEGVSTQRKDRANLRRVSSFEAMQPDTRSLPVNYVRLDQDILSPLAGKKQLYIYETNDFWEQIKTPGMSIKCSGLYLAQFRYTSPHLLANGDGIKKASITGDVYIHPSAKVHPSAKIGPSVSISANARIGAGTRLKHCIILDDVEIKENALVGHAIVGWKSSIGRWACVEASGDYNAKLGVTILGESVTVEDEVVVLNSIVLPHKTLNLGVQDEILL

SEQ ID NO: 263397 - protein, 448 aa, Glycine max
  unsure (1)..(448): unsure at all Xaa locations
  Clone ID: PAT_MRT3847_7986C.1.pep
MEECHTVFGKYEMGRLLGKGTFAKVYYGKQISTGESVAIKVINKEQVRKEGMMEQIKREISVMRLVRHPNVVEIKEVMATKTKIFFVMEYVRGGELFAKISKGKLKEDLARKYFQQLISAVDYCHSRGVSHRDLKPENLLLDEDENLKISDFXGLSALPEQLRYDGLLHTQCGTPAYVAPGVLRKKGYDGSKADIWSCGVVLYVLLAGFLPFQHENLMTMYYKVLRAEFEFPPWFSPESKRLISKILVADPAKRTTISAITRVPWFRKGFSSFSAPDLCQLEKQEAVTEEENNSKVPKFFNAFEFISSMSSGFDLSGLFETKRKTAAVFTSKCSAAAIVAKIAAAARGLSFRVAEVKDFKIRLQGAAEGRKGRLAVTAEVFEVAPEVAVVEFSKSAGDTLEYAKFCEEDVRPALKDIVWTWQGDATCAANFPACHGEECQKQVVVSTI

SEQ ID NO: 263398 - protein, 65 aa, Glycine max
  Clone ID: PAT_MRT3847_79870C.1.pep
KWYCFLLCWYVDLFTFHNQKGVGLGSEMLPYTWAPEKACSYEHLTVWFHMKTDYCCAMTMTLSSG

SEQ ID NO: 263399 - protein, 49 aa, Glycine max
  Clone ID: PAT_MRT3847_79871C.1.pep
LLILSPKTLQESQSKFCLQRILLIGCFDVFKDLGSDLPKLCKFEFELCI

SEQ ID NO: 263400 - protein, 61 aa, Glycine max
  unsure (1)..(61): unsure at all Xaa locations
  Clone ID: PAT_MRT3847_79872C.1.pep
IXIKYSXNHALTXXGELVLLXTREQVMWLIXXKGTLSFXXRDLIXNQSTPSSPLSXYLDVY

SEQ ID NO: 263401 - protein, 75 aa, Glycine max
  Clone ID: PAT_MRT3847_79873C.1.pep
ETKKNLGGLPKSVIRNPLALKNSQNSKWQKLVKPLIQEIDCISHKTFVQCLYSGRFLFAQHTKVLLPFNYNLDRF

SEQ ID NO: 263402 - protein, 55 aa, Glycine max
  unsure (1)..(55): unsure at all Xaa locations
  Clone ID: PAT_MRT3847_79874C.1.pep
RXXTMTGVSLSCPRVFFNASASXQNAHXVXFSLPHNIXXXXXXIXXGHXMXIRTF

SEQ ID NO: 263403 - protein, 101 aa, Glycine max
  unsure (1)..(101): unsure at all Xaa locations
  Clone ID: PAT_MRT3847_79875C.1.pep
MLAIRVEKENPHPFSSHPFSVNNSVMASQAAVDEHLLGDLLCDHLTHPVIIRQDWXVRAQSANLPQIKPEEITAIXHDFNEPGSLAPTGFDTGGTIYMAIH

SEQ ID NO: 263404 - protein, 38 aa, Glycine max
  Clone ID: PAT_MRT3847_79876C.1.pep
PLLFFFFFFLCKKKKVLFWTPNTQFIMNRICKLIHSPL

SEQ ID NO: 263405 - protein, 132 aa, Glycine max
  Clone ID: PAT_MRT3847_79877C.1.pep
TRSHFSLSSALHQSQPRSFSYVADGERFDSCIHPTGVVHSNAVIGQGVSIGPFCSVSSSAKLGNGCQLHPGSHVFGSTELGDNCMLMTGAVVGDDYPGCTVIGSNNTIGYHAVIGVKCQDMKYKPEDECFLE

SEQ ID NO: 263406 - protein, 92 aa, Glycine max
  Clone ID: PAT_MRT3847_79878C.1.pep
AKKNLNGVCRRGSYVVVSYYALLWLVTLFNLAWSFLQPWQCSPAKEVAWNLLSLFTASGMLCLEISLMAFLLKDNYMSGMEALAHSSMHQEL

SEQ ID NO: 263407 - protein, 153 aa, Glycine max
  Clone ID: PAT_MRT3847_79879C.1.pep
PTRQGTRSHFSLSSALHQSQPRSFSYVADGERFDSCIHPTAVVHPNAVIGQGVSIGPFCSVSSSAKLGNGCQLHPGSHVFGSTELGDNCMLMTGAAGGDDYPGCTVIGSNNTIGYHAVIGVKCQDMKYKPEDECYLEVGHNNDIREHTSIHRS

SEQ ID NO: 263408 - protein, 83 aa, Glycine max
  Clone ID: PAT_MRT3847_7987C.1.pep
MNITNPQHFKKTKTPTQTIKTQSLSDYKQQNKATVTLQYLLKTKFSRKEHKKLLISSRETFSLNESNDKFHKLVYDLTSIINI

SEQ ID NO: 263409 - protein, 65 aa, Glycine max
  Clone ID: PAT_MRT3847_79880C.1.pep
RVHQLCSGLILFEMGLPCDRHIFTFGLYWVIRLIHLNNVAGTFKDPLIHECGCNSEAHLYFCQKK

SEQ ID NO: 263410 - protein, 70 aa, Glycine max
  Clone ID: PAT_MRT3847_79881C.1.pep
VFRRKEQQQQQQQQHSSGYFWGERRLYLKLKGGGLFNIKKAERRTKWLGGVLRERENRDQKGGIGENSPG

SEQ ID NO: 263411 - protein, 75 aa, Glycine max
  Clone ID: PAT_MRT3847_79882C.1.pep
MEGIAENSNDTTIPKKSRSLDLKSLYKSKLTENTAKKNLKRIGNSSGGGGEKRKKKKTRMEVSLSSLQMVMVVES

SEQ ID NO: 263412 - protein, 122 aa, Glycine max
  unsure (1)..(122): unsure at all Xaa locations
  Clone ID: PAT_MRT3847_79883C.1.pep
GRLLRNVLYFFRNSVSQWCVFLTDVSFCSGSLQFVVPLAVSSVFLPISVRFTASNTFFFLKVTGIMPLKGGGFPXFGPRALLFPVLLPPLCGWPSFVWAPVAVKKHKMWFPPPSAIYIWSGL

SEQ ID NO: 263413 - protein, 49 aa, Glycine max
  Clone ID: PAT_MRT3847_79884C.1.pep
YKYDTWSNNSINNKKITYKQTFDFDMIKLGFKVKVKLLIGPYNFMIRNF

SEQ ID NO: 263414 - protein, 59 aa, Glycine max
  Clone ID: PAT_MRT3847_79885C.1.pep
KTQTLTYCFYSLLVICSLMTHQYFFFTTTEKLLFIYITERLLLNSTIFITKSFYCIVKY

SEQ ID NO: 263415 - protein, 53 aa, Glycine max
  Clone ID: PAT_MRT3847_79886C.1.pep
TRTNRAFFLNLNRINRSSFTLDFYHEHLFSHKCILRTYSALLKTISIKLKDSI

SEQ ID NO: 263416 - protein, 61 aa, Glycine max
  Clone ID: PAT_MRT3847_79887C.1.pep
RNAAPDWAGGRIHRSLNTSYFITFYQHLPLLSLSPSSHTRPRWDFPFLLPILLHHYITLYL

SEQ ID NO: 263417 - protein, 128 aa, Glycine max
  Clone ID: PAT_MRT3847_79888C.1.pep
LTSPLDNGSKQKGMVQRKPGRGDTTLSVSCSDKIARWNDGGGQGAMLSYFLQPVYRSSITGGLTLNIPENYRLEDNLKRALNERIPPLANELTSPLLGNQAIFDAGPRPPKDFQQSESAANSLACGYS

SEQ ID NO: 263418 - protein, 77 aa, Glycine max
  unsure (1)..(77): unsure at all Xaa locations
  Clone ID: PAT_MRT3847_79889C.1.pep
KAFSLINIIFFIFLFILSYLIYYYCYYFXYYFSLILLLLFFYFFSIFLFYYIINIILSFFLIISHFFLFFFNYYLFF

SEQ ID NO: 263419 - protein, 179 aa, Glycine max
  Clone ID: PAT_MRT3847_7988C.1.pep
MSRSSAMHGITSTNNKLKGVRRRKWGKWVSEIRVPGTQERLWLGTYATPEAAAVAHDVAVYCLSRPSSLDKLNFPETLSSYSVQLRDMSPRSVQKVASDVGMDVDARNIVAGKTSTVGAETNCESDERTSTASVCNVVGEGGADHSDVFWWDDDGGSWHGSGGDSTERDALSISIEDYL

SEQ ID NO: 263420 - protein, 147 aa, Glycine max
  Clone ID: PAT_MRT3847_79890C.1.pep
MGDNNIGKVLEREGFKYNFTAAASDTSAQDEVIKEQDRLLPIANVGRIMKQILPPNAKISKEAKETMQECVSEFISFVTGEASDKCHKEKRKTVNGDDICWALATLGFDDYSEPLKRYLHKYREFEGERANQNKGNNNTYENNIANI

SEQ ID NO: 263421 - protein, 74 aa, Glycine max
  Clone ID: PAT_MRT3847_79891C.1.pep
IKFKDQTAEPSGYKCLLCKRDLSYAPEGPISQPPVPPATAVLPCGHTFHDYCLERITPDDQSKYPPCIPCALLE

SEQ ID NO: 263422 - protein, 306 aa, Glycine max
  Clone ID: PAT_MRT3847_79892C.1.pep
DYHIAHHIVRVHQKREGALAPAFTTAELRGYIAYAKTLKPKLSPDARKLLVDSYVALRRGDTNPGSRVAYRMTVRQLEALIRLSEAIARCHLDNEVQPRHVRLAVKLLKTSIISVESSEIDLSEFQEQNHNDGAGGGNENDNNRDANYQEGNDTAQQAAGNGNDQVGNDAAQQATGNNGNPADGSKPQVRKLIMSDEYYQRVTSALIMRLRQHEEAVVQGDGLSGMRQKDLIQWYVDQQNERNNYSSMDEVQAEISKIKAIIESLIRREGHLIVVDNGEAAAAAAEPPGAPRNYRILAVAPNYVID

SEQ ID NO: 263423 - protein, 46 aa, Glycine max
  Clone ID: PAT_MRT3847_79893C.1.pep
HVRRSISSITESQREIINDCISSIETQLTSSAASAFHARSYNFEGH

SEQ ID NO: 263424 - protein, 79 aa, Glycine max
  Clone ID: PAT_MRT3847_79894C.1.pep
AHTFFISFIMSKFYKIPIPIGMMATLPSTMQLPSHIYKIMHLTTCEQYASILLEYIHLVFYKILSSSTQSLISIKTGII

SEQ ID NO: 263425 - protein, 125 aa, Glycine max
  Clone ID: PAT_MRT3847_79895C.1.pep
IFSNPKRRIWKTTPPFPPFKGEQKEFIKNGVKFLRGETPLFNWANLSRQTNTSTVYFWRPPFGDTIFPQLYKTLGPKKNPTLSMAPLFKPKSPRLLSTQKIQRGRARKPLLGIWNSNPWSGESKP

SEQ ID NO: 263426 - protein, 51 aa, Glycine max
  Clone ID: PAT_MRT3847_79896C.1.pep
NSVNIYVYDITVNNDALTNFSTPLLFKVKKSLINLLLPHFTKLIFHFKKIL

SEQ ID NO: 263427 - protein, 69 aa, Glycine max
  Clone ID: PAT_MRT3847_79897C.1.pep
KRQCLSRQQPISNQNVTVDGCFPTGHRNCHRRRIRDQRRWINNLPRGGGTAIRTWRNRRCGMTRVLMDA

SEQ ID NO: 263428 - protein, 65 aa, Glycine max
  Clone ID: PAT_MRT3847_79898C.1.pep
YLEKNQLSPAVDELLQIQDYNPGVWFMHCHLKIHTTWGLKMAFVVDNGKGPNESLLPPPSDLPKC

SEQ ID NO: 263429 - protein, 43 aa, Glycine max
  Clone ID: PAT_MRT3847_79899C.1.pep
CNPHFLYLNPQLPIFSFNTIYFNQFPHPHYPIKTPYSSLNSFF

SEQ ID NO: 263430 - protein, 510 aa, Glycine max
  Clone ID: PAT_MRT3847_7989C.1.pep
MAFQVLFICLISTIVFASILWRKQNKNKTLLPPSPMPLPIIGHLHLLSPTPHQDFHKLSLRYGPIIHLFLGSVPCVVASTAEAAKEFLKTHEPAFSNRPANTVAVETLTYASEDFLFAPYGPYWKFMKKLCMSELLGGHMLDQFLPVRQQETKKFIKRVLQKGISGEAVDFGGEFITLSNNIVSRMIVSQTSTTEDENEVEEMRKLVKDAAELSGKFNISDFVSFLKRFDLQGFNKRLEKIRDCFDTVLDRIIKQREEERRNKNETVGKREFKDMLDVLFDISEDESSEIKLNKENIKANILDILIAGTDTSAVTMEWAMAELINNPGVLEKARQEMDAVVGKSRIVEESDIANLPYLQGIVRETLRLHPAGPLLFRESSRRAVVCGYDIPAKTRLFVNVWAIGRDPNHWENPLEFRPERFVENGKSQLDVRGQHYHLLPFGSGRRACPGTSLALQVVHVNLAVLIQCFQWKVDCDNGKVNMEEKAGITLPRAHPIICVPIRRLNPFPVV

SEQ ID NO: 263431 - protein, 32 aa, Glycine max
  Clone ID: PAT_MRT3847_798C.1.pep
LTDHTLSEILLRIHMTTQLKKQLFVRTPHERV

SEQ ID NO: 263432 - protein, 199 aa, Glycine max
  unsure (1)..(199): unsure at all Xaa locations
  Clone ID: PAT_MRT3847_79900C.1.pep
MPRFFKQNNEPLKHLALRLLINLSFDRTARQQIVSKGMLPLIVNLLNVNQLRLLVLIVLFQISSESKLRNSFADTECPRLIYKLIIHFPEPIVGRELIALGINLAASRRCANIFAEGEQLDHLLQRAFKSGDILLFKMIRNISQFSDLPETKDSFRAYAPXIIKLGMSKNVNDDLKVELIGIVSXIQLVDEWYDRLENN

SEQ ID NO: 263433 - protein, 84 aa, Glycine max
  Clone ID: PAT_MRT3847_79901C.1.pep
LCHESAQAIRPATTTRPRGDKYSPEDKKAQHTSSILEGLHNKLGPGMPSWQPVIGGRKSCLLESKFCYSFCYCFPCSIGSVEEL

SEQ ID NO: 263434 - protein, 83 aa, Glycine max
  Clone ID: PAT_MRT3847_79902C.1.pep
PFPVEVGFCLRSRLGYWSPRCSNMASSSSDGLFRFAICLGAPWSSRTGDLPTKFEMNWRSSTLIPAASSASEAETRADAAAQS

SEQ ID NO: 263435 - protein, 151 aa, Glycine max
  Clone ID: PAT_MRT3847_79903C.1.pep
VRLREDDRRGRLKAKYHQSTQISMAVMVAFLNLIIIFSVVSTTVKDATARDKTVPAAILRMHFHDCFVRGCDASVLLNSKGNNKAEKDGPPNVSLHAFYVIDAAKKALEASCPGVVSCADILALAARDAVFLSGGPTWDVPKGRKDGRTSK

SEQ ID NO: 263436 - protein, 332 aa, Glycine max
  Clone ID: PAT_MRT3847_79904C.1.pep
MGRLKAKYHQSTQISMAVMVAFLNLIIIFSVVSTTGKSLSLNYYAKTCPNVEFIVAKAVKDATARDKTVPAAILRMHFHDCFVRGCDASVLLNSKGNNKAEKDGPPNVSLHAFYVIDAAKKALEASCPGVVSCADILALAARDAVFLSGGPTWDVPKGRKDGRTSKASETRQLPAPTFNLSQLRQSFSQRGLSGEDLVALSGGHTLGFSHCSSFKNRIHNFNATHDVDPSLNPSFATKLISICPLKNQAKNAGTSMDPSTTTFDNTYYRLILQQKGLFSSDQVLLDNPDTKNLVAKFATSKKAFYEAFAKSMIRMSSINGGQEVRKDCRMIN

SEQ ID NO: 263437 - protein, 70 aa, Glycine max
  Clone ID: PAT_MRT3847_79905C.1.pep
QEKNSNFGGIFKHFLGNPPGIFEGKIWEFQKKKKEVEPFFNVPVFFLGTHPGPLKFKKGAGPKTHYRFNT

SEQ ID NO: 263438 - protein, 61 aa, Glycine max
  unsure (1)..(61): unsure at all Xaa locations
  Clone ID: PAT_MRT3847_79906C.1.pep
LTQYYTYHNYNSLHHTRILHYXYATTHVYFNSPRTILTISIIILSSSHIEQRCMYYARSMT

SEQ ID NO: 263439 - protein, 71 aa, Glycine max
  unsure (1)..(71): unsure at all Xaa locations
  Clone ID: PAT_MRT3847_79907C.1.pep
SIDLHRFKSDLYDVRCEAKTLSVLSRSNVRKAHCVLXTXXXLLGVVMPTHGRGITLVRHRSFPPLRLNGAL

SEQ ID NO: 263440 - protein, 66 aa, Glycine max
  unsure (1)..(66): unsure at all Xaa locations
  Clone ID: PAT_MRT3847_79908C.1.pep
CWKMEIKWCFHXPLSEYRVRTFPLDLINKIMFPIVEACNNLPMTKFGNHAAQLLNQFQIQMLSVFK

SEQ ID NO: 263441 - protein, 56 aa, Glycine max
  Clone ID: PAT_MRT3847_79909C.1.pep
AQELPSWTRWLKRLVTSEIKLQIQVRTRVCWGQSSCAHGRPRQPVALTTCYYLVHL

SEQ ID NO: 263442 - protein, 68 aa, Glycine max
  Clone ID: PAT_MRT3847_7990C.1.pep
LKCLHGREKMIEGHLPTAIKFTNSSMEQILTHRTVQHYANEAARPFYFHGAVPYGYTPVSLTCHRYKR

SEQ ID NO: 263443 - protein, 111 aa, Glycine max
  unsure (1)..(111): unsure at all Xaa locations
  Clone ID: PAT_MRT3847_79910C.1.pep
IIIQGCPLVIPSASQISANPGLAGYFFRLPYETDNDANVQGSRXTGLLPGSKGCGNYRQHANDSHAYHILTLGGLQDDHITVSMHDDTASKDEHPKPGAILLKPHGRDGHD

SEQ ID NO: 263444 - protein, 157 aa, Glycine max
  Clone ID: PAT_MRT3847_79911C.1.pep
MGVFTSESEHVSPVSAAKLYKAIVLDASNVFPKALPNFIKSVETIEGDGGPGTIKKLTLAEGLGYVKHHVDAIDTENYVYNYSVIEGSALSEPLEKICYEYKLVATPDGGSIVKSTSKYYTKGDEQLAEEYVKTGKERSAGFTKAIEDFIQANPDYN

SEQ ID NO: 263445 - protein, 59 aa, Glycine max
  Clone ID: PAT_MRT3847_79912C.1.pep
AQNKIPQKPFWVNGARFLPDQDAKPLTSNAMVPQFYPNTTHAKNTGAPNLVVSNCGARI

SEQ ID NO: 263446 - protein, 87 aa, Glycine max
  Clone ID: PAT_MRT3847_79913C.1.pep
VTKIYSCGCPKTLQITLHYQFKKKKPKGMLKNQLGAQSNRTNAPAKLRNPKIIKFSIAFGKPFPYLPHSGLQRERATSSPIGFFPSL

SEQ ID NO: 263447 - protein, 161 aa, Glycine max
  Clone ID: PAT_MRT3847_79914C.1.pep
MACGMCSLLPDEELGPQIECREYSILDNPSLPSEVLKSWLDVQLCKEGTQDCDASASNDTNVGGGVLKFPKHSNEETFMKVFSSFKDVKVIKFSSVQEAFTGFTDKEREDKFRNRVKRYVGIWCCVPDHTPGHIYYDMYWDEKPGWKAVPPQTSEDDHPPY

SEQ ID NO: 263448 - protein, 31 aa, Glycine max
  Clone ID: PAT_MRT3847_79915C.1.pep
MGKEKTHINIVVIGHVDSGKSTTTWSFNDKR

SEQ ID NO: 263449 - protein, 74 aa, Glycine max
  Clone ID: PAT_MRT3847_79916C.1.pep
SARARSRSRCVFLIVDGVVFHNVLLDSPHRIYWRSMMSAIYWSHREALSLSLKLLRLQNMLDHLEFRMTGKTIS

SEQ ID NO: 263450 - protein, 66 aa, Glycine max
  Clone ID: PAT_MRT3847_79917C.1.pep
KLTTDFYPSTDAKADDTGAESKEYIHIPIQQLNARKSLTTVHGLKNEYSSNKILKDVNTEFCRNAT

SEQ ID NO: 263451 - protein, 37 aa, Glycine max
  Clone ID: PAT_MRT3847_79918C.1.pep
GRRYPGLLDRDAGCGDVIEAPPVSAQVAIESLNTQCL

SEQ ID NO: 263452 - protein, 76 aa, Glycine max
  unsure (1)..(76): unsure at all Xaa locations
  Clone ID: PAT_MRT3847_79919C.1.pep
SQILTSCCYGKLSLCRNVVSFSDGLPNDKASFTVSEFPLGTCGRRDPMNPTCSKISLTAXVLQKLLIFSTLTFKNI

SEQ ID NO: 263453 - protein, 106 aa, Glycine max
  Clone ID: PAT_MRT3847_7991C.1.pep
ILSHSLSDSLCHLHTIQREMQLSSSEEQLVEAKGLQETDIFAATHPDVLFQYLGLERKSSSNSLTAMQIPYELMTFVLQSDHYPAMQRDRIQAPPYNHGRRLIFCR

SEQ ID NO: 263454 - protein, 45 aa, Glycine max
  Clone ID: PAT_MRT3847_79920C.1.pep
PSNNSRCTGGSSFHSKSCRNPRYPMCLLTAPKTHTKGLWGIFFNF

SEQ ID NO: 263455 - protein, 111 aa, Glycine max
  Clone ID: PAT_MRT3847_79921C.1.pep
MVPSEKPMCDTADAVIDCLAKDRGFPQKGKFVQAVMDAGPLLKTLLLAGPLPKWRNPPPLQNIKVPPLTIKKCDVNSIVPNTFGDTGNTLLKPQLPALHYLNATSVFSFYA

SEQ ID NO: 263456 - protein, 58 aa, Glycine max
  Clone ID: PAT_MRT3847_79922C.1.pep
YNNNNNKGSFYATQHFPGLYWFSVTLDDKMERFSFQHASLLRLHGLISLSISLIDQLQ

SEQ ID NO: 263457 - protein, 43 aa, Glycine max
  unsure (1)..(43): unsure at all Xaa locations
  Clone ID: PAT_MRT3847_79923C.1.pep
QNXXXPXXXXQXSDQCWEXXLRXXXXXXPRAAIXSXRXXXXQL

SEQ ID NO: 263458 - protein, 482 aa, Glycine max
  unsure (1)..(482): unsure at all Xaa locations
  Clone ID: PAT_MRT3847_79924C.1.pep
MPSLERDLNDTRGYYESGKTKEASWRESQLKGLRRFLIEKQEDIMNALWHDLRKNQLEAFRDEIGTLINKLNXQFKFLKESMKSVKEPTILLEPPPEAVIVPDGIFRIIPSLIFAFGISKKLLIGDVTARNAAVLNPTEFSPACCTLLSSNLSTYLDIKDIKVIQGGPKETQQLLEQRWDKILFTGSARVGRIVMSSAVKHLTPVTLELGGKCPAVVDSLSSSWNIEVAVKRIIVGKYGACAGQACIAIDYVLVEKVELMKVWIKKMFGEKRVLSKTIAKIVNKHHFSRLKNLLADKKVKESVIYGGSMDEQNLFIEPTILVDPPLEAAIMSEEIFGPLLPIITVEKIEDSIKFINSRPKPLALYVFTKNQTLQRRMISETSSGSVTINDAILQYAVDTVPFGGVGESGFGMYHGKFSFDTFSHQKAIVRRSFLTDFWYRYPPWTLNKLQLLEVSYNYDYLGLLLVLLGLKRPSKRLISDHV

SEQ ID NO: 263459 - protein, 279 aa, Glycine max
  unsure (1)..(279): unsure at all Xaa locations
  Clone ID: PAT_MRT3847_79925C.1.pep
ARNSAREKLMAGSARVGRIVMSSAVKHLTPVTLELGGKCPAVVDSLSSSWDKEVTVKRIIVGKYGTCAGQACITIDYVLVEKGYCLKLVELMKVWIKKMFGQNPRKSKTIAKIVNKHHFSRLKNLLADKQVKGSVVYGGSMDEQNLFIEPTILVDPPLEAAIMSEEIFGPLLPIITVEKIEDSIKFINARPKPLALYVFTKNHTLQRKMISETSSGSVTINDAVLQYAADTIPFGGVGESGFGMYHGKFSFDTFSHQKAIVRRSFLXDFWYRYPSMDTK

SEQ ID NO: 263460 - protein, 72 aa, Glycine max
  Clone ID: PAT_MRT3847_79926C.1.pep
QENNRPKGTFLPTTHKIGDSIFVIPCPTELIVIPLTVTGAPMREGWYSNGRHTEPSQGSLLVRRDSAVTQGV

SEQ ID NO: 263461 - protein, 52 aa, Glycine max
  Clone ID: PAT_MRT3847_79927C.1.pep
PHLRPLVHLFFITKIQHKLMQNSSQYSSSSNCYMTNQQPSHTRFNIHKHNTH

SEQ ID NO: 263462 - protein, 70 aa, Glycine max
  Clone ID: PAT_MRT3847_79928C.1.pep
MGCCVSTSSQSTCSSRSNGDTIAPTCLEIGFCGQKSARRTSSDHVVSLHQLPSLPNRIFTNGKSRSSCIF

SEQ ID NO: 263463 - protein, 51 aa, Glycine max
  Clone ID: PAT_MRT3847_79929C.1.pep
KLITFFAFSVSGKNEVSDRRLLFPIVVVYQIYKLSSMLSDVYQKCGIFHCG

SEQ ID NO: 263464 - protein, 317 aa, Glycine max
  Clone ID: PAT_MRT3847_7992C.1.pep
DSGFLYWKWKPSECHLPRFDPNTFLQFISNKHVAFVGDSISRNHLESLLCMLATVTKPNRVRHQGSRRWHFPSHNAILSFYWSPFLVQGIPRKNPGPHYNTVFLDRVNLRWARDMDQMDMIVLSFGHWFNVPSVFYEGDDKVLGCHNHPVTNCTTEIGFYGPIRRALRIALNSIIERKVSKGNGVDVIVRTYSPSHFEGDWDTGGTCAKTNPYGVGQRQLEGENAVIRRIQLEEVENAKVKAKQFRGFRLEVLDVTKLALLRPDGHPGAYMNPFPFANGVNPKKPVQNDCVHWCLPGPIDTWSGIFLEMMKNMARAA

SEQ ID NO: 263465 - protein, 58 aa, Glycine max
  Clone ID: PAT_MRT3847_79930C.1.pep
KGGQTFQVKWLPHGGNLKGLIMQIYWLLILRTTLLCKKESLCVQKPPLMFGFFGTLGL

SEQ ID NO: 263466 - protein, 81 aa, Glycine max
  unsure (1)..(81): unsure at all Xaa locations
  Clone ID: PAT_MRT3847_79931C.1.pep
MLHARREWSRRRHFTIQHSHDDKCACAMLIKRKESKRRVPDTTVTYQRDTXYGASGTSRAPGTIPYSVPRFLVPLLDAVRT

SEQ ID NO: 263467 - protein, 334 aa, Glycine max
  unsure (1)..(334): unsure at all Xaa locations
  Clone ID: PAT_MRT3847_79932C.1.pep
MSLSMSLCGNYSLQLQNRRIVSCNLHQDGRHIVPINTHQKPSKPEKCLRSKWKINGNNIGTCIGVMTVAHLVAPVAAKAEVAASIYALADGSLGDWFGGFLFSAGQQPLEAVQGQLTSLSFTSLAVIYGAGLVTSLSPCTLSVLPLTLGYIGAFGSGKSRAHVXGDTIAFLGVLASFAALAYGQSGQGLPLAASGLAIIMFVNLLEIIELRLPSFFDSFDPRAAAANFPSSVQAYLAGLTFALAASPCSTPVLATLLGYVAASKDPVIGGSLLLTYTTGYVSPLLLAASFAGALQSLLSFRKFSAWINPISGAMLLGGGVYTFLDRLFPVTMVM

SEQ ID NO: 263468 - protein, 136 aa, Glycine max
  Clone ID: PAT_MRT3847_79933C.1.pep
LEQTLYEDENKNRMMETKELFEWVLRQPCFEKTSFMLFLNKFDIFEKKVLNVPLNVCEWFKDYQPVSTGKQEIEHAYEFVKKKFEELYFQSTAPDCVDRVFKIYNTRLLEIRRVWKTFKLVDETLRRRGLFEALSL

SEQ ID NO: 263469 - protein, 42 aa, Glycine max
  Clone ID: PAT_MRT3847_79934C.1.pep
SACDVCGNASVEPEDHTLEGARDCSLCISTCGEVLNYQAFTD

SEQ ID NO: 263470 - protein, 54 aa, Glycine max
  unsure (1)..(54): unsure at all Xaa locations
  Clone ID: PAT_MRT3847_79935C.1.pep
DLLSERXSXXVLAXGIYXFQXKSTIFVDKXNXMIDFXCXVXFXSMXGWRIGVFX

SEQ ID NO: 263471 - protein, 73 aa, Glycine max
  unsure (1)..(73): unsure at all Xaa locations
  Clone ID: PAT_MRT3847_79936C.1.pep
GATTXKKRDEDDETNATGHELFFFKDDPEGRDILVINPPVGPFGTKEEPDDVKSHYDRRIDGRPGDESEGEHD

SEQ ID NO: 263472 - protein, 188 aa, Glycine max
  unsure (1)..(188): unsure at all Xaa locations
  Clone ID: PAT_MRT3847_79937C.1.pep
TSSTRPAVPKSYICYGLKQGNIRXLLIPPAVRSLKTFEADDAMRWAFFAEDVQVLVVVGTDDRVYLWDISEGPDDEDKLQITTNIVIALQIVREEKVEHPQICWHCHKQEILIVGMGKHVLRIDTPKVGNGEAFVVDDPLRCPVDKLIDGVKLVGTHNGEVTDLSMCQWMTNQFVSTSQDDTVCIFLL

SEQ ID NO: 263473 - protein, 73 aa, Glycine max
  Clone ID: PAT_MRT3847_79938C.1.pep
NHIASADKHKSTSYTANRWDTCLLSQGRTRIIYIMPCQGLGVEGSTLREILACSLKEQRLCPAAFNGTVWNPS

SEQ ID NO: 263474 - protein, 173 aa, Glycine max
  Clone ID: PAT_MRT3847_79939C.1.pep
ALFLYALCVNTGPSYIFWIIMLIYTELYILLQYLYQIVIQHCGLSIDPHLLRELGFPTHKITSSFVVSSLPLFLVYLFTLIQISITPKDGEWMSSTDFKFKRTDLHAKDDRTSYNWQDRAWDLLNQVINMVKLIIISFFRYWKSLTQGAESPPYFVQVSMDVNFWPEDGIQPE

SEQ ID NO: 263475 - protein, 50 aa, Glycine max
  Clone ID: PAT_MRT3847_7993C.1.pep
VSPLGPLGSQPFYAIGGGYWTFVGSAWFGFSFYSIFMVGPKIRCPQLGGR

SEQ ID NO: 263476 - protein, 204 aa, Glycine max
  Clone ID: PAT_MRT3847_79940C.1.pep
RLRIIHRDLKASNILLDAEMNPKISDFGMARLFLVDQTQGNTSKIVGTYGYMAPEYISQGQFSVKSDVFSFGVLVLEIVSGQKNSGFQHGDHVEDLISFAWKNWREGTASNLIDPTLNTGSRNEMMRCIHIGLLCVQGNLADRPTMASVALMLNSYSHTMPVPSEPAFFMHSRGLSDIQSREYNSGATESKSKSVKAYSSEEST

SEQ ID NO: 263477 - protein, 44 aa, Glycine max
  Clone ID: PAT_MRT3847_79941C.1.pep
SMHVELHYNKIVYKMNYHVLCVCASSTLSSYIVSSLVFLPTYVC

SEQ ID NO: 263478 - protein, 46 aa, Glycine max
  Clone ID: PAT_MRT3847_79942C.1.pep
LILYLFMSKFRSIFGSIFGFNPCQNSCIHQGKLLGEFCDKFLKDEW

SEQ ID NO: 263479 - protein, 133 aa, Glycine max
  unsure (1)..(133): unsure at all Xaa locations
  Clone ID: PAT_MRT3847_79943C.1.pep
RLFLVDQTQGNTSKIVGTYGYMAPEYISQGQFSVKSDVFSFGVLVLEIVSGQKNSGFQHGDHVEDLISFAWKNWREGTASNLIDPTLNTGSRNEMMRCIHIGLLCVQGNLADRPTMXFXALMLNSYSHTMPVP

SEQ ID NO: 263480 - protein, 69 aa, Glycine max
  unsure (1)..(69): unsure at all Xaa locations
  Clone ID: PAT_MRT3847_79944C.1.pep
MKYADLRYKGELIAWDEINDNLHLHFYEDKYGENASDXTYATGYELDQHHQLWLNDFNTIDYNGDEASC

SEQ ID NO: 263481 - protein, 142 aa, Glycine max
  unsure (1)..(142): unsure at all Xaa locations
  Clone ID: PAT_MRT3847_79945C.1.pep
HAFHAKCLEQTPPKTQKKRSXCPVCVKLEEENSPDQRGHLRLRTGFPRLKSSRDDGPSRPWGCVQVGDCVEGALHAPPRNTMLLLNRNRIKKNLSLKGNIGKEFPGKMRKNGTFSSHLFSGSSADGEAVGSFKATAGPSVWR

SEQ ID NO: 263482 - protein, 78 aa, Glycine max
  Clone ID: PAT_MRT3847_79946C.1.pep
PESEIPIPPFYHVHPPPKKKKSNQIKERNKKTLFRESPTILKILAKINKGEILNLNLCALRRNLKWVTDYYVSEWNII

SEQ ID NO: 263483 - protein, 51 aa, Glycine max
  Clone ID: PAT_MRT3847_79947C.1.pep
AIEVLEKQIIKRDGVPYLWRLLERAYKLANKEEEERIANEKATALESRYFN

SEQ ID NO: 263484 - protein, 91 aa, Glycine max
  Clone ID: PAT_MRT3847_79948C.1.pep
EGNRDSQYFLELLSGKRDLRICVSHCLDYRWIISATATNLEQLNHNLWGEEIVDVLCQSLMLRMLHRFLASGIVGTFSKPDPQCTKSHLEP

SEQ ID NO: 263485 - protein, 66 aa, Glycine max
  unsure (1)..(66): unsure at all Xaa locations
  Clone ID: PAT_MRT3847_79949C.1.pep
NAALAEEYPGTFWHELDYIRHAIDFLGIHGKRKKSLXQIPHDLCPVLTVRQIYLISTMYWDDMYGT

SEQ ID NO: 263486 - protein, 87 aa, Glycine max
  Clone ID: PAT_MRT3847_7994C.1.pep
VFSGIDTVHCRGSCALCSENPTPLDIHLIHPIFKKCTSQFDPKKKKKKKKKKKKKKKKKKKKKKKKKKKKKKKKKKKKKKKKKKKKK

SEQ ID NO: 263487 - protein, 151 aa, Glycine max
  unsure (1)..(151): unsure at all Xaa locations
  Clone ID: PAT_MRT3847_79950C.1.pep
KNASVWKIGLFEKLKDGKMAECRECKANGRAKYEFGLPDFSTKSLKNHLFSTIHANSEYVKNFEELEKTKKESKEKAEKKQPTIENLIGTNLTSSGILSVADKRIINMITCNNLSFGLLSDPAFKALCKYELKDESDYRKRSLPEAYXLVR

SEQ ID NO: 263488 - protein, 56 aa, Glycine max
  Clone ID: PAT_MRT3847_79951C.1.pep
GSRIGIDIFSLTTGPRIIATTFFLTSNMLSNKRAQKEPPTAKDCLVSPLTRTTGQW

SEQ ID NO: 263489 - protein, 97 aa, Glycine max
  Clone ID: PAT_MRT3847_79952C.1.pep
VLEKKIIFSEGKRAKNRNRNRNLSSLSWGICFSRENHLLQLVTIILFTLLLFNLCMCCFCYVCLSFFRGLGFGLCLLLFVKNLSWYVSSIHVKSMVK

SEQ ID NO: 263490 - protein, 74 aa, Glycine max
  Clone ID: PAT_MRT3847_79953C.1.pep
PHITFNLIFKLTNTYLYLRVYNNEANSIILSSSIPSPHCIHHVSSHFSFPSYLSLSHIIKSILLPHITNSFKKY

SEQ ID NO: 263491 - protein, 59 aa, Glycine max
  Clone ID: PAT_MRT3847_79954C.1.pep
MQLGNLVESIKSKVRSLKPKKGKKPYMKMDKSASVKVEIRSRKARKLIEKTLKAADISN

SEQ ID NO: 263492 - protein, 314 aa, Glycine max
  Clone ID: PAT_MRT3847_79955C.1.pep
ILFLDDLYNITSISYTICFGAVQIFFSQIPDFHNMWWLSIVASVMSFTYSIIGLVLGITKIAETGTFKGSLTGISIGTVTEAQKVWGVFQALGNIAFAYSYSFVLLEIQDTIKSPPSEVKTMKKAAKLSIAVTTTFYMLCGCVGYAAFGDSAPGNLLAGFGFHKLYWLVDIANAAIVIHLVGAYQVYAQPLFAFVEKETAKRWPKIDKEFQISIPGLQSYNQNIFSLVCRTVFVIITTVISTLLPFFNDILGVIGALGFWPLTVYFPVEMYILQKRIPKWSMRWISLELMSVVCLLVTIAAGLGSVVGVYLDLQ

SEQ ID NO: 263493 - protein, 118 aa, Glycine max
  Clone ID: PAT_MRT3847_79956C.1.pep
IDKEFQISIPGLQSYNQNVFSLVWRTVFVIITTVISMLLPFFNDILGVIGALGFWPLTVYFPVEMYILQKRIPKWSMRWISLELLSVVCLIVTIAAGLGSMVGVLLDLQKYKPFSSDY

SEQ ID NO: 263494 - protein, 47 aa, Glycine max
  unsure (1)..(47): unsure at all Xaa locations
  Clone ID: PAT_MRT3847_79957C.1.pep
VFVXGCPFVXSGASFSGAFLFXVLRACXLCCLWSWVPSCLLXPPPPX

SEQ ID NO: 263495 - protein, 59 aa, Glycine max
  unsure (1)..(59): unsure at all Xaa locations
  Clone ID: PAT_MRT3847_79958C.1.pep
MAPKGLTXLXVLICVSALXLSPSVAGEGXDNGLXMNFYXESXPQAXAIIXEXVQSATSA

SEQ ID NO: 263496 - protein, 135 aa, Glycine max
  Clone ID: PAT_MRT3847_79959C.1.pep
SNRNQGLTSLLPAKESTAEETKVASLSPNERLSVRISHVPESSTSEERMVELQVNVRGQVSQTDLLIRLLKFLKLAHHVSLVSMDANTHIAEGNNALHQLTFRLRIIQGSEWDESAFEEAVRRVVADLAQYQMDQ

SEQ ID NO: 263497 - protein, 155 aa, Glycine max
  unsure (1)..(155): unsure at all Xaa locations
  Clone ID: PAT_MRT3847_7995C.1.pep
FSRGPXGDLYVYXDXXEISGIQRDGINLRSTISISYLDAILGAVVKVKTVKGISELQIPPGTQXPGDVLILARKGAPKLSKPSIRGDHLFTVKVTIPKRIRKKXEGPATQNVESTVATVAEPTAQPEDQNDAWKKLKDIAGSLANGAFKSLKDNL

SEQ ID NO: 263498 - protein, 97 aa, Glycine max
  unsure (1)..(97): unsure at all Xaa locations
  Clone ID: PAT_MRT3847_79960C.1.pep
FLAPYRGTRYHLNEWIGNTPQNYKELFNLRHASARNVIERSFGVLKKGXSILRTPSFFDIKTXIRIINVCFMLRNFIRDEQQSDPIGSPRLGTFICC

SEQ ID NO: 263499 - protein, 367 aa, Glycine max
  Clone ID: PAT_MRT3847_79961C.1.pep
MAFCPIFCCGNSSDRKGRGKKQPPWRVFSLKELHSATNNFNYDNKLGEGGFGSVYWGQLWDGSQIAVKRLKVWSNKADMEFAVEVEILARVRHKNLLSLRGYCAEGQERLIVYDYMPNLSLLSHLHGQHSAESLLDWNRRMNIAIGSAEGIGYLHHQSTPHIIHRDIKASNVLLDSDFQARVADFGFAKLIPDGATHVTTRVKGTLGYLAPEYAMLGKANESCDVYSFGILLLELASGKKPLEKLSSAVKRSINDWALPLACEKKFSELADPKLEGNYAEEELKRVVLTALLCVQSQPEKRPTILEVVELLKGESKDKLAQLENNELFKNPPAVGHTDDGTVAAEGSSDFISEDKESKPELEENTEP

SEQ ID NO: 263500 - protein, 262 aa, Glycine max
  Clone ID: PAT_MRT3847_79962C.1.pep
FGLVGQLQVSIFFSFLCLHSHLHGQHSAESLLDWNRRMNIAIGSAEGIGYLHHQATPHIIHRDIKASNVLLDSDFRARVADFGFAKLIPDGATHVTTKVKGTLGYLAPEYAMLGKANESCDVYSFGILLLELASGKRPIEKLNSTVRRSIVDWALPLVCEKKFSEIADPRLNGNYVEGELKRVVLVALMCAQDLPEKRPTMLDVVELLKGESKDKFYHIENSEMLRSLLAVESNDETSVAEEDSLDYISEEKELERPLKEYT

SEQ ID NO: 263501 - protein, 74 aa, Glycine max
  unsure (1)..(74): unsure at all Xaa locations
  Clone ID: PAT_MRT3847_79963C.1.pep
MSXFLVILFLQSCTFGTTHSETSHHKKLPSAVVVGTVYCDTCFQQDFSMGNHFISGASVAVECKDGYGEVKAKV

SEQ ID NO: 263502 - protein, 158 aa, Glycine max
  unsure (1)..(158): unsure at all Xaa locations
  Clone ID: PAT_MRT3847_79964C.1.pep
GSRVETAGTGLFLTMAKRFEILXERHIWVESKRLGKGCTXLLLSKLGNPDRSKEGKLPFVPNEARKTGSTNFDRVKVLGMDDNGVSRTPTDGLIXRFRCDATTACSTEKWLRVDFLEHEPAFMDVCTGVEGYXLVVRIHEKFTRHQDRPLMGAFTGNT

SEQ ID NO: 263503 - protein, 88 aa, Glycine max
  Clone ID: PAT_MRT3847_79965C.1.pep
PLPLFLAPPPVTRVSPSPFCQTQLENLVFIHPPRKKKGEAIFKKKIPFPPGKLTPGVLPFMKGLIYSDCKILERTITDPSLKFVALFP

SEQ ID NO: 263504 - protein, 368 aa, Glycine max
  unsure (1)..(368): unsure at all Xaa locations
  Clone ID: PAT_MRT3847_79966C.1.pep
MAFCPIFCCGNSSDRKGRGKKQPPWRVFSLKELHSATNNFNYDNKLGEGGFGSVYWGQLWDGSQIAVKRLKVWSNKADMEFAVEVEILARVRHKNLLSLRGYCAEGQERLIVYDYMPNLSLLSHLHGQHSAECMRDWNRWMNIEIXSAEGIGYNKDWXMPLIFHRDIKVSXVLLDSCCQALFDYFGFAKLIPDGATHVTMSIKGILGCLAPEYAMLGKANESCDVYSFGILLLELASGKKATLRNLVLXVKRSINDWALPLACEKKFSELADPKLEGNYAEEELKRVVLTALLCVQSQPEKRPTILEVVELLKGESKDKLAQLENNELFKNPPAVGHTDDGTVAAEGSSDFISEDKESKPELEENTEP

SEQ ID NO: 263505 - protein, 49 aa, Glycine max
  unsure (1)..(49): unsure at all Xaa locations
  Clone ID: PAT_MRT3847_79967C.1.pep
IXYDLTTLGWRSRLSLLFQKLPVRYPSDSPICLGCPGLDGFPLRGFLKP

SEQ ID NO: 263506 - protein, 61 aa, Glycine max
  Clone ID: PAT_MRT3847_79968C.1.pep
HILYRQKEQFSDGVGYRWIDGLKAHAAKHVLNPCFFVQFSDGVCYCHEICFAYNWFLSIFP

SEQ ID NO: 263507 - protein, 90 aa, Glycine max
  Clone ID: PAT_MRT3847_79969C.1.pep
GEKLKGPPKGKRVPLGGSNQIFLGGGGGEPPKRTFGGGPKGHREFNQLKPHFGPKGGGQPGPNLQTRSHWGALKRGPRGQTPGGGPGGPP

SEQ ID NO: 263508 - protein, 141 aa, Glycine max
  Clone ID: PAT_MRT3847_7996C.1.pep
MRMNTEFERVLKYFDEDGDGKISPCELRNRLGMIGGELLAKDAEKLIEELDSDGDGFLSLEDFVKLMEAAGEDEKLKDLEEAFEMYNDTEMFGFITPKSLQRMLGRLGESKSMEQCTTMIGHFDLNGDGLLCFDEFRVMMQ

SEQ ID NO: 263509 - protein, 132 aa, Glycine max
  unsure (1)..(132): unsure at all Xaa locations
  Clone ID: PAT_MRT3847_79970C.1.pep
HTLYFTRDYDHCYKNERKAGGLATYHVPYGVHIRGRFDAKFAKMLAKDASKYAAELQRELQNDIKHALKRTLEAKKKCNERSIAGFDPAINDITKHVXVCAPVSPPVADTKADIKCPVNRKMVINTVNYAVN

SEQ ID NO: 263510 - protein, 112 aa, Glycine max
  unsure (1)..(112): unsure at all Xaa locations
  Clone ID: PAT_MRT3847_79971C.1.pep
ALLLDNCEGILLSXDSHKSEPAPFLTKTYQLVDDPATDHIVSRGEDNTTFAARRPPELERDLVPNYLKHNNFSSXVRQLNTYGSRKIEPDRWEVANEFFQKGEKHLLCQIHK

SEQ ID NO: 263511 - protein, 89 aa, Glycine max
  Clone ID: PAT_MRT3847_79972C.1.pep
SGCSMDKLKDIIKQVAPLGVPPYGIHESQVVRRLFFRQSDHVKYSEKLIEYKITELKNNKDMLKMLVESNYWKQFYPIKILAIFNKPVT

SEQ ID NO: 263512 - protein, 157 aa, Glycine max
  Clone ID: PAT_MRT3847_79973C.1.pep
MAKLYVKAVPPADLNRNTEWFTYPGVWTTYILILFFSWILVLSVFGCSPGIAWTIVNLAHFAVTYHFFHWKKGTPFAEDQGIYNRLTWWEQVDNGKQLTRNRKFLTVVPLVLYLIASHTTDYQNPMLLFNTVAVIVLVVAKFPHMHKVRIFGINADK

SEQ ID NO: 263513 - protein, 164 aa, Glycine max
  Clone ID: PAT_MRT3847_79974C.1.pep
MKREREVDSITMANYLMLLSRTTTNLNTSNNRVFECKTCNRRFASFQALGGHRASHKKPRLMGESDSQVLIHGSPPKPKTHDCSICGLEFAIGQALGGHMRRHRAAAAAASNGNMHTTINSWLSSGSSSGGSTVDNTLPPNMNHNPNVTDTKRILFPDLNLTPL

SEQ ID NO: 263514 - protein, 157 aa, Glycine max
  Clone ID: PAT_MRT3847_79975C.1.pep
MANLYVKAVPPADLNRNTEWFTYPGVWTTYILILFFSWILVLSVFGCSPGIAWTIVNLAHFAVTYHFFHWKKGTPFAEDQGIYNRLTWWEQVDNGKQLTRNRKFLTVVPLVLYLIASHTTDYQNPMFLFNTVAVIVLVVAKFPHMHKVRIFGINADK

SEQ ID NO: 263515 - protein, 108 aa, Glycine max
  unsure (1)..(108): unsure at all Xaa locations
  Clone ID: PAT_MRT3847_79976C.1.pep
MPRGGGGSSGGGRSAHSARSHASRPAPAQSDNRGSLFGTVAEGLAFGSGSAVAHRAVDSVFGPRTIQHEVAATGPPPASAANKLGGDACNVHAKXAFQDCLNSYESDI

SEQ ID NO: 263516 - protein, 78 aa, Glycine max
  Clone ID: PAT_MRT3847_79977C.1.pep
LGEVHPHALYSYTTCNSTCEHATFTLWIQSLVLNGSGCTVFGSYGPIAYRVDCYNCLHRDGVHRTAQYGDILCTMLVK

SEQ ID NO: 263517 - protein, 137 aa, Glycine max
  Clone ID: PAT_MRT3847_79978C.1.pep
MPRGGGGSSGGGRSAHSARSHASRPVNHAPPPAPAQSDNRGSLFGTVAEGLAFGSGSAVAHRAVDSVFGPRTIQHEVAATGPPPASAANKLGGDACNVHAKAFQDCLNSYESDISKCQFYINMLAECRRNSGATLSA

SEQ ID NO: 263518 - protein, 198 aa, Glycine max
  Clone ID: PAT_MRT3847_79979C.1.pep
ESVTQCPIRPGGKYTYRFNITGQEGTLWWHSHSSFLRATVYGALIIRPRRGNSHPFPSVYQEVPILLGEWWNGNVVDVENNAIETGIGPNLSDAYTINGLPGDTYNCSQNQTYQLQVKHGETYLLRIINAALNAQHFFKIANHTFTVVAIDASYTQPYNTDVIILAPGQTVDAIITTNQTLGSYYMAFTPYHSAPGVS

SEQ ID NO: 263519 - protein, 73 aa, Glycine max
  unsure (1)..(73): unsure at all Xaa locations
  Clone ID: PAT_MRT3847_7997C.1.pep
KIITDTYGGWRAHGRSAFSRKDPTKADRSGAYLVRHAVXIVVVNGLVRRCMXQNSYAIAVPEPVALNGDTYET

SEQ ID NO: 263520 - protein, 132 aa, Glycine max
  unsure (1)..(132): unsure at all Xaa locations
  Clone ID: PAT_MRT3847_79980C.1.pep
MAYDTAGKFFKDCRQGGEPLTTHAALHPWTKKKWGDYYVYLNYGTTDILPITEVCEGIKXFNNVHSILSTVSEQGSTTAIELLPTTNTSSRDTLNRFDGFLPYTXHADSLISDLYQRLEEPNFLRSCDFNIL

SEQ ID NO: 263521 - protein, 66 aa, Glycine max
  unsure (1)..(66): unsure at all Xaa locations
  Clone ID: PAT_MRT3847_79981C.1.pep
ADGLTYTGPLSTILSXTLASMSEFKSNYNENXSMNQCIKLIFDAICTDILNDLKSESNVNTYVITN

SEQ ID NO: 263522 - protein, 77 aa, Glycine max
  Clone ID: PAT_MRT3847_79982C.1.pep
HHDTLSWNRRPPSLIALRLLAPKQAVRLPVSDIADPTLEEKGQDSSRFARKDHRRTTCKYIFLVVLKRNLTYVFSVV

SEQ ID NO: 263523 - protein, 95 aa, Glycine max
  unsure (1)..(95): unsure at all Xaa locations
  Clone ID: PAT_MRT3847_79983C.1.pep
FLIFSGCIALREHAQQNECQIQKLDALIPDNRIESEGGFIETWNPDNKPFQCAPVXDLSRCTLNHNALRRPYYTNSAXEIYVQQGYGIFGMIFPG

SEQ ID NO: 263524 - protein, 147 aa, Glycine max
  Clone ID: PAT_MRT3847_79984C.1.pep
PAVSWSNEKYYLEQILPLFGEHKVVHFNKTDARLANNGLPLDLQKLRCRVNFQALKFTPQLENLGQKLIRILRENGPFLALHLRYEMDMLAFSGCTHGCSIEEAEELKQMRYAFPSWREKEIVSEERRSQGLCPLTPEESALILQAL

SEQ ID NO: 263525 - protein, 43 aa, Glycine max
  Clone ID: PAT_MRT3847_79985C.1.pep
HMLFEGVVIILLRVTCVMSYKPFSEVVFDVINELHGYYICYRK

SEQ ID NO: 263526 - protein, 92 aa, Glycine max
  unsure (1)..(92): unsure at all Xaa locations
  Clone ID: PAT_MRT3847_79986C.1.pep
MGKCRGLRTARKLRSHRRDQKWHDXQYKKAHXGTALKANPFGGASHAKGIVLEKVGVEAKQPNSAIRKCVXVQLIKNGXKITAFVPNDGCXN

SEQ ID NO: 263527 - protein, 85 aa, Glycine max
  unsure (1)..(85): unsure at all Xaa locations
  Clone ID: PAT_MRT3847_79987C.1.pep
TWTLTRANTDAGMANDGINSGMDYNVRVEISTILYAEELXAVRRADLNRYKHSLDEDVAAHTSGHLRQLLVGLVTSYKYAEDEIS

SEQ ID NO: 263528 - protein, 229 aa, Glycine max
  Clone ID: PAT_MRT3847_79988C.1.pep
GAIREAGTVKGKKTGKFATSDWMKVEQERDTPGHEDFSEDTYRTLMAVDSAVMVIDCAKGKEPFELLDEIEETLNIDTYPMNWPVGMGQNFFGIIDRHSKTIEPFRDEENLLHLNEDYELKEEHAIKNDSAFEQAIEEMMLVDEAGEAFDNEALLNGELTPVFFGSALANFGVQNFLNAYVDHAPMPNARQTKEEVDVSPFDIDFSGFIFKIQANMDPKHRDRIAFMRV

SEQ ID NO: 263529 - protein, 205 aa, Glycine max
  Clone ID: PAT_MRT3847_79989C.1.pep
EELDFKVFQLTSHNILSLKEKAKGSTNARATGFNVITAHIWRCKALSAPYNPSRSSTILYAVDIRPRLNPPLPKSFAGNAVLTAYATAKWEELEKGEFSSLVGMVTEGAKRMSDEYTRSMIDWGEVHSGFPHGEVLVSSWWRLGFEEVEYPWGKPKYCCPVVYHRKDIILVFPPFGSGDDGINIIVALPPKEMDKFETLFYMFLN

SEQ ID NO: 263530 - protein, 99 aa, Glycine max
  unsure (1)..(99): unsure at all Xaa locations
  Clone ID: PAT_MRT3847_7998C.1.pep
MVFKDRAAHPSPSSNSTSLPINTSLIAPYRVVFNNASLQNTYVSISLHIFSIISQVTTDAPSNVEKHFNKHHYNFVPNNFKPKTPYIVYXLLNTKITLY

SEQ ID NO: 263531 - protein, 78 aa, Glycine max
  Clone ID: PAT_MRT3847_79990C.1.pep
KSIQQGISCASSSQWCLHIAIRLSIIRKPVYQVRSSTSLTDMWQRCVDVDSHHIFRIKLFLVFEMFLGSCLCVESVLW

SEQ ID NO: 263532 - protein, 70 aa, Glycine max
  unsure (1)..(70): unsure at all Xaa locations
  Clone ID: PAT_MRT3847_79991C.1.pep
EALLATGSNSDTGYIAHAPSESNGLSDVLIXSSPILTGVSARARGLAAAAAAAAAGGVSGFEFGVDPNLD

SEQ ID NO: 263533 - protein, 120 aa, Glycine max
  unsure (1)..(120): unsure at all Xaa locations
  Clone ID: PAT_MRT3847_79992C.1.pep
SDPYGLKILSVYGCGSKNMSYDSANLTTXPDIKWLGVRPSDLDKYKIPEQCRLPMTEQDIKTGKDLLEEDFVKKNPGWVEELTLMVKTKQKAEIQALSTFGFQYLSEVYLPLKLQQKDWL

SEQ ID NO: 263534 - protein, 61 aa, Glycine max
  Clone ID: PAT_MRT3847_79993C.1.pep
PKMLCLYEHQRVLVVSPSASYEAVGVCTYLQVYSRAVRVLGEQICGSQWSSFLLGPAFDGH

SEQ ID NO: 263535 - protein, 204 aa, Glycine max
  Clone ID: PAT_MRT3847_79994C.1.pep
MLQQQAKPELSDGGVPSSLDISDTNTEDTTTTTTTTTNLSRKRRPATTEQDLSSSTQQHQMGSYLLQSSAGAIPASHAANIWMVANSNSNQVMSGDPIWTFPPVNNSALYRGTMSSGLHFMNFPTPVALLPSQQLGSSGNIGAVGGSSHNNHNNNINEGHLSMLAGLSPYRPVIGVSESQASGSQSHRGSGTDDRHDNSSSHHS

SEQ ID NO: 263536 - protein, 91 aa, Glycine max
  unsure (1)..(91): unsure at all Xaa locations
  Clone ID: PAT_MRT3847_79995C.1.pep
VGKFGLYRRYVILFFFYYYYNWNSIFNXKKWIYNFFLKSNIRFFLLIYNLYVWEYEYIFIFIXNNCISYXLKYFRVFFEGIKIYQKILDFV

SEQ ID NO: 263537 - protein, 80 aa, Glycine max
  Clone ID: PAT_MRT3847_79996C.1.pep
AKRERFYQKATSLSGCFQMKQKSPLPPLFFNKGRGVKGQASHPLEDWMEYGGQKKEFVDLPCGSPPIGNLPPGFWVRGFP

SEQ ID NO: 263538 - protein, 95 aa, Glycine max
  Clone ID: PAT_MRT3847_79997C.1.pep
AVPVLHCRLERPVRPSNYCFNRANLAYAHHGHASGIIHLVLPWGRASWRPIPVAVRLHAQFGFGKKKAAAPNEVSRGSDSISDWPLGYPGPKAPA

SEQ ID NO: 263539 - protein, 75 aa, Glycine max
  Clone ID: PAT_MRT3847_79998C.1.pep
THAPRRQLLILLEEKYNMNFYTLPAVISTNDDGYPQQARARAHPLPLSTLRSRPKATHIRLLERAGETNPIQSQI

SEQ ID NO: 263540 - protein, 95 aa, Glycine max
  unsure (1)..(95): unsure at all Xaa locations
  Clone ID: PAT_MRT3847_79999C.1.pep
VLWRFVLGDGEEMTLIPGPRAEEAYNKLVDELEKSATTLVGIECAKDEKLTRRNILDKPKTRCFTILHMEFNLVARXRLLNDVRSIMKKRDKLSW

SEQ ID NO: 263541 - protein, 67 aa, Glycine max
  Clone ID: PAT_MRT3847_7999C.1.pep
VQRGNCHTLISSGDNCLSTCEFSLAKLSYLTSITTQSVGFRDVTKRDEQDTQNGGNFCQHRDFFQPS

SEQ ID NO: 263542 - protein, 139 aa, Glycine max
  Clone ID: PAT_MRT3847_799C.1.pep
MNKCVETDNQALLKLKHGFVDGSHILSSWSGEDCCKWKGISCNNLTGRVNRLDLQFSDYSAQLEGKIDSSICELQHLTFLDVSFNDLQGEIPKCIGSLTQLIELKLPGNEFVGSVPRTLANLSNLQNLDLRDNNNLVAN

SEQ ID NO: 263543 - protein, 88 aa, Glycine max
  Clone ID: PAT_MRT3847_79C.1.pep
IIKTFGKTKNGGWSIPFTNLDLLNQKKRDLHAKSWHKTMHRPFKKKKKGIEIFFFQAGYNYVTKIHKANFGHLKPTVLISGGSFKRHF

SEQ ID NO: 263544 - protein, 190 aa, Glycine max
  Clone ID: PAT_MRT3847_7C.1.pep
MAAASRRSSGPVLRTLSPAGRFRNSRPSPATTAFASSTSTFSARSTAFFQNRSSSPTRDNLYGSSSGSVPSVRFGSITPNSSISVAGAGRHSHHQKRTCMCSPTSHPGSFRCSLHKSFGSRSAVAAASPNRLNARRSAMTNSLVRIRGVEGELVKRALAALIRPSSHQQRRRGDFRPRPSRLSIMFTAKD

SEQ ID NO: 263545 - protein, 51 aa, Glycine max
  Clone ID: PAT_MRT3847_80000C.1.pep
TDGTYMFNLEGFIPKLCQLAQEEGEDERALRLRSAGLQALSYMVHFMGEHS

SEQ ID NO: 263546 - protein, 62 aa, Glycine max
  Clone ID: PAT_MRT3847_80001C.1.pep
NGRCTTDYAGHAVPVGANRTVDTHIRARRSTERNDLHVGTSADLNRVYIFTKGIHLIMGHIK

SEQ ID NO: 263547 - protein, 38 aa, Glycine max
  Clone ID: PAT_MRT3847_80002C.1.pep
GSSANVPLHSHRLDHPVPAISGHGYHFPLTPIHVRMRL

SEQ ID NO: 263548 - protein, 46 aa, Glycine max
  Clone ID: PAT_MRT3847_80003C.1.pep
STITPDFLRQNSISDKEKKILNSVQILDLRSNMTLLIESIPLHTNK

SEQ ID NO: 263549 - protein, 118 aa, Glycine max
  Clone ID: PAT_MRT3847_80004C.1.pep
DLVFDTALELPTSINIALLDSVLSPSTRGPLRISSVGGMGTENSGPSFFRRSDVSNFGKIGSATATQSTTNLTISISSISSISKYMAHPLSRESHPIYTSFTRILIHQLFITFKSATQ

SEQ ID NO: 263550 - protein, 146 aa, Glycine max
  unsure (1)..(146): unsure at all Xaa locations
  Clone ID: PAT_MRT3847_80005C.1.pep
PRLRFFDFLLLGGGGGVYWGALYGVSTMGSSAHAYGGGGANAHATFYGGGEXSLTIGXASAXGGVYXQXDGTNTAALSTGLCNNGVSVGSXYXSXGANXXRGCLPXAIGGTATNFCGANNALXQQQWGAWXDPPLQHFXLXQPVFL

SEQ ID NO: 263551 - protein, 295 aa, Glycine max
  Clone ID: PAT_MRT3847_80006C.1.pep
MDEYSGKRGVDGMVFPRKGMSHVFRDTANTRDRNRQICSRLGCSSRANLPKVAQVRCSEKGKSLRPSYQSSSSSKGAIGSSSRTTSNPAKRLLEPRKTLSSQFEADSSETSSVQDGPEFSELIPPTEEIRRGPLAEGENTESSNAILMEVGSSSAVSNTRSQRNLNQRAGLRGQEIKSTGAVRRAVSSSYGLRNLKCNSISDVVRSGCSSSDSSLNRRKDTIKKGNCEGGNSSTVRGKNITGSSLEGRNSGSRNGISISDSRRSRNVPSHRSTSVASVRTQRSISGQARGRFCSQ

SEQ ID NO: 263552 - protein, 176 aa, Glycine max
  Clone ID: PAT_MRT3847_80007C.1.pep
MDEYSRKRGVDGMVFPRKGMGHVFRDTANTRDRNGQICSRLGCSSRANLPKVAHVRSSEKGKSLRPSFQSSSSSKDAIGSSSRTTSYPAKRLIEPRKTLSSQFEAHSSETSSVQDGPEFSVPIPPTEEIRRGPLVEGESTESSNAILMEVGSSSAVSNTRSQRAGLRAQELKALVQ

SEQ ID NO: 263553 - protein, 205 aa, Glycine max
  unsure (1)..(205): unsure at all Xaa locations
  Clone ID: PAT_MRT3847_80008C.1.pep
MALYLDEEEIWKCPKHPSKRRRSGICHICLRDRLVTLCPDCANVRPCSCYATSSSSSSSSSSSFSRFSGASDSVGRVHNLIEREPGLRRSRSMAIPFLRSRAVDTTASAPRRSRSGRRRRYWRRNXGGDGGINPMMARSRSVVVXAGDGGNGGFRDGELRLWTKGRGXFFPSPTKAFPQSKVSKWVHERFPLYRGRILCEKFKIV

SEQ ID NO: 263554 - protein, 72 aa, Glycine max
  Clone ID: PAT_MRT3847_80009C.1.pep
LFVLISQLLFNHRTITLWVMLCQLHLFYFSYSNSLMLSLDITPPEAGYKEERLVSKESKRCGGAPVILRSED

SEQ ID NO: 263555 - protein, 94 aa, Glycine max
  Clone ID: PAT_MRT3847_8000C.1.pep
VPHKLHFVGEAPIQYFRTRLSSTDIGSLKPIVRCPGNSQATHLWLQLRRKPMLSVQFHSLVLRLIALPASHLKKLWNGSFTYFSRTLDLLQTGL

SEQ ID NO: 263556 - protein, 146 aa, Glycine max
  Clone ID: PAT_MRT3847_80010C.1.pep
DFCRFVFLLGQFHLQRFFSSVKSSKEKPKELSSWLKTFGRHLQDKSLYALGISSEFQLGMDDTLLFGLDAYEDTEKPRGKAVFHHKFPDHDLTVEAGYPELFVDTTGDYCDLPSPMAVDLAFVTTSDSSTAYHMCARYTTGSPKHV

SEQ ID NO: 263557 - protein, 56 aa, Glycine max
  Clone ID: PAT_MRT3847_80011C.1.pep
HGYICFGLKRHATLLVHTAYLLLICLTPFNFFLSDHKISLAFCILTSIWPEIITAP

SEQ ID NO: 263558 - protein, 173 aa, Glycine max
  Clone ID: PAT_MRT3847_80012C.1.pep
MEESQRIGIDLMRGFPRRRSVENRSSSRRRRSIFSGAGNSESVDADDFADVFGGPPRTLLAHKFSSSGSFYEEVFRPPEFTCPAPKDGRSLPVFRIPARNEGFYSDIFGSDDDRRSRDRSRSLSKENSSSAMSSEELSPRRPAIADDVALSGFASKLRPINIPWRWNPSTVMP

SEQ ID NO: 263559 - protein, 50 aa, Glycine max
  Clone ID: PAT_MRT3847_80013C.1.pep
NMPEERVILETEQFHILYIDPLFSPIHPNCRNTSIHQFSHPLSYFLHLFS

SEQ ID NO: 263560 - protein, 71 aa, Glycine max
  unsure (1)..(71): unsure at all Xaa locations
  Clone ID: PAT_MRT3847_80014C.1.pep
TEGAAQSNCPPEKEYRPDRPTEADLASKKRGSAPVPIPGXQKNVKSGGVSLTLCRAPTYATPLKACHESED

SEQ ID NO: 263561 - protein, 91 aa, Glycine max
  Clone ID: PAT_MRT3847_80015C.1.pep
YKNLKLCILKWRKWYLGSTFFVCERSRKYFLCTPLHMQLILAFKLIYPSDTATMKVEISWKFPLAKSDSQSDKDINNRYQLNSHHTMKKLK

SEQ ID NO: 263562 - protein, 110 aa, Glycine max
  Clone ID: PAT_MRT3847_80016C.1.pep
MAVGGSDKKRFFLHESSRSRYRLSPGWSSSVTASKHESQALGLQTAFSCKEYRWQVYIRLWQERENMRLRLMSYLHSPIVSCVRVKGESQGILPKHLQVLHPQPHLFSRA

SEQ ID NO: 263563 - protein, 133 aa, Glycine max
  Clone ID: PAT_MRT3847_80017C.1.pep
QRAKIPESKDPQRENGERKRGNQKKATPKHGSKKKGPPKKRGKKTKGQGKKGKKAGKGKNAIGKREHPVMPNPGSPMGGGWMGKIPPGGPPPRVKGPRAPAPRPGGPNPNPLGLRPNPKLPIGGLGNLKFDFW

SEQ ID NO: 263564 - protein, 122 aa, Glycine max
  unsure (1)..(122): unsure at all Xaa locations
  Clone ID: PAT_MRT3847_80018C.1.pep
GHKFAKENVPLGSGFFGLNVGHVNKRKICFGPPPYLEWKTQAGNIWVALFFWKTRGFSSFFXGIKKVPPRCGGDETPLWGGPFLKLKKWWGHFPNPEEKKNPGGGGAGYPRGFGLVGFFFFI

SEQ ID NO: 263565 - protein, 49 aa, Glycine max
  Clone ID: PAT_MRT3847_80019C.1.pep
HASADAWASSRSRAAALFFFLSFQMYFFIIMRLNVLGNLSPVCIVLVNG

SEQ ID NO: 263566 - protein, 69 aa, Glycine max
  Clone ID: PAT_MRT3847_8001C.1.pep
MPISYITVRRSEEATHPDPLKAALADFISTFIFVFAGSGSGIVYNKLTDNGADTPAGLISVSIAHAFAL

SEQ ID NO: 263567 - protein, 41 aa, Glycine max
  Clone ID: PAT_MRT3847_80020C.1.pep
CRVYFANPDPGSSHLKTGKQTHYTLSSRTAQRLPTSVEYHC

SEQ ID NO: 263568 - protein, 89 aa, Glycine max
  Clone ID: PAT_MRT3847_80021C.1.pep
CVNFSVTSISPLYSPIPTLRTSSPLLSLQNTISYPSHTHPFCSYLLNLSSGNFSILTTIILSLESTCALSCSMFIRYRNFNFICVQISP

SEQ ID NO: 263569 - protein, 65 aa, Glycine max
  Clone ID: PAT_MRT3847_80022C.1.pep
YFILVPDKLTNFIYNFVCFFSFVISIFIWEQKQIFYFIRVKVKNFFIREYKQNFEYLLKSRSNIF

SEQ ID NO: 263570 - protein, 41 aa, Glycine max
  Clone ID: PAT_MRT3847_80023C.1.pep
EKTTDGHLIGYFHHFGAGLSMSVDVPGYLLTLLAEDGQPPD

SEQ ID NO: 263571 - protein, 324 aa, Glycine max
  unsure (1)..(324): unsure at all Xaa locations
  Clone ID: PAT_MRT3847_80024C.1.pep
LSSIITRRLEQSPNIISENILKCLSNILLRMSAVKNPGSTCDMAPVWDLKPQNCDEEADFWDPYGICLEFGKRDIGPYRQLCAIDAKSFNPKRLYLNIFSTQFIITFLNNQNKKSXFVRLIILSNHNNDGILSSTLLQAFIENGIPENPQMAVALMRKATINVGGHVLSATTIEHFILRLPYHWKFTFSKGTKNHQMTARSIYGLELSEPLVTFALSSGTWSSPAVRVYTASQVENELEVAKREYLQAAIGFSTSKFAIPKLLDWYLLNFAKDLESLLDWICLQLPSELGKEALKFLEERKTEPLSQFVQIMPYEFSFRYLICT

SEQ ID NO: 263572 - protein, 124 aa, Glycine max
  Clone ID: PAT_MRT3847_80025C.1.pep
MAAISLRKGNTRLPPEVNRVLYVRNLPFNITSEEMYDIFGKYGAIRQIRIGTNKDTRGTAFVVYEDIYDAKTAVDHLSGFNVANRYLIVLYYQQAKMSKKFDQKKKEDEIARMQEKYGVSTKDK

SEQ ID NO: 263573 - protein, 124 aa, Glycine max
  Clone ID: PAT_MRT3847_80026C.1.pep
MAAISLRKGNTRLPPEVNRVLYVRNLPFNITSEEMYDIFGKYGAIRQIRIGTNKDTRGTAFIVYEDIYDAKTAVDHLSGFNVANRYLIVLYYQQAKMSKKFDQKKKEDEIARMQEKYGVSTKDK

SEQ ID NO: 263574 - protein, 59 aa, Glycine max
  Clone ID: PAT_MRT3847_80027C.1.pep
TFPIFPYLMHHKTQVFNRYLRSVIIVYRPRWPVLVHPGMVMVNLMASNPASVASIAVDL

SEQ ID NO: 263575 - protein, 83 aa, Glycine max
  unsure (1)..(83): unsure at all Xaa locations
  Clone ID: PAT_MRT3847_80028C.1.pep
FYVRVTCGPPGFRVCYXGARFFSWDGIPPTGAANPLIAFXILSLAFSPPRAPFFFFFPPCFCPLSVQTRESPVSSLGVGFPPK

SEQ ID NO: 263576 - protein, 38 aa, Glycine max
  Clone ID: PAT_MRT3847_80029C.1.pep
GTTTIMINQHVLFSTRLLKKNVISKIVKIELTGAICHI

SEQ ID NO: 263577 - protein, 91 aa, Glycine max
  Clone ID: PAT_MRT3847_8002C.1.pep
KNFFAKKGSGWGFKALILKTKGQRGGIFWKNGFFGSLMGGFNGGGVFVILFKTGGGFLKNLGPDFMGIGQMAPPHLKRSPFFFGGAGFFIF

SEQ ID NO: 263578 - protein, 54 aa, Glycine max
  Clone ID: PAT_MRT3847_80030C.1.pep
RTHSLRILKSVKNSRNLSKLIYGVYSLTAFYWFPPYSRGALYVAFLTCEGRRCL

SEQ ID NO: 263579 - protein, 70 aa, Glycine max
  Clone ID: PAT_MRT3847_80031C.1.pep
RISLSNLGLNIVRLLPRFAWLVIAEVVSSSHCFFFCIIPIKCHGFYGTRYVIIILLYPSAQGEHRSICAQ

SEQ ID NO: 263580 - protein, 260 aa, Glycine max
  Clone ID: PAT_MRT3847_80032C.1.pep
ESDNGVNVVGVVGPGKETITRKVYEVIAPSFPAHCFLPDVGEKIREHGPEYLQNMLGPYMLGNSQEGVPFIRHEKVLAVLDCIDSLDSLKAALGLTPRFAPGSQVFIIAPDITLLENNGIEKVYEVKGLDKTSAYQVLCLEAFSSMNMSFKYMDIISRAETCADGNPCALKAIGSSFRGKTIAECEIALDEYKRIHYSELIESMIGENNWIPSFGDISEEYTEYDMPDVELASDDGSGMGNFLGSSTLLSQANMQDVEAA

SEQ ID NO: 263581 - protein, 242 aa, Glycine max
  unsure (1)..(242): unsure at all Xaa locations
  Clone ID: PAT_MRT3847_80033C.1.pep
HASANVVYLWCAAESLEMTEEYGEGNLISQAEAFFNQVVLRSWKDSLRALQTCDDVSAHAEELHIVKRCIESLAAKASTDPNLFGWPVLERGGPLQSPGGSVLWNGISTGARPKNSSSDWWYEDVTNLSLPLFKTLIAVMESRGIRQEIIAGSLAFYAKTYLPGLNRRQVSGESSTRLSQVAMGSPLSEDNQKILLEEIDGLLPMQKGLVQTKLXLGLLRTAMILXVSPSCISNXEKRIGLQ

SEQ ID NO: 263582 - protein, 53 aa, Glycine max
  Clone ID: PAT_MRT3847_80034C.1.pep
FADPPCFYWKFLPKKFFFFFKKKKKKKKKKKKKKKKKKKKKKKKKKKKKKKKK

SEQ ID NO: 263583 - protein, 305 aa, Glycine max
  Clone ID: PAT_MRT3847_80035C.1.pep
MPTRPVWTNVTTATNGPSARFSVAGDCLDPFRSGVLIFIGGCNKSLEALDDMYYLYTGIARESEQRPEKLSLKKQLKLKCLEQNPNPSQNQVLVRYGVGSDVGQTMTVLNYSQSSRLNIPVNQSLPPGKKMFEAKVTENISEGYTIETVIDGKPLRGILFLNKPISLYTDAHTCSRYVFLSSSPHQSLSLFNALIVLSTFWYTSLFQLMLNSPSRKRTVGEIDSVVSNGIHPNQFKTPKVVKQNQMENREASRGDSSESHEHRTESIAVLMSSNPMTANPSDTHKVKLFSVLLLVRVLEDGLSNE

SEQ ID NO: 263584 - protein, 125 aa, Glycine max
  unsure (1)..(125): unsure at all Xaa locations
  Clone ID: PAT_MRT3847_80036C.1.pep
HIKDLASYNKVGKYYIEMGPYNTHVTPVILTNIIENPAWHTEITPYQAEIFQGRLETLIDHHTMTTDLTGLPMDNAALVDEGTVGADALSMCNNIQIGERNSFIIASDCHPXQTIDICETRADGA

SEQ ID NO: 263585 - protein, 90 aa, Glycine max
  unsure (1)..(90): unsure at all Xaa locations
  Clone ID: PAT_MRT3847_80037C.1.pep
TTXXXFXXXYXFLXEPXXSXXIXSIIXTNXXLFXIIXLLXXXXIIXXXXXXXXXXXXXXDXXXLXLXRRXXXXXXXDXXSNXXXLPXXXY

SEQ ID NO: 263586 - protein, 58 aa, Glycine max
  Clone ID: PAT_MRT3847_80038C.1.pep
VNRHRQFVKGGHHGGAIWHNGGAIWHNGMLIWQNFGLTPLITLGPQVKFPRNGRNGIY

SEQ ID NO: 263587 - protein, 94 aa, Glycine max
  Clone ID: PAT_MRT3847_80039C.1.pep
LITCFKENIDEQELMLTNDLEQSLCWCVVYIPSILMNLHNPFATQYLLFRKGRNSLISAKVIEQYPSSRPRRVRVAKLEPSKKLKTSWPGTSSR

SEQ ID NO: 263588 - protein, 52 aa, Glycine max
  Clone ID: PAT_MRT3847_8003C.1.pep
RRWHIHQSLGSETSQVFSLRQHPDYAYPARFLVPPSVRYTNFFRMSGRDEWS

SEQ ID NO: 263589 - protein, 82 aa, Glycine max
  Clone ID: PAT_MRT3847_80040C.1.pep
KNQSQPRRPFPFFLPFGIGKPLAAFPISGPGTGPFFSLFFPPFSPKHFGQSQKRVDWRVETLAFSRRSQKGEPRVTWGQPFI

SEQ ID NO: 263590 - protein, 49 aa, Glycine max
  Clone ID: PAT_MRT3847_80041C.1.pep
IFHEQHVFHMKEPEFHSYIFSPKTYYHFYMITITSSTAHEREQNPTLYS

SEQ ID NO: 263591 - protein, 82 aa, Glycine max
  Clone ID: PAT_MRT3847_80042C.1.pep
RSQSHLGKIIRGGKLDESTKNGAVTSLAFLLPLQDAQRARKLVEDTIADKQSKLDRLRSIDTVNNSLMNLCHKLPEQIFHDI

SEQ ID NO: 263592 - protein, 41 aa, Glycine max
  unsure (1)..(41): unsure at all Xaa locations
  Clone ID: PAT_MRT3847_80043C.1.pep
RSSPTRDVWLSXELDSTDQEWIKWVQMNYMINNTASDCQRF

SEQ ID NO: 263593 - protein, 73 aa, Glycine max
  Clone ID: PAT_MRT3847_80044C.1.pep
AGSKIHHKLLLKRERGDRGKIKTHLPKTSFFLHKKGKHPLKLELLLVLGRGGLIFFIGILRGSKPQTPKNNWG

SEQ ID NO: 263594 - protein, 85 aa, Glycine max
  unsure (1)..(85): unsure at all Xaa locations
  Clone ID: PAT_MRT3847_80045C.1.pep
IVKTVGKVNTVEXSAIGPKKGGLGINAPIAIGLTEEVNNLLGGAFSGRAINPPVTFGRSVVSXTCPNKWMYWGGPLIRGGMHGLI

SEQ ID NO: 263595 - protein, 101 aa, Glycine max
  unsure (1)..(101): unsure at all Xaa locations
  Clone ID: PAT_MRT3847_80046C.1.pep
SVIDILTRVDSICKKYDKYDGQSQRDFFFSSDDALDKLYAFVDAAIEVLLEKADTRFKETRKASTVAINVEIRXTNDRSLEEAPKAPRLAMKKAKGFSSQD

SEQ ID NO: 263596 - protein, 89 aa, Glycine max
  unsure (1)..(89): unsure at all Xaa locations
  Clone ID: PAT_MRT3847_80047C.1.pep
XAXPLFRPSQHRAFXRIPLXPQXSXXEXXXDRFCKXLTXQGGXLRDTXXXLFKARXRSXVKSKQPWKXQSXRXDXTSETXXXVXXYCXQ

SEQ ID NO: 263597 - protein, 44 aa, Glycine max
  Clone ID: PAT_MRT3847_80048C.1.pep
NLEYNSQYIYSIKSFYFCHPIKRSLYMKISFNFIIIILRIMYQL

SEQ ID NO: 263598 - protein, 68 aa, Glycine max
  Clone ID: PAT_MRT3847_80049C.1.pep
CRCREGTRTIYGLDSGDGLQTAKFYDILGQKEKHICSCRCGCNTSHHSMMAKIVEATTSLAPCKLILN

SEQ ID NO: 263599 - protein, 155 aa, Glycine max
  Clone ID: PAT_MRT3847_8004C.1.pep
MASSSSSLLPRSHIPTPLISKISSSPRTWSLFILTYPSHPKNNNNNNNNKRLFLSPTNAVYTQSPYTPSTPSKTELHNDPITVLNERIRRDLSKKEAFRTVMDSEEAGKYMKMVKVQQQRGLQKLKGDRESKDGVFSYKVNPYTLRSGDYVVHRK

SEQ ID NO: 263600 - protein, 57 aa, Glycine max
  Clone ID: PAT_MRT3847_80050C.1.pep
WLKTRSSRLVKGVKAVKKTVVEAAENSNRKTKKITSEAAEETVLELHPDWPSVCPIR

SEQ ID NO: 263601 - protein, 54 aa, Glycine max
  Clone ID: PAT_MRT3847_80051C.1.pep
STYGQLRIPLGWRVGILSQQTLFRRAKSCGGLAWTRRVNGHSHNRFGEICWRCT

SEQ ID NO: 263602 - protein, 46 aa, Glycine max
  Clone ID: PAT_MRT3847_80052C.1.pep
VNQTLLTPLCNQPNCSRSCTISFFWYTIMVTKSCTNYPNPSLLGQL

SEQ ID NO: 263603 - protein, 78 aa, Glycine max
  Clone ID: PAT_MRT3847_80053C.1.pep
TFIADCGASDVYSYPDDESVLDPQLAQHLAFFGIDFSSLRKTEMTTAERELDQNTNFEWNRIQDSGREVDPIFGPGYT

SEQ ID NO: 263604 - protein, 116 aa, Glycine max
  Clone ID: PAT_MRT3847_80054C.1.pep
IIVERRPTNKRSQDGVGKARNEVSFLHYASMREAKTCWQLSKRDIVIAVDGAWNATRAPAPLYSANTPSVLLTGTKHYTDQSIFVFIQLRSRKSIKQFERLADTYLTTCVSPSTIP

SEQ ID NO: 263605 - protein, 56 aa, Glycine max
  Clone ID: PAT_MRT3847_80055C.1.pep
RGLSLNKILRVFLNKKLAHFLLFKKASPKSQIKFFLRGITNAVKGLLLYLRNFHLV

SEQ ID NO: 263606 - protein, 51 aa, Glycine max
  Clone ID: PAT_MRT3847_80056C.1.pep
ELSYYSTDFNLDNANDDITVKIRSCMTYLVRKMLKCILFDRILTIDYRIDP

SEQ ID NO: 263607 - protein, 121 aa, Glycine max
  unsure (1)..(121): unsure at all Xaa locations
  Clone ID: PAT_MRT3847_80057C.1.pep
KPSSIIYLQLPTHPSYNTTSQYVSLFHPHLYRRFIILLRIIYNSLYHCSIKSLPPRVRPILPSPTXQPSPHPSELKLTSPTLQHPPPHPKITPCNAXPPHPTSTPPPPFPPQKPPQTPLPP

SEQ ID NO: 263608 - protein, 162 aa, Glycine max
  unsure (1)..(162): unsure at all Xaa locations
  Clone ID: PAT_MRT3847_80058C.1.pep
LTRGRTQKLYQAFLVSXRQVITPFTYNALISACPRSGDYYKDLNLMSNMRRDGYQPDLVIYRCISKYLTRYNRVDSPIVQTLYTDIVTDKIEINGHLMNEMILGFSKAGQPTHAMRFIAMADNTGLNPKPSTLARAIMALANSGRTPXGEALFEEIRENGSE

SEQ ID NO: 263609 - protein, 69 aa, Glycine max
  unsure (1)..(69): unsure at all Xaa locations
  Clone ID: PAT_MRT3847_80059C.1.pep
PGPPTSQATRVPSGHGGXGPPPPILRSFLAGPVGSHPPGCAALYWGVASSSPPVWPQGPRAPPRLPPSS

SEQ ID NO: 263610 - protein, 61 aa, Glycine max
  Clone ID: PAT_MRT3847_8005C.1.pep
RLYPIQGGILIPEKPLDRLQITQGPSKVITSCNSYIQADRIYFNFNSHANLIIIQRNHRII

SEQ ID NO: 263611 - protein, 255 aa, Glycine max
  Clone ID: PAT_MRT3847_80060C.1.pep
MATRRYSFGRADEATHPDSMRATLAEFASTFIFVFAGEGSSLALVKIYQDSAFSAGELLAVALAHAFALFAAVSSSMHVSGGHVNPAVTFGALIGGRISVLRAVYYWIAQILGAIVAALVLRLVTNNMRPSGFHVGQGVGVGHMLILEIIMTFGLMYTVYGTAIDPKRGSVSNIAPLAIGLIVGANILVGGPFDGACMNPALAFGPSLVGWRWHQHWIFWVGPLIGAALAALVYEYVVIPTEPPHQHQPLAPEDY

SEQ ID NO: 263612 - protein, 40 aa, Glycine max
  Clone ID: PAT_MRT3847_80061C.1.pep
LETVVVSFFFCLVVYLFFFRQGIYLKVVRLTLNWICPLLT

SEQ ID NO: 263613 - protein, 256 aa, Glycine max
  unsure (1)..(256): unsure at all Xaa locations
  Clone ID: PAT_MRT3847_80062C.1.pep
MATRRYAFGRADEATHPDSMRATLAEFVSTFIFAFAGEGSGLALVKIYQDSAFSAGELLAVALAHGFALFAAVSASMHVSGGHVNPAVTFGALIGGRISVLRAVYYWIAQILGAIVAALVLRLVTNNMRPSGFHVGQGVGVGHMLILEIVMTFGLMYTVYGXTAIDPKRGAVSNIAPLAIGLIVGANILVGGPFDGACMNPALAFGPSLVGWRWHQHWIFWVGPLIGAALAALVYEYVVIPTEPPHQHQPLAPEDY

SEQ ID NO: 263614 - protein, 51 aa, Glycine max
  Clone ID: PAT_MRT3847_80063C.1.pep
RNNITRIPECTGVPALYIRRGTSNRHNLHPHSARWHILHHAITLVALLLRD

SEQ ID NO: 263615 - protein, 68 aa, Glycine max
  unsure (1)..(68): unsure at all Xaa locations
  Clone ID: PAT_MRT3847_80064C.1.pep
RIXXXXXAXSXXXXXLLXXSDHXRVXXXQXXGXCVLPPRKXGRVXWFXXGLXATXXXXPETLKFPRSL

SEQ ID NO: 263616 - protein, 137 aa, Glycine max
  unsure (1)..(137): unsure at all Xaa locations
  Clone ID: PAT_MRT3847_80065C.1.pep
MYSKGKGSLAERKRAAKKEEVKEDGSTEKKTTSAFLRIQKDLADLELPDNVELKKEDDYNFSFVLNINEGYWKGGIFEFKFAFPQTYPFAGPKVTCMDKVYHPNIDLEGAGCVSVLRPWKPTYSTQIXLSXLLFLFS

SEQ ID NO: 263617 - protein, 108 aa, Glycine max
  unsure (1)..(108): unsure at all Xaa locations
  Clone ID: PAT_MRT3847_80066C.1.pep
KLDKKKTPLNKTGGFKRTKKKPPFLNNSRWGKTTNLRGGGGKIFGKQKICLSGKAPPPSTRGSKSSEPTKRQLSAHSLKGILFLATGFLXIIFIIHPKKRLLKFFFFP

SEQ ID NO: 263618 - protein, 41 aa, Glycine max
  Clone ID: PAT_MRT3847_80067C.1.pep
RVNNFRASEDSYCKLTYNYLTNDIFAIMIQSSKALLKCLRN

SEQ ID NO: 263619 - protein, 229 aa, Glycine max
  Clone ID: PAT_MRT3847_80068C.1.pep
KLNLYSDIGNIMALKQRAKKRNIKINVKEINETEGVTFDDCDIFFIGGGSDREQALATKELSKIKTSLKNAIEDGMPGLTICGGYQFLGHKYITPDGTELEGLGVLDFYTESKKERLTGDIIIESDTFGTIVGFENHGGRTYHPYGTLGRVTYGYGNNDNDRKEGIHYKNLLGSYLHGPILPKNHEITDYLLEKACERKGILFEPKKIDNTEEEAAKQVLIKRAKENKK

SEQ ID NO: 263620 - protein, 58 aa, Glycine max
  Clone ID: PAT_MRT3847_80069C.1.pep
KPDQVPSNYQIKGPIGERQRMRTKPTQSKFQTKNLSTLLIQTHHHHKPKYIDPKTEDS

SEQ ID NO: 263621 - protein, 101 aa, Glycine max
  Clone ID: PAT_MRT3847_8006C.1.pep
MGSKALLVLVMLLASVLLLSAEVASKDVDKKLDKNDGNHDTKGVDEMKYYGGWGSGWDRYRRGWYCPNGCCQWSYYYQTCWRCCYYPGEHVDVRTDAQPRN

SEQ ID NO: 263622 - protein, 36 aa, Glycine max
  unsure (1)..(36): unsure at all Xaa locations
  Clone ID: PAT_MRT3847_80070C.1.pep
KKFDFRIMHPLYLVMKTLSVLVXXXATFFNVYSIDK

SEQ ID NO: 263623 - protein, 103 aa, Glycine max
  Clone ID: PAT_MRT3847_80071C.1.pep
SAVISLQSFLQQIHHLIIYYITRTKLRRRHGVPDIFLTLNVESPNPNPASNIAVGTTMRSPALDADETLVCKYASFTAYLVTEDRCIPGRRLLLSSCSSSSMP

SEQ ID NO: 263624 - protein, 42 aa, Glycine max
  Clone ID: PAT_MRT3847_80072C.1.pep
NRGFPFPFKIVLLDTLCMFKDLGFVQQAASKRKMILRTTTPS

SEQ ID NO: 263625 - protein, 71 aa, Glycine max
  Clone ID: PAT_MRT3847_80073C.1.pep
YKIQISYPIKKNKREDTTRTKNKMTKTLTPCLKNEGEADLYKKNIGGTTHWRLHTPRNKFGTRTIWTPNFP

SEQ ID NO: 263626 - protein, 584 aa, Glycine max
  Clone ID: PAT_MRT3847_80074C.1.pep
MSKQWQWSSAWTLLLFLIFFLSSTTTSTTDYACKFSQSHPFCDTSLPTLTRARSLVSLLTLPEKILLLSNNASSIPRLGIPAYQWWSESLHGLALNGPGVSFAGAVPSATSFPQVILSAASFNRSLWLRTAAAIAREARAMFNVGQAGLTFWAPNINLFRDPRWGRGQETPGEDPMLASAYAVEYVRGLQGLSGIQDAVVVDDDDTLMVSACCKHFTAYDLDMWGQFSRYNFNAVVSQQDLEDTYQPPFRSCIQQGKASCLMCSYNEVNGVPACASEELLGLARDKWGFKGYITSDCDAVATVYEYQKYAKSQEDAVADVLKAGMDINCGTFMLRHTESAIEQGKVKEEDLDRALLNLFSVQLRLGLFDGDPIRGRFGKLGPKDVCTQEHKTLALDAARQGIVLLKNDKKFLPLDRDIGASLAVIGPLATTTKLGGGYSGIPCSSSSLYEGLGEFAERISYAFGCYDVPCDSDDGFAEAIDTAKQADFVVIVAGLDATQETEDHDRVSLLLPGKQMNLVSSVADASKNPVILVLIGGGPLDVSFAEKNPQIASIIWLGYPGEAGGKALAEIIFGEFNPGMYTYK

SEQ ID NO: 263627 - protein, 47 aa, Glycine max
  Clone ID: PAT_MRT3847_80075C.1.pep
QYHQKPGIIYINSEAKQNTDENLIHLLISSISTTNPTITQSYTTNPT

SEQ ID NO: 263628 - protein, 52 aa, Glycine max
  Clone ID: PAT_MRT3847_80076C.1.pep
KKKKKRRESTQGATVLMFPIRIQEKSSILTYSNVSDGKTRVIKYKNQILKTK

SEQ ID NO: 263629 - protein, 115 aa, Glycine max
  unsure (1)..(115): unsure at all Xaa locations
  Clone ID: PAT_MRT3847_80077C.1.pep
PVNQTSFSVLHGVVGLRQHIPNCTQKKXFVSRWIEMQKEGLANTSLNSYGIYAYDTVWAVARAIDIFIKVHNTITFSFPDNYNLSHMVGIGIQLDKLKIFAGGSDLVAILFQSNF

SEQ ID NO: 263630 - protein, 66 aa, Glycine max
  Clone ID: PAT_MRT3847_80078C.1.pep
KERLFEQNFPLFFAGIQYSVISTRSILFSYFGFGFPTPCSIRHCLKTSDIFHTQGIWVSNFPLLGL

SEQ ID NO: 263631 - protein, 56 aa, Glycine max
  Clone ID: PAT_MRT3847_80079C.1.pep
KKTSAITTYHIKIVHDCFHKQEIEHAKIVTPSVVFSQPYPSVVFSQPYPSVVFSQP

SEQ ID NO: 263632 - protein, 59 aa, Glycine max
  Clone ID: PAT_MRT3847_8007C.1.pep
ISVNHSFIFFPYFHLLFFRSYKSISDLYVHSRGSIYDLFLNEYFFKIYHPFCRLLAAVR

SEQ ID NO: 263633 - protein, 115 aa, Glycine max
  Clone ID: PAT_MRT3847_80080C.1.pep
FWMSWAKREAPHLLHKGGKTSASIVQLLPDYVLLPKKLVPNGRGNWGPSPGLKKRSLFKVSGKSGIHIQIRGPWAPPKKNLSFKSGPGLQKCYEKGGSELYWRSPPRKGNDFFLS

SEQ ID NO: 263634 - protein, 137 aa, Glycine max
  unsure (1)..(137): unsure at all Xaa locations
  Clone ID: PAT_MRT3847_80081C.1.pep
HPQGKGTPGGKNERPRKHAPKRNATDPQEEPPSPEKGRKXPGRKKPGPETGGQRGPNSPQPKRGPENHSPPPDREPPPRRPARNAKGQARKKQKPRPARKHPQGGGQNHPTKTEPKAKPPNPRETTRSAGKGGPKNK

SEQ ID NO: 263635 - protein, 140 aa, Glycine max
  unsure (1)..(140): unsure at all Xaa locations
  Clone ID: PAT_MRT3847_80082C.1.pep
DIPHIESASNLNETGVACGXGVAHXRXEPLSFAGKQVRFIWDAPGQAVGPNNSYVTATSAGEPQYVAWVNQLNMTYTPITKTGPNAGYTYQPAGEVYAGGAGIMNDTMFIALTDANPYLTPFNLSMINPHVVALSVYQAG

SEQ ID NO: 263636 - protein, 227 aa, Glycine max
  Clone ID: PAT_MRT3847_80083C.1.pep
MARGKIQIKRIENTTNRQVTYSKRRNGLFKKANELTVLCDAKVSIIMFSSTGKLHEYISPSTSTKQFFDQYQMTLGVDLWNSHYENMQENLKKLKDVNRNLRKEIRQRMGDCLNDLGMEDLKLLEEEMDKAAKVVRERKYKVITNQIDTQRKKFNNEKEVHNRLLHDLDAKAEDPRFALIDNGGEYESVIGFSNLGPRMFALSLQPSHPSAQSGAAGSDLTTYPLLF

SEQ ID NO: 263637 - protein, 234 aa, Glycine max
  Clone ID: PAT_MRT3847_80084C.1.pep
MARGKIQIKRIENTTNRQVTYSKRRNGLFKKANELTVLCDAKVSIIMFSSTGKLHEYISPSTSTKQFFDQYQMTLGVDLWNSHYENMQENLKKLKDVNRNLRKEIRQRMGDCLNDLGMEDLKLLEEEMDKAAKVVRERSCMTWREKQKHVTHRIVTQRKKFNNEKEVHNRLLRDLDARAEDPRFALIDNGGEYESVIGFSNLGPRMFALSLQPSHPSAQSGAAGSDLTTYPLLF

SEQ ID NO: 263638 - protein, 250 aa, Glycine max
  Clone ID: PAT_MRT3847_80085C.1.pep
GQVEREFQAEVEALSRAQHKNLVSLKGYCQHFNDRLLIYSYLENGSLDYWLHESEDGNSALKWDARLKIAKGAAHGLAYLHKECEPHIVHRDIKSSNILLDDKFKAYLADFGLSRLLQPYDTHVSTDLVGTLGYIPPEYSQVLKATFKGDIYSFGVVLVELLTGRRPVEVIIGQRSRNLVSWVLQIKSENREQEIFDSVIWHKDNEKQLLEVLAIACKCIDEDPRQRPHIELVVSWLDNVGFDGSEQSSF

SEQ ID NO: 263639 - protein, 33 aa, Glycine max
  Clone ID: PAT_MRT3847_80086C.1.pep
LLRRRHTAGFIPDTTPLLIACSVGSRYSHSSSG

SEQ ID NO: 263640 - protein, 185 aa, Glycine max
  unsure (1)..(185): unsure at all Xaa locations
  Clone ID: PAT_MRT3847_80087C.1.pep
MGSGVSTLCWCSGTNNEPDVIFSATDPLDETLGHSFCYVRSSARFLSPTHSDRFLSPSTSLRFSPTHTRPEFHETGFKAISGASVSANSSLPTTVIHLDEEVNGVSSRGNIVNGFESTASFSALPLQPVPRGGEPFEVSGFFLSGPIEANAVSGPLPSAAAYGVSSGDVPFSAPLARLYSKKNXK

SEQ ID NO: 263641 - protein, 98 aa, Glycine max
  unsure (1)..(98): unsure at all Xaa locations
  Clone ID: PAT_MRT3847_80088C.1.pep
LLFWGEAADTVRSTGGANGWGLMNGDAAEMAQMEHPQSRDHTEIYETAVKILETYWMVVDDKTTPSGDAGQXGINFGGTHPPAGPCGGSCCTQKEIRL

SEQ ID NO: 263642 - protein, 51 aa, Glycine max
  Clone ID: PAT_MRT3847_80089C.1.pep
NHRRRFLKEFSIYFKVDAVDRNLFITVCVCEITLVFRCIITDIKKQYMSGQ

SEQ ID NO: 263643 - protein, 98 aa, Glycine max
  unsure (1)..(98): unsure at all Xaa locations
  Clone ID: PAT_MRT3847_8008C.1.pep
QNQVLPTDEAKGDNTYLSALTLCFXQIFPAILNTTVNLNLFNIIAKAKSSSLSXSKITSLLLPNPHPQLTKXLKHILPILTSYSLLNCSIRTNKGYVR

SEQ ID NO: 263644 - protein, 93 aa, Glycine max
  Clone ID: PAT_MRT3847_80090C.1.pep
FILRREYLYHPYYDLPCLTTCSITFSKKNEPIARICSVPTFGALLLFAWGQACNTFFNIGPKLNTFCLPTLLLDHLQTGSNMIICTPSTYEGT

SEQ ID NO: 263645 - protein, 233 aa, Glycine max
  Clone ID: PAT_MRT3847_80091C.1.pep
MKIQCDVCDKVEASVFCPADEAALCHSCDRTIHRANKLATKHARFSLHYPTSKDFPLCDICQERRAYLFCQEDRALLCRECDVPIHRANEHTQKHNRFLLTGVKLSGTCLDPASSSTNYTNNNRVTGSEGRNDARSRMNRPRSSVSNEENASNSSCKVEDNVASDTGSISTSSISEYLIETIPGYCFEDLLDASFAPNGFCKKQNFDHPWAFQDQKRTSGDTMAVPFLKLVIH

SEQ ID NO: 263646 - protein, 543 aa, Glycine max
  unsure (1)..(543): unsure at all Xaa locations
  Clone ID: PAT_MRT3847_80092C.1.pep
MGPPPISGALLKNPTFFYLNPSTVGPRPLRAFMRPFRPQSPAKRIRAVLARRHSSVNFIRASRLKMSVCEDGLGRIFGFATPLTARYELXDAGVRGQCVYTCSAKYNKWVIEGEDVAVKINGFNMRYQAIAIEDVRREVKILRALTGHKNLVQFYEAYEDDGNVYIVMELCKGGELQDRILSRGGTYAXXDARVVMSHILSVEAFXHLHYFVQRDFEPENFFFTCKDERSRLKSIVFGLSDYVKTFERLNDILGRAYXVDLKVLLRSYGTVADMNLFLMLYSILLNPSFPILASHHFLLSLFLLRXDAGFDEAPRPSLSVSVKDIVEMWIIXKDCKILSDLKALTLVYPWLVSIHDDMRIPLDMIIHKLVKAYICSSSLRKSALRALAKTLTVAQLAYLRDQFTLLGPNKSGLISMQNFKTAVLRSSTDASKDSRVLEYVSMVSSIQYRKLDFEEFCAAAISVHQLEGMETWEQHARRAYELFEKEGNRPIMIEELASELGLSPSVPVHVVLQDWIRHSDGKLSFLGFVRLLHGVSSRAFQKA

SEQ ID NO: 263647 - protein, 48 aa, Glycine max
  Clone ID: PAT_MRT3847_80093C.1.pep
VAIRSYTGTDLQTIYQLYVCLFNVRIATIPTIAATQDDVNLLGIVGSP

SEQ ID NO: 263648 - protein, 96 aa, Glycine max
  Clone ID: PAT_MRT3847_80094C.1.pep
MCRGTFVVATTVGVVEALKDQGYCKMNSTMMKLVAQHAKNHIGSVTEAKKLASPSPSPSTSSSSVTSNNLRDDEKRRMAEESLRTVMYLSTWGPNS

SEQ ID NO: 263649 - protein, 54 aa, Glycine max
  Clone ID: PAT_MRT3847_80095C.1.pep
PYIFLLPFLLVSVIKRLVWLMMFHLTLELSQSCKHFCNLTGRIKRIKFKHYKNH

SEQ ID NO: 263650 - protein, 48 aa, Glycine max
  Clone ID: PAT_MRT3847_80096C.1.pep
IHTNKKTLCKVPAVIMHSTIFIIQKKHFIYLSTSFTRPAKKRMFSVKL

SEQ ID NO: 263651 - protein, 126 aa, Glycine max
  unsure (1)..(126): unsure at all Xaa locations
  Clone ID: PAT_MRT3847_80097C.1.pep
TAARRRQKGTEQEFVGSYKLHYLEEIMTLTRSFCASAGGVACPSHATSYQRFHIQMRTGYSERSSKVXCAGVSLAXEAHNMQASKTLPDECVAPTQDFLSGEQFKAHSXTGDHQSVFHAHEHEVHC

SEQ ID NO: 263652 - protein, 181 aa, Glycine max
  Clone ID: PAT_MRT3847_80098C.1.pep
MSGILRNLSLPPKIFSLTLLLLLNSVLFPCWYSLNEQGQALLAWKNSLHSTSDALPSGNPSNPSPCNWFGVQCNLQGEVVEVNLKSVNLQGSLPLNLQPLRSLPTLVLSTTNITGMIPKEIGDYKELIVIALSGNSLFGDTPEEICILSKLQTIALHANFLEGNIASNIGNLSSLVNLTLY

SEQ ID NO: 263653 - protein, 57 aa, Glycine max
  Clone ID: PAT_MRT3847_80099C.1.pep
NGTSHFATYRLIRHMVTDRALTQRQILRLRLWVETCPGVQTGHARIVRSSTIADRRL

SEQ ID NO: 263654 - protein, 177 aa, Glycine max
  unsure (1)..(177): unsure at all Xaa locations
  Clone ID: PAT_MRT3847_8009C.1.pep
MALHCGTFCFWTVASHPPSSVKLSQPTIKASSFSSPLAPPLVKLNVRGKAFPGDGTPETKESPLVVCFGEMLIDFVPTVNGLSLAEAPAFKKAAGGAPANVAVGISRLGGSSAFIGKXVGEDEFGYMLANILKENNVNNXGMRFDPXGARTALAFVTLXSDGXREFMFYRIPVLICC

SEQ ID NO: 263655 - protein, 53 aa, Glycine max
  Clone ID: PAT_MRT3847_800C.1.pep
MIFALLKINIMKLMNKSLKTISSHSQTFKSLCICSFERSERKILYLCLQTMEY

SEQ ID NO: 263656 - protein, 43 aa, Glycine max
  Clone ID: PAT_MRT3847_80100C.1.pep
VEQYAHLGLRTLCLAWRELKRDEYREWSLMFKEASSTLVDRGG

SEQ ID NO: 263657 - protein, 68 aa, Glycine max
  unsure (1)..(68): unsure at all Xaa locations
  Clone ID: PAT_MRT3847_80101C.1.pep
REXXXIRAPVTAXXXRKGXXRIHXRYXEXGPWIXXSHMFFSSXXNAXXXSSPXXXRAEFRAYVRVXAT

SEQ ID NO: 263658 - protein, 44 aa, Glycine max
  Clone ID: PAT_MRT3847_80102C.1.pep
PTRPVRPVQHSVLRGNSTVAGNSAPPHRCLRKSNFRETFSQMLH

SEQ ID NO: 263659 - protein, 41 aa, Glycine max
  unsure (1)..(41): unsure at all Xaa locations
  Clone ID: PAT_MRT3847_80103C.1.pep
HCXCHIXISVFIKGEFCISLSLYTLQAFLLIXVLYLXNLTV

SEQ ID NO: 263660 - protein, 106 aa, Glycine max
  unsure (1)..(106): unsure at all Xaa locations
  Clone ID: PAT_MRT3847_80104C.1.pep
NMPLSPFPMEAPPGFXFFPGANVGPPPFFPLGGLELQTHLARIWGDIGTVDPLLLDVFIKALPPISPHFVGVHPVMFGGSEFXNWNARFKSKDPGFGVPQIYPPLF

SEQ ID NO: 263661 - protein, 73 aa, Glycine max
  Clone ID: PAT_MRT3847_80105C.1.pep
YTYFFKIITLLSQMLLSTYFMTKFQLILKSSYCIKRFMNINLHTTFSHFCSYKYGHVRVLDSPITEDEFSGIA

SEQ ID NO: 263662 - protein, 357 aa, Glycine max
  Clone ID: PAT_MRT3847_80106C.1.pep
SRVDPRVRALSQTPSRARSAPQVLVKTQRLEELAIKQSRQLIPVTPSMPKASVHNSEKSKPKTAIRNADMNVVTKTVPQQPSALHIASQSVRSVNAKVDTPKTSGKFTDLKSVVWENGASPTSKDVSNPTNYSNSKPGNQHAVASGAASAPLRNPNNLKSPTERKPSSMDLKLGSNLEKKHSISQVQSRNDFFNLIKKKTLMNSSAVLPDSGPMVSSPAMEKSGEVNRGVIVSPSASPQSHGNGTELTSNGTHAHEVIHRLSDNEEKESNPSVTIYPDEEEAAFLRSLGWEENSDEDEGLTEEEINAFYQECKKLDPTAFKLSQGMQPKLSKLFESYASNLRESSAELSSSDPGSEA

SEQ ID NO: 263663 - protein, 67 aa, Glycine max
  Clone ID: PAT_MRT3847_80107C.1.pep
CITTRTRRLETLSRSYRAIDGDVVIDHARMHRSYTSSQCFMSSSRGSTAVEIAFLIMPHIRSRTSYK

SEQ ID NO: 263664 - protein, 56 aa, Glycine max
  Clone ID: PAT_MRT3847_80108C.1.pep
VGTLVMSQVPVNVKMRISDSSHGDNERDEVDVDVNGTHPSLPVPSASRKLLRALVF

SEQ ID NO: 263665 - protein, 87 aa, Glycine max
  unsure (1)..(87): unsure at all Xaa locations
  Clone ID: PAT_MRT3847_80109C.1.pep
DRQVELLRQLVSGXKFHIEEVINVKNTDGRTXSHIATIGKIHTDLVKLLMTAPSINVNVSXANXMTPLDYLKQSPNSAASNVLIRKL

SEQ ID NO: 263666 - protein, 216 aa, Glycine max
  unsure (1)..(216): unsure at all Xaa locations
  Clone ID: PAT_MRT3847_8010C.1.pep
MALHCGTFCFWTVASHPPSSVKLSQPTIKASSFSSPLAPPLVKLNVRGKAFPGDGTPETKESPLVVCFGEMLIDFVPTVNGLSLAEAPAFKKAAGGAPANVAVGISRLGGSSACITLSVGEDEFGYMLANILKENNVNNEGMRFDPGARTXALAFVTLRSDGEREFMFYRNPSADMLLQEDELDLDLIRKAKIFHYGSISLITEPCKSAHIAAGRL

SEQ ID NO: 263667 - protein, 60 aa, Glycine max
  Clone ID: PAT_MRT3847_80110C.1.pep
SQTPIFLKDICSSNSPSNSALLQNGFKFLYKGKVLKIIRLTKISFIFPHNLRYRETQECW

SEQ ID NO: 263668 - protein, 91 aa, Glycine max
  unsure (1)..(91): unsure at all Xaa locations
  Clone ID: PAT_MRT3847_80111C.1.pep
VVNGSFFLPKSPMAFLFQKFQEAVKTLAKNPAFARDPSQLQFEADINRLFLYTSYNLVXKNADEADAEEIFEIANKASVADQQMPVKKNVH

SEQ ID NO: 263669 - protein, 62 aa, Glycine max
  unsure (1)..(62): unsure at all Xaa locations
  Clone ID: PAT_MRT3847_80112C.1.pep
TVDQPPDTSFSGSHVCQQGHCHLYWSLALASCIMCSLLRRRMCPRTKDPSRFIXWRRNARLS

SEQ ID NO: 263670 - protein, 155 aa, Glycine max
  Clone ID: PAT_MRT3847_80113C.1.pep
LKTAAEQGEPKEIQTEAAVTRDEVKEAEKLEGFSAPAEVTPETPVQQDTIRDSAAPEMLKETTTDDTSVAQHEDTVRTTDEQEITTSSLPGEPTPDPAQSQEQQQSSEPAEEKQTSSSKKKNKKKKKKSLSSTSVDEGPSTAPQDSVSEQEVVDP

SEQ ID NO: 263671 - protein, 126 aa, Glycine max
  Clone ID: PAT_MRT3847_80114C.1.pep
LVRISACCDESCSRLDQCQLNDLNSQKHYHGQTLERGDAHTGDCQHHEQKCAWATVDDLTHTRDEAHSALDAANTEPTIKVQRAGAVGERAPRETSALGEAHEQSSIIGAAPEKHTRPCSRDMMPH

SEQ ID NO: 263672 - protein, 215 aa, Glycine max
  Clone ID: PAT_MRT3847_80115C.1.pep
ARASNVLLDFELNGRLGDFGLARLYEHGANPSTTRVVGTLGYLAPELPRTGKATTSSDVFAFGALLLEVACGRRPIEPKALPEELVLVDWVWEKYKQGRILDLVDPKLNGYFDEKEVIVVLKLGLMCSNDVPVTRPSMRQVVRYLDGEVEVPEDLKKPGDISHHEGFDEFLHSLASSSFDKMSSGSNFGNRDMESSFLSFANSPHSLLHGRGETR

SEQ ID NO: 263673 - protein, 190 aa, Glycine max
  Clone ID: PAT_MRT3847_80116C.1.pep
MPFKNAARKKWNEVQAKEAKLTNGAFARIDQGLKGDGFDLLFQDSSNDYQNVTKACSSVNKGVQGAGEKDGMLEHTVEKHSENNSEAEITLCNELFEMTEERKYKQGDVPLIKLVDIEKHMYMAVAPDPDILIRTSGEARLSNFLLWQTSTCPLYAPTALWPEIGLRHLVWAVLNFQRHHFYLEKKKKQF

SEQ ID NO: 263674 - protein, 53 aa, Glycine max
  Clone ID: PAT_MRT3847_80117C.1.pep
RLSEKKSYSSKSFVRCWSSISGLDSRFSRAYSLKACYGILTPIAPMKGNLYPF

SEQ ID NO: 263675 - protein, 89 aa, Glycine max
  unsure (1)..(89): unsure at all Xaa locations
  Clone ID: PAT_MRT3847_80118C.1.pep
VPARAIREAPMWHAPPLTRITITERAVFARLMDGTKTSNGLNNWQPQGYMPDEYAITGRAATPNTWXPHTAAVTAVSHAAHRRQHSHSV

SEQ ID NO: 263676 - protein, 53 aa, Glycine max
  Clone ID: PAT_MRT3847_80119C.1.pep
LAKCLVNYYCYKLPPCCFTLISLSPSGAVKFPPVLMLSSQPPPPPPSRWTTNM

SEQ ID NO: 263677 - protein, 37 aa, Glycine max
  Clone ID: PAT_MRT3847_8011C.1.pep
EGLGNTVNVEYYSEDRINVLHMNTFIFSEWKGCQIHC

SEQ ID NO: 263678 - protein, 52 aa, Glycine max
  Clone ID: PAT_MRT3847_80120C.1.pep
MHKRNDLVHNKSLTLGHSWIKNPKTHHSEAIYYVKTPLLGELSWITPIGNNE

SEQ ID NO: 263679 - protein, 103 aa, Glycine max
  Clone ID: PAT_MRT3847_80121C.1.pep
LFLYQQKYNDQLVSKKVLCNCAAFMVCSRIHSWIFNGAEIKCIERERMALLNFKEGLIDVYGMLSTWSGDETNRDCCKWKGIDATMKQLLYKSFVFVVSIHNI

SEQ ID NO: 263680 - protein, 110 aa, Glycine max
  Clone ID: PAT_MRT3847_80122C.1.pep
SHTVFDYSLPPSSSFTALEVGDYYSLFFSKHKNCSNILPWEPSICRPGTVSFNESCFLPLTFAGGGVPVTTVIILTTKTMWPLSGHAGSRLPHPLKRIRVLLLMACRCWR

SEQ ID NO: 263681 - protein, 62 aa, Glycine max
  Clone ID: PAT_MRT3847_80123C.1.pep
RYQYKLQDLLIEATQKSEMLFFFSSYNVAERTNKQRITIKSTLMNTIRSIWVSDDYCWILMK

SEQ ID NO: 263682 - protein, 247 aa, Glycine max
  Clone ID: PAT_MRT3847_80124C.1.pep
GSSCCNPLTRTFRVLPHLGSAWSRHGSVLVDSEDRVMVLTELAALYCHRNTTTWLKFSSNLPSKPRSSLLINDSAFALCDVGSPWRNRWKLFSCTIKSTTTSVVPVWSPLDRHEWGDVFDVLNRPRLVRGGHGNFILMVGGLKSSFALNAPCSTILVLRLDLDNLRWDEAARMPSEMFRAFRESTKFKVFGGAGDMVCFSAKRIGKLALWDRRASEGHEWRWIDNLPENGKGLYRGFVFEGRLNAVP

SEQ ID NO: 263683 - protein, 68 aa, Glycine max
  Clone ID: PAT_MRT3847_80125C.1.pep
RDYIVILTFKRNNGGRNQHGRSHLKFIRCYDWRKCCAKDQAIKRYFVRNIGEQASDRDIHEASIYEQL

SEQ ID NO: 263684 - protein, 57 aa, Glycine max
  Clone ID: PAT_MRT3847_80126C.1.pep
NNHHTQCISPKTPLIQQLNRKDSIPALIPYLCQTRGTSKARAYVLLGVTITSSAAGL

SEQ ID NO: 263685 - protein, 40 aa, Glycine max
  unsure (1)..(40): unsure at all Xaa locations
  Clone ID: PAT_MRT3847_80127C.1.pep
RKKKFHLKNFFLTSSETKVYKLILGYXEIQRIXLXCFLLX

SEQ ID NO: 263686 - protein, 251 aa, Glycine max
  Clone ID: PAT_MRT3847_80128C.1.pep
MEAPPMALHDLPFTPMTTISLFIILFSLFSTPSHSALTCASQKLNRTYANCTNLPTLGATLHFTFNATNRSLSVAFSAEPPSRSGWVAWGLNLVGDGMRGAEAFLAFPSSASASAITLGRYNLTSYKAIDEVKAFTFDSWDLAAEESNGAVTIYGSVKIPDSARNVSHVWQVGPVAAGKPGVHSFEKKNTDSKAAFPVALVGPNTTTPASGENATAPASGGDKKNGAAGESFGVGFYFWLVFALMIGVVAI

SEQ ID NO: 263687 - protein, 35 aa, Glycine max
  Clone ID: PAT_MRT3847_80129C.1.pep
HIKSLLNLHSYSGFLKQHNSHYLYPTSYFFIPPHT

SEQ ID NO: 263688 - protein, 66 aa, Glycine max
  unsure (1)..(66): unsure at all Xaa locations
  Clone ID: PAT_MRT3847_8012C.1.pep
FFSFSGSDSGILLFLNSPVCKXLRIVCVVRFESASIEIYFHFYFSLFYSHSFRKVNAAGRSVKIGC

SEQ ID NO: 263689 - protein, 53 aa, Glycine max
  Clone ID: PAT_MRT3847_80130C.1.pep
CLGFVLMYGIVVQFQCKKDLKIPKSIVIPRNICEYAVFKSHHSMHFFYTLKIN

SEQ ID NO: 263690 - protein, 55 aa, Glycine max
  Clone ID: PAT_MRT3847_80131C.1.pep
GLKYFPAFVPSLIFLIVDIHSPNFFLFFFPAQTLIPYPIPFFLIHNERGKVQDRF

SEQ ID NO: 263691 - protein, 135 aa, Glycine max
  Clone ID: PAT_MRT3847_80132C.1.pep
PTLHAAALVAASCAEADSPPPDLVLLPIAAPCWADVGVPRMALVPMYSMSTAKSLGLLAAIRSGSVCLRLSLPSHLPVAYFVLVGAALEPFASELLFGLYFQALKKVEEAMLRLENLLQELYVSSTSSGKEHLNI

SEQ ID NO: 263692 - protein, 167 aa, Glycine max
  Clone ID: PAT_MRT3847_80133C.1.pep
ELKHILFSLTGLPLWLHDIPGIVFRSDNEQFKFHMQRFTAKIVNLMKSANLFASQGGPIILSQIENEYGNVEGAFHEKGLSYIRWAAQMAVGLQTGVPWVMCKQDNAPDPVINTCNGMQCGKTFKGPNSPNKPSLWTENWTSFYQVFGEVPYIRSAEDIAYNVALFI

SEQ ID NO: 263693 - protein, 222 aa, Glycine max
  Clone ID: PAT_MRT3847_80134C.1.pep
MMNDTSSDSENEIIGSRAKLFGHEEPIHEVLGGGKVADVLLWKDRYVSGALLGGMTVIWFLFEIVEYNFVALLCHISITTMLVLFIWSTVADIFKWKGPQIPDIVLKESFFHDLASILHKRFNQLLPMLLRISCGIDLPIFLLNIVSLYILSVIGSYFSFVNLLYIGFLCMQTLPIVYERYEEEINNWVGDVIIVLKKNYRRFNKNYLNKIPRGPGKAKKTQ

SEQ ID NO: 263694 - protein, 194 aa, Glycine max
  unsure (1)..(194): unsure at all Xaa locations
  Clone ID: PAT_MRT3847_80135C.1.pep
FGTSLRLRKRLAASVLKCGKRKVWLDPNETSEIEMANSRQQIRKLVKDGLIIRKPNKIHSRARVRARTEAKRKGRHMGFGKRKGTXEARMPTKVLWIRXMRVLRXMLXKYRAQKKIDKFLYHXLXLKXKGXVFXNKRVLMEHIXKXKAEKQRXKNLXKXANAXRLKNQAXXXKXSKXVPERXKLGFPEKTEDNP

SEQ ID NO: 263695 - protein, 123 aa, Glycine max
  Clone ID: PAT_MRT3847_80136C.1.pep
YNSTCKDVILAQTKAKEINQWKEERIAEEATKLPKEAALELAEKEKVKAQAALEAYEEAIKMVEKEAQRRIQAEVKARREAQEKDRALNLLIINDTRYRKYSIKDIEEATQKFSPSLTVSEGG

SEQ ID NO: 263696 - protein, 240 aa, Glycine max
  Clone ID: PAT_MRT3847_80137C.1.pep
LAVGLEALLEGITDTLGTELLESLLKMAPSKEEERKLKEHKDDSPTKLGPAEKFLKAVLDVPFAFKRVEAMLYIANFESEVEYLRKSFQTLEAACEELRNSRMFLKLLEAVLKTGNRMNVGTNRGDAHAFKLDTLLKLVDVKGADGKTTLLHFVVQEIIRTEGARPSSTNQTPSTNLNDDAKCRRLGLQVVSSLSSDLASVKKAAAMDSEVLSSEVSKLSKGIAHIAEVVQLDEAAGSDE

SEQ ID NO: 263697 - protein, 201 aa, Glycine max
  unsure (1)..(201): unsure at all Xaa locations
  Clone ID: PAT_MRT3847_80138C.1.pep
NSLNRPQKFENTSVIHQLRCGGVLEAVRISLAGYPTRRIYSEFVDRFGLIAPEFMDGSYDDKAVTLKILQKLKLENFQLGRTKVFLRAGQICILDSRRAEVLDNAAKCIQRRLRTFIARRDFISIQAAALSIQACCRGCIGRKIYASKRETAAAISIQKYIRMCLMRHAYVKLXNSAIIVQSKWSWVHNSAKDSCIKDTKL

SEQ ID NO: 263698 - protein, 73 aa, Glycine max
  Clone ID: PAT_MRT3847_80139C.1.pep
RVRRLQEDGGRGSERGVLERAGFEALICASRDCYKTDNESRTRFEVPDALRTHPRHRNSSEPPHLLFMKQHPL

SEQ ID NO: 263699 - protein, 52 aa, Glycine max
  unsure (1)..(52): unsure at all Xaa locations
  Clone ID: PAT_MRT3847_8013C.1.pep
XXXPXXQXPPDXLSXXIXXXIXXXXTXXXXXQILXNYPXXXLIPXXXXXXXS

SEQ ID NO: 263700 - protein, 75 aa, Glycine max
  Clone ID: PAT_MRT3847_80140C.1.pep
VSPVVYQLVIYVVQFFSLVFHPIFVLLSSIFISLFFSLSSAEYYQQYKCILRKLKFSQALLIYSITTNLGFISPP

SEQ ID NO: 263701 - protein, 87 aa, Glycine max
  Clone ID: PAT_MRT3847_80141C.1.pep
LKLNECGYLQVFKIASYFDCYLQVVKKLSDLLLFLWHPCLTFSKHCQMLWLSNVGCKDNFIFCNSFCIRMLRNLNSILTKPNQIGRT

SEQ ID NO: 263702 - protein, 70 aa, Glycine max
  Clone ID: PAT_MRT3847_80142C.1.pep
FFFFFFFFFFFFFFFFFGKKFLLSINILFIMIMNIWKCKPAFFYWQGGFTILGGGFHWGGRAFEILLGSA

SEQ ID NO: 263703 - protein, 100 aa, Glycine max
  Clone ID: PAT_MRT3847_80143C.1.pep
SKVSCHSNQNNSTQNLEEGKLSHNLGGKNRRDFLIGFGELYGASTLSNNNNNLLAIAAPILPPDLETYGSPELPTDVKPATICCPPVSSIVIDFKLPSAS

SEQ ID NO: 263704 - protein, 69 aa, Glycine max
  Clone ID: PAT_MRT3847_80144C.1.pep
SSLFFFLFLKWLMITVFFPHFWLPLCIVSHPLPIIGICNYSNCIVISFLRFSLNVIVSYTLIESLTPYN

SEQ ID NO: 263705 - protein, 83 aa, Glycine max
  Clone ID: PAT_MRT3847_80145C.1.pep
LFFSLACPFKITPSGFSVFSLVFSRFSSSERVADWCSFRAVIVGVDPPRPLRIPPTTQCFLLFNQRFVCFVSCNRILNSLQPP

SEQ ID NO: 263706 - protein, 70 aa, Glycine max
  Clone ID: PAT_MRT3847_80146C.1.pep
SNIIPNIITLLTILICFYLLTPLTIRFQFSSTLSNPFMNPSFLFTTFNNSVITQNPFYPSYPYHITHTRF

SEQ ID NO: 263707 - protein, 53 aa, Glycine max
  Clone ID: PAT_MRT3847_80147C.1.pep
YHLCLHLKLCFFLLQIINICFVYACSYSVDPTYFNACSYPYYQELGMYHKDTI

SEQ ID NO: 263708 - protein, 85 aa, Glycine max
  Clone ID: PAT_MRT3847_80148C.1.pep
FGAECPHPQECFLADISTLARYNVFSLSLLFTLLVLRWNYLACHPRLWLRVDRSVKELSEPGVFPNIETAVSASRPGDTILIATG

SEQ ID NO: 263709 - protein, 266 aa, Glycine max
  Clone ID: PAT_MRT3847_80149C.1.pep
MEYQQQKQQWKRSQRTKPSSSSSSHINNLDDGCLMHIFNFLPPIPDRFNTALVCHRWNYLACHPRLWLRVDRSVKELSEPGVFPNIETAVSASRPGDTILIAAGGTHRVANIQIRKPLCLIGAGEVPDDTTLVCSRGSDSALEFLSTCKLANLTVRAELGCCLLHRKGRLTIDGCILQCESNPLDYLSCPIVSTASSSVVLPSQTKSNNGDGVFVSQTRIEGGAKAVLTSGDLALQRVRVIYARTSLLFWFDVEQMCDQIDYDKPL

SEQ ID NO: 263710 - protein, 174 aa, Glycine max
  Clone ID: PAT_MRT3847_8014C.1.pep
HASAQPQSEDQNMAQPQSEDPNMVHPQSEDQNMAQPLMEDENTALPQLEDENTAQPQLEDENTAQLQGSSKLEDENTAQPASDLPDQKEGTTAQPQMSSRPEEGNTAPTSNEFKTQKEGNTAQPQVSSRSEDGNTAQRQVSSRSDDGNTVQLQVSSRTEDGEYSSATSEFKIGG

SEQ ID NO: 263711 - protein, 60 aa, Glycine max
  Clone ID: PAT_MRT3847_80150C.1.pep
SCKTKVPSVEVPFSLCLPFNLKTHLSLPLKIKYHTPEEEIAFGPGCWLWDYLRRSGASGF

SEQ ID NO: 263712 - protein, 275 aa, Glycine max
  unsure (1)..(275): unsure at all Xaa locations
  Clone ID: PAT_MRT3847_80151C.1.pep
MPLIHTTPPLHYAISTLINAPSSSSSTLSAATFGSNFLRKIHNPIFRFSTARNRSRAAVVRAKAGTDYYSTLNVGPNATLQEIKASYRKLARKYHPDMNKSPGAEDKFKEISAAYXDDEKRSLYDRFGESGLQGDNGGSTGAPGVDPFDLFDTFFGRSDGVFGVGDEGSFNFNFRNKRNHVHDIRYDLHLSFEESIFGGQREIEVSCFQTCNMCDGAGAKSKNCIKQCTNCGGRGGEMKTQRTPFGMMSQVSTCSKCGGLGKIITDQCRRCDGSG

SEQ ID NO: 263713 - protein, 91 aa, Glycine max
  Clone ID: PAT_MRT3847_80152C.1.pep
TAARRRQKGYSPTSPSYSPTSPSYNPQSAKYSPSLAYSPSSLRLSPSSPYSPTSPNYSPTSPSYSPTSPSYSPSSPTYSPSSPYNSGVSPD

SEQ ID NO: 263714 - protein, 95 aa, Glycine max
  unsure (1)..(95): unsure at all Xaa locations
  Clone ID: PAT_MRT3847_80153C.1.pep
SNQGTISMSLTQPPYDLQSLKFQPIKESIGXREMTRRSMTAMLTYAATDFVFFGAGSAGFSCASELXSRNPAGGGAIVEQSVSPGGGPWFVGQFF

SEQ ID NO: 263715 - protein, 29 aa, Glycine max
  Clone ID: PAT_MRT3847_80154C.1.pep
KIMATYPDAFPEDSSSEVIDRRPDLEMSK

SEQ ID NO: 263716 - protein, 98 aa, Glycine max
  Clone ID: PAT_MRT3847_80155C.1.pep
RGSSLSLFRWVPLFFLAFFPLFFVCRVPCIGGFPSPALRGLGPSFFVGSFFVPRPVVGAFGAPFGAFFCSSLVRVGFSVFSFSMFFCLCCGVEQQKIS

SEQ ID NO: 263717 - protein, 86 aa, Glycine max
  Clone ID: PAT_MRT3847_80156C.1.pep
AFCDLVWSDPEDVDTWAISPRGAGWLFGAKVTNEFVHINNLKLICRAHQLVHEGYKFMFDEKLVTVWSAPNYCYRCGNIASIMVFK

SEQ ID NO: 263718 - protein, 197 aa, Glycine max
  Clone ID: PAT_MRT3847_80157C.1.pep
MVHVSFYRNYGKTFKKPRRPYEKERLDAELKLVGEYGLRCKRELWRVQYALSRIRNNARNLLTLDEKNPRRIFEGEALLRRMFRYGLLDETQNKLDYVLALTVENFLERRLQTLVFKSGMAKSIHHARVLIRQRHIRVGRQVVNIPSFMVRVDSQKHIDFSLTSPLGGGRPGRVKRKNQRAAAKKAAGGDGDEEDED

SEQ ID NO: 263719 - protein, 79 aa, Glycine max
  unsure (1)..(79): unsure at all Xaa locations
  Clone ID: PAT_MRT3847_80158C.1.pep
LLITKKPCVMKQGTHLGIMFXXXLTFTYQVDYFHCNKDWSCIKNAEENHAIHLDLDKLIEYKLDLLACIKVSFVFLRKL

SEQ ID NO: 263720 - protein, 131 aa, Glycine max
  Clone ID: PAT_MRT3847_80159C.1.pep
IHNPKIPKGPEKRNQKARGKKLLKAKKKGKGRKAPQKKGGGKQSFEKISKIKKPGGLEAKKLNPRTWKTGKNPRERKKPLGVADLPPGNPFTPRKGLGPPKIGGYHKGQDPPPLYPREPLGKGDPKTGPKP

SEQ ID NO: 263721 - protein, 50 aa, Glycine max
  Clone ID: PAT_MRT3847_8015C.1.pep
EHSWPWVLLWAPFLNFRKFPRDTSLQYPWSVPEDPSKSTSSYAKYPYAEP

SEQ ID NO: 263722 - protein, 129 aa, Glycine max
  Clone ID: PAT_MRT3847_80160C.1.pep
KWSRNWAARFILLNLEPCVADDIIRAEMERDCSTTHGSPDYSEFASITTSTRATEHNPACRGSGSFLVKLQLQWVQLSSSNHRKLEEVSVCNSSFQIPTLRTRLTFRRVVLLGYKEKGKLVKIVSLLMS

SEQ ID NO: 263723 - protein, 102 aa, Glycine max
  unsure (1)..(102): unsure at all Xaa locations
  Clone ID: PAT_MRT3847_80161C.1.pep
FDLGLNALDXEVWLGDVSIGGAELAKSAKLVKSGISDIDVPITFRPKDFGSALWTXRGRGTGYTFKGHIDVDTPFGAMKLPITKEGGTTRLKKNEDSGDDEE

SEQ ID NO: 263724 - protein, 64 aa, Glycine max
  Clone ID: PAT_MRT3847_80162C.1.pep
LLQEDVRWVLLREDYRMVQLLYDYSMTLIMIIMNVTIEYYTYIDYMSKLILYEFVQNYLTLCLL

SEQ ID NO: 263725 - protein, 77 aa, Glycine max
  Clone ID: PAT_MRT3847_80163C.1.pep
HRKKKFIGLFQNNWSWIHRSISNNLKKKIISFSRNWWINHSKFTEHQLQWVEEGTRTKCHSGDLWQHGTRGSRGENC

SEQ ID NO: 263726 - protein, 125 aa, Glycine max
  Clone ID: PAT_MRT3847_80164C.1.pep
NARRKKTTEGGRGEAWKQANQAPTSPKRPKRQPTPKTPQNPRGPQQPTRTPPTKNDHPTEPTENPRGQGHGGGGDTEPGEQARKPGDPGPDRPPKKAQEPEKQKAKPEKPQKKPQDAHEETKAAT

SEQ ID NO: 263727 - protein, 46 aa, Glycine max
  Clone ID: PAT_MRT3847_80165C.1.pep
LLICWFLLVGGFKPKTYPSLPSLFSTKSTLYLRHVRPSTHPLYLGP

SEQ ID NO: 263728 - protein, 184 aa, Glycine max
  Clone ID: PAT_MRT3847_80166C.1.pep
MHVDSAWRIGVEKNLLPVETVDAGLKSLASGCPNLRKLEVAGCSEVGISTIGAECATLQELELQRCDDAVLGGVAGCENLQILKIVGCVKGFYESVVSDIGLTILAQGCKRLVRLELVGCEGSFDGVKAIGQCCVMLEELVIVDHRMDDGWLAGFRICENLKTLRVQSCKVIDGSPGLEEHLVC

SEQ ID NO: 263729 - protein, 87 aa, Glycine max
  unsure (1)..(87): unsure at all Xaa locations
  Clone ID: PAT_MRT3847_80167C.1.pep
KILHXNSFPFSLLYHIIILTSRLFLKHLCLLQNQYYLLFTFLLTFLSTQSTILSSIPFFISSHYYNLTLQHPYPTFPHQLLFTTFQS

SEQ ID NO: 263730 - protein, 60 aa, Glycine max
  Clone ID: PAT_MRT3847_80168C.1.pep
LLPCGGKVVTFRCDQYYTVGRALATGSDQLRKIYRMRLCATIKDCDTITFWYDVRKLDYV

SEQ ID NO: 263731 - protein, 66 aa, Glycine max
  Clone ID: PAT_MRT3847_80169C.1.pep
FFLQISKGDPNSPLCHLFDRAYERIKIKGEKTKPRSDVFLKQIKRSESLQSQRMLLAPPFQKKNFQ

SEQ ID NO: 263732 - protein, 195 aa, Glycine max
  Clone ID: PAT_MRT3847_8016C.1.pep
MAFTFNLHVPKALPPLPSSSRGTTSLFFSSKHKSYHNNTSPSQSLRITCSSQKSNHDDDGSLKYTSLALQIGVLLALAEQPVLAVTGENNRPELLWVLTQWGVVLFGYFLVVPPIIMYWLWKRWYRRNLLEMYLQFMCVFIFFPGVILWAPFLNFRKFPRDPSLQYPWSVPEDPSKIRSSYAKYPYAEPEDYDNL

SEQ ID NO: 263733 - protein, 62 aa, Glycine max
  Clone ID: PAT_MRT3847_80170C.1.pep
PFYFFTFFFFPQLSPGWDSLYTGPAHNHRLYARFPYHNSPISNFGHTYPYLITTHIPISIVN

SEQ ID NO: 263734 - protein, 113 aa, Glycine max
  unsure (1)..(113): unsure at all Xaa locations
  Clone ID: PAT_MRT3847_80171C.1.pep
LARSWPHHRHQQTLMAMRGQQDKEIEIPTTTTLGYNLPNRDSSSSSSKLSSPTVGERSSSDHDQQHHQPTHQTRTLIFNETPHHNLYPPPPPPXXALAPHRPTSDPDLSPPLL

SEQ ID NO: 263735 - protein, 58 aa, Glycine max
  Clone ID: PAT_MRT3847_80172C.1.pep
VSFGNGIGSGYQMPLLLRITSWAQRPPTPLRGSAVPSHHASRGGRTLGSLWSDISRHG

SEQ ID NO: 263736 - protein, 57 aa, Glycine max
  Clone ID: PAT_MRT3847_80173C.1.pep
DGVFVSDGPVLSPSEEVEPDEGHALREWRRLNAIELEENENRDKELRLSIIEEAWEY

SEQ ID NO: 263737 - protein, 121 aa, Glycine max
  Clone ID: PAT_MRT3847_80174C.1.pep
MLSFSVSGFPPFPLRRAYPRRVSASFDIDTPQDPNSVNPNGSNAKFEEEEEEFRKGKERGRVIGGGGVFIGRKKKAGKEKVQWVCCNCGYSAGQWWGMCRSCSVSGTMKEAKFSDADTGGK

SEQ ID NO: 263738 - protein, 65 aa, Glycine max
  Clone ID: PAT_MRT3847_80175C.1.pep
KRLDKPTKMFILELTKHQTNSLQRHANKKRLNSHDTSFSMQIPIQPTSPIPNYRHHIDHFFSYLS

SEQ ID NO: 263739 - protein, 45 aa, Glycine max
  Clone ID: PAT_MRT3847_80176C.1.pep
KTTFSPFFLERENSKPPGPRVMLFLRGEADFIRPHRGGEILALAI

SEQ ID NO: 263740 - protein, 91 aa, Glycine max
  unsure (1)..(91): unsure at all Xaa locations
  Clone ID: PAT_MRT3847_80177C.1.pep
EISEAKLVCEDLKGNLNKKESIIKHLSAAKDRLLVDCDDKFKKWEDEKKXLVLALEEANEKTQNQEQQIHQYKQEIERMKGCLSVSEKKCL

SEQ ID NO: 263741 - protein, 47 aa, Glycine max
  Clone ID: PAT_MRT3847_80178C.1.pep
GMNQPQVSKVYSPIINIIRLSGVYTSRMRKAYSRIQQPYLFGTIRLE

SEQ ID NO: 263742 - protein, 54 aa, Glycine max
  Clone ID: PAT_MRT3847_80179C.1.pep
CLMTPMTFTLALARLQKQSCGQSGSDDHDLTMMGDHHTNTHVAIISLACITTHH

SEQ ID NO: 263743 - protein, 101 aa, Glycine max
  Clone ID: PAT_MRT3847_8017C.1.pep
PCLRLLGGDIDMSCDTYALSVLRALVKLYGGESYNIDFNEQKVLVKGNVQPDTFLQTVCKTVNMTTSCERDPGSSETITATAYNICLYSVQNTLLRESNTI

SEQ ID NO: 263744 - protein, 72 aa, Glycine max
  unsure (1)..(72): unsure at all Xaa locations
  Clone ID: PAT_MRT3847_80180C.1.pep
IMNSFQEFDSSNTDSNSTKAIINFTSGNSTNFPPAPPPSSSSPPCSSSSSGTTTLSRYENQKRRDWNTXRQY

SEQ ID NO: 263745 - protein, 202 aa, Glycine max
  Clone ID: PAT_MRT3847_80181C.1.pep
MNSFQEFDSSNTDSNSTKAIINFTSGNSTNFPPAPPPSSSSPPCSSSSSGTTTLSRYENQKRRDWNTFGQYLRNHRPPLSLARCSGAHVLEFLRYLDQFGKTKVHTQLCPFFGHPNPPAACPCPLRQAWGSLDALIGRLRAAFEENGGKPEANPFGARAVRLYLREVRDSQAKARGISYEKKKRKRPQQPPLPPSNNAKVVI

SEQ ID NO: 263746 - protein, 79 aa, Glycine max
  Clone ID: PAT_MRT3847_80182C.1.pep
MILFYNKFIMKEKKNCLFFLINLLLLYFFFTFLSFIPRCIHEDTLQFAFDILMNHEFLHIILTNVFRYDLHQPVNQMIR

SEQ ID NO: 263747 - protein, 44 aa, Glycine max
  unsure (1)..(44): unsure at all Xaa locations
  Clone ID: PAT_MRT3847_80183C.1.pep
RSWPAPCALFFPFSSRXRXGGVALFCSXPRXGSAPACGVQESQP

SEQ ID NO: 263748 - protein, 192 aa, Glycine max
  Clone ID: PAT_MRT3847_80184C.1.pep
MNSFQEFDSSNTNSTKATNFPSSSSAAPAATAPPCSSSSSSTTLSRYENQKRRDWNTFGQYLRNHRPPLSLSRCSGAHVLEFLRYLDQFGKTKVHTQLCPFFGHPNPPAPCPCPLRQAWGSLDALIGRLRAAFEENGGKPEANPFGARAVRLYLREVRDSQAKARGISYEKKKRKRPQQLSLPPSNNAKVVI

SEQ ID NO: 263749 - protein, 61 aa, Glycine max
  Clone ID: PAT_MRT3847_80185C.1.pep
QLSHNQGTSWVRGGDWLCLLEPVIGTCQKPHQSSTLSHLTPSKASFSSLQTKIHTAKFADS

SEQ ID NO: 263750 - protein, 33 aa, Glycine max
  Clone ID: PAT_MRT3847_80186C.1.pep
FFSPRFLMWSRSHCIMVDPPYSSCNAAYVLLLL

SEQ ID NO: 263751 - protein, 109 aa, Glycine max
  Clone ID: PAT_MRT3847_80187C.1.pep
THCSHMGPQLLTNLGNILGYLRGGSYIIAMAFIPLLKDLGSQLCRTLRWTTGAVLVFQQAATIRAEIYLALPTWGSNYHRSKPRERPCLSGTHWGNTLSNLSPPFITNN

SEQ ID NO: 263752 - protein, 251 aa, Glycine max
  Clone ID: PAT_MRT3847_80188C.1.pep
VTLRKTVKIGRPGYRVTKQYDPETKQRSLLFQIEYPEIEDLTKPRHRFMSSYEQRVQPFDKRYQYLLFAVEPYEIVAFKVPSTEIDKSTPNFFSHWDPDSKMFTLQLYFKSKPPEANKPQPASTANGTAPSGVPPRPLPPPPQGPLPPPPMPGSMPPPPMAATNGPRPAPSGGMPSIPPPPPVASGTSGFNMGARPPSMPPPQGFPSQPMQGHGVRLSSTPKHGTVGPQALGQQASLEVLNNCSRMCPLRT

SEQ ID NO: 263753 - protein, 53 aa, Glycine max
  Clone ID: PAT_MRT3847_80189C.1.pep
KFLLIVNTGCRTLKHGNKSERYSIKRILKLLPTIKCTKSYGKENDCMDWPHTS

SEQ ID NO: 263754 - protein, 52 aa, Glycine max
  Clone ID: PAT_MRT3847_8018C.1.pep
QQRQFNMMVLQLYIEILIVLLEHHIIVGVTADHIRVCFDKTSESSCYDNTTY

SEQ ID NO: 263755 - protein, 349 aa, Glycine max
  Clone ID: PAT_MRT3847_80190C.1.pep
MDREWGSKPGSGGAASAQNEAIDRRERLRRLALETIDLAKDPYFMRNHLGSYECKLCLTLHNNEGNYLAHTQGKRHQTNLAKRAAREAKDAPAQPQPHKRKVTLRKTVKIGRPGYRVTKQYDPETKQRSLLFQIEYPEIEDLMKPRHRFMSSYEQRVQPFDKRYQYLLFAAEPYEIVAFKVPSTEIDKSTPNFFSHWDPDSKMFTLQLYFKSKPPEANKPQPASTANGTAPSGVPPRPLPPPPQGPLPPPPPPPQGLPPGAPMANPPRAPPPPMPGSMPPPPMAATNGPRPAPSGGMPSIPPPPPVASGTSGFNMGARPPSMPPPQGFPSQPMQGHGVRLPPPPPNMGQ

SEQ ID NO: 263756 - protein, 129 aa, Glycine max
  Clone ID: PAT_MRT3847_80191C.1.pep
MPVYIMGDYVTVSTTQEHIAIPIEKLNALSLEVAKEEKHVTDDAYVDNVQKPEEKDEETQEKGDCRYCQEEDFIFNMESPCNCNGSVKYVHKRCIDQWYNSKGRMILCEICRKPYNPNDYPLGLHYDDD

SEQ ID NO: 263757 - protein, 54 aa, Glycine max
  Clone ID: PAT_MRT3847_80192C.1.pep
LKDFIFLILVRLIFAHIRPDYIGVTRIFLHRSLVIFIQDESYIRRIQGPKVYQI

SEQ ID NO: 263758 - protein, 87 aa, Glycine max
  Clone ID: PAT_MRT3847_80193C.1.pep
VGPPSLLVVWELWVTTVPSGLGESVGSVAMDRYRFLLSSTGKVGQESGNYNVFERVKKGKQRIRTYIPFYHLLTTMQAHKSAQRFEA

SEQ ID NO: 263759 - protein, 59 aa, Glycine max
  Clone ID: PAT_MRT3847_80194C.1.pep
LLLHPSNTSIMTSIYFATHTYLELHIITTTTKSFLNTIYQQLSTTSLHTYINFKLHMKK

SEQ ID NO: 263760 - protein, 51 aa, Glycine max
  unsure (1)..(51): unsure at all Xaa locations
  Clone ID: PAT_MRT3847_80195C.1.pep
SFAMLKKLMWKAQYIKKRESVKFKYRPRLCLIRHWCSIXYQVIPGQCHAHY

SEQ ID NO: 263761 - protein, 41 aa, Glycine max
  Clone ID: PAT_MRT3847_80196C.1.pep
MAKDPVRVLVTGAAGQIGYALVPMIARGVKLGPDQPVILTC

SEQ ID NO: 263762 - protein, 124 aa, Glycine max
  unsure (1)..(124): unsure at all Xaa locations
  Clone ID: PAT_MRT3847_80197C.1.pep
PDRXESYSLXSTEAHQSYLAXYSWNILEASYDTKYXEINMVMFCXEEGLVHCERRLQDSVIVEISLEQIHSLIKLAKSSSRKTISSEDKPFNSRSHHRIYYNKLGXFSGVISQNNQQLMDLDIL

SEQ ID NO: 263763 - protein, 49 aa, Glycine max
  Clone ID: PAT_MRT3847_80198C.1.pep
SSQISPAYLFTKQFLILFLQWERKVRGRDKKCNGREICSPEFIVYALQI

SEQ ID NO: 263764 - protein, 46 aa, Glycine max
  Clone ID: PAT_MRT3847_80199C.1.pep
YVIEQLKNCGHVLQWSSANCNQLRSENVMAYCFLKTNDRACTTTAN

SEQ ID NO: 263765 - protein, 55 aa, Glycine max
  Clone ID: PAT_MRT3847_8019C.1.pep
RVTDFFYALASCRYRLNNAHYTGNAGYCSSGGKAVECISPKVESSMLTGEGAVTY

SEQ ID NO: 263766 - protein, 85 aa, Glycine max
  Clone ID: PAT_MRT3847_801C.1.pep
TRPLPRPPIPYPFPIDTGLCIGEPAFVAMIKEHPKLCQSHDECMKKGSGKFCARYPNPESEYGWCIDSDSEALKGFLKMPTTFAE

SEQ ID NO: 263767 - protein, 130 aa, Glycine max
  Clone ID: PAT_MRT3847_80200C.1.pep
QQQQQQIGKRNNNGWFGDFPRPDNNNTGLLFGFQQPNRSNGNLGENTNLVPKQPPPPLSLNSNHSQRQAQQHQQQPPPLFPKPANVTFAAAPMHLLNNAQLASPGRKRGLIGVAEHSMNVGMVGLATANV

SEQ ID NO: 263768 - protein, 49 aa, Glycine max
  Clone ID: PAT_MRT3847_80201C.1.pep
KPYGGVMMTTGGERVGVNITRTRRSPIWVFYNHDAMEPALGFHNVVFHL

SEQ ID NO: 263769 - protein, 57 aa, Glycine max
  Clone ID: PAT_MRT3847_80202C.1.pep
GYASHIQHVGGFNVSGGRHTSLRSLCRIHGYLKQKFNSFNMNSWSRKLVIGKVDFNG

SEQ ID NO: 263770 - protein, 97 aa, Glycine max
  Clone ID: PAT_MRT3847_80203C.1.pep
PVGGPTLHPTCTITPITIILHAVPLANKPIPKYRIFYAHRPVHALFRRVVGATGVLLILFFSVFYSRFLHLFVLTSSVAHYPSIPPFIGSTLCTQHL

SEQ ID NO: 263771 - protein, 100 aa, Glycine max
  Clone ID: PAT_MRT3847_80204C.1.pep
LTLDINITPYFIILSWSQLTVLSFKRIGKNSTRILDNSEHYKNLSKQINKKLKTLNFYSYIHQKFIKQNSMQAYLGMQYQKSTMNGILFLGLREMTPQTV

SEQ ID NO: 263772 - protein, 131 aa, Glycine max
  Clone ID: PAT_MRT3847_80205C.1.pep
DIPVGVSGSVVVVTVLYCLMAASMTKLLPYDVINAEAPFSAAFSGRSDGWGWVSRVIGVGASFGILTSLLVAMLGQARYMCVIGRSNVVPSWFARVHPKTSTPVNASGLLCIFTAAIALFTDLDVLLNLEG

SEQ ID NO: 263773 - protein, 117 aa, Glycine max
  Clone ID: PAT_MRT3847_80206C.1.pep
FTHNNSYGVVNLAFKTPQLFPIHHPIFPPKAPLYHHQFSTHIHVNNVLKSSSFNLSKIIKTFLLTSFSPIYSIQEISSSFIKNSIPVCLLKIVSSYNNASNLFSFIILKKISQILTS

SEQ ID NO: 263774 - protein, 72 aa, Glycine max
  unsure (1)..(72): unsure at all Xaa locations
  Clone ID: PAT_MRT3847_80207C.1.pep
MNICYICLYNCITLLHDFEGKTKMKEXLTRVSKMGAADELTPQQARQLHFHLASSYSSFMAMLLHDWVGVCL

SEQ ID NO: 263775 - protein, 336 aa, Glycine max
  Clone ID: PAT_MRT3847_80208C.1.pep
MCNPQIFLQTKIPKMPPCKYFAIPSILFFLLSFLIFPTKAAPIYSSHACTDSSKYQPNSTFQTNLDLLLSYLSSNATQGAHFYKTTVGSETPNAVKGLFLCRRDTLTAVCHDCVNAAAKDLTRRCPVEKEAIIWYDVCMVRYSNQNYLNNIVPAVDMSDSKSVAGADLDRFNEVLAGLLNALATKAANSEDEKFETGEVNLTSSVTLYGLVQCTPELSLFDCNMCFRSAIASVPNCCDGKQGARVLLPGCNIRYQVYPFYNSTKILATPVVKSRPSGRSRVEVILTFVIPIVAAMVLFTFGICHVMRKQAKSLKQLWRKTNYSEGVDEIDSINLRG

SEQ ID NO: 263776 - protein, 92 aa, Glycine max
  Clone ID: PAT_MRT3847_80209C.1.pep
NGVVIIRWYSDSMKTPISGFYRNPLKFITPTDENLKEYLIRPSTYLQASLIPLPRKLQKSHLLTGCFILGWHQRQLNPLCKVLSKNGHWLAS

SEQ ID NO: 263777 - protein, 49 aa, Glycine max
  unsure (1)..(49): unsure at all Xaa locations
  Clone ID: PAT_MRT3847_8020C.1.pep
XCVWSNDILYQRHITIHKLSKLKXTYRACLVSHFLTSIKQLHSVASLHV

SEQ ID NO: 263778 - protein, 70 aa, Glycine max
  Clone ID: PAT_MRT3847_80210C.1.pep
STVEPPLSRRRTPTESISSRRSQFEGKMHEVWVHSRPDRDVRPSDHGRGRAGVPPAGGDRRLRGPLRGQH

SEQ ID NO: 263779 - protein, 75 aa, Glycine max
  unsure (1)..(75): unsure at all Xaa locations
  Clone ID: PAT_MRT3847_80211C.1.pep
VTLSDSQVSAYTSQILHGLKYLLDRNVVHRDIKCANILVYPSGSVKLADFGLAKTTKFECRXSMKGTAFWMALEV

SEQ ID NO: 263780 - protein, 95 aa, Glycine max
  unsure (1)..(95): unsure at all Xaa locations
  Clone ID: PAT_MRT3847_80212C.1.pep
PAGTISTTSSLDIWKGNNALXLPDGPDANELDLVLGTLFVVHPIFFIGEARNLEDKLPXAARGNAFLLFGSDCGRAGRFHCHTMREASVYSWMGV

SEQ ID NO: 263781 - protein, 96 aa, Glycine max
  Clone ID: PAT_MRT3847_80213C.1.pep
FWGKIKTHFSYKITFKFYPSKNDTSLGIFFHAWRKKIWGHVGVLCPLNLDPFQNRIWGGVFFFNTPLLLLFLALFLISPPFLFSLLLWFWFLGNPL

SEQ ID NO: 263782 - protein, 72 aa, Glycine max
  Clone ID: PAT_MRT3847_80214C.1.pep
VVAAASLNKFINLYYESGSYLYIKNMYECTLIILKMQTTRNSKHNLIQYLYHNTPKFNQKLLHNNFNNLDQN

SEQ ID NO: 263783 - protein, 109 aa, Glycine max
  unsure (1)..(109): unsure at all Xaa locations
  Clone ID: PAT_MRT3847_80215C.1.pep
TTYXNAQIIFLATTNPPSKLDEAILSLLPQAFEIVIPHQKERSEIFKIILNYYNIQHNINFCHIHVFSEGYTGSHLFDLCKKPAYFPITQLLDEENKRKQSHPPIPLSH

SEQ ID NO: 263784 - protein, 100 aa, Glycine max
  Clone ID: PAT_MRT3847_80216C.1.pep
IYDMAWTTLKGSPRMSSHPRPLSWIVIMVGALAFFLIYASWVLVSSPIGATVQGYFYSVGSSEKLDLPVSSVNEASINDGHSNTSLDLVDKNPSSEDLQS

SEQ ID NO: 263785 - protein, 75 aa, Glycine max
  Clone ID: PAT_MRT3847_80217C.1.pep
NQARLGTTQHTTLWRRTVTTHHSLGHCASSCPTQTCYKGRGLPLRLPSTICTNHFLAIIFRSDWHTRAVYDPSTK

SEQ ID NO: 263786 - protein, 148 aa, Glycine max
  Clone ID: PAT_MRT3847_80218C.1.pep
TPLYTLSTFFLVSVLISVAMASDHTMSFHSSSLHEEDFDDDDDDHLHPHPHNLSRLSVCTSSTFGDNDHVDNLASMCVSHLSIESFDADGVLSSDSENELGSFYSLPSTPPRRRKQVKDYASDNGNETKKSDPRRRRRPSMMGFDGRG

SEQ ID NO: 263787 - protein, 47 aa, Glycine max
  Clone ID: PAT_MRT3847_80219C.1.pep
SDLSYSHILVSELYHNQYLLQNKISFRSYMRQVKSFIYVRLVKSKLD

SEQ ID NO: 263788 - protein, 55 aa, Glycine max
  Clone ID: PAT_MRT3847_8021C.1.pep
YQRIFKEKSWHTFSSFLYAQFVNGCQNAKKVVAKEGKFYLINATKKLLSSLQLQN

SEQ ID NO: 263789 - protein, 84 aa, Glycine max
  unsure (1)..(84): unsure at all Xaa locations
  Clone ID: PAT_MRT3847_80220C.1.pep
LVCRFFGLLLPFLLRCSVXLLGFLLLSSSXXSLWAGWLRGPCCRPFLVRRRXXLLPXGLGGAVPPLPXLPPLVVVXCSPNLRLV

SEQ ID NO: 263790 - protein, 112 aa, Glycine max
  Clone ID: PAT_MRT3847_80221C.1.pep
RLNYKKKCVMDISNVLDIILKKIQKAIGVRNPVAILCAPRILQNTIHVTMCVRTLFTSLLCHCARQNTVHVIIDHFFIAKNYQCTIHNTVHAILTTKIVSALFMTPSVVFSQ

SEQ ID NO: 263791 - protein, 49 aa, Glycine max
  Clone ID: PAT_MRT3847_80222C.1.pep
SDPISLNKYQVSCKFHQSVLKFRHIQGQLQIYQQVVSTSTHIHEHRTYD

SEQ ID NO: 263792 - protein, 55 aa, Glycine max
  Clone ID: PAT_MRT3847_80223C.1.pep
KRNKKYTNGRASVILEKKKKKKKKKKKKKKKKKKKKKKKKKKKKKKKKKKKKKGG

SEQ ID NO: 263793 - protein, 98 aa, Glycine max
  Clone ID: PAT_MRT3847_80224C.1.pep
RASGASITIQRPRGVPGEMTVEISGTASQIQAAQQLVQNFMAEAASAAQDHMGGSINQGYNSYPTNPVYASPPSSAAGHAGHAPSADYGSVYGTNYGY

SEQ ID NO: 263794 - protein, 99 aa, Glycine max
  Clone ID: PAT_MRT3847_80225C.1.pep
SISPRFLTEKREFTLAYKKMLIAYKFPTSLNCKIFRRKNVHGGRGKAETLVFRQTQETPLATENGSSKTPALGNGRNNVKLAYEKLWMLFHPRKFKGGT

SEQ ID NO: 263795 - protein, 110 aa, Glycine max
  Clone ID: PAT_MRT3847_80226C.1.pep
NQQDFQPKHRKALESEYVSAHLHEWIDLIFGYKQRGKEAVTANNVFFYTTYEGTVDLDKISDPVQQRAIQDQIAYFGQTPSQLLTVPHLKKMPLAEVLHLQTIFRNPKEV

SEQ ID NO: 263796 - protein, 84 aa, Glycine max
  Clone ID: PAT_MRT3847_80227C.1.pep
LEGSFAGYLNHIRVEGIPGREAKTHSFSAKARAGDHSGRRTQKLTWTYPADEASGPRDKTYETHSDVGWRASGPNNSSWIMALK

SEQ ID NO: 263797 - protein, 152 aa, Glycine max
  Clone ID: PAT_MRT3847_80228C.1.pep
MTMDVVQLQRKLREHQAAMFQQGFLDDQFSQLQKLQDESTPDFVIEVITMFFDDSENLLKNMARCLEQVPADFKQIDAHAHQYKGSSASIGAARVKNVCATFRAFCEAKNQEGCMRCLSQLQQEYSLLKNALQYLFSLQQQIKAAGGSIPTQ

SEQ ID NO: 263798 - protein, 97 aa, Glycine max
  Clone ID: PAT_MRT3847_80229C.1.pep
MGPMVLSQLATGLSVLAGAVLVKSVMDQKPMAGPFTRCPTCNGTGRVTCLCSRWSDGDVGCSTCSGSGRMACSSCGGSGTGRPLPAKIAIRPGPVVH

SEQ ID NO: 263799 - protein, 51 aa, Glycine max
  Clone ID: PAT_MRT3847_8022C.1.pep
RRCPAGWPHAPGGLAGATWRTCRRRAGALVRVRDCAWTFRRENFQMEVADE

SEQ ID NO: 263800 - protein, 41 aa, Glycine max
  Clone ID: PAT_MRT3847_80230C.1.pep
TGRERANKSNGGRKPMTLCLVSRRRCSAERRPLARADEDRE

SEQ ID NO: 263801 - protein, 98 aa, Glycine max
  Clone ID: PAT_MRT3847_80231C.1.pep
MGPMLLSQLATGLSVLAGAVLVKSVMDQKPMAGPFTRCPTCNGTGRVTCLCSRWSDGDVGCSTCSGSGRMACSSCGGSGTGRPLPAKIAIRPPNRPIN

SEQ ID NO: 263802 - protein, 231 aa, Glycine max
  Clone ID: PAT_MRT3847_80232C.1.pep
LVLSLVKAWGIDLDDQPCSNPDCLYLHGIGSHEDSFTKDEIVSAYTRSRVQQITGAAYNMQRQSGNVLSPPLDDCTDNSSGKSIVKNSSSTSVSIVRGSPPNGTSGRPIALSAAAAWGIRATNCQPAACGLLCPNGLSKLKPDTISSTLPFSSAVACTIQASLNSDVTKRPLSSDGSHSMTPQVKNELLKPVKQNRSMDILDSAEERTLASESLSPMKLNNQGVFSTISRI

SEQ ID NO: 263803 - protein, 52 aa, Glycine max
  Clone ID: PAT_MRT3847_80233C.1.pep
KYKLEFYTRYIALDINTHIIHKRDGLVIDTLYMRKTKGKNEGYSFILSFHPK

SEQ ID NO: 263804 - protein, 73 aa, Glycine max
  Clone ID: PAT_MRT3847_80234C.1.pep
LYLFGNAFSSKKNHILALPLLRCSNVILFGSLDRICSFVSLVKSKVAHFQSLTREVVLRKSRHVVPSLKHWFM

SEQ ID NO: 263805 - protein, 58 aa, Glycine max
  Clone ID: PAT_MRT3847_80235C.1.pep
KRGGNFQIDRAFSTRGAWQIFFRWDNEFLLTNGNHKTLFADFHSSEVELRAKIKLAKP

SEQ ID NO: 263806 - protein, 424 aa, Glycine max
  Clone ID: PAT_MRT3847_80236C.1.pep
MAFPYMEAVVGFMILMYIFETYLDVRQHRALKLPTLPKTLEGVISQEKFEKSRAYSLDKSHFHFVHEFVTIVTDSTILYFGVLPWFWKKSGDFMTIAGFNAENEILHTLAFLAGLMIWSQITDLPFSLYSTFVIEARHGFNKQTPWLFFRDMLKGIFLSVIIGPPIVAAIIVIVQKGGPYLAIYLWVFTFGLSIVMMTLYPVLIAPLFNKFTPLPDGQLREKIEKLASSLNYPLKKLFVVDGSTRSSHSNAYMYGFFKNKRIVLYDTLIQQCKDDEEIVAVIAHELGHWKLNHTVYTFVAMQILTLLQFGGYTLVRNSADLYRSFGFDTQPVLIGLIIFQHTVIPLQQLVSFGLNLVSRSFEFQADGFAKKLGYASGLRGGLVKLQEENLSAMNTDPWYSAYHYSHPPLVERLAVLDEPDKKED

SEQ ID NO: 263807 - protein, 145 aa, Glycine max
  unsure (1)..(145): unsure at all Xaa locations
  Clone ID: PAT_MRT3847_80237C.1.pep
IKGIFLSVIIGPPIVAAIIVIVQKGGPYLAIYLWAFTFGLSIVMMTLYPVLIAPLFNKFTPLPDGQLREKIEKLASSLNYPLKKLFVVDGSTRSSHSNAYMYGFFKNKRIVLYDTLIQQCKDDEENVAVIXAHELXHWKLNHTVY

SEQ ID NO: 263808 - protein, 89 aa, Glycine max
  Clone ID: PAT_MRT3847_80238C.1.pep
MFSSDLFSGFMILMYIFETYLDVRQHRALKLPTLPKTLEGVISQEKFEKSRAYSLDKSHFHFVHEFVTIVTDSTILYFGVLPWFWKVNF

SEQ ID NO: 263809 - protein, 50 aa, Glycine max
  Clone ID: PAT_MRT3847_80239C.1.pep
WYRGVIPVQFLKCGVHMHETLVIQWHLPSGLLNYKQPYVKGQALKRVSAG

SEQ ID NO: 263810 - protein, 107 aa, Glycine max
  Clone ID: PAT_MRT3847_8023C.1.pep
LLVSNFQSENMQNNDRASESHAAHTGEYAASTSTNWYNFSSNIPYLLIQSKGNQYNSSHNCTPYPTTKKRLILSKRVYSTRTRGRSGPLQSLALKLGRFKVRAVIVD

SEQ ID NO: 263811 - protein, 409 aa, Glycine max
  Clone ID: PAT_MRT3847_80240C.1.pep
MEGNSGSDPARPLLANRDNNSAENGGQRSRLSRRISVSSLRASFTSKLPDKVRSGLDSESPFDVDLSSTTALSKGEKEYYERQFATLKSFDEVDSVESSDCIEESDEEQAQQERAMKISNYANVALLILKIYATVRSGSIAIAASTLDSLLDLMAGGILWFTHLSMKNINIYKYPIGKLRVQPVGIIIFAAIMATLGFQVLITAVQQLIQNSPAEMMTTEQLIWLYSIMIFATVVKLMLWLYCRSSGNKIVRAYADDHHFDVVTNMVGLVAAVLGDKYYWWIDPVGAILLAIYTITNWSHTVMENAVSLVGQYAPPEVLQKLTYLVIRHPRIKRVDTVRAYTFGVLYFVEVDIELPEDLPLKEAHAIGESLQIKLEKLPEVERAFVHLDFECDHKPEHSVLIKLPNNQP

SEQ ID NO: 263812 - protein, 461 aa, Glycine max
  Clone ID: PAT_MRT3847_80241C.1.pep
MKEQRKNHAAHCLVLPYPAQGHINPMLQFSKRLVQRGVKVTLVTVVSNWKNMRNKNFTSIEVESISDGYDDGGLAAAESLEAYIETFWRVGSQTFAELVQKLAGSSHPPDCVIYDAFMPWVLDVAKKFGLLGATFFTQTCTTNNIYFHVYRIGSELPLTQAEYLLPGLPKLAAGDLPSFLNKYGSYPGYFDVVVNQFVNIDKADWVLANSFYELEQGVVDWLVKIWPLKPIGPCLPSIYLDKRLQDDKDYGVNMYNPNSEACIKWLDEKPKGSVVYVSFGSMAGLNEEQTEELAWGLGDSGSYFMWVIRDCDKGKLPKEFADTSEKGLIVSWCPQLQVLTHEALGCFLTHCGWNSTLEALSLGVPVIAMPLWTDQITNAKLLKDVWKIGVKAVADEKEIVRRETITHCIKEILETEKGNEIKKNAIKWKNLAKSYVDEGGNSDKNIAEFVEELAHRCAAIN

SEQ ID NO: 263813 - protein, 107 aa, Glycine max
  Clone ID: PAT_MRT3847_80242C.1.pep
HNNNKQNTIQTIRTWTVVDNIGASQALTDRMKVSQSQHALRSLQQHARRTIRSNPQDTCMPSATSATVSPTVNKRTVEYNMMIGKILCLRNIISLASQCPFANLRTT

SEQ ID NO: 263814 - protein, 65 aa, Glycine max
  Clone ID: PAT_MRT3847_80243C.1.pep
KAGGRFWPPKQGPKGGHPLKGGGPNPPPQGVTNLGPGAPRPGGGNKPPPPGGGGEGPPFSIGTLG

SEQ ID NO: 263815 - protein, 103 aa, Glycine max
  Clone ID: PAT_MRT3847_80244C.1.pep
KTNGISFRAYYWKSAPGILTWGAKVTGHDNKGVHPIKHAIHLKPKPVFPIWGVRKVKHCSIVPVKGLPLAHLIQFNSGDGGFSIYLGNAQSKVPGGGASFLEG

SEQ ID NO: 263816 - protein, 100 aa, Glycine max
  Clone ID: PAT_MRT3847_80245C.1.pep
LGIREMLGLCAAAAAVVENLHCSIQDQEHCATFFLFPSSHFSFACPTMTVFVTRTIPAIAVPRRRGFSHSPIPCQATQTTHASIFLLPCFQWIFNFQIDN

SEQ ID NO: 263817 - protein, 54 aa, Glycine max
  unsure (1)..(54): unsure at all Xaa locations
  Clone ID: PAT_MRT3847_80246C.1.pep
MTTNYAITPYDSTLFKLAKIHQLSNXKKIAATKMIHPTYDKPLLVWWTTLXLLH

SEQ ID NO: 263818 - protein, 57 aa, Glycine max
  Clone ID: PAT_MRT3847_80247C.1.pep
GENNSKQNFLLLNLKTCTCRSETLILHLNFFPRHAGKPICALFSLRIFFFCLFFNPF

SEQ ID NO: 263819 - protein, 203 aa, Glycine max
  unsure (1)..(203): unsure at all Xaa locations
  Clone ID: PAT_MRT3847_80248C.1.pep
MLYVSNSAPSNQTVMVLRLTSRVEAACSHTELLRQHGLNLIECFTLDSAQNAMKGGCRVGLLIVTREDELCELDKYESFVGGNRISWVGLVAQELISMPRMRQFIGEHLFNFITLPAELDHIVLTLRHAWGMAFMRDMPQTAVHIPILNNADYAMVXKTPEMQRLFGQIQKVARTDASVLITGPSGTGKELAALFIHHQSARS

SEQ ID NO: 263820 - protein, 51 aa, Glycine max
  Clone ID: PAT_MRT3847_80249C.1.pep
MGRKSLMDVGLLTLWIKAMEVLLSWAGKVPFSSRTIHSGDACVKGIINDDW

SEQ ID NO: 263821 - protein, 448 aa, Glycine max
  Clone ID: PAT_MRT3847_8024C.1.pep
MVWKLLGARPLCSYSSSLLLTPLLFRSKISLVHGQEPIFGHLCYMKPSPFLGNVSFHSYPFLKFNDKVVEQQHQDSQKASSANVDGDGNAKVKRNKLKGKRAVVRWLKFFRFKKKKEYERMTAEEKNLYKLLKARKKEERLCEALKKIEPAESSETTHDPEILTPEEHFFFLKMGLKSKNYVPVGRRGIYQGVILNMHLHWKKHQTLKVVVKTFSAEEVKEIAAELARLSGGIVLDIHEDNTIIMYRGKNYSQPPTEIMSPRVSLSRKKALDKSKYRDALRAVRRYIPRLEQELEILRAQFKSSAESNTDAAEAIQNSGRESIESGSISNFQLQNSYKDREMMNVNIGSTEDETDMNSELDSDSDKLSDIFETDSDTENFVKEEKPLYLDEFDNFPEQSDGEMNDFEEHMRQMSLKSKNMEKDDNLPKLDEVDKIFLQATSFLKKKIK

SEQ ID NO: 263822 - protein, 179 aa, Glycine max
  Clone ID: PAT_MRT3847_80250C.1.pep
MALFALAVLLLAFTGSSSATWCVCKEGSDAILQKTLDYACGAGADCNPLHQNGPCFQPNTVRAHCNYAVNSYFQRKGQAQGSCDFAGTATVTASDPSTGGCSYPASASTAGTATTSGTTTSFPYSSTPGVLGGIGSGMGPSGIGTNSNDSHGGLRLVDTSFFFMPLFSALVMIMLLWWG

SEQ ID NO: 263823 - protein, 51 aa, Glycine max
  Clone ID: PAT_MRT3847_80251C.1.pep
FTLIVWQRITIPEILDDEWFKKEYNPPIFEEKGEINLYDVEAAFKDSEELH

SEQ ID NO: 263824 - protein, 73 aa, Glycine max
  Clone ID: PAT_MRT3847_80252C.1.pep
IPKSKHPDLISTKKLFKPKILKSFIIIIAPQNLLIIFFFSLSPADTPQTPKLLEQHLKDSNGNLNSKGHESCG

SEQ ID NO: 263825 - protein, 79 aa, Glycine max
  Clone ID: PAT_MRT3847_80253C.1.pep
HIHEDGYHSFSFWFGESDVNRHKSPWSFFLSSLFVVRLDLKPFFCISSVWANLTLCMLSFEAPFFVGLIQAFIIFKIGE

SEQ ID NO: 263826 - protein, 164 aa, Glycine max
  Clone ID: PAT_MRT3847_80254C.1.pep
GTEFSSGGWNNPLFGGGFLCGSESNLMSGGDHEMLVGRVAAESVVEAVTCAVNGRPFEVVYYPRASSPEFCVKASVVKAAMQIQWCSGMRFKMPFETEDSSRISWFMGTISSVQVADPILWPDSPWRLLQVHYTTIIINGVYFINVLTFPIRSSLPQLVFAQRQ

SEQ ID NO: 263827 - protein, 40 aa, Glycine max
  Clone ID: PAT_MRT3847_80255C.1.pep
DWKSVRNLGWCGFSLTTLEQFGARNGNCLSNRWLFLSAEA

SEQ ID NO: 263828 - protein, 59 aa, Glycine max
  Clone ID: PAT_MRT3847_80256C.1.pep
TQTIIVMFSRTKLFVIPSIFILLPSCRGVKWQMNPISYVTCFRWHICPPPPVAPCKLLK

SEQ ID NO: 263829 - protein, 103 aa, Glycine max
  unsure (1)..(103): unsure at all Xaa locations
  Clone ID: PAT_MRT3847_80257C.1.pep
LLEREPSTATMVELIRGMVQHFLRIADGPDLEEAQRLRLMATSHLDDGEFARLLYAKIEKLIGAVFVASLERAXCRRDARPCTGDPLNLFWFAHQIKYKERKQ

SEQ ID NO: 263830 - protein, 61 aa, Glycine max
  Clone ID: PAT_MRT3847_80258C.1.pep
ARLKTQVPVILEAPPFSIKLQKRRFLVLKCLNPAPVYGSRGSLYGPSGGCFGSNKTGPLDF

SEQ ID NO: 263831 - protein, 196 aa, Glycine max
  Clone ID: PAT_MRT3847_80259C.1.pep
PNKVVDLSEFTQGSFMVQTKNGTVAVASAFAGHKEAIQQRDHKFLRIAVEEAYKGVDCEDGGPFGAIIVCNDEIVARCHNMVLRNTDPTAHAEVTVIRKACEKLNQIELSDCEIYASCEPCPMCFGAIHLSRVKRLVYGAKAEAAIAIGFDDFISDALRGTGFYQKAQLEIKRADGKAANIAEEVFERTKEKFRMY

SEQ ID NO: 263832 - protein, 64 aa, Glycine max
  Clone ID: PAT_MRT3847_8025C.1.pep
LLFWDNRWGDQISYLGLAFGGIFSLGLDIVRGGFSRGASFLRGGPPSFSPPKARRGLFFTPFKN

SEQ ID NO: 263833 - protein, 185 aa, Glycine max
  unsure (1)..(185): unsure at all Xaa locations
  Clone ID: PAT_MRT3847_80260C.1.pep
MEEVNVVQTKNGTVSVASAIAGHKEAIQQRDHKFLRIAVEEAYKGVDCEDGGPFGAIIVCNDEIVARCHNMVLRNTDPTAHAEVTVIRKAXKLNQIELSDCEIYASCEPCPMCFGAIHLSRVKRLVYGAKAEAAIAIGFDDFISDALRGTGFYQKAQLEIKRADGKEANIAEEVFERTKEKFRMY

SEQ ID NO: 263834 - protein, 49 aa, Glycine max
  Clone ID: PAT_MRT3847_80261C.1.pep
NLTSELCYLLLLTTYCKNKLKITSDTPLIVNTIRLNTLIQDHVQRIIAN

SEQ ID NO: 263835 - protein, 109 aa, Glycine max
  Clone ID: PAT_MRT3847_80262C.1.pep
DLYFKLNDFILQACEKLNQIELSDCEIYASCEPCPMCFGAIHLSRVKRLVYGAKAEAAIAIGFDDFISDALRGTGFYQKAQLEIKRADGKAANIAEEVFERTKEKFRMY

SEQ ID NO: 263836 - protein, 125 aa, Glycine max
  unsure (1)..(125): unsure at all Xaa locations
  Clone ID: PAT_MRT3847_80263C.1.pep
LHRWCQLCYPINYGHWGPNPDPELNTQCRFLTHATTCIGPYRIGQLGHXGYRLSTRLHHSVCSVWHVLPLVPPGTXGQRIMXPYSGTHANGGNTLLISLSXLDQDGLLEKHELAQPIDAERVNIS

SEQ ID NO: 263837 - protein, 64 aa, Glycine max
  Clone ID: PAT_MRT3847_80264C.1.pep
MGLSFTKLFSRLFAKLEMRILMVGLDAACKSTILYKLKLGYIVTSIPNNWSNVVTVEYNNVSFA

SEQ ID NO: 263838 - protein, 114 aa, Glycine max
  unsure (1)..(114): unsure at all Xaa locations
  Clone ID: PAT_MRT3847_80265C.1.pep
TNLPLIRLEKLTGEERNNAMXRIKDACKNXRFVDLRDHNIPHDMLNTIRQXTRERYNKYIXEKFKELRTTKXVDTVQTKIKDMNYEDHLSTYIRWLNQTSHRAVDVMYDYTKVG

SEQ ID NO: 263839 - protein, 519 aa, Glycine max
  Clone ID: PAT_MRT3847_80266C.1.pep
MDDCCAVCAEPLEWVAYGPCLHREVCSTCVARLRFICDDRRCCICKTECNLVFVTKALGDYTRMINDFSTLPLEAREGKVGSYWYHEDTNAFFDDVDHYRMIKAMCRLSCNVCDKIEDQPQDAASRRRAKFRNIGQLKGHLFHRHKLHMCNLCLEGRKVFICEQKLYTKAQLNQHVISGDSEVDGSESERGGFMGHPMCEFCRTPFYGDNELYMHMSTEHYTCHMGRRQHPGQYEYYKNYDDLEIHFRQEHFLCEDEACLAKKFVVFQSEAEMKRHNAIEHGGRMSRSKRNAALQIPTSFRYRHGNEHEQRRGRGRTFRRDTENQLSMAIEASLETANAEQTFLDQSTSSSGQVAVDDGNDDIDALIQPFESLAAGSEASARYLQALGHSSRNGPLEDSSFPPLPITSSNGQQRSKHELEGSSSNTMAARLRRHGNRTVSVINSGNAWPAAGRGLVQSSSNPSQSKLSTNNVLGLSRNTGQMKTVINSGPSSSTYAGSIQATQRTAHGQSPAHRGQRDM

SEQ ID NO: 263840 - protein, 79 aa, Glycine max
  Clone ID: PAT_MRT3847_80267C.1.pep
AIRGCKFYRGQRWHAGSATRLAAVECHGSCPFRAVRHRPAVHVPRVLSCYVSASGDCAAAAYRNPTVHAGLQLIAGVAG

SEQ ID NO: 263841 - protein, 378 aa, Glycine max
  Clone ID: PAT_MRT3847_80268C.1.pep
RLVRCAPPGGPPPRPPPPGAPVPPPPAAAPLPHAVAPSQPFPGTSLWKKGKLIGRGTFGSVYVATNRETGALCAMKEVELFPDDPKSAECIKQLEQEIKVLSNLKHSNIVQYYGSEIVEDRFYIYLEYVHPGSINKYVREHCGAITESVIRNFTRHILSGLAYLHSKKTIHRDIKGANLLVDSAGVVKLADFGMAKHLTGFEANLSLRGSPYWMAPELLQAVIQKDNSPDLAFAIDIWSLGCTIIEMFTGKPPWSEYEGAAALFKVMKETPPIPETLSSEGKDFLRCCFKRNPAERPTAAVLLEHRFLKNSQLLDVLSSTQLYNETSFMDKPHTPSRQSENSYDQLSTPCAKIAKGKAAERRGFLISSFDILPAYLDQ

SEQ ID NO: 263842 - protein, 84 aa, Glycine max
  unsure (1)..(84): unsure at all Xaa locations
  Clone ID: PAT_MRT3847_80269C.1.pep
VISTEGFCLIELRGLIRXHPMKIHALHYSDILAPRDMLTPXEGSRDLIQELNNHLIPLLYNIIEYYWIDMKELYGIDRYKTNEI

SEQ ID NO: 263843 - protein, 50 aa, Glycine max
  Clone ID: PAT_MRT3847_8026C.1.pep
YMLAMLMSHMHLAVVGLPEPTTQKSECFSLSCMSNASVVNSRSVCTHLMY

SEQ ID NO: 263844 - protein, 320 aa, Glycine max
  unsure (1)..(320): unsure at all Xaa locations
  Clone ID: PAT_MRT3847_80270C.1.pep
MVWPIRSRISSLLCSKAPLVGSYIYDSCGCLRFSAPTSSSITRHWPKIMDWVQMDRCRAAASLPSIKEKQPESHSNRVRLGQEIKGLDEGNMAEIDSYQNLFGLMKQRFLSFKSQKYIXKELEHFEALAEAQFPKFMVIACADSRVCPSNILGFQPGEVFMIRNIANLVPVMKNGPSECNAALQFAVTTLQVENILVIGHSSCAGIEALMNMQEDAESRNFIHKWVANGKLAKQRTKAATAHLSFDQQCKFCEKESINQSLLNLLSYPWIQDRVRKELLSLHGGYYNFSNCSFEKWTLDFKQCNVEEGSSYVVKEQEFWC

SEQ ID NO: 263845 - protein, 129 aa, Glycine max
  Clone ID: PAT_MRT3847_80271C.1.pep
VENILVIGHSSCAGIEALMNMQEDAESRNFIHKWVANGKLAKQRTKAATAHLSFDQQCKFCEKESINQSLLNLLSYPWIQDRVRKELLSLHGGYYNFSNCSFEKWTLDFKQCNVEEGSSYVVKEQEFWC

SEQ ID NO: 263846 - protein, 34 aa, Glycine max
  Clone ID: PAT_MRT3847_80272C.1.pep
PTFRGPFSLPKNKFGNQPVFWNPGPGPWLKIGRF

SEQ ID NO: 263847 - protein, 183 aa, Glycine max
  unsure (1)..(183): unsure at all Xaa locations
  Clone ID: PAT_MRT3847_80273C.1.pep
GFAFLKVLDDGNIEGISVLVSSMDPXTQREFVKXCSTGPSDLIFLQWVITHLKXNLAFKFISPYLGLVDHGRHSVLWITXFPMFEWNDPEQRLXDMNDLASARALAYDMVYNGVEIDGGSLRIYKCDIQQKVLEIVGISMEHVSGALIGNNDYVTIPVLSCLFIYFASFYICKMLQCCQTNLN

SEQ ID NO: 263848 - protein, 171 aa, Glycine max
  Clone ID: PAT_MRT3847_80274C.1.pep
MVWPIRSRISSLLCSKAPLVGSYIYDSCGCLRFSAPTSSSITRHWPKIMDWVQMDRCRAAASLPSIKEKQPESHSNRVRLGQEIKGLDEGNMAEIDSYQNLFGLMKQRFLSFKSQKYIKELEHFEALAEAQFPKFMVIACADSKVCPSNILGFQPGEVFMIRNIANLVPVM

SEQ ID NO: 263849 - protein, 93 aa, Glycine max
  Clone ID: PAT_MRT3847_80275C.1.pep
DVSLRTWFGQYLFRFSTFFSHSARGKCAQSSFKETPVFLVTVANNNWVYFKVGSVSSKMCIMMRTVFGFDGNNVTCSYSPPAKGLLTFYRRST

SEQ ID NO: 263850 - protein, 108 aa, Glycine max
  unsure (1)..(108): unsure at all Xaa locations
  Clone ID: PAT_MRT3847_80276C.1.pep
KRNLRNLHLAGSPHDGRYKFWTKHEKNLAKTXEEETTEAIRNKGIPADALAKRAHDFEKHVVHESLKDQIPAVDKLHPTKVNTFAKTMNXLRQSDVGDLKLLTDGKLS

SEQ ID NO: 263851 - protein, 110 aa, Glycine max
  Clone ID: PAT_MRT3847_80277C.1.pep
FSPGVDPRGFGLFFFFRGRGLEVSPLGPFFSVWGQPLFVSQFLVSLFPRGGRFRISGCGPGFRFVKRPAGAPRGLGFSFLTRSRYFGSPGPPPLLFFFLLMYFGLLTPLL

SEQ ID NO: 263852 - protein, 55 aa, Glycine max
  unsure (1)..(55): unsure at all Xaa locations
  Clone ID: PAT_MRT3847_80278C.1.pep
PFWKRRNLWAVGYVDLLYLREKRSPLIRQRLRVVIAYTHESNQVGRRQSFXSESC

SEQ ID NO: 263853 - protein, 20 aa, Glycine max
  Clone ID: PAT_MRT3847_80279C.1.pep
VYSDNCFIFVSIYVNCYYLQ

SEQ ID NO: 263854 - protein, 71 aa, Glycine max
  Clone ID: PAT_MRT3847_8027C.1.pep
KKLVLPYRDEAMLFPAEVTIKSEFVLCSVIFVYVRRLGLHISKRMSLSSDFVPVILFIQQFSIKKNIIITY

SEQ ID NO: 263855 - protein, 101 aa, Glycine max
  Clone ID: PAT_MRT3847_80280C.1.pep
IVYDTNHHDGRVCFMVYFPAVFSLTLNHVHTLTLLQKTLLIVRHLLYSLHLLTVTWASVYTTTRQCDLDAALLLHILCETHKHNPHVLEATFYVWRRNLSK

SEQ ID NO: 263856 - protein, 75 aa, Glycine max
  Clone ID: PAT_MRT3847_80281C.1.pep
GSRPLLSTFSLSHTFIHRGGVSIHRTLPTLRSTIRNVCHSGTLQIKELQLSLITQVRGKDLSCVRHPAKQRQPTS

SEQ ID NO: 263857 - protein, 326 aa, Glycine max
  Clone ID: PAT_MRT3847_80282C.1.pep
GSVPVSSPPPPRASPPGSGPPCGSPPSAPGPLRIRHEADSDGTTFREYHLFSTSRCDTIFTQSWIPRSPSNTIRGLVILMHGLNEHSGRYTHFAKHLNANGFKVYGMDWLGHGGSDGLHGYVHSLDDVVSDTKIFLEKVLNENPGLPCFCFGHSTGAAIILKALLDPKVESRIAGAVLTSPAVGVSPSHPILLALAPIASILLPTYQCSSAYKKGSPVSRDPEALIAKYSDPLVCTGPLRVRTGYEILRITSYLQRNLRKLRVPFFVLHGTADSVTDPIASQKLYVEASSSDKTIRLYDGFLHDLLFEPERDAITQDIIQWLNNRV

SEQ ID NO: 263858 - protein, 138 aa, Glycine max
  unsure (1)..(138): unsure at all Xaa locations
  Clone ID: PAT_MRT3847_80283C.1.pep
MLASLMISGDHRFTETAMLNCRDLDMLVAYYTIATXFRKYLPHYITWYLLTLLIYILPSFLTDEIIYKRHKRNIQISVLFHDGRFRLWTLHQKNLALTEEELMEVIRKRCIPADVLAKLADEFEQHVAHESLKDQISD

SEQ ID NO: 263859 - protein, 51 aa, Glycine max
  Clone ID: PAT_MRT3847_80284C.1.pep
FIRLLEFRIIRDLNGLRKHIGSCELSNHQSMVRATKHDNLVTHNGALLAIG

SEQ ID NO: 263860 - protein, 74 aa, Glycine max
  unsure (1)..(74): unsure at all Xaa locations
  Clone ID: PAT_MRT3847_80285C.1.pep
LRSKNVGVVLMXDSLMIQDGSSVIAGGTVAHIXCSEAYLGRVIDALAKPLDGRGVISDSESRLIGSPAPGIISR

SEQ ID NO: 263861 - protein, 50 aa, Glycine max
  Clone ID: PAT_MRT3847_80286C.1.pep
YAARRRQKGASLIYKECQDIIPKHYGNVSIFNLFPTLDIDLCTFMSGYNF

SEQ ID NO: 263862 - protein, 45 aa, Glycine max
  Clone ID: PAT_MRT3847_80287C.1.pep
GENETMIVRGDSFFDMTIGFYVEDAVRDDHIKVEWYVPVRILRKK

SEQ ID NO: 263863 - protein, 155 aa, Glycine max
  Clone ID: PAT_MRT3847_80288C.1.pep
FTSKISTDSISQIVEKDELLKSTVSKITVIHSQKDGKNITGKEKNNLSDSLLKKRQQQEIPPPLERENGNKDSMEVSNDVKLKKMLKKRKRGVNIIFEGDSQAAELEFERLSKVKRKLDSMKQKLNEVQNCRAKGSNEPSIIYVPTAQLREKVEK

SEQ ID NO: 263864 - protein, 51 aa, Glycine max
  Clone ID: PAT_MRT3847_80289C.1.pep
LVLCQLYEAGLYCHLWSIKRHKFKGSTHRCHSYTGSLISSPHFHVNASRAG

SEQ ID NO: 263865 - protein, 91 aa, Glycine max
  Clone ID: PAT_MRT3847_8028C.1.pep
GQAFPTMKILNRPPSLVGVLPFDPASSVPENILFISSPSVPKDYALPSESTIAENDDFSPSPNNNKYHALALRPNTKADSSPKTSSTKYSH

SEQ ID NO: 263866 - protein, 193 aa, Glycine max
  Clone ID: PAT_MRT3847_80290C.1.pep
MADTKFASLLLENLKLQDPWLPPDTWESIPSESGLLLSSPIPNSNQPLCHLSTLSESSLVRLAVNAMQGAKSSLVIIQNLSAIFSSDPSVRSFLWNRASTTRSLGNILISIGCTGSLLFLLRAFVDYFTDTFPLIHHDSPPFTLVNQAFAVSVGKVLEGYICGLDTIHTSVLLRRSSKDVDFTVPVFEECSAF

SEQ ID NO: 263867 - protein, 59 aa, Glycine max
  Clone ID: PAT_MRT3847_80291C.1.pep
QFPFTKIGMRFIKGQGGTSYLKIRSLGVENIKARTSLGCLNPQKLFVCQLVLPKLPQMI

SEQ ID NO: 263868 - protein, 50 aa, Glycine max
  Clone ID: PAT_MRT3847_80292C.1.pep
LPKTLSAVLSNTPENNINYISKRTLKYNYTFNTNPNSHITPQFSSPHNHY

SEQ ID NO: 263869 - protein, 74 aa, Glycine max
  Clone ID: PAT_MRT3847_80293C.1.pep
TSVPPNMQVYEVSESLCIKSQRDDVLQRDSWLNKSQYDSYPRGDSSQSASLVENTLNPSMNSVKKNQKTIFVRC

SEQ ID NO: 263870 - protein, 69 aa, Glycine max
  Clone ID: PAT_MRT3847_80294C.1.pep
SLCAESPYFLVLCLVKVKSKKMFQIVLFFQSNRHLCSILSSVVTSSSDPFCHVYYVACPHTHIYDLTAL

SEQ ID NO: 263871 - protein, 101 aa, Glycine max
  Clone ID: PAT_MRT3847_80295C.1.pep
WNLGYKFLPLSNNTYTNMFIGSLHPISHKLELTINPLSKVHSQYVLICLNILHLIDYCSSIHQTFINNMIFKLFAQHIKYFSSPSVVAHQYVLSHCSLREI

SEQ ID NO: 263872 - protein, 36 aa, Glycine max
  Clone ID: PAT_MRT3847_80296C.1.pep
VSFSSRSSSLSDSFSSLTYLLELQIRAPSPCAKSRA

SEQ ID NO: 263873 - protein, 233 aa, Glycine max
  Clone ID: PAT_MRT3847_80297C.1.pep
MVLRVSLILVLLVLHCSCTVESIWGHHNDLNKNGSSLAAVKFPDHAHFNAVSSSTETGCSFSKSEKFEPSVATMASNEDTDGKEGEAFVAAKQHKQSVKLNLRHHSVSKDSEPKKSVVDSTGRDLKRIQTLHRRVIEKKNQNTISRLEKAQEHSKKSYKPPTVAAAAPPEYLSGQLMATLESGVSLGSGEYFMDVFVGTPPKHFSLILDTDSDLNRIQCVTLYASCEQNGPYY

SEQ ID NO: 263874 - protein, 125 aa, Glycine max
  Clone ID: PAT_MRT3847_80298C.1.pep
NSARGTGAVTIRVAGVLKDWLLITLSTVLFPESKITGLNVIGYAIALSGVVFYNYLKVRDVRTSQLQSIQDESAKELQTEKKADDAMDNKDEASWNDSVSDTHLDEEAPLISSRISHFGVGRKPA

SEQ ID NO: 263875 - protein, 106 aa, Glycine max
  Clone ID: PAT_MRT3847_80299C.1.pep
GWVLFFYFHFLFDEMNLFHTMGELTRGAGPRDLNNDKGAPHTHGGRKGGDPLNGRKKPTGGPSRPKQKKGGGGAKKKTPAENGRECPPRRGGGQEPTKTPSLGNKR

SEQ ID NO: 263876 - protein, 56 aa, Glycine max
  Clone ID: PAT_MRT3847_8029C.1.pep
DKIVLARSFFTLLIFQGPTRQAYSPGPHPHPITFLTPPKDPNLVSVSRKPLVHFFN

SEQ ID NO: 263877 - protein, 91 aa, Glycine max
  Clone ID: PAT_MRT3847_802C.1.pep
SSSVPGDPLESTCRNGDMQAHTARMLRIEVVKKEQNSKKIIVVQGNLMRPLHPHCSRFFLHYLITTAQHTTARLLGKFTIASPHLHSEFFI

SEQ ID NO: 263878 - protein, 48 aa, Glycine max
  Clone ID: PAT_MRT3847_80300C.1.pep
LPHPHDGRSEDQACGWLLRLRQTMARLRLPQFQAHGRVKEPGMTKLLL

SEQ ID NO: 263879 - protein, 67 aa, Glycine max
  unsure (1)..(67): unsure at all Xaa locations
  Clone ID: PAT_MRT3847_80301C.1.pep
KPPGALEEXGPTTASDNKTAKARKNSKPDATATHXGATEKNNDXXASADSNNAGAGLTGETKDTNPG

SEQ ID NO: 263880 - protein, 113 aa, Glycine max
  Clone ID: PAT_MRT3847_80302C.1.pep
SRLNYVTLKLTNCNADSSYTLSECKSLVLEEGGHISGHFTPPDLLCTIHNGCHILVSSFRFPASITCSSHVYGSAVGQLADLVAPENSACVPLLMYERIGVSKQLAAIGLGFL

SEQ ID NO: 263881 - protein, 67 aa, Glycine max
  Clone ID: PAT_MRT3847_80303C.1.pep
SLAFTSFLFGDGAAALFLLKLRSVWNLQLFKVAALLRRPPKKYDVTVEVVAEMAELEIAFESVGPGI

SEQ ID NO: 263882 - protein, 107 aa, Glycine max
  unsure (1)..(107): unsure at all Xaa locations
  Clone ID: PAT_MRT3847_80304C.1.pep
FRSRQYVGAKTFKCDIIGAGSHSSEDFPAREELXTPNLTDARLIQRIHPPFNEVLAHMEAYMLELSLDDVETPKGSMLDLKISESKIALPKNTGGGTILLKDLLPNF

SEQ ID NO: 263883 - protein, 45 aa, Glycine max
  Clone ID: PAT_MRT3847_80305C.1.pep
TSDGVAKMKRLGLIIAQEASQLARDDRFPIPSFFRGCERQRVQLV

SEQ ID NO: 263884 - protein, 186 aa, Glycine max
  unsure (1)..(186): unsure at all Xaa locations
  Clone ID: PAT_MRT3847_80306C.1.pep
MRLRYPHTLLPLFTSLKLTTMNTQTLFHSSPFPNLKNTFFSQRRRFPSHRPFFTVFCSKPISRNPPSPLRTNGYHGSSHASIPRPVQLESPMEKSVEFQLNILKKKLEAIGMETGMCEPGQYNHLLCPECLGXRSGXERSLSLYIAPDGGSAAWNCFRGKXCGWKGSTQAFAKQFCKTSSRPRLKR

SEQ ID NO: 263885 - protein, 48 aa, Glycine max
  Clone ID: PAT_MRT3847_80307C.1.pep
SRFRMFVIRQKFNNLESAVSIKQFETRIKVARDAKDGSCQCKYGFCNR

SEQ ID NO: 263886 - protein, 55 aa, Glycine max
  Clone ID: PAT_MRT3847_80308C.1.pep
HAFDSTWMPLVMKVTILRTRTCKSMADMTCHLEPGNVSPRLKDVSHATTSCRNLI

SEQ ID NO: 263887 - protein, 62 aa, Glycine max
  unsure (1)..(62): unsure at all Xaa locations
  Clone ID: PAT_MRT3847_80309C.1.pep
IYHCMRTAVSVPPIINGAHXNITLVTKNELIACTASELTKAKVVLITMDHPCKNFGMQIGFV

SEQ ID NO: 263888 - protein, 145 aa, Glycine max
  unsure (1)..(145): unsure at all Xaa locations
  Clone ID: PAT_MRT3847_8030C.1.pep
EDIPHSAWDLFCWDSEKTLPNNLSAELLSCKLDTVTGQYYPEWAPINCRVHRQPIHITEGNYVRKHDASIEYDARTIPNDCGSLVVAKVGNHKQIVGFHVVGSKGRLGYASLIPYVEPVVQAXSAEVYLDSFPEEVVSQQDLLTL

SEQ ID NO: 263889 - protein, 56 aa, Glycine max
  Clone ID: PAT_MRT3847_80310C.1.pep
LQTCLYHFPFQNPPIHHRDPHQRSKLTYTCMRGRSRGTKLTYACMLPHSSHIVSPK

SEQ ID NO: 263890 - protein, 58 aa, Glycine max
  Clone ID: PAT_MRT3847_80311C.1.pep
LSQQCFRSTRVPSSSIGIFISSVFSAHLFLSFLSNPHTLISDWLAWDWIRTYDLQFYY

SEQ ID NO: 263891 - protein, 191 aa, Glycine max
  Clone ID: PAT_MRT3847_80312C.1.pep
MRLVVSALCVLVLFSCAVAYDPLDPNGNVTIKWDVMSWTPDGYVAVVTMHNFQMFRHIMNPGWTLGWTWAKKEVIWSMIGAQTTEQGDCSKFKGNIPHCCKKIPTVVDLLPGVPYNQQFSNCCKGGVVAAWGQDPSQAISSFQVSVGQAGTSNKTVKLPKNFTLFAPGPGYTCGPAKIVPSTNFLTPDKRR

SEQ ID NO: 263892 - protein, 73 aa, Glycine max
  Clone ID: PAT_MRT3847_80313C.1.pep
CTTHLQSRLIPLIVNRYLCNSSHLTTCRVPVMALPQSISALVTTLTLFSLTTKPQIVSPFGFFSIHKTRFSTL

SEQ ID NO: 263893 - protein, 186 aa, Glycine max
  Clone ID: PAT_MRT3847_80314C.1.pep
LNHAHAVDSLQNSEKGGAALLGVCRGKVSEGIDFSDDNARVVIIVGIPFPNINDIQVALKKKYNDTYKSSKNLLSGSEWYCHQAFRVLNQAAGRCIRHKLDYGAIVLLDERFRDERNRAFISKWLRRPLRVYDSFDLSLEGLKSFFEDAKKHYGINTVHATQSLGLNGDVVQIKDQNAWFKKKKKK

SEQ ID NO: 263894 - protein, 110 aa, Glycine max
  Clone ID: PAT_MRT3847_80315C.1.pep
MSKRVRSPRLELRLNLSPPRAAATSIISSSELSPTESSMSSPVSVQSLESSCVSSEAEETRAMLLVGCPRCLMYVMLSEVDPKCPKCKSTLLLDFLNNEENNNTKKSSSE

SEQ ID NO: 263895 - protein, 83 aa, Glycine max
  Clone ID: PAT_MRT3847_80316C.1.pep
MDPDGVVAAEALMASGRSSEKLSLPSLQSKMKCDPEGYESELLLLYNQFNSSLELFQKQAAMNFTSISGIGSDPTVANDLGDR

SEQ ID NO: 263896 - protein, 233 aa, Glycine max
  Clone ID: PAT_MRT3847_80317C.1.pep
MAIAAANSSPTMSLSHSQSQEDATTASTTNKPVDVDDNDDHEHDMVMPGFRFHPTEEELVEFYLRRKVEGKRFNVELITFLDLYRYDPWELPALAAIGEKEWYFYVPRDRKYRNGDRPNRVTTSGYWKATGADRMIRTENFRSIGLKKTLVFYSGKAPKGIRTSWIMNEYRLPQHETERYQKAEISLCRVYKRAGVEDHPSLPRCLPTRPSSSRASHDNNKKHNEMVQHNINM

SEQ ID NO: 263897 - protein, 294 aa, Glycine max
  Clone ID: PAT_MRT3847_80318C.1.pep
MTRKVSNFSDLIQRVTTSCFLHSFADDREEEYHSDSFGNKPQDEQGYYGEEKMVMGLKVISREAKIDTRVRALMEEVFEAVSAMKSAYVSLQEAHCTWDPQSLREADVAVVAQLKKLALLRDGFHGSVSTVEEDEGRRRRGGNAPYETVMKKEVKAKDLHKVKLGCVATLTSHENKARRPHPYTKRKLGCNSQMQEAGFVAAPSPEVLEATMAQVKEASKSFTSLLLSLMQDAKWDMAAAVRSIEAASDKYYNNPATSTTTVSTLHAKYALESYIFRKMFQGFDHESFYMDNNT

SEQ ID NO: 263898 - protein, 64 aa, Glycine max
  Clone ID: PAT_MRT3847_80319C.1.pep
PGLNGRALNQTKSSTTDSPPLSKQWDLAIELERAALLKLFTMRHDKLLTEGGAWIYSLEREGWL

SEQ ID NO: 263899 - protein, 152 aa, Glycine max
  unsure (1)..(152): unsure at all Xaa locations
  Clone ID: PAT_MRT3847_8031C.1.pep
DDKLVLANTQEFFDGNFPVDSWLPIFVNCLYPVSQLPSEAVVVNVTCGSGPGXFPTTAWISSAVNNRSSDINKRVRTPLGKGKKIVFLIRDDPFPVAFLAVLXFGGRKKILSFIAPNPMLTPLLWNCKRLKYLGGEGPFAFVDLHVKFFSLI

SEQ ID NO: 263900 - protein, 195 aa, Glycine max
  Clone ID: PAT_MRT3847_80320C.1.pep
LGFSVTAMDFESRRLHLLISVVAIIALSFTAEKCRELVGEEGSSQSGKFTILNCFDMGSGTVACAVKEGVKLYFYNIRSSHAERARSQAIESALVDAVTQGMSPTDSAKHAQKEGKKAAKLASRQAKRIIGPIISSGWDFFEAIYYGGTVTEGFLRGTGTLFGTYAGGFLGEQRLGRIGYLIFLEVTWAVGLVVE

SEQ ID NO: 263901 - protein, 183 aa, Glycine max
  Clone ID: PAT_MRT3847_80321C.1.pep
RLLVAGGGASNPGDWPWLSAVFVSTSLGLEYHCAGSLVSAGHVLTAAHCVHRHNPEALLVYLGRHNVRKWTEPQAQAREVAAVHVHPDHQAANYTADVAVLQLSERVAYDWFVRPVCIDWTGPEALAEVVGRVGTVVGWGRDEHGHALSSEPRAASLPIVSQEACLRSKTEFLHVTSERTFCA

SEQ ID NO: 263902 - protein, 60 aa, Glycine max
  unsure (1)..(60): unsure at all Xaa locations
  Clone ID: PAT_MRT3847_80322C.1.pep
GPNSKIFNRQTLLAFLDHPLYKISNIFLTQNWWVMRVSIILNMPRSAXFFENVTKHIKMY

SEQ ID NO: 263903 - protein, 67 aa, Glycine max
  unsure (1)..(67): unsure at all Xaa locations
  Clone ID: PAT_MRT3847_80323C.1.pep
YLFEMISKKSRWIXFQQIIIHKIVSLPILITNFLTGNLKIFLSKQIIAIILFNHVHLIIYRMFPIPL

SEQ ID NO: 263904 - protein, 47 aa, Glycine max
  Clone ID: PAT_MRT3847_80324C.1.pep
MGLGRDIDGLLKNNAKQTDLTPLWFLERAALVHPTRTSVVHGSRHYT

SEQ ID NO: 263905 - protein, 117 aa, Glycine max
  unsure (1)..(117): unsure at all Xaa locations
  Clone ID: PAT_MRT3847_80325C.1.pep
PXSPPPPPPPPPPPPPPPPHATPPPRTHAPRPAYSLSPIKKVYPFSSSQPNISLASFSPTALSPLVTTSSFYPVHALAIIVNHVLCTQPQTSPHVCRNDVASFIVLLNFRVLLLSLP

SEQ ID NO: 263906 - protein, 69 aa, Glycine max
  unsure (1)..(69): unsure at all Xaa locations
  Clone ID: PAT_MRT3847_80326C.1.pep
CRNATSAVPAGASMVAPFTGLKYIAVLPTRNTILDFAYIASNGXRAQCMHVWPPIGKKKVETLSYLPDL

SEQ ID NO: 263907 - protein, 187 aa, Glycine max
  Clone ID: PAT_MRT3847_80327C.1.pep
MKCAAGILLVFLPRIDLWAVEKHFQIAERTDSCLMMGKSCFTRNQVVEKENEISTEKNSTEMIKGQANTKASYAWMSFIEQVESIDVSTSLMILATSEVPYTELPHKVREFFKSYQSKDGRSTPLEQTIPRFSVQIDENFDHDMVINLSALELLRNVVEQLVQLIHQRSHVHMGSPKGRSYESIEVS

SEQ ID NO: 263908 - protein, 699 aa, Glycine max
  Clone ID: PAT_MRT3847_80328C.1.pep
MAMFTYHVETVQSWLALSRLHILIHLVAVLSLCYYRITHLLLEPPTAPWLLMTVAELLLSVLWFFNQAFRWRPVSRSVMTEKLPRDEKLPGLDIFVCTLDPEKEPTVEVMDTIISAVAMDYPSDKLAVYLSDDGGCDVTLYGIREAAEFAKEWVPFCNIYGVKSRCPKVFFSPFGEEDQHTLRHDGFSTQRDLIKAKYEKMQKNIEKFGSDPKNRRIVSDRPPRIEIINDQPGMPLVVYVSRERRPSLPHKFKGGALNALLRVSGLISNGPYVLAVDCDMYSNDPTSAKQAMCFFLDPETSKYIAFVQFPQMFHNLSKKDIYDNQSRTAFKTMWQGMDGLRGPGLSGSGNYLSRSALLFGSPNQKDDYLKDAQKYFGKSTAYIESLKAIRGQKSSKKNISRDEMLREAQVVASCSYENNTNWGTEVGFSYGILLESTITGYLLHSRGWKSAYLYPKTPCFLGCAPTDIKEGMLQLVKWLSELLLLGVSSKYSPFTYGFSRMSIIHTFTYCFMTMSSLYAVVFILYGIVPQVCLLKGITVFPKATDPWFAVFAFVYVSTQIQHLIEVLSGDGSVAMWWDEQRIWILKSVTSIFAIIDGIKKWLGLNKVKFNLSNKAIDKEKLKKYEQGRFDFQGAAVFMAPLVLLLIANIVSFFVGIWRLFNFNVKDFEEMFGQLFLVTYVMLLSYPILEAIVTMKSKSG

SEQ ID NO: 263909 - protein, 80 aa, Glycine max
  Clone ID: PAT_MRT3847_80329C.1.pep
GEFSPKRRGGTKYLWFLFYKIPSLKTKIPYGGGPPRWPNLGFKVAQIKKNLFFFPLPKETERPSTFGFSPVPGKGVKTFF

SEQ ID NO: 263910 - protein, 127 aa, Glycine max
  unsure (1)..(127): unsure at all Xaa locations
  Clone ID: PAT_MRT3847_8032C.1.pep
GKAFPNKIAFDDKLVLANTQEFFDGNFPVDSWLPIFVNCLYPVSQLPSEAVVVNVTCGSGRXGLPTTACIRSAANNRXSKTLTNXIRTGLXKRKKIVVITRVYPFSEALLAGLFCGQNEILSTSAAY

SEQ ID NO: 263911 - protein, 87 aa, Glycine max
  Clone ID: PAT_MRT3847_80330C.1.pep
YHVASQYGPLFFVNLVLSTAFPHAPQSLRVCLFVCVCCLLLLRLSLPAVGDCSACVLCGFFGCVCYYHAATPYGYILLVPLMPLRFA

SEQ ID NO: 263912 - protein, 68 aa, Glycine max
  Clone ID: PAT_MRT3847_80331C.1.pep
GRERLYSSDLLKSFMSRGSTSSREKLIHLATFWSKDPAQVFFIYSPRIFGVLKRIGMCLLTLLIDIGY

SEQ ID NO: 263913 - protein, 106 aa, Glycine max
  Clone ID: PAT_MRT3847_80332C.1.pep
KSLPCYLHSEQKPKCAFKRVLADNSYSPFNHLSNDENALSSHPYEAEITALLKNPMPKIELGTEIADLEMKDSYVWVHTELNELIDVLSEERFFAVDTEQHSLRSF

SEQ ID NO: 263914 - protein, 79 aa, Glycine max
  unsure (1)..(79): unsure at all Xaa locations
  Clone ID: PAT_MRT3847_80333C.1.pep
FIVLIFQILYKCSFNMAYLVIKCFSISNINRICSLGWYYGLTCSIFNIVYEISGNEFKFPIFLCSLYLYCILSFXFSEY

SEQ ID NO: 263915 - protein, 72 aa, Glycine max
  Clone ID: PAT_MRT3847_80334C.1.pep
VTPHAFKPKQQLCHRYDSFLNYDYNYYNCIININLCVCVCVCVCDFFIFLSSLVFLIHLSSCDKHLLISFIF

SEQ ID NO: 263916 - protein, 66 aa, Glycine max
  unsure (1)..(66): unsure at all Xaa locations
  Clone ID: PAT_MRT3847_80335C.1.pep
MDPYKIRPPSAFNSPFWATNSDAPVXYNISSLRVGARGPIQHKDYHLVAKLANFDRERTPARVVQV

SEQ ID NO: 263917 - protein, 44 aa, Glycine max
  Clone ID: PAT_MRT3847_80336C.1.pep
LPSDESLAPQIKHGFLEGKDPDVSVECPMGEEQFFSLEDFGPKK

SEQ ID NO: 263918 - protein, 101 aa, Glycine max
  unsure (1)..(101): unsure at all Xaa locations
  Clone ID: PAT_MRT3847_80337C.1.pep
SLPSSLSLSLLNNMQIXVKTLTGXXIXLXVESSDTXXNVXAKIQDKXXXXXXQQRXIXXGKQLEXXXTLXDXXIHXXXTXHXVLRXGEDTXXXVKTLTXVD

SEQ ID NO: 263919 - protein, 87 aa, Glycine max
  Clone ID: PAT_MRT3847_80338C.1.pep
WAIFWDALFCSWFPSVYGCLDRLFFACLSVGAMLYVFYCFCLFWLFFGSSIWVSYSLVGFFLFSYLYWVVVVSFLECYTMFGFGYLY

SEQ ID NO: 263920 - protein, 47 aa, Glycine max
  Clone ID: PAT_MRT3847_80339C.1.pep
AVHLPQFTTAMLRGLLRQMNCIYSQHCRCKLICMYYSKNRTNSLFLV

SEQ ID NO: 263921 - protein, 124 aa, Glycine max
  unsure (1)..(124): unsure at all Xaa locations
  Clone ID: PAT_MRT3847_8033C.1.pep
SDLEANNKPTVELEKXGPTLLGIECPKDEKLPRRKIFDKPKTRCFTILPMEFNLVVRQKFLNSVRFIMKKRDKLSCQVGINPYFMEWTGLANRSLSKGNDILRGEYASFDGLITKQVMSNDGRK

SEQ ID NO: 263922 - protein, 61 aa, Glycine max
  Clone ID: PAT_MRT3847_80340C.1.pep
LTTMLSKSYGYPTSSLIQEHPQNLERIEIQHTLENENTYSNIHCVFNNSVAMPVQRTKTDQ

SEQ ID NO: 263923 - protein, 61 aa, Glycine max
  unsure (1)..(61): unsure at all Xaa locations
  Clone ID: PAT_MRT3847_80341C.1.pep
KTTEGVTFFDFFESRQLKGNIFSIFVIAIAAAXTAIGLAIVSSIYRNRKSTRINQSNLLNK

SEQ ID NO: 263924 - protein, 38 aa, Glycine max
  Clone ID: PAT_MRT3847_80342C.1.pep
STSRSSQSFVYEAPLGYSIEDVRPNGGIKTFRSAAYSN

SEQ ID NO: 263925 - protein, 61 aa, Glycine max
  unsure (1)..(61): unsure at all Xaa locations
  Clone ID: PAT_MRT3847_80343C.1.pep
MASSRLDFLFCNLCGTMLTVPSTEYAQCPLCKTRRXIQDICDKXISFTISXEDIRRELGRK

SEQ ID NO: 263926 - protein, 108 aa, Glycine max
  unsure (1)..(108): unsure at all Xaa locations
  Clone ID: PAT_MRT3847_80344C.1.pep
XXXTXPXFXXTXXHXDLXXLXPXVXXKXPXSXXGXXLXXDSXXXGXXXXXXXXSXXXRXRTIIXXXAXYXXXPFXXMXXXLXXIXXXXVXXNXSFARAXFLXSXXXXX

SEQ ID NO: 263927 - protein, 53 aa, Glycine max
  unsure (1)..(53): unsure at all Xaa locations
  Clone ID: PAT_MRT3847_80345C.1.pep
SFXYYFCFFFLQYKXLTFKRTNCNQWVQGHSGNPKKSKRDGQMHGETHLIQAT

SEQ ID NO: 263928 - protein, 135 aa, Glycine max
  unsure (1)..(135): unsure at all Xaa locations
  Clone ID: PAT_MRT3847_80346C.1.pep
ISDCGLXPLLSSGSTGQLSGRLLTAYGYSAPEFESGSYTQQSDVFSFGVVMLELLTGRKSYDKSLPRGEQFLVRWAVPQLHDIDALSKMVDPCLNGAYPMKSLSRFADIVSSCIQREPEFRPAMSEIVQDLLRMM

SEQ ID NO: 263929 - protein, 124 aa, Glycine max
  Clone ID: PAT_MRT3847_80347C.1.pep
LGFFFFFFGKKGNWVYFSIENKNPVPQTKPARACYFRGGGCFKKDNPPFTGAPSPNKPKGTLVPTLSIKRLGKICPISNRFMLPTNLENAKSGTGPGLSFLKGGAPPGFKSNFPPCDMQQTFVG

SEQ ID NO: 263930 - protein, 424 aa, Glycine max
  unsure (1)..(424): unsure at all Xaa locations
  Clone ID: PAT_MRT3847_80348C.1.pep
IKRRPEKKNAKKLDDVGVFAGPLIKPTRPTRPVETANQEEKGKCEVPHRSTNFIPKVQEEQDIYVKVVSATSEGNNGRESINTGGGSKLSSLQPPPQHFLPTSPGEKVIINPAITTQVTKRQVMSNSIRVYTVALLQQYTNSFSQENCIGEGTLGPVYRAELPDGKLLAVRKLDATASMGQSHEQFLQLVSSISKIQHANIARTCRPTVAEHNQRLSCYMNIASNGXTLHDSLHGYDNHRIKLPWNARIQVALGAARALEYLHENFQPPIVHRNFRSANVLLNDNLEVCISDCGLGPLLSSGSTGQLSGRLLTAYGYSAPEFESGSYTQQSDVFSFGVVMLELLTGRKSYEKSLPRGEQVLVRWAVPQLHDIDALSKMVDPCLKGTYPMKSLSRFADIVSSCIQREPEFRPAMSEIVQDLLRIK

SEQ ID NO: 263931 - protein, 80 aa, Glycine max
  Clone ID: PAT_MRT3847_80349C.1.pep
ALGKDERTTILLLSLLSASLQVRLLIIGIRCRYYASHMDSICLSNNSAVYRFKDPASQLSPSMSRISRSLITDSPSLRTN

SEQ ID NO: 263932 - protein, 118 aa, Glycine max
  unsure (1)..(118): unsure at all Xaa locations
  Clone ID: PAT_MRT3847_8034C.1.pep
IFVYCLYPVSQLPSEAVAVNVTCGSGRGGLPTTAWINSAVNNRSSDINKKIRTALGKGKKIAHLTRVDPFPEPLLGGLFGVKKEILSSNTTNPMLTRLFENCXRLKYLFDEGSFAFLN

SEQ ID NO: 263933 - protein, 308 aa, Glycine max
  Clone ID: PAT_MRT3847_80350C.1.pep
MFGGGGEDALAARLGMMPPSLLNPASVMSGEMSPAVPAAREERGPAQPQWSQQETREFIAIRAELERDFTASKRNKTLWEVVSAKMRERGFRRSPEQCKCKWKNLVNRYKGKETSDPEHGKQCPFFEELHAVFTQRAHNMQRLLLESETRSAHTKKGVKRSSGDRSSEELSEDDNEVEYDSEEEKPSRSNTRKTKVDKVGVEKSSRASNPSNSASNSTSIQEMLKEFFQHQLSMEMQWREMIERRAHERQLFEQEFIKSLKKLERERLMIEQAWREREEQRRMREESRAERRDALLTTLLNKLINESN

SEQ ID NO: 263934 - protein, 41 aa, Glycine max
  Clone ID: PAT_MRT3847_80351C.1.pep
VLFLTSFSFILAVVLDHRADLLVFSNARVSVRVVGRVGGRS

SEQ ID NO: 263935 - protein, 98 aa, Glycine max
  Clone ID: PAT_MRT3847_80352C.1.pep
LNRTMCFTPYWLDHTPNSVFFSPPTQFYKTGPLCFFFSGGPRPLNSVIPSNHFFFGEKNPPNFKIGGIALAKNAYRICMGEFKTVSKGIRTLHSKITF

SEQ ID NO: 263936 - protein, 90 aa, Glycine max
  Clone ID: PAT_MRT3847_80353C.1.pep
KCIVSGPRVRVSVIGYQQFSVPNRPVFLPLLQIPHFSIGSRKQQVLTCWIRTMDTQSGEDTVDIDLGGVSSSGEAIGDMGDDIVTVLTGL

SEQ ID NO: 263937 - protein, 40 aa, Glycine max
  Clone ID: PAT_MRT3847_80354C.1.pep
RFTLAIGGPSLSSNPGHICYNSETSASSHEPFLHLHRLLS

SEQ ID NO: 263938 - protein, 89 aa, Glycine max
  unsure (1)..(89): unsure at all Xaa locations
  Clone ID: PAT_MRT3847_80355C.1.pep
TRRSKTKENRNRNDEDEHCVXKAMGXKXNESQXTGLGRALVRQHTKXSNRARTSLTSTRRSFSNPSPKSPXSTPSSSNPSXPSPNSPPH

SEQ ID NO: 263939 - protein, 131 aa, Glycine max
  unsure (1)..(131): unsure at all Xaa locations
  Clone ID: PAT_MRT3847_80356C.1.pep
NSLDLIGRDTQLNSAYKKSRPKKEEAPGKNEEEERSAGPLTDLMMSARKNTHARRTGGASRKLPGRVRALDRHCNKVLENVRQMXTEEPKTGKGPKTAQPANKDRFXKMSLRGHSVLIVLTNPKSDSVINL

SEQ ID NO: 263940 - protein, 62 aa, Glycine max
  Clone ID: PAT_MRT3847_80357C.1.pep
KWGLTRRIYNTNIFRGLQGWLHKRLFIETLGKVGQSIGCKKIQRGERLFKKTLDHWMQLLGI

SEQ ID NO: 263941 - protein, 116 aa, Glycine max
  unsure (1)..(116): unsure at all Xaa locations
  Clone ID: PAT_MRT3847_80358C.1.pep
VATKKFQNISYLXDFDDAXLVKEVEYYIRKGWILCLQLQLEYGFVHREYHRLLGXYDARSWIMWNLLMFGCLDXFXVLKELXEVKTVYPNGFIRIIGFDNVCQVQCISFIAYKPSG

SEQ ID NO: 263942 - protein, 134 aa, Glycine max
  Clone ID: PAT_MRT3847_80359C.1.pep
IRLEYGCEKTTEGGALFLFSLKHHQLRVEEGTIIAEHCPQSILDLTYNSYLSNLTVQPNKVQPRTPLCFSTSQCLSGADKNATSLNKGTFILCQNCQKSFSYWVINYKDKTAGRVLLFFVCITTRNLVARVILL

SEQ ID NO: 263943 - protein, 114 aa, Glycine max
  Clone ID: PAT_MRT3847_8035C.1.pep
CLYPVSQLPPEAVGVNVTCGSGRGGLPTTACISSAVNNRSSDINKKIRTALVKGKKIVCLTRVDPYADALLDEIFGDKNEIVSSIATNPMLTRLFENCISLKYMDDECTYALVN

SEQ ID NO: 263944 - protein, 50 aa, Glycine max
  Clone ID: PAT_MRT3847_80360C.1.pep
KGPKFKAKKVVGPLKRDSNYGGPMARKNFINGGAVGRINNGKLAAGMFII

SEQ ID NO: 263945 - protein, 301 aa, Glycine max
  unsure (1)..(301): unsure at all Xaa locations
  Clone ID: PAT_MRT3847_80361C.1.pep
VLPTLVYMSXEKRPQYHHNYKAGAINSLLRVSSRISNAKIILIIDCDMYSNHSQSVRDALCFFMDEEKGQEIAFVQFPQNFENLSKNDLYGNAISATXRRDALCGKKFNSQYKNEWNDENEKEVVKANLHELEVESKALASCSYEENTLWGKEIGAIYGCLVEDVITGLWIHSQGWKSIYYNPPRKAFFGIAPTNLLHTLVQQKRWGEGDFQILFTEYSPTWYGERKINLGLLMGYWRFNYSATTCLPILYYSVIPSLYILKAVPLVAMMTSPWFIPFAYVSLGVGSFSSGSRFDPSGPTP

SEQ ID NO: 263946 - protein, 59 aa, Glycine max
  Clone ID: PAT_MRT3847_80362C.1.pep
YHVVQVVFSRCELPFSVDNLENLKVVIGDEETAASCEDFKPMLPNLKVVNSRAVQVFLF

SEQ ID NO: 263947 - protein, 102 aa, Glycine max
  Clone ID: PAT_MRT3847_80363C.1.pep
GERTNLLGQRTGQHPRKPELITYSQHYSTYPLIDYLTPELGGPTHQHRLNRDTVRVMLCARGPHCWALTTQCPPPPLLVSIFSHDKELGQCSASTERCHALH

SEQ ID NO: 263948 - protein, 133 aa, Glycine max
  unsure (1)..(133): unsure at all Xaa locations
  Clone ID: PAT_MRT3847_80364C.1.pep
DDRVFTVYVRSGSIVEGGSDSVIALXLYDMSGYGIYISILAACGGFMDPGHNYYERSNLDIFRGRGPCLEAPVCEANLTSDGSAPHLCLYVYYVXVTNTGVHAPCSQQQFTFESWLVADCVPYXLWAVMNNCS

SEQ ID NO: 263949 - protein, 126 aa, Glycine max
  Clone ID: PAT_MRT3847_80365C.1.pep
ARGICGKKNSGFYLSECGQSLTLYAWKLWCAGKCLELLDPVLEESCIESEVVKCIHIGLLCVQEDAADRPTMSTVVVMLASDKMPLPKPNQPAFSVGRMTLEDASTSKSSKNLSINDVTVSNILPR

SEQ ID NO: 263950 - protein, 65 aa, Glycine max
  Clone ID: PAT_MRT3847_80366C.1.pep
NAGLFPSPSMKTTSCAVTEGGYVEEVQGRMHREQDLYPMILPPVSKWSSSNNSTGSPSFPIWTHD

SEQ ID NO: 263951 - protein, 94 aa, Glycine max
  Clone ID: PAT_MRT3847_80367C.1.pep
SADYIVCIPEKLYQSILKVMFLMVRCNMFASRFQSCIKVSTAVGNKRQASVNRVRFMVAAIPHEVVSSPNVHIPRMNKVMDGCNNTASGCDHVA

SEQ ID NO: 263952 - protein, 72 aa, Glycine max
  Clone ID: PAT_MRT3847_80368C.1.pep
WWKHMLLILNQARILTVVTKIVPFLFPVFHCRCNSCTGESLCLALSFVCLFCLARLRDQKFLHLICFSFGNC

SEQ ID NO: 263953 - protein, 65 aa, Glycine max
  Clone ID: PAT_MRT3847_80369C.1.pep
FSVYLSSDEHHVKNDHFLPLLISNTSILFQGWSQFVFHVKHLNYPSNSFLFFLMTNPIFHNITLL

SEQ ID NO: 263954 - protein, 125 aa, Glycine max
  Clone ID: PAT_MRT3847_8036C.1.pep
QIDNGVVIPPSGWKCAKCDKTDNLWLNLTDGMILCGRKMWGGTGGNNHAVEHYQETGFPVAVKLGTITADLEAADVYSYPDDESVLDPQLAQHLAFFGIDFSSLRKTEMTTAERELDQNTNFDWN

SEQ ID NO: 263955 - protein, 102 aa, Glycine max
  Clone ID: PAT_MRT3847_80370C.1.pep
FTLHLPEAGGYRDFNQLWIYKRGYSSFGRGNLKLTGCIVPCIHIYMSCWTLAFHPLLMRVGTIPWKHSQIIGPARCLPMPASKQLSPILLLTPLALRNFLYC

SEQ ID NO: 263956 - protein, 126 aa, Glycine max
  unsure (1)..(126): unsure at all Xaa locations
  Clone ID: PAT_MRT3847_80371C.1.pep
MSHSRKPVSSELGFTERFRDSLSCSDDNTNKPDFRELDLGSPVSTLRPRHYHSAPTTTSSTSTSTSSGSTGSGSGRSGXHNAVSKRSHSASCLGRARPIVRPRVSKPGHRRSQFGSEPEIXPSSSS

SEQ ID NO: 263957 - protein, 179 aa, Glycine max
  unsure (1)..(179): unsure at all Xaa locations
  Clone ID: PAT_MRT3847_80372C.1.pep
MADAKSNPNAQLLEELEALSESLYKQHTSTTTARRTTSLALPRTSAPPIEDAKHDDGNSNKTRRRMSMFPWRSRSKPDDDATAKAETKKLDDNTSTISSGESNRKGIWKWKPIRALAHIGMQKLSCLSADDVVIAHGLPFSMNGLILFDCVRKNEXNDGAAKTMPXRVALRAADLEETL

SEQ ID NO: 263958 - protein, 318 aa, Glycine max
  Clone ID: PAT_MRT3847_80373C.1.pep
VARRLEEKNSKSSSSTMANSVAFSDEIPNMSMSFPFSPAFSSSIFDMMPPPPPSSSHDPKAPNFANSFMDLLAVPADYYTPSLFDWSQNTAPTSAPPPSTTQINHPLPSPASSNVPDGSEVLNTPASPNSSSISSSSNEAAAATTANKTTGNDNEEEEDETAIDATAGREEEDHQDQDKTKKQLKPKKKNQKKQREPRFAFMTKSEVDHLDDGYRWRKYGQKAVKNSPHPRSYYRCTTATCGVKKRVERSSEDPTVVVTTYEGQHTHPCPATSRASFGFMHSEASGFGPTSGLGSAHFMLQQQQQFRDQAQAQAAMLY

SEQ ID NO: 263959 - protein, 97 aa, Glycine max
  unsure (1)..(97): unsure at all Xaa locations
  Clone ID: PAT_MRT3847_80374C.1.pep
KRRRENAKEXPATKGGRKKEXNRANKAARIGKGLDEWPNEYQRQDGTTDAHWIERDGGLMLLNAQLLLTKESFENCKMQGCCIAQDDANAAGLIADV

SEQ ID NO: 263960 - protein, 84 aa, Glycine max
  unsure (1)..(84): unsure at all Xaa locations
  Clone ID: PAT_MRT3847_80375C.1.pep
LTMEKRMTCLQLDEFHAECLLPSNLLLCLIKHXGIFYLRNKGVRSTVFLKDAYLFFFWREKGTKGQVYVFFMPLCGRGNIDLCD

SEQ ID NO: 263961 - protein, 60 aa, Glycine max
  Clone ID: PAT_MRT3847_80376C.1.pep
KHTNIHISNHISQNKASCHLPHHTFHTTNKHPSQLKNIKKQFHFFNDTNPFKNIIQSILS

SEQ ID NO: 263962 - protein, 112 aa, Glycine max
  unsure (1)..(112): unsure at all Xaa locations
  Clone ID: PAT_MRT3847_80377C.1.pep
GDDPDRLALNITSSGNXVNFDNRXLLTPQLVASVYSDHQSSIFGSNKVLLPRDFFVPKPPPPAPAPAKAKASSAKKSTEGPSSAADNDSAAISLNGIWLSLSVATIAAVFSL

SEQ ID NO: 263963 - protein, 83 aa, Glycine max
  unsure (1)..(83): unsure at all Xaa locations
  Clone ID: PAT_MRT3847_80378C.1.pep
ASPPPTPPPINLPSPLIYQLPPPNKIPLYVCQDRXVSLIALSNNPPPYPVMVILPXPIYYLPDPPPPPPPPPPPPPHPSTPPN

SEQ ID NO: 263964 - protein, 731 aa, Glycine max
  Clone ID: PAT_MRT3847_80379C.1.pep
LISGKRTSCGDEDPDYFGVSKGKIPFGEQSSRTLFVRNINSNVEDSELKALFEQYGDIRTIYTACKHRGFVMISYYDIRAAQNAMKALQNRSLRSRKLDIHYSIPKGNSPEKDIGHGTLMISNLDSSVLDDELKQIFGFYGEIREIYEYPQLNHVKFIEFYDVRAAEASLRALNGICFAGKHIKLEPGLPKIATCMMHQSHKGKDEPDVGHSLSDNISLRHKAGVSSGFIASGSSLENGYNQGFHSATQLPAFIDNSPFHVNSSIHKITRGASAGKVSGVFEASNAFDAMKFASISRFHPHSLPEYRESLATGSPYNFSSTINTASNIGTGSTESSESRHIQGMSSTGNLAEFNAGGNGNHPHHGLYHMWNGSNLHQQPSSNAMLWQKTPSFVNGACSPGLPQIPSFPRTPPHVLRASHIDHQVGSAPVVTASPWDRQHSFLGESPDASGFRLGSVGSPGFNGSWQLHPPASHNMFPHVGGNGTELTSNAGQGSPKQLSHVFPGKLPMTSMSKFDASNERMRNLYHRRNEANTNNVDKKQYELDLGRILRGEDSRTTLMIKNIPNKYTSKMLLAAIDEQCKGTYDFLYLPIDFKNKCNVGYAFINMIDPGQIIPFHQAFDGKKWEKFNSEKVAALAYARIQGKAALIAHFQNSSLMNEDKRCRPILFHTDGPNAGDPEPFPLGNNIRVRPGKIRINGNEENRSQGNPSSLASGEESGNAIESTSSSSKNSD

SEQ ID NO: 263965 - protein, 127 aa, Glycine max
  unsure (1)..(127): unsure at all Xaa locations
  Clone ID: PAT_MRT3847_8037C.1.pep
FTFSWQLDLPCDKISSVLTTTDERLVGTEHEGYDPFLGGIQKYATPMMPLDEEILFKVAQDMVEECVDCVDEEDFFEEVFLSASLNGVEGLDNMEXRISLATFEGFSYVHSRKNWLNMLKVYFFWEW

SEQ ID NO: 263966 - protein, 62 aa, Glycine max
  Clone ID: PAT_MRT3847_80380C.1.pep
YSGEESTEEFQVHGIDAEVLEEDYPRCTGMCVASLSMGIVTPALLPLTLISGVQTTSCLSHD

SEQ ID NO: 263967 - protein, 963 aa, Glycine max
  unsure (1)..(963): unsure at all Xaa locations
  Clone ID: PAT_MRT3847_80381C.1.pep
MPSEIMEKRGASASSRFLDDISYVSEKYTGLRKPKSIHDHFLHGKSEMAASPGIIFNTSSPLETNSKTGLSISQTTLSREITEDLHFGRETGNTDMLKDSTTESLNYHKRSWSNVYRQSASGSYGLIGSKIVTNAASRESSLFSSSLSDMFSQKLRLLGNGVLSGQPITVGSFPEEEPYKSLEEIEAETIGNLLPDEDDLFSGVTDELGFSTGTRMNDDFEDFDLFSSSGGMELEGDEHLISGKRTSCGDEDPNYFGVSKGKIPFGEKSSRTLFVRNINSNVEDSELKALFEQYGDIRTIYTACKHRGFVMISYYDLRAAQNAMKALQNRSLRSRKLDIHYSIPKGNAPEKDIGHGTLMISDLDSPVLDDELKQIFGFYGEIREIYEYPQLNHDKFIEFYDVRAAEATLRALNGICFAGKHIKLEPGLPKIATCMMQQSQKGKDEPDFGHRLSDNISLKXHKAGVSSGFIASGISLENGYNQGFHSETQLHAFIDNSLVHENSSIQKNTHGAPQGNVSGFFEACNAIDAMKFATISSFHPHSLPDYLESLANDRPENFSSTIIMSANIGTVSAESSANRHRQGMSSTGNLLXFNAAMNGNCPHPGLYHMWNGAKLHQQPPLDSMLCCNILFFVNSACCPGVSLILFFSRTPPHVLRASHIDHQVGSAPVVAASPWDRQHSFLGESPDASGFRLGSVGSPGFHGSWQLHPPASHNIFSHVGGNGTELTSNGGQGSPKQLSHVFPGRLPMTLVSKNLYSRRSEPNTNNNADKKQYVLDLGRILRGDDNRTTLMIKNIPNKYTSKMLLVAIDEQCRGTYDFLYLPIDFKNKCNVGYAFINMIDPGQIIPFHQAFHGKKWEKFNSEKVAVLAYARIQGKSALIAHFQNSSLMNEDKRCRPILFHTDGPNAGDPEPFPLGNNIRVRPGKIRMNGNEENGSQGNPSSLASGEESGNGTESTSSSSKSSD

SEQ ID NO: 263968 - protein, 86 aa, Glycine max
  unsure (1)..(86): unsure at all Xaa locations
  Clone ID: PAT_MRT3847_80382C.1.pep
KPLFFAQFPPNIKPMGSKGGRPKIGMNYPEIKTRPVPEREPTFPFLNRIGGRPNKGPXTPRLKNGTAPPSPPTFPPGSLILNPRGP

SEQ ID NO: 263969 - protein, 341 aa, Glycine max
  Clone ID: PAT_MRT3847_80383C.1.pep
MCEHLLVSLSCYIWVRTQRIVEFNEMEQIKHRIVEVNGIKMHVAEKGEGPVVLFLHGFPELWYSWRHQILSLSSLGYRAVAPDLRGYGDTEAPPSISSYNCFHIVGDLVALIDSLGVQQVFLVAHDWGAIIGWYLCMFRPDKVKAYVCLSVPFWPRNPKVKPVDAMRAIYGDDYYICRFQEPGKAEAEFANNSIEQVIKNILTSRRPGPPILRKEGAGSNSDPSRPLPTWLSQEDVTYYASKFTKTGLTGGLNYYRNLNLNWELTAPWTGVQVKVPVKFITGDLDAVYNSLGMKNYIESGAFKKDVPCLEEVVVQEGVAHFNNQEAAEDVTNHIYDFINKF

SEQ ID NO: 263970 - protein, 333 aa, Glycine max
  Clone ID: PAT_MRT3847_80384C.1.pep
TRPGYSSSFIALQREREMEGIEHRTVEVNGIKMHIAEKGEGPVVLFLHGFPELWYSWRHQILALSSLGYRAVAPDLRGYGDTEAPPSISSYTCFHIVADLVALIDSLGVEQVFLVAHDWGAIIGWYLCMFRPDKVKAYVCLSVPFMPRNPKVKPVDAMRAIYGDDYYICRFQEPGKAEAEFANNSIEQVIKNILTSRKPGPPILRKEGAGSNPDPSMPLPTWLSQEDVTYYASKFEKTGFTGGLNYYRNFNLNWELTAPWTGAQVKVPVKFITGDLDLVYTSLGTKNYIESGAFKKDVPNLEEVVVQEGVAHFNNQEAAEDVSNHIYDFIKKF

SEQ ID NO: 263971 - protein, 85 aa, Glycine max
  Clone ID: PAT_MRT3847_80385C.1.pep
LVWESFYLLTCEPRHSQKLSMRINNYQFECRKHCSHHSAIDMDALTILCIWSGTIRLISRPIQIREEKLSLSIGELPLDCANTIL

SEQ ID NO: 263972 - protein, 48 aa, Glycine max
  Clone ID: PAT_MRT3847_80386C.1.pep
DMAKPSSKGDLNNNQQKGQVQQQQQQGQWAAAAHRSGMSSNGWICSTR

SEQ ID NO: 263973 - protein, 59 aa, Glycine max
  Clone ID: PAT_MRT3847_80387C.1.pep
PVCSFSWPCLTLPNAHLVLLQRPTRTSTNIRITYRVVPPLADPLHLRNDGPLGVRHIFR

SEQ ID NO: 263974 - protein, 434 aa, Glycine max
  unsure (1)..(434): unsure at all Xaa locations
  Clone ID: PAT_MRT3847_80388C.1.pep
MPKNKCPREAVTEWTRGSGATICFHFSTTLVRCHVLLLLVFVHSSSANLTNMGSKNQCQLSDKKGYVSSLGCFFGLLDANFFEDKQIGEIAEGENEFNIPIIRANRKLVASENGELHYPSPLVFNADWNSQPTHFEXKSFNYPSISGIQRPESEEDIAFMSVLEFAELINNKQITSLELTQIFLRRLKKYNPTLEAVVTYTEELAHEQAKEADKLLGXGTYLGPLHGIPYGLKDIISVPKYKTTWGSKSFKNQVIDVEAWVYKRLKSAGAVLVAKLVSGSLAYDDIWFGGRTRNPWNIEEFSTGSSAGPAASTSAGMVPFAFGTETAGSITFPAARCGVTALRPTFGTIGRSGVMSISQXLDLDDPSSKHSSLDDPFLVDITKLTVGYLDDAEMEVVHVLDSQSDKMVPFKLNYTVDCVQGILNVTMNVDMLAH

SEQ ID NO: 263975 - protein, 56 aa, Glycine max
  unsure (1)..(56): unsure at all Xaa locations
  Clone ID: PAT_MRT3847_80389C.1.pep
LRXRXSLGVHCKXLECLXXVXRXXXYSXPKHSGIVLFFRTXKENFELALEXDNXNT

SEQ ID NO: 263976 - protein, 164 aa, Glycine max
  unsure (1)..(164): unsure at all Xaa locations
  Clone ID: PAT_MRT3847_8038C.1.pep
LDMHEAYLVYLVYVWRELHXHSPQEARQSRRKALSRIEWLHKADVPTIAQMEQFHSMRTMMNAPESNDNIDLLLSIDLLGLQGASKAFSNKIDFDDKLVLANTQEFSDGNFPVDSWLPIIVNCLYPVSQLPSEAVSXKDTCGRGRCGLPTTARISSTVNNQSSN

SEQ ID NO: 263977 - protein, 73 aa, Glycine max
  Clone ID: PAT_MRT3847_80390C.1.pep
GEKNNPFPCDFFIIPKRNPGKIILSLIPGELNYYLPTWGRVWTFSTSSWERFTWPPPIFFGIADANYPPFQTP

SEQ ID NO: 263978 - protein, 90 aa, Glycine max
  unsure (1)..(90): unsure at all Xaa locations
  Clone ID: PAT_MRT3847_80391C.1.pep
KKSPGGAFGPLGAFKGPXPFPEFKVKDLXNGRPALLAFGGFCVPPSAFPGPGPLGNLGAPLGGPWPPPLGTLLFPPSVFPLKKKIQFLFP

SEQ ID NO: 263979 - protein, 94 aa, Glycine max
  Clone ID: PAT_MRT3847_80392C.1.pep
GRKTGYFQAPTKQNPNSKNTGLQCPHPTGDLPLSGYGGFIYNNGHFFGIKIYGGDSILLWHHGGFITKDGPQIGHNGWWQSFTFSPKFYCGKNP

SEQ ID NO: 263980 - protein, 101 aa, Glycine max
  unsure (1)..(101): unsure at all Xaa locations
  Clone ID: PAT_MRT3847_80393C.1.pep
ALFPHCKFNNFMIGAVVSKFGDKSVYLDLXDLGNTTKKXNLCGLYAPSPYNHIKSLFFETLAAPFTKRGLLLKFLIFERVSPLHTSXNCLRDILPIKKGPQ

SEQ ID NO: 263981 - protein, 50 aa, Glycine max
  Clone ID: PAT_MRT3847_80394C.1.pep
QTPLPPPNPLSRSHSHSPMDDASSSPPPPPPPPDPPFAENLSLVYPLTPT

SEQ ID NO: 263982 - protein, 47 aa, Glycine max
  Clone ID: PAT_MRT3847_80395C.1.pep
MSSFMLRPPVLMTTSVSSSLCYNPCLPVEQSFRLGSPRPLRVVVCRT

SEQ ID NO: 263983 - protein, 68 aa, Glycine max
  Clone ID: PAT_MRT3847_80396C.1.pep
NFRRRRMKTKKQDTAKLITAEDFEFVIDKESATVSHNIHNNFTSPGFYFPIRVLGLALLRHIMMEDDS

SEQ ID NO: 263984 - protein, 70 aa, Glycine max
  Clone ID: PAT_MRT3847_80397C.1.pep
GLVALCFYSALDILYVNGSGMPKTAYVRCMHTFGFRAKDIVDLFSALFLRRRLDVQAEVQRLAALPAYRT

SEQ ID NO: 263985 - protein, 48 aa, Glycine max
  unsure (1)..(48): unsure at all Xaa locations
  Clone ID: PAT_MRT3847_80398C.1.pep
RGFDLCFQLGAPILLWGHPWGARCPSSQSGDVVASEPXCTXPRFSLWG

SEQ ID NO: 263986 - protein, 59 aa, Glycine max
  Clone ID: PAT_MRT3847_80399C.1.pep
AIRLKLHFVVRTQNPSSRLESQTFTLMPQHGHRQHTEEENVQEVQLHARGSRRASGHVH

SEQ ID NO: 263987 - protein, 143 aa, Glycine max
  unsure (1)..(143): unsure at all Xaa locations
  Clone ID: PAT_MRT3847_8039C.1.pep
LTCPAALNGVVGLDYMERIPLATSEGFPHVLSRINGEKGKRRFAFGDGEEMTLIPGTCVEEAYNKLIVELVKSCPTLFGIECPKDEKLSCRKIXFDKPKTRCLTILPMELNLVVRQKFXKFVRLFIKKRDMLSCQSGXNPYSM

SEQ ID NO: 263988 - protein, 132 aa, Glycine max
  Clone ID: PAT_MRT3847_803C.1.pep
MRKKCPSEIETGILRCSDSVNRQISQGSSLFKGNDSTHKISQGSLFKENDSTHKIRSKRSNDENNFVMPSSLLHDRRVARKSDPPKIVRGVRPTPRPVTANPAPVSHKRGSTSRDQVQGIKERDTKKKIWSR

SEQ ID NO: 263989 - protein, 60 aa, Glycine max
  Clone ID: PAT_MRT3847_80401C.1.pep
TKYVPNHLNRKTIHLSRKLSYQFSPNFTRKSSPSNKRVKEKTLAENLTGCKFEVSIFNTQ

SEQ ID NO: 263990 - protein, 72 aa, Glycine max
  Clone ID: PAT_MRT3847_80402C.1.pep
ATFLIFIIKAYTFKTHSKIENGRKGERRLGVKRRSKMDCICRNNMWLILYGAHVIEEEKTEHGNESNRFKRG

SEQ ID NO: 263991 - protein, 396 aa, Glycine max
  Clone ID: PAT_MRT3847_80403C.1.pep
MASSLFLCSNYVFPTSQNPFRSNHLAQFRPNGPSNFHSKLRFQRPHLVRAMVSDSNTSRRQIEIVYDPEGRINKLADEVDRETPLSRLTLFSPCKINVFLRITNKREDGYHDLASLFHVISLGDIIKFSLSPSKTKDSLSTNVSGVPLDDRNLIIKALNLYRKKTGSDKYFWIHLDKRVPTGAGLGGGSSNAATTLWAANQFSGCPASEKELQEWSSEIGSDIPFFFSQGAAYCTGRGEVVQNIPPPVSLDVPMVLIKPPEACSTAEVYKRLCLDQTSNVEPLTLLEKISKIGISQDVCINDLEPPAFEVLPSLKRLKQRISAAGRGEYDAVFMSGSGSTIVGFGSPDPPQFVYDDDEYKDVFLSDAYFLTREENQWYQEPASSPSASPSVVSESV

SEQ ID NO: 263992 - protein, 83 aa, Glycine max
  Clone ID: PAT_MRT3847_80404C.1.pep
RAEKLGLNRDIWSNFKADYGRFSSSLKGMFAAGGCRRGQALVAWSHSEGLHAAAQVDSFLTNEDSEHNGAGSPDELIKKKQLL

SEQ ID NO: 263993 - protein, 97 aa, Glycine max
  Clone ID: PAT_MRT3847_80405C.1.pep
YGCEKTTEGYGCEKTTEGYGCEKTTEGGEYDAVFMSGSGSTIVGIGSPDPPQFVYDDDEYKDVFLSDAHFLTREANQWYQEPTSSPSASPSVVSESV

SEQ ID NO: 263994 - protein, 94 aa, Glycine max
  Clone ID: PAT_MRT3847_80406C.1.pep
IAVTWQISSIGMLGLIFEVSSLFSNVIGTLALPIVPILAIVFFHDKINGVKFVALLLAVWGFLSYVYQHYLDDKKAKAEKSDGLGVSNSEVEIC

SEQ ID NO: 263995 - protein, 181 aa, Glycine max
  Clone ID: PAT_MRT3847_80407C.1.pep
MNPKVLVTASLLDKRVPTGAGLGGGSSNAATTLWAANQFSGCPASEKELQEWSSEIGSDIPFFFSQGAAYCTGRGEVVQNIPPPVSLDVPMVLIKPPEACSTAEVYKTSNVEPLTLLEKISKIGISHDVCINDLEPSAFEVLPSLKRLKQRISAAGRGEYDAVLCQERKHHCGVGLLTSTF

SEQ ID NO: 263996 - protein, 120 aa, Glycine max
  unsure (1)..(120): unsure at all Xaa locations
  Clone ID: PAT_MRT3847_80408C.1.pep
LVYQDLLTGDELLSDSFRYNETENGMLREVEGKWVVXGAVDVYIVANPSADGGXEDDGVDDAAVNDADICDTFRLYEQLAYFNIYFVTFMKILIKNLTSLFDADHHVLFKMLFERSTHNL

SEQ ID NO: 263997 - protein, 50 aa, Glycine max
  Clone ID: PAT_MRT3847_80409C.1.pep
APVGQQGLEAIIVNTEAAVRVTHKSGSPKINSKEFSHYARSGEDDDSLSL

SEQ ID NO: 263998 - protein, 135 aa, Glycine max
  Clone ID: PAT_MRT3847_8040C.1.pep
MSRNSDEPAMTEEAPTKQSLANIFSLFRKINFQLPFLPPKPEEPKLEAQAQQEGPKPGRVQFPKSQVALIASSPLQAEPDADHSPAAKTTNPLILWQIYAIGAIAISSWVWARWNERKGRGGSPSDERGEGRHSD

SEQ ID NO: 263999 - protein, 642 aa, Glycine max
  Clone ID: PAT_MRT3847_80410C.1.pep
EPLVPVFSYSYQIMRSLQRNMCDNETGHVLYETMFVWNEFLTRGIRNHLQNTIWTVALVYGFFKQEMLMISRREFTLTLIARRSRHYAGTRYLRRGVNEKGRVANDVETEQIVFEDVAEGLPIQISSIIQNRGSIPLFWSQETSKLNIKPDIILSKKDQSYQATRYHFENLVKRYGNPIIILNLIKTHEKKPRESILRQEFANAIDFINKDLSDENRLRFLHWDLHKHFQSKATNVLQLLGKVAAYALTLTGFFYCQTTPTLRPEECLKWPSTKVDNRDADENYSVKPPMLQRGVLRTNCIDCLDRTNVAQYAYGLAALGHQLHALGVIDHPKIDLDEPVADDLMGFYERMGDTLAHQYGGSAAHNKIFSERRGQWRAATQSQEFFRTLQRYYSNAYMDAMKQDAINVFLGHFQPQQGKPALWELGSDQLYDAGRHGDDDARSFFKRSFSDGNILNESSTPMSAPKAKHEKFPSQGGLPDRSEEGSKGLCESSPEISTTDSDISFSRYTPSMPRRQLFGDMQRERCLESEHIYYSDHGDSFSCSNFVDLDWLSSSGNSCEEEPFERSSITNSPIAGVSSENVINGMMVGEATASTSDWGASSLKGREQTESELSYDDARSNTPEEFPDTFVNWVTYGQTLCH

SEQ ID NO: 264000 - protein, 73 aa, Glycine max
  Clone ID: PAT_MRT3847_80411C.1.pep
CCFFRVLYTNWNEACLLLGMKHASFRFVIFKNKIPPCFNFPICIDVLAKCFPSLFGTGFFLSLKLFSGPYFPH

SEQ ID NO: 264001 - protein, 119 aa, Glycine max
  Clone ID: PAT_MRT3847_80412C.1.pep
MASEESQNKPPSEQSTTELITSAKLVAEAAQSALKSDSDKVDKAKVADAAGDLLDAAGKYGKLDDKQGIGQYVDKAADYLHNYQGDNTTAPSQPAESKGEESGGGLGGLANLAGGFFKK

SEQ ID NO: 264002 - protein, 110 aa, Glycine max
  unsure (1)..(110): unsure at all Xaa locations
  Clone ID: PAT_MRT3847_80413C.1.pep
WDNRRAPWSDWKWLCPCLQEPHLLLGVRLHELMIKIDRRTGLELEKEPKYWKNGDAAYVNMIATKPMVVETFYNYHALARXAVKHMRKTDGEGDIPNVETKDPTGAKVTN

SEQ ID NO: 264003 - protein, 357 aa, Glycine max
  unsure (1)..(357): unsure at all Xaa locations
  Clone ID: PAT_MRT3847_80414C.1.pep
VRKPSEGNNDDNENQSVKPPMLQXGVLRINCIDCLDPTNVAQYAYGXASLGHQLHALGSXDHPKIDLDDPVADDLMGFYERMGDTLAHQYGGSAAHNKIFSERSGQWRAATQSQEFFRTLQRYYSNAYMDAMKQDAINVFLGHFQPQQGKPALWELGSDQLYDAGRHGDDDARSFFKRSFSDGNILNESSTPMSAPKAKHEKFPSQGGLPDRSEEGSKGLCESSPEISTTESDISFSRYTPSMPRRQLFGDMQRERCLESEHIYYSDHGDSFSCSNFVDLDWLSSSGNSCEEEPFERSSITNSPIAGVSSENVLNGIMVGRAQNETELSHGDARSNTPEQFPDTFVNWVTYGQTLCH

SEQ ID NO: 264004 - protein, 56 aa, Glycine max
  Clone ID: PAT_MRT3847_80415C.1.pep
MHQSLGIVCVFGGEFRCLEWSRPSVQAQIRIVRVGYSHMVFRAVRAAIARQQCSSS

SEQ ID NO: 264005 - protein, 54 aa, Glycine max
  Clone ID: PAT_MRT3847_80416C.1.pep
KKNASPSLWEWGWEKQPTGFRRGGVPAFLGVNPSQVKTGVFALQTYECKFLIWF

SEQ ID NO: 264006 - protein, 141 aa, Glycine max
  unsure (1)..(141): unsure at all Xaa locations
  Clone ID: PAT_MRT3847_80417C.1.pep
VRVRTGRATPLVPKRTVYGKLPNXGVTPXQFXRSKRLVVQESAARKLGGXRVFNSYWVNEDSTYKXFEVILVDVGYAAIRNDFRINWVVNSVYKYRELGGVTFVGKSNRGLCGRGNLYYKAGPFCRAMWKRNNTLFFRRYR

SEQ ID NO: 264007 - protein, 192 aa, Glycine max
  unsure (1)..(192): unsure at all Xaa locations
  Clone ID: PAT_MRT3847_80418C.1.pep
MMPLTPDQSNKKVGSGMAASPSPFLTPRPERRRPDSRGSDWGSNRQDKDKETNVQVLLRCRPLSDDELRSNVPKVVTCNENKREVSVMQTLANKQVDRVFTFDKVFGPKSQQRSIYEQAIAPIVNEVLDGFNCTVFAYGQTGTGKTYTMEGGMRNKGGDLPAEAGVIPRAVRQIFDILEAXNADYSIXVTFL

SEQ ID NO: 264008 - protein, 60 aa, Glycine max
  Clone ID: PAT_MRT3847_80419C.1.pep
MSLLSDLLNLNLSDTTENVIAEYMWIGGSRMDLMSKAGTHRGAVSESSELPKWNYDGYQS

SEQ ID NO: 264009 - protein, 136 aa, Glycine max
  unsure (1)..(136): unsure at all Xaa locations
  Clone ID: PAT_MRT3847_8041C.1.pep
SAHAFGFFCHFHDFLLDEEILSKAAQDMVEEWFDCVDEEDSFEEVSLSATLNGVEGLDYMERIPLATSEGFPHVLSRKNGEKGTRRFVSGDGEDMTFVPGTTAEEAYNKLIGEPEKHVXLHLAGIECSKDDKLPRC

SEQ ID NO: 264010 - protein, 59 aa, Glycine max
  Clone ID: PAT_MRT3847_80420C.1.pep
SPPFLSGFYFVKEIWPWLVNQPKSSPGFLLPFSRLGEPREILPLYLLVWESPPFLPPFF

SEQ ID NO: 264011 - protein, 190 aa, Glycine max
  Clone ID: PAT_MRT3847_80421C.1.pep
DYFRHLREIGGQDADREDEGDRNGARIARRPPGQVNRNINNGEGNGEDAGGVQGIAGAGQVIRRNAENVAARWEMQAARLEAHVEQMFDGLDDADGAEDVPFDELVGMQGPVFHLVENAFTVLASNMIFLGVVIFVPFSLGRIILHYLSWVFSTASGPLLSAVAPLADTSFFLAIITLKNALTAGKNMSS

SEQ ID NO: 264012 - protein, 55 aa, Glycine max
  Clone ID: PAT_MRT3847_80422C.1.pep
HASAHASAETQEVAEVKPTEGSVNRDAVLARVATEKRLSLIKAWEESEKSKAENK

SEQ ID NO: 264013 - protein, 39 aa, Glycine max
  Clone ID: PAT_MRT3847_80423C.1.pep
QRQPTKGAYELLCYQLSREGSLKSSGNLNSQVNSTRTHP

SEQ ID NO: 264014 - protein, 67 aa, Glycine max
  Clone ID: PAT_MRT3847_80424C.1.pep
YTTFLRFTNSASIFMLRTFPKKVKNERNKESYFKEKTREEKKKYGANFMQFPQKKVGKFFHQKKVVL

SEQ ID NO: 264015 - protein, 69 aa, Glycine max
  Clone ID: PAT_MRT3847_80425C.1.pep
MSGHSATSMLGPSKALEVYMLPKEGTGLPFGVNTYLPGWIQLCVKELVLAFPFVDASSLQEEQESGLSL

SEQ ID NO: 264016 - protein, 72 aa, Glycine max
  Clone ID: PAT_MRT3847_80426C.1.pep
MELEPLVTVLWKKGPLPHLKSSKKFQRKNPRNPRKRWQIRMFKSHIMVPKKRVLRFNLSRTNTKSINCPISM

SEQ ID NO: 264017 - protein, 70 aa, Glycine max
  Clone ID: PAT_MRT3847_80427C.1.pep
EKSKASILCLVSSYLCAIANSKTIPKIYILNFKGLKRLKFNTQGLTYLIRYKIGLIVRVRDLRIKSKERE

SEQ ID NO: 264018 - protein, 36 aa, Glycine max
  Clone ID: PAT_MRT3847_80428C.1.pep
ALTRSPTRPEIAGNTLMPAFSVPQATARSSENAECS

SEQ ID NO: 264019 - protein, 61 aa, Glycine max
  unsure (1)..(61): unsure at all Xaa locations
  Clone ID: PAT_MRT3847_80429C.1.pep
CXPPRCVSXXQXXGXQIRIRFYSLKKSYDXXSRSCSFLNLXFLLMTKQMCSPLLXVSSFLN

SEQ ID NO: 264020 - protein, 89 aa, Glycine max
  Clone ID: PAT_MRT3847_8042C.1.pep
KLSIMFQSCPPTSLYKNLLKICHVMWFVHDNCCVFQDRNLGRTIEHAGEWNDLYCLRSKSSHSFIYEFMTTNKENILLYHYRLGHNVKD

SEQ ID NO: 264021 - protein, 55 aa, Glycine max
  Clone ID: PAT_MRT3847_80430C.1.pep
RCVTHRVCELHVSGPYVGPHGQCGSLWRCFENNFYYNLSSRYHITVFYHNVMCQE

SEQ ID NO: 264022 - protein, 101 aa, Glycine max
  Clone ID: PAT_MRT3847_80431C.1.pep
ACMLMQILIHSIRSFMKRDWSFSLCHVNTKVNSVVDFLAEWGARMTKSTLSWPLPQMKCSKSFIGTPWLLCSPLFSLFFISCISHQKKKLVQFHEPHGFKI

SEQ ID NO: 264023 - protein, 146 aa, Glycine max
  Clone ID: PAT_MRT3847_80432C.1.pep
LGPRLFPTRLRCWPQVRLSSRIRYVWCGGGPRHPLGCRAGYCPPGCLPGGAVSLCLVVYLVPLSLSFPFVCAPWGASLSRGRPVPPAAAWPGPSSGLPPVVASLAPRSSLRAFPSSFPLEGMDKAQCMSLIPHQERLLFRLFTSSY

SEQ ID NO: 264024 - protein, 42 aa, Glycine max
  Clone ID: PAT_MRT3847_80433C.1.pep
PLREDYRRGFYERFMGRKRQESRMICFCEDICIRAITILESP

SEQ ID NO: 264025 - protein, 36 aa, Glycine max
  Clone ID: PAT_MRT3847_80434C.1.pep
MPLIHNALFLPIGKGNNPQSQGIFTAISFVTTNQTK

SEQ ID NO: 264026 - protein, 100 aa, Glycine max
  unsure (1)..(100): unsure at all Xaa locations
  Clone ID: PAT_MRT3847_80435C.1.pep
ITALGSITSTPQATAVHVVAIEPIKGGNIGNXCIIIGALLLGDPYHTNPENAVRFIYAAPFKGPMPIGEGTFTDPIEPIXPDMKSRFELLSTTTKGDSVL

SEQ ID NO: 264027 - protein, 96 aa, Glycine max
  unsure (1)..(96): unsure at all Xaa locations
  Clone ID: PAT_MRT3847_80436C.1.pep
MGKEEEEMRGEIEERLINEEYKIWKKNSPFLYDLVITHALEWPSLTVEWLPDRHEPPGKDYSLQKXILGTHTSENEPNYLMLAQVQLPLDDAENDA

SEQ ID NO: 264028 - protein, 57 aa, Glycine max
  unsure (1)..(57): unsure at all Xaa locations
  Clone ID: PAT_MRT3847_80437C.1.pep
KRAPRSKVSFAHGALCSMKRETRPRVLILSLGRSIYGCRVFSXXAWAKTAWDRPERI

SEQ ID NO: 264029 - protein, 90 aa, Glycine max
  Clone ID: PAT_MRT3847_80438C.1.pep
YLGDHASACFHFQFTLGLNSQYPHSPFPRLCFLVPTVTCESPLPGLANGKFNGVVFANRLLLSHFSCHSHTSSFLRFSFLTLFCFHFHLS

SEQ ID NO: 264030 - protein, 110 aa, Glycine max
  unsure (1)..(110): unsure at all Xaa locations
  Clone ID: PAT_MRT3847_80439C.1.pep
MSSMKVAKGRILVGKYELGKTIGEGSFAKVKFARNVQNGNYVAIKILDRKHVLRLNMMEQLMKEISTMKLINHPNVVRILEDXVLASKTKIYIVLEFVDGGELFDKIAAN

SEQ ID NO: 264031 - protein, 81 aa, Glycine max
  Clone ID: PAT_MRT3847_8043C.1.pep
SILVVSVYAVPSLVHYPLLAFYLSPQAHTGTLLVCSAYCSWVNYVHTLQLSDRFNFGHSMGRHTAAAPVKHSPLHPRCPIV

SEQ ID NO: 264032 - protein, 425 aa, Glycine max
  Clone ID: PAT_MRT3847_80440C.1.pep
MGKEEEEMRGEIEERLINEEYKIWKKNSPFLYDLVITHALEWPSLTVEWLPDRHEPPGKDYSLQKVILGTHTSENEPNYLMLAQVQLPLDDAENDARHYDDDRPDIGGFGCANGKVQIIQQINHEGEVNRARYMPQNPFIIATKTVSAEVYVFDYSKHPSKPPLDGACNPDLKLTGHNTEAYGLSWSKYLLSGFVDASDDAQICLGDINGTPKNKSLEAMQIFKVHEGVVEDVAWHLRHEYLFGSVGDDQYLLIWDLRTPAASKPVQSVVAHQSEVNCLAFNPFNEWVVATGSTDKTVKLFDLRKINTPLHIFDSHKEEVFQVGWNPKNETILASCCLGRRLMVWDLSRIDEEQSPEDAEDGPPELLFIHGGHTSKISDFSWNPCEDWVVASVAEDNILQIWQMAENIYHDEDDLPEESTKAAAS

SEQ ID NO: 264033 - protein, 138 aa, Glycine max
  unsure (1)..(138): unsure at all Xaa locations
  Clone ID: PAT_MRT3847_80441C.1.pep
LCPDCNIVXGAMLLVDPYHTNPEIAVGSVVVAPFIGGRPIMVVTFPNAMEQIEPNVNSGFKLSSTTTNGDLVQGIDLAMVKVNVTCAAVDWTSGYTTASLLESGLQKDSGLIVEDYGRMXYTADNVNYPQEKDLLEGN

SEQ ID NO: 264034 - protein, 86 aa, Glycine max
  Clone ID: PAT_MRT3847_80442C.1.pep
LEMFLNATTLHSSYTIYPSFLSMDTGVDASAPLCRKPNGSQSDHHSSNHMTLCRPCFCDRDTCTPICPNRDALLHTCSRSLDTTCA

SEQ ID NO: 264035 - protein, 389 aa, Glycine max
  Clone ID: PAT_MRT3847_80443C.1.pep
MDPQNQHPPNPRSIIFNKYEMGRVLGQGNFAKVYHARNLNTNESVAIKVIKKEKLKKERLVKQIKREVSVMRLVRHPHIVELKEVMATKGKIFLVMEYVNEDLKVSDFGLSTLPEQRRADGMLVTPCGTPAYVAPEVLKKKGYDGSKADLWSCGVILFALLCGYLPFQGENVMRIYRKAFRAEYEFPEWISPQAKNLISNLLVADPGKRYSIPDIMRDPWFQVGFMRPIAFSIKESYVEDNIDFDDVENNQEEEVTMRKPARPFYNAFEIISSLSHGFDLRSLFETRKRSPSMFICKFSASAVLAKVEAVAKKLNFRVTGKKEFVVRMQGTEEGRKGKLAMTVEVFEVAPEVAVAEFTKSAGDTLEYVKFCEEQVRPSLKDIVWSWQGD

SEQ ID NO: 264036 - protein, 64 aa, Glycine max
  Clone ID: PAT_MRT3847_80444C.1.pep
NQDICCLVFNFYCLTLLLLLQVFCCYILTDCLFIYNSLIKHKNNKINTLVKLYILFVLFLIEYL

SEQ ID NO: 264037 - protein, 153 aa, Glycine max
  Clone ID: PAT_MRT3847_80445C.1.pep
MRPIAFSIKESNVVEDNEGKPARPFYNAFEIISSLSHGFDLRSLFETRKRSPSMFISKFSASTVLAKVEAVAKKLNFRVTGKKEFVVRMQGAEEGRKGKLAMTVEVFEVAPEVAVVEFSKSAGDTLEYVRFCDEQVRPSLKDIVWSWQGDTNS

SEQ ID NO: 264038 - protein, 48 aa, Glycine max
  Clone ID: PAT_MRT3847_80446C.1.pep
QLLIQSPFLHYHLTSNTKTFNYLKYINYPYTCRQKNHIPPIYFYSKPP

SEQ ID NO: 264039 - protein, 178 aa, Glycine max
  Clone ID: PAT_MRT3847_80447C.1.pep
MDPENQLTSNPRSIILNKYEMGRVLGQGNFAKVYHGRNLNTNESVAIKVIKKEKLKKERLVKQIKREVSVMKLVRHPHIVELKEVMATKGKIFLVMEYVNGGELFAKVNNGKLTEDLARKYFQQLISAVDFCHSRGVTHRDLKPENLLLDQNEDLKVSDFGLSALPEQRRADGMLLTP

SEQ ID NO: 264040 - protein, 67 aa, Glycine max
  unsure (1)..(67): unsure at all Xaa locations
  Clone ID: PAT_MRT3847_80448C.1.pep
GFFPQNSSRVSVHAGPSVXCIPAQAVEWYWLWSISLDPSGRPVLEVHASAYVNQVQAVEADQVIPKL

SEQ ID NO: 264041 - protein, 136 aa, Glycine max
  Clone ID: PAT_MRT3847_80449C.1.pep
VISNRSQVRITIPSSQGSPFDHKCSIFICVGHACVTSTSRFRFGQGTEGSATGELNAQLDEVRNPNILPENCDLKPDTLVRPHPSGVQKNSRGNVRVMNLESPVKTEVEEAYEGEDEHEESPSIKRELSDFELQSS

SEQ ID NO: 264042 - protein, 66 aa, Glycine max
  unsure (1)..(66): unsure at all Xaa locations
  Clone ID: PAT_MRT3847_8044C.1.pep
NEHGTSMLAKPNLIHPHCLHLLLNSIYTAELKYYTCFHPHCLHLYASXITGTPLANMYRFMNYSYL

SEQ ID NO: 264043 - protein, 52 aa, Glycine max
  Clone ID: PAT_MRT3847_80450C.1.pep
VTFPAPSGAVGSILHLSYNKRSGAVGGPYLMVILLPRVPWVMASDYQSRSRL

SEQ ID NO: 264044 - protein, 80 aa, Glycine max
  Clone ID: PAT_MRT3847_80451C.1.pep
DSHITPQHITTQKHLLPLSLFAQTHSTITSSNLIYTSQYNFSSVSFIIIFIVIIIEEDLRSVYSTLFQETLPLSIDMFKC

SEQ ID NO: 264045 - protein, 109 aa, Glycine max
  unsure (1)..(109): unsure at all Xaa locations
  Clone ID: PAT_MRT3847_80452C.1.pep
KLWLCTGNGSALARQHPRDVSLVLMHGHAVLLQGRVIRSLWRKLIHVVAPRSGIRRGMLLFYMYMSTRAPSKDDYCTAKRTEMENSKQRSSILVHASADAWVDPGNXGP

SEQ ID NO: 264046 - protein, 50 aa, Glycine max
  Clone ID: PAT_MRT3847_80453C.1.pep
HASADAWVFFEITWNSVMGVNVLAYIRATIARAYRIKCVRNHRYTYEHWL

SEQ ID NO: 264047 - protein, 86 aa, Glycine max
  Clone ID: PAT_MRT3847_80454C.1.pep
QKFLSPGLKDKINLTSHWFFTRKQKFFVKAHDFLGGKEILIWELLETPWLKGLHNRINYLTLGSMATSFRVLKWELFLKNPLIVIF

SEQ ID NO: 264048 - protein, 51 aa, Glycine max
  Clone ID: PAT_MRT3847_80455C.1.pep
HVGVLFQIQKHNFNKKIMFKNIHLPLFNLIKKVCLITYKNHLLSQRIHNDV

SEQ ID NO: 264049 - protein, 43 aa, Glycine max
  unsure (1)..(43): unsure at all Xaa locations
  Clone ID: PAT_MRT3847_80456C.1.pep
IASFHALDCDSGRYLHFNVXAERWYDQGDMDGGRSKGSYPEKC

SEQ ID NO: 264050 - protein, 50 aa, Glycine max
  Clone ID: PAT_MRT3847_80457C.1.pep
WVYILGKQKAHNFIACVTVVNFDDTSPTCLYSCSSPTMLESQFEINKFIK

SEQ ID NO: 264051 - protein, 45 aa, Glycine max
  unsure (1)..(45): unsure at all Xaa locations
  Clone ID: PAT_MRT3847_80458C.1.pep
MPSSHQDETAVKKKYXCMLPKKPTLISNDHXRSYLDSADCTLSNQ

SEQ ID NO: 264052 - protein, 370 aa, Glycine max
  unsure (1)..(370): unsure at all Xaa locations
  Clone ID: PAT_MRT3847_80459C.1.pep
MGLWELLPHLYRIRVKLNETVKAAALFEPHVVLTIDSKGFSFRFLKQLTTXIRQKKLHSPAHFHYVAPSFWAWKGGETRLRGLAEFVDHLLCILPNEDKICRLNGLCATFVGHPVLEDVLELNLRNNSSIHEWKAEGNGEDFRIKHAVPAGATIISLLPGSRMQEVSRMPTRPRTRGELMKDMVPQLMTIIHVAPNEHVENFIADAVHRWPVPVVLIPGGTTQLRYDAFSASRAALCTSGTVAVELQLARLPCVVAYRAHILTEWYIWYKAKIQYISLTNILLDKAIIPEALFQSCKPLNLALLLKDLLHDDGCREEQIIAAQKILKLLWPSERIKLNLLQQNLKTCADYTPSAVAALTILNHGKPMTSI

SEQ ID NO: 264053 - protein, 37 aa, Glycine max
  Clone ID: PAT_MRT3847_8045C.1.pep
SNIFLTKDNNVRLGDLRLAKLLNALDLAFSHGVTQNY

SEQ ID NO: 264054 - protein, 60 aa, Glycine max
  Clone ID: PAT_MRT3847_80460C.1.pep
VGGVTLSNSEQLQREQRILSSLFSPHIVTYKGCNITEDNNTLWFNLFMEYMPFGTLSQES

SEQ ID NO: 264055 - protein, 95 aa, Glycine max
  Clone ID: PAT_MRT3847_80461C.1.pep
MEGENTCEIHPVTDEEKFDVVVANILLNPLLDLADQIISHAKPGAVVGLSGILSEQVQYIIERYSPFLEGIEVSKMDDWACVSGRKKKFECEVTH

SEQ ID NO: 264056 - protein, 39 aa, Glycine max
  Clone ID: PAT_MRT3847_80462C.1.pep
LLIFIHEYGNATRGGFLLGLQAHPLISPICPKHHYMTPL

SEQ ID NO: 264057 - protein, 131 aa, Glycine max
  Clone ID: PAT_MRT3847_80463C.1.pep
THCPYMQSCLTEKYNPTIRAITPAALNWVKTMIELHPAVATSARIVVATAVTAYQGGGCRVRTGTRSEGAQWRERHSACAQRLELWVGAQQPAQIRQTGHAYQTGPYKCRWHRHVERRTLRRDTGEERDTP

SEQ ID NO: 264058 - protein, 94 aa, Glycine max
  unsure (1)..(94): unsure at all Xaa locations
  Clone ID: PAT_MRT3847_80464C.1.pep
FAGVLXCVEEGGDGLVNVAYRLPLCTSWGVAGFRGGRGSKFSVRQFDVSLLVPVRSGCFLCVFFSVSEVTSSSVWFLVEELSVVSGGSFCAYYG

SEQ ID NO: 264059 - protein, 79 aa, Glycine max
  Clone ID: PAT_MRT3847_80465C.1.pep
RWHRRHETVFPALFDQPRRSLKGVIEFGIFIRQVRPYTGLAFLSFVFHFHPPIALKPPAGFVRHARKEKESVSLFFARA

SEQ ID NO: 264060 - protein, 119 aa, Glycine max
  unsure (1)..(119): unsure at all Xaa locations
  Clone ID: PAT_MRT3847_80466C.1.pep
RETPDDKASYWSQLNCGLSDNPGRQDAXVENIINVSRDMHLHRPKEARQLKWKATFRIEWLTKAEVPTIAQIEYDHAKHRMMNCCRLNEKLDLLYVIDMLAXQGASKAPPYKYVIDDRP

SEQ ID NO: 264061 - protein, 74 aa, Glycine max
  Clone ID: PAT_MRT3847_80467C.1.pep
LQTHGLRPTSLSAVTPVLTWSWNGTSAQDRHSLERTLVTGVLNKKSEPTIAWKRQYEESDNYQPSDANISSEYC

SEQ ID NO: 264062 - protein, 98 aa, Glycine max
  unsure (1)..(98): unsure at all Xaa locations
  Clone ID: PAT_MRT3847_80468C.1.pep
XEXXFGXKSGXGGXXIWMVFFKXKXINWEGEVEFEWXDDVLIVXKXEXEGIEFXYXXRXXXWVXCVXKIGEGXXXKXDXXXXGDEXIDRXWXXXCVGR

SEQ ID NO: 264063 - protein, 405 aa, Glycine max
  Clone ID: PAT_MRT3847_80469C.1.pep
ERFNVMLHELKIEHPKGGIARSETDALAIAADIGYPVVVRPSYVLGGRAMEIVYTDNKLVTYLENAVEVDPERPVLIDKYLSDACEIDVDALADSQGNVVIGGIMEHIEQAGIHSGDSACSIPTRTVPASCLETIRSWTVNLAKQLNVCGLMNCQYAITPSGDVFLLEANPRASRTVPFVSKAIGHPLAKYASLVMSGKTLYDLQFTKEVIPKYVSVKEAVLPFSKFPGCDVFLSPEMRSTGEVMGIDPSYNIAFAKAQIAAGQKLPLSGTVFLSLNDLTKPHLEKIAKAFVENGFKIAATSGTAHVLNLAKIPAERVLKLHEGRPHAGDMIANGDIQLMVVTSSDDALDRIDGLALRRMALDYKVPIVTTVNGALATAEAINSLKANSIKMIALQDFIDGEFNE

SEQ ID NO: 264064 - protein, 21 aa, Glycine max
  Clone ID: PAT_MRT3847_80470C.1.pep
GCIYNHRQVFMNILTAIHFRV

SEQ ID NO: 264065 - protein, 52 aa, Glycine max
  Clone ID: PAT_MRT3847_80471C.1.pep
LLIYMGKDFEGMVHQLTVGLALVLKEFHQLAGTLWIYEKWVFRLKYDDHMHG

SEQ ID NO: 264066 - protein, 72 aa, Glycine max
  unsure (1)..(72): unsure at all Xaa locations
  Clone ID: PAT_MRT3847_80472C.1.pep
MKVLVFFVAIVLAAWHCHGSDHDHDHGHTYQIFPLENETWQGGHXIRGVSSQSWRLGWEAHNVIDWKTVPQD

SEQ ID NO: 264067 - protein, 90 aa, Glycine max
  Clone ID: PAT_MRT3847_80473C.1.pep
MQQDQRKKGSMEMEFFSDYGDVSRYKIQEVIGKGSYGVVCSAIDSHTGEKVAIKKIHDIFEHVSDAARILREIKLLRLLRHPDIVEIKHV

SEQ ID NO: 264068 - protein, 82 aa, Glycine max
  Clone ID: PAT_MRT3847_80474C.1.pep
MQQDQRKKGSMEMEFFSDYGDVSRYKIQEVIGKGSYGVVCSAIDTHTGEKVAIKKIHDIFEHVSDAARILREIKLLRLLRHP

SEQ ID NO: 264069 - protein, 101 aa, Glycine max
  Clone ID: PAT_MRT3847_80475C.1.pep
STSTPMSCVWHTVILIEYLFLLRASISPPGLMLCIFAQRLSFVIVLRTRSLTTVSLHERLGIAVCRSDTCNIYYMHRSSVAIMFMPPQHRISPHIHDAKNR

SEQ ID NO: 264070 - protein, 97 aa, Glycine max
  unsure (1)..(97): unsure at all Xaa locations
  Clone ID: PAT_MRT3847_80476C.1.pep
KHNLLWAITRTLQLQHLTITEAATSMHLIDIHHYATSQNVPEHSLIEMTISFDVLQXAAPPSRLNCVXLGRETLMWASLNLHGTTLILEEDPVWFGI

SEQ ID NO: 264071 - protein, 126 aa, Glycine max
  unsure (1)..(126): unsure at all Xaa locations
  Clone ID: PAT_MRT3847_80477C.1.pep
MAGELDLASYHCTHHDMRSEANAANTNSCENGLNIGYMSANDRLNWGAVVEAMDESHTNEDKRMLKELHKSVVXLGGETRTTLQDWVMAVHHQTVKAELPEPLQSRFKDSLDWAIESPNEGAGRFR

SEQ ID NO: 264072 - protein, 104 aa, Glycine max
  Clone ID: PAT_MRT3847_80478C.1.pep
QCGDISRGRLYFEVSKIYFPNTKRTSLIFFIAIGNLADDTINFEAYSLQAGAASRDLRKSSFEIFTKMNFFTGLDNSGCVPDNQPLVWPVLVLFHYFCNVYWLH

SEQ ID NO: 264073 - protein, 87 aa, Glycine max
  Clone ID: PAT_MRT3847_80479C.1.pep
PRRIADLTKQENLYASKGGPIVSSQTANEYGNIAADHGPDAKVHLQRAVSMVTSPGTGVPWGMSQHVEVSATLLTACHGSYSRSYYP

SEQ ID NO: 264074 - protein, 121 aa, Glycine max
  unsure (1)..(121): unsure at all Xaa locations
  Clone ID: PAT_MRT3847_8047C.1.pep
QTACMKERKEKGISGPGEACDASYAPXQRTTLNKKGSAFNGKLNILVDNAGSNVKKPTNEYTAEXYTKLRATNLDCTYHKVPTSXPLFKASGNASIESIGYAARHTRGRSGSIYSSSKAAI

SEQ ID NO: 264075 - protein, 528 aa, Glycine max
  unsure (1)..(528): unsure at all Xaa locations
  Clone ID: PAT_MRT3847_80480C.1.pep
MAEHGFDGHDVGYVPEDPNFPQNHSDEHDVGTVIDSSGFPHLLPDEDDAGNLMEDANFPENDFVGHEHDVGGLAGDADSPPEEHVEEVHGAGDVPEDFDSLPKQGSEIDSKGNEIKKWPGWPGENVFRMLVPVQKVGSIIGRKGEFIKKITEETKARIKILDGPPGISERAVMVSAKEEPDCPIPPAVDGLLRVHKQVINVDRDLADSALAAGRSVVTRLLVADTQAGSLIGKQGSTIKSIQDGSGCXLRVLGSENLPIFALRDDSIVEIQGESAGVHKAVELIAVHLRKFLVDRSIVGVFETQMQRSDVRVTKKLRPHQNGGXLLKSGLLRMVDNPNYNEHITSIKXHFPPSNQSDNYYHPYYVTLLALLGARSQLELSEREASMGIHSSSAQPQQSVVTKVTQHMQIPLTYADAVIGASGTNISYIRRASGASITIQETRGVPGEMTVEISGTSSQIQAAQQLVQNFMAEAASATQDPMGGSVSQGYSAYPTTAPVYAPPPTSAGGHTGHAPSADYGPVYGTNYGY

SEQ ID NO: 264076 - protein, 65 aa, Glycine max
  Clone ID: PAT_MRT3847_80481C.1.pep
LDPTRMFITGCHSHHNGKLRESFVRRSSTTRLWSSVDESSVCPVYVNLLQRFWFNLYEILSVLVL

SEQ ID NO: 264077 - protein, 91 aa, Glycine max
  Clone ID: PAT_MRT3847_80482C.1.pep
IKNSLQTNCFLKGVKKKFFSTKRGTKGGGKTPFPLPGKKMGIGILPPPKRKGWGLSYPKEGPFFFSRQVKENPIVRGAKNGFPGYPQKGEG

SEQ ID NO: 264078 - protein, 74 aa, Glycine max
  Clone ID: PAT_MRT3847_80483C.1.pep
LVHTICPAIPLLSELFSTTPLLATLSFGRFHPPIPHELIKLSSLFCASSSSHWPKHLCDPCSSRAFPNPSITNP

SEQ ID NO: 264079 - protein, 40 aa, Glycine max
  unsure (1)..(40): unsure at all Xaa locations
  Clone ID: PAT_MRT3847_80484C.1.pep
TVAWGVXNHAFHFHCISRWLKTRQVCPLDNSEWEFQKYGH

SEQ ID NO: 264080 - protein, 64 aa, Glycine max
  Clone ID: PAT_MRT3847_80485C.1.pep
LFKFPLTFITIHKQILYSFSQLFTDMFCFWVKSCVAQLHDYKYLKFDRIIKGNARLRCVSESIF

SEQ ID NO: 264081 - protein, 75 aa, Glycine max
  Clone ID: PAT_MRT3847_80486C.1.pep
KRAFPISFFLKTDSCYLPPRIFFVLTDPFVVRQTGGFLLQHLELDILLQKKLPLEKKYVIKMKAKFPFGTKSPLK

SEQ ID NO: 264082 - protein, 63 aa, Glycine max
  unsure (1)..(63): unsure at all Xaa locations
  Clone ID: PAT_MRT3847_80487C.1.pep
DLPKGAHKRPSSSKGEIPLRVPKPKPXTGKVIGVFKIVHPFGPFLGPKAPKDVKIRGIWYAQL

SEQ ID NO: 264083 - protein, 51 aa, Glycine max
  Clone ID: PAT_MRT3847_80488C.1.pep
TRFFFLITCTKQPKQLRAKTPFHKLSIKKLLTPILLLPAHYNSWCFQEMSQ

SEQ ID NO: 264084 - protein, 91 aa, Glycine max
  Clone ID: PAT_MRT3847_80489C.1.pep
TFLFWKICFSTKVLFLLPYNGLFFLNKFSKTKKSIREVALVFILKISLMSWLNHRAGFVYVLLHSVCRTITGHRTLETAVSTPERMNEKAK

SEQ ID NO: 264085 - protein, 142 aa, Glycine max
  unsure (1)..(142): unsure at all Xaa locations
  Clone ID: PAT_MRT3847_8048C.1.pep
RGSGSSSDRPLWYPGAKAPEYLYGSLVRNYGFDPFGLRKPAEYLQLEMDSLDQNLANNVAGDIIGTNTELADVKYTPFQPYIEVFRLXKFHECELIYRMXSMLCTLGAISAEWLTGDTWQYARKGKLLDCVSILLEPLPFLI

SEQ ID NO: 264086 - protein, 132 aa, Glycine max
  Clone ID: PAT_MRT3847_80490C.1.pep
AQPKQHPKWLQLLFPWLLAAESLLPTTTSLHPKPSSCHYPYANQRGPLFTTKAVSNYTPQINASVKEKAAAGLTAASVTVSMAAPELAHAAGYEYCPSLKNFLLSRIAGGVVLPLIFGAGTGDAKFEPVERT

SEQ ID NO: 264087 - protein, 65 aa, Glycine max
  Clone ID: PAT_MRT3847_80491C.1.pep
VTIQDRALVMSAQLSSRYIPGRHLPVKALICFPRLVLFYGFTSSPASEKYNLKKKKILYFLKFIL

SEQ ID NO: 264088 - protein, 64 aa, Glycine max
  Clone ID: PAT_MRT3847_80492C.1.pep
DGDNTKRTRVTSTHLFSTFLLYFSFHLFNFRRSIKNGSFRRSRFNHQRSLFSSSTCRFRLLHLS

SEQ ID NO: 264089 - protein, 47 aa, Glycine max
  Clone ID: PAT_MRT3847_80493C.1.pep
LCITNYNKLEGKIHFKVQTIKGYIEFDKYIKKVVFSAETMSSHIFPN

SEQ ID NO: 264090 - protein, 66 aa, Glycine max
  Clone ID: PAT_MRT3847_80494C.1.pep
FYERLSPLVPLNVPLGSFSNVRNGDCIVTFSRQEIYKLKKRIEKEGKHLCSVVYGSLPPETRTRQV

SEQ ID NO: 264091 - protein, 79 aa, Glycine max
  Clone ID: PAT_MRT3847_80495C.1.pep
RAGSSNGHPVCGKRSKAKMRFSCACAILKRLGLSPFSHEALRRSLWVIVTRSHAHTTFEGRMLKVQMSESALTERGNSH

SEQ ID NO: 264092 - protein, 74 aa, Glycine max
  Clone ID: PAT_MRT3847_80496C.1.pep
FHISYAFSNGGVCYLMYICHLLFVQAVFPFILQCLSSRWLFNFSVWHVPLLVSFSLLWPFLYLFSQVYLLWPPF

SEQ ID NO: 264093 - protein, 53 aa, Glycine max
  Clone ID: PAT_MRT3847_80497C.1.pep
GSIRCINIVEHRSFIVAYSEAQSVFDANILSCNKNCIMCVKVDLESIPGSQFV

SEQ ID NO: 264094 - protein, 128 aa, Glycine max
  unsure (1)..(128): unsure at all Xaa locations
  Clone ID: PAT_MRT3847_80498C.1.pep
MLCMIGSSWLTHETSLVETHQGILDYQFWGGDYILEVNNLSHSGRVNVHRWQWTRRMTDHVQGGIPPGFPVTEICTSVFNEQLIKDRYEKLLLQAKASRMFLQPFKSWYIXVYGDEHLISGHEYSSLL

SEQ ID NO: 264095 - protein, 381 aa, Glycine max
  unsure (1)..(381): unsure at all Xaa locations
  Clone ID: PAT_MRT3847_80499C.1.pep
LPAEGAAVVVDFTKDEVETLLNEKKGNTYDNKKKIEQMMDLIKRLKLCVRWFKRIEEGYMQEKEKLQSELETAEKKCTDTGTEMKSKIEELEETVSDLRKTISSLEERIVKEESDKLEAINSYGKEKEARTEAEKVRDEKSAELEKVRDEKSVAVKKAISNEDLYKRSQEYNMSLQQYNSRLQSDLETANEAXHKRLESEKATIVESLSNVRGHNKALQDQLVSLKVSQDEAIKQKEILGNELKCLREELKQIRDDRDHQLGQVNALTGEIAKYKEYTGKTCTQLDTLMIKTNALEETCSSQKEQIHILQQQLFAEKEKFKNADLSSLETRTMFEEQKRIIRELQDRLADIEFQVMEGEMLRKKLHNTILELKGNIRVFCR

SEQ ID NO: 264096 - protein, 52 aa, Glycine max
  Clone ID: PAT_MRT3847_8049C.1.pep
IAWGAFLRHAFRDRICMDLIQIYTSIVVLAGSFIDLVRRGSDLRYRGTIEKR

SEQ ID NO: 264097 - protein, 59 aa, Glycine max
  Clone ID: PAT_MRT3847_804C.1.pep
YVTSEKYVAQAKCAGYVRECGASAQSEMAERIAQGQRAYCCSIELPRPNKVNNHHAHVR

SEQ ID NO: 264098 - protein, 53 aa, Glycine max
  Clone ID: PAT_MRT3847_80500C.1.pep
GGLILLNARLLKPYLFKPLGINKDRSKSKFRLLPVKMHSGKATNPLEEFQNFF

SEQ ID NO: 264099 - protein, 211 aa, Glycine max
  unsure (1)..(211): unsure at all Xaa locations
  Clone ID: PAT_MRT3847_80501C.1.pep
EYNMSLQQYNSRLQSDLGTVNEAHKRLETEXATIVESLSNVRGHNKALQDQLVSLKVSQDEAIKQKEILANELKCLREELKQIRDDRDCQLGQVHALTGEIAKYKEYTGKTCTQLDTLMIKTNALEETCSSQKEQIHILQQQLFAEKEKFKNADLSSLETRTMFEEQKRIIRELQDRLADIEFQVMEGEMLRKKLHNTILELKGNIRVFCR

SEQ ID NO: 264100 - protein, 65 aa, Glycine max
  Clone ID: PAT_MRT3847_80502C.1.pep
YIVHLEQIQVMLDNAFLYDLSQAVKIHNITKVIKFGHPIVLLVTAVSKTIAYMIESTYSYMRAMM

SEQ ID NO: 264101 - protein, 66 aa, Glycine max
  Clone ID: PAT_MRT3847_80503C.1.pep
SSLLRFQVEQFLFFPSGIQHSFLMLSSTNGLVITFINNIPLLSASYLFCVNIVRTIMAVSILILFT

SEQ ID NO: 264102 - protein, 354 aa, Glycine max
  unsure (1)..(354): unsure at all Xaa locations
  Clone ID: PAT_MRT3847_80504C.1.pep
TRPGEDVVLLDRASRATRGKRLTKLLDDEIQEDELFWNQDALKEDEEDDNYQEEPEIADEFDSDFDQDEPVPEEEEDPNKNDDDERMHKKKRLIFPGKTLAKKKKKKKTISKLESSPKENEDEEHSGKVVEDEGGERMIRKSTRTSVIVRQAERDAIRAALQATIKPVKRKKEGEEKRMTQEEMLLEAAQTEIMNLRNLERVLAREEEVKRRAIVLRLERRQKGIRYISKNGTSYLEFIKGSSFSXDIPTAPVQYPEQPVCPITGLPAKYRDPKTGQPYATKEAFKIIRERFLNESTNSRKDMSMGGLYDSVSGCGFSIKRKRSIMPDKNANPDGRSLARFRRIPDFEDEDYSD

SEQ ID NO: 264103 - protein, 57 aa, Glycine max
  unsure (1)..(57): unsure at all Xaa locations
  Clone ID: PAT_MRT3847_80505C.1.pep
WXXRGNSMTLKKRFSTFLGPNLKPGKRFSGGTKKVKGAPNNFRGKTFFPEFANLTKI

SEQ ID NO: 264104 - protein, 59 aa, Glycine max
  Clone ID: PAT_MRT3847_80506C.1.pep
PRHSFHPFSDSLSRKTKTWLLFVALSLFSLDTLQTVKSIFSKVKKRQPMRERVVIRHHR

SEQ ID NO: 264105 - protein, 265 aa, Glycine max
  unsure (1)..(265): unsure at all Xaa locations
  Clone ID: PAT_MRT3847_80507C.1.pep
ETISQSXNEFLMQPFDEKEIRDAVWDCGSQKSPGPDGLNFNFIXEFXDLMKPEVLRFLDKFYVKGRFPKGTNASFITLIPKLLELQNLNQYRPISLIGCIYKIVAKVLARRLKKVMPKIIDEQQSAFIEGRHMLHIVLIANEAVEEVKRNAKSSLIFKVDYERAYDSVSWDFLTFMLRKMAFCPKWIKWMDGCIRTASMSILVNGSPTAEFIPQKGIRQGDPLALLLFNIVAEGLTGLMREALKANKYKGLLVEKMNETDTAGSK

SEQ ID NO: 264106 - protein, 57 aa, Glycine max
  Clone ID: PAT_MRT3847_80508C.1.pep
ESFLCAISDTACALEYLSLASYANYPSPTFHTQSVIAPTLPMGNCFLVNQQLHLLYG

SEQ ID NO: 264107 - protein, 47 aa, Glycine max
  unsure (1)..(47): unsure at all Xaa locations
  Clone ID: PAT_MRT3847_80509C.1.pep
VPVTTKPNLAVTHKDGQLKLHXDEISNEYSPSAKRLXSTEHDGYDPF

SEQ ID NO: 264108 - protein, 224 aa, Glycine max
  unsure (1)..(224): unsure at all Xaa locations
  Clone ID: PAT_MRT3847_8050C.1.pep
MLVKILITTKKDGSISCSLRKNRRSSIAGEEDKGGKTSRQLRKQAARKPANSSFNEDVEDLEGTNLNLLLDHGMFYASNSFFDYAKNRRILWGWSKECETTQDDYEKGWAGLQWPIEEVEXLHDKQVSIMGEKLVSESTIEVSGIPASQVDVEVWFELPELENMEWLNESEVDPHLLCSEEYASRSGIIGMWPLVDLLHWIQLLARHNKAISRDTWSQLLEFAK

SEQ ID NO: 264109 - protein, 43 aa, Glycine max
  Clone ID: PAT_MRT3847_80510C.1.pep
LCSRFVQYLCWFQIRDTKEDILQNENRVPTLEDQNIFLCFLDL

SEQ ID NO: 264110 - protein, 75 aa, Glycine max
  Clone ID: PAT_MRT3847_80511C.1.pep
FFFFFFFFFFFFFFFFFFFFFFLKKKKFFFLGQKTYGVQNIENKTKISSTAYTPNKKDLTFQNISYDTRKAGGNP

SEQ ID NO: 264111 - protein, 85 aa, Glycine max
  Clone ID: PAT_MRT3847_80512C.1.pep
SLCAHSFFLLSIEKIVTLCMCIALSTCYRLQRGLHVHFNDNFGKFLSRATVESCLVDKYRQIMRYHYLLHDQVASVSNEHELAYK

SEQ ID NO: 264112 - protein, 67 aa, Glycine max
  Clone ID: PAT_MRT3847_80513C.1.pep
VSYWRASICDPPGAIPPMTRSVEIGSCSTKLVMSLVRAVTVSLMFRSSPRIERKTIRLCYKVSGNYE

SEQ ID NO: 264113 - protein, 137 aa, Glycine max
  Clone ID: PAT_MRT3847_80514C.1.pep
CFSPKGLPLPLFSQNKEDSPQQRVQRSFLKKEKNALKPPKMGSLFPLGNPPRGVPFSLLFGPKKPQGGVFPIASPPEKFPGFKKGGVFPPHPKKKKSFPFLNFFSPPKGKKVPQKVGFGLPPNNFGSQKNPPGPKKN

SEQ ID NO: 264114 - protein, 49 aa, Glycine max
  Clone ID: PAT_MRT3847_80515C.1.pep
KINFLDYPKMPTKQVTYCNDKAALVKVYVEKPRKKSSSSIQHQHLHYHI

SEQ ID NO: 264115 - protein, 74 aa, Glycine max
  Clone ID: PAT_MRT3847_80516C.1.pep
RALRTINLSNNLMSPYKSELPLLKNIKVVVLNNTGVDWEQVPSIFFELLRQSLTTIEELHIMANNISRTLVCCL

SEQ ID NO: 264116 - protein, 77 aa, Glycine max
  Clone ID: PAT_MRT3847_80517C.1.pep
LMLSLRLWFSSLATHNTLSCSSRRSLFLVPHQILNNNTLISNTSKILSCCYEKPIKQNGIFSVASDLQSSSFSSSFP

SEQ ID NO: 264117 - protein, 46 aa, Glycine max
  Clone ID: PAT_MRT3847_80518C.1.pep
SYGEILKALVNTEHIHGLVVHNDYNEDSGRCRVNYITCTKYLKIKI

SEQ ID NO: 264118 - protein, 95 aa, Glycine max
  Clone ID: PAT_MRT3847_80519C.1.pep
LLICSEQVLSGRYLAPEYFMHGRVTDKSDVYAFGVVLLELLSNRKPINNECPQGQGSLVMWALPILEGGTFSQLLDPSLRGCDDCPITRMIFGAA

SEQ ID NO: 264119 - protein, 284 aa, Glycine max
  Clone ID: PAT_MRT3847_8051C.1.pep
MNMDMCQNVSVSGECQQVQVFAPSCSSSLDDLFSAQNTEVDVELEWLSEFVEDCFSSPPSCVLVPIGVKTTSTSTNLSSGTLKRPQQQNESPLQNFAVPGKARSKRKRKRLSAPRTTKHTLSTWSQHFSTQNDGVSSDPPLLKQAYWLADSELIVPKKKDVEQEEEEGVVVVVKKEKLGDYCDDDEGDEINNNNSNNDDNVQHPIPRRCTHCLAQRTPQWRAGPLGPKTLCNACGVRYKSGRLLPEYRPAKSPTFVSYLHSNSHKKVMEMRMGVGVAVLSTDKK

SEQ ID NO: 264120 - protein, 36 aa, Glycine max
  Clone ID: PAT_MRT3847_80520C.1.pep
KREVQNLLIAEDCWEVPLHPFSRFNVDRYAKIPFLL

SEQ ID NO: 264121 - protein, 306 aa, Glycine max
  Clone ID: PAT_MRT3847_80521C.1.pep
KQVGFKIHVEKPVDLTIAIKKRVCCLAFSSMKEINCKVDSSSCTLAPNREPCITESLSVSGNGTTTSSMSVKSTPEIEKKFVHHVYDAIAPHFSATRFAKWPKVAAFLSSLPLGSLVLDAGCGNGKYLGLNQDCFFIGCDISPSLIKICLDREHEVLVADAVNLPYRTGFGDVAISIAVLHHLSTENRRRKAIEELVRVVKKGGLVLITVWAVEQEDSKLITKWTPLNEKYVDEWVGPGSPRTRAPSSSSLESIPESEASRSGEHMEVCNEPHVSRDLEEEKNKESTGILCSWHLPYYRAEISGAF

SEQ ID NO: 264122 - protein, 178 aa, Glycine max
  Clone ID: PAT_MRT3847_80522C.1.pep
KLWSCSLLLRRECCSFSNGEYLKAGLHELEQWCLKATDQFAGSSWAELKHIRQAVGFLVLHQKTQKSLEEITNELCPVLSIPQIYRIGTMFWDDKYGAHGLSAEVISRMRVIMTEDSINIHNSSFLLEVDSSIPFLMEEMFQSMSDIRLSDMDVDPPPILRQRSDFQFLLQQMDSDSQ

SEQ ID NO: 264123 - protein, 67 aa, Glycine max
  Clone ID: PAT_MRT3847_80523C.1.pep
MMIYREQVVMDQILLKRKRKRIYKLYTIESLSSFYINNTKATKIFISLIQIKQNIWPLKRSLAMYCC

SEQ ID NO: 264124 - protein, 50 aa, Glycine max
  Clone ID: PAT_MRT3847_80524C.1.pep
ILYYLSKIIKTINYSRGKKISGLPQYRKIIHPHSQNPVDSPVNIVRFPHT

SEQ ID NO: 264125 - protein, 64 aa, Glycine max
  Clone ID: PAT_MRT3847_80525C.1.pep
NVDYLAGGEMIINGCASMDIDVCIKTKRLDTAMMCKHFKLEAKQSLETTLMTLHIHSTLLVRST

SEQ ID NO: 264126 - protein, 91 aa, Glycine max
  Clone ID: PAT_MRT3847_80526C.1.pep
NVDYLAGGEMIINGCASMDIDVCIKTKRLDTAMMCKHFKLEAKQSLETTLMTLHIHSTLLLRVRKDVLSKNEGYFIPISKVRAIVSYNSNQ

SEQ ID NO: 264127 - protein, 80 aa, Glycine max
  Clone ID: PAT_MRT3847_80527C.1.pep
QQGNLQDDTQIKKETERASQTPLHPPKIHEKFQYLFLMTNKRFYIHFLPLYDVPSGTDRIEAHISSHILILDLRKTGIKH

SEQ ID NO: 264128 - protein, 54 aa, Glycine max
  Clone ID: PAT_MRT3847_80528C.1.pep
TISSNLSNILTKVYRKDPISLIVLLDYLDYITVVKWLASPLPVNGSRGKYTVYP

SEQ ID NO: 264129 - protein, 121 aa, Glycine max
  Clone ID: PAT_MRT3847_80529C.1.pep
VLLTWLQSTLSKTILSLVLPCTHSYQVWEKILEYFHLQTRARAQQLRRELRRTMLDDKTMKEFLLRIKAICDSLNGVRDPVSHHEHVGIILEGLPTEYGPVIAVVESKFESPLIADAEALY

SEQ ID NO: 264130 - protein, 132 aa, Glycine max
  unsure (1)..(132): unsure at all Xaa locations
  Clone ID: PAT_MRT3847_8052C.1.pep
LGACGPRWPSCATCALGGAHDLATGDLVSLIEHHLADRAHLCDPKEXGTGDSCCDGGYAAQPHLGSHSSLGEFRLRMSMHSPCDDTTCRLDRTDSGDTDSTYSVGCLDDEPIASHLELNGPVAVPINAXSMH

SEQ ID NO: 264131 - protein, 538 aa, Glycine max
  unsure (1)..(538): unsure at all Xaa locations
  Clone ID: PAT_MRT3847_80530C.1.pep
MKLPTTFADPESLSYLYTLLQSSFDQMNDPTNNNTSTTGRKRRRKNEDDDDDDDDGDDDGSSNNNNNNNNKRSKKKKEELKGILTSILLLDEQEKLEQQQNNKVSEEEKFSLETNHKKKTKAMLHYYSNLDEYYSHVEESERVKRKKSRGMARAVAVAVAACEREGEGGGGSAEGGKSGAGGSQRRLWVKDRSGAWWDECNKEDFPEEDFKKAFRMGRETFDMICEELNSAIVKEDTTLRNAIPVRQRVAVCLWRLATGDPLRIVSKRFGLGISTCHKLVLEVCTAIKSVLMPKYLNWPDEVALRRVKSEFEGVSGIPNVVGSMYTSHVPIIAXVPKISVAAYFNKRHTERNQKTSYSITVQGVVDHRGVFTDVCIGWPGSMPDDQVLEKSALFQRANGGLLKGDWIVGSSGYPLMDWVLVPYSQQNLTWTQHAFNEKIGEVQKVARDAFARLKGRWSCLQKRTEVKLQDLPVVLGACCVLHNICELKGEKIDPELKVDLMDDEMVPEVALRSMSSMKTRDAIAHNLLHHGLAGTSFL

SEQ ID NO: 264132 - protein, 80 aa, Glycine max
  Clone ID: PAT_MRT3847_80531C.1.pep
PRADSARAKVKLNHSTSLPTTLRLRQSLQPSPEDLCRFHRAPPIARLIVTSSAGTDHIDLVECSRHDIQVVSVPGDQAKD

SEQ ID NO: 264133 - protein, 95 aa, Glycine max
  Clone ID: PAT_MRT3847_80532C.1.pep
QKLKGFFQNPFPIVKPIPKPIPIVYPILNPVPVVKPIPIPEYKALPKFLTIVNPVPNLIPGVKPLTKPILTFDPKFFLKPKPSFEKPVLKLPLDP

SEQ ID NO: 264134 - protein, 156 aa, Glycine max
  unsure (1)..(156): unsure at all Xaa locations
  Clone ID: PAT_MRT3847_80533C.1.pep
TRPKCLMKLLYDKTVVYATHQLEFLEAADLILVMKDGKIVESGSYKDLIACPNSELVQQMAAYQETLHQINPCQEDDSASCRPCQKNQIEVAEENIQEIMEXLGKKXEEEAETGRXKWXXYSTFVISAYKGVLVPVILLCXILFXXMQMXXXYWIV

SEQ ID NO: 264135 - protein, 37 aa, Glycine max
  Clone ID: PAT_MRT3847_80534C.1.pep
GAFQAPRFSSTHDPHQLTRSPEKAHVHSSNGYNSVVS

SEQ ID NO: 264136 - protein, 417 aa, Glycine max
  Clone ID: PAT_MRT3847_80535C.1.pep
TLPKIGNSEQKCLMKLLYDKTVVYATHQLEFLEAADLILVMKDGKIVESGSYKDLIACPNSELVQQMAAYQETLHQINPCQEDDSASCRPCQKNQIEVAEENIQEIMEDWGRSKEEEAETGRVKWSVYSTFVISAYKGVLVPVILLCQILFQVMQMGSNYWISWATEQKGRVNNKQLMGTFALLSFGGTIFILGRTVLMAAVAVETAQRLFLGMITSVFRAPVSFFDTTPSSRIMSRSSTDQSTVDTDIPYRLAGLVFALIQLLSIIVLMSQVAWQVILLFFVVFAISIWYQAYYITTARELARMVGIRKAPILHHFSESIARAATIRCFNQEKLFMTKIKALIDDYSRVAFHNFGTMEWLSVRINFLFNLVFYFVLVILVTLPRSTIDPSLAGLVATYGLNLNVLQAWVPFCRLLA

SEQ ID NO: 264137 - protein, 53 aa, Glycine max
  Clone ID: PAT_MRT3847_80536C.1.pep
ILTLAFAGFKKKLSGHLGYNDHYFYFLGNPPPESFFGKFLGNKGVIPSLKKPF

SEQ ID NO: 264138 - protein, 76 aa, Glycine max
  Clone ID: PAT_MRT3847_80537C.1.pep
LLEGKNLSDINYCSVFEKVRATKAHFVMGTTFKYDITWRLLTYLMNTLSLGIGRKTQKERCLIVTQNSASFQGRAG

SEQ ID NO: 264139 - protein, 36 aa, Glycine max
  Clone ID: PAT_MRT3847_80538C.1.pep
ENILPNLVKLIYVHHLALFISDGESIHRLTISVMAL

SEQ ID NO: 264140 - protein, 55 aa, Glycine max
  Clone ID: PAT_MRT3847_80539C.1.pep
PLVQADARRRPKGRMCHNRWIKGANWAMKMHEISELNGILLKLIQVIEEQCTMLL

SEQ ID NO: 264141 - protein, 65 aa, Glycine max
  unsure (1)..(65): unsure at all Xaa locations
  Clone ID: PAT_MRT3847_8053C.1.pep
LEFTSLVFAYGVDLFFSQIAPFRAFDSLTEDFSXALLFLTIVALVAAIFVPWVFSPRKDFPKKWR

SEQ ID NO: 264142 - protein, 214 aa, Glycine max
  Clone ID: PAT_MRT3847_80540C.1.pep
KTGGSDETYRKGPTFFGWIRSWWQFWKGNAKSGDSTAHQNKVVNHFEDSNSSELVDQTVQTVSDFEDKSSELDQNAICSGKPELFSSSSVWDDMESFIFTRRGSVIVYESKNREDMARKLRKNGPPVFRSLSKKDILQLLELLISEKKWLEETPTQTFPFQFDSVKYIVRLYGSRYDMLKDCEKLVREILREHPDGFRISSFPRFFVVRYGYHL

SEQ ID NO: 264143 - protein, 41 aa, Glycine max
  Clone ID: PAT_MRT3847_80541C.1.pep
LISRVYLLVSPTSWSVPNIVGKVRSRIKKEVVIVLAMSIPS

SEQ ID NO: 264144 - protein, 259 aa, Glycine max
  Clone ID: PAT_MRT3847_80542C.1.pep
MASILQLLMFAFTMMFTFMGERAVAGGIFRPSQWALAHATFYGDETASATMGGACGYGNLFQNGYGTDTVALSSTLFNNGYTCGTCYQIKCYQSSACYKNVAFTTVTATNLCPPNWSQPSNNGGWCNPPRVHFDMSKPAFMKIAQWKAGIVPVMYRRVPCMRRGGLRFSFQGNGYWLLVYVMNVGGGGDISSMWVKGSRSGWISMSHNWGASYQAFATLGGQALSFRITSYTTRETIIAWNVAPSNWNAGLTYSTTLTS

SEQ ID NO: 264145 - protein, 68 aa, Glycine max
  Clone ID: PAT_MRT3847_80543C.1.pep
AVIVYRRFRFSGVRYLGRWSDGRVSRIRFPPCLSASCLAPVQVILLAVFPLFFFFCLNAHFGPSYFNK

SEQ ID NO: 264146 - protein, 78 aa, Glycine max
  Clone ID: PAT_MRT3847_80544C.1.pep
GENLRMSALSLSHHMHMSLLYLYSSFAAIFYKSSFCPIVAFFSPLSISIEIHRMIVFPTAASFQGMPVYLWGLYRVFG

SEQ ID NO: 264147 - protein, 77 aa, Glycine max
  Clone ID: PAT_MRT3847_80545C.1.pep
RSKKIYQGTGGGLHKKNPHSKRGQDGPFLPYFIPKKKRPSFHNRKAKKNRVRELFLYPKGHRGLIGKIKKNSSPTTD

SEQ ID NO: 264148 - protein, 70 aa, Glycine max
  unsure (1)..(70): unsure at all Xaa locations
  Clone ID: PAT_MRT3847_80546C.1.pep
DLNGVGRKTHYVATFWIGSGPVTWVYRSEIFPLRLGAXVNRVTSGVISSTFLSLYKAITIGGAFFLFAGV

SEQ ID NO: 264149 - protein, 36 aa, Glycine max
  Clone ID: PAT_MRT3847_80547C.1.pep
MQRKRKTEFQELVQKLVLMNSASEIVKSTEVLKQLL

SEQ ID NO: 264150 - protein, 94 aa, Glycine max
  Clone ID: PAT_MRT3847_80548C.1.pep
MQAMAATEEDLKLLPIVGSPVVCTVQIALQLRGLDDKFLEENLGKTSDLLLKYSPVHKNVPVSVHNEKPIADSLVIVRYIDQTWKNNRILPSDP

SEQ ID NO: 264151 - protein, 250 aa, Glycine max
  unsure (1)..(250): unsure at all Xaa locations
  Clone ID: PAT_MRT3847_80549C.1.pep
HASEFCESEKAMSYRNLVVEKIVEILSLDDITLSFSLKVEALLNIGKTGMKNMLTILQGLGRAVFANLSKVYVHRNLRSSEIAVQLLECYSCQLLPWIHENGGSEDFVMQFAVDIWSQAGNCMDLSTPFEGKGLLDAMMKAMRLSVGSCSVESQNLIIRKAYSVLSSHTNFQLKEVERLPLTPGKYDISLRDEGIISLFASVVIAVCPKTYIPNIRVLVHLFIITXLRGXVPVAQALGSILNXLVSHQAL

SEQ ID NO: 264152 - protein, 58 aa, Glycine max
  unsure (1)..(58): unsure at all Xaa locations
  Clone ID: PAT_MRT3847_8054C.1.pep
SSVILSRSHTSLHLDXXVCNLCGQEDDSRSQWPSQRVITIPQRFLTPNFSKKLPVLLT

SEQ ID NO: 264153 - protein, 53 aa, Glycine max
  Clone ID: PAT_MRT3847_80551C.1.pep
KIHRVISKRSLECDNGKANADNNVATLKGSKIDVISGAELEIAEMKKLSSCSC

SEQ ID NO: 264154 - protein, 46 aa, Glycine max
  Clone ID: PAT_MRT3847_80552C.1.pep
EGEPFCLKHLRGHPTSNHGGYSNRFLVAHLEGLLNPLMGTWGSILL

SEQ ID NO: 264155 - protein, 54 aa, Glycine max
  Clone ID: PAT_MRT3847_80553C.1.pep
PRLYLTSTITTISKSRLSWGQLQCTTLPLDFAALPPSIGTTAGPLLILITFPPT

SEQ ID NO: 264156 - protein, 54 aa, Glycine max
  Clone ID: PAT_MRT3847_80554C.1.pep
GSRLTLSITLPPSLSFFTLNLIYRCEALACHRGHSYFSPKLLYPLLWCSAKTLN

SEQ ID NO: 264157 - protein, 65 aa, Glycine max
  unsure (1)..(65): unsure at all Xaa locations
  Clone ID: PAT_MRT3847_80555C.1.pep
LLKDRLDARMPEXXSKNGRKVELNLNLKLPVTVFRNPMIGENKSFYLCFNVFLNFSKIFGTLCLI

SEQ ID NO: 264158 - protein, 215 aa, Glycine max
  Clone ID: PAT_MRT3847_80556C.1.pep
MATTTPSNRSSEAFALMAILSTLLCTAVAAKESVYEILPKYGLPSGLLPDTVTDYTLDEDGQFVVVLAKPCYIQFDYLVYYETKISGKLSYGSITNLKGIQVQRLFIWFNVDEIKVDLPPSNSIYFQVGIINKKLDVHHFLLRSMKFPCFSRSRSSFILAVVWHNGIYDVLTCHCPSIALAYICQSVKTRKTQSGYVILYPRETFMNMILCTYLS

SEQ ID NO: 264159 - protein, 354 aa, Glycine max
  Clone ID: PAT_MRT3847_80557C.1.pep
MATSDFKFRQKLLKTKELARWAREGFAAGANGFELVNVEFLVDDADLEVDAVGGRQIDLDLIDVEPDEEALDLNALEVGDGAIAELAGDLGLSVTVSGNRPLGRPYLGSISYTLSFAATAVQSRVLRIAMRANASDDRFEGVVVAMAQIVETTYSDPTCDGEGVLLLAWVWVDDLTVTKEDVWDKGARKRLSPREDMFPQTLILFSALIILFHGDLVLSTTAPDDIHDVLPQYGFPKGLLPNNAVSYTLSPDDGFFTVQLDAPCYVHWDDQLVYYHSQISGTLTYGSVSHVSGIQAQKLFLWLPVTGIKVHQDSGMLEFFVGALSQTLPASDFQDVPGCSRRGSLLATNLILPL

SEQ ID NO: 264160 - protein, 175 aa, Glycine max
  Clone ID: PAT_MRT3847_80558C.1.pep
MATTTPSNRSSEAFALMAILSTLLCTAVAAKESVYEILPKYGLPSGLLPDTVTDYTLDEDGQFVVVLAKPCYIQFDYLVYYETKISGKLSYGSITNLKGIQVQRLFIWFNVDEIKVDLPPSNSIYFQVGIINKKLDVHQFKTVRSCRKSLSCPPCLPRPIQLPAPVDEIPMLLTE

SEQ ID NO: 264161 - protein, 175 aa, Glycine max
  Clone ID: PAT_MRT3847_80559C.1.pep
MATIPPSRSSSHAFVAMATFTTLLLCTAAAKESVYEILPKYGLPSGLLPDTVTDYKLDEDGQFVVVLPKPCYIQFDYLVYYESKISGKLSYGSITNLKGIQVQRLFIWFNVDEIRVDLPPSDSIYFQVGIINKKLDVDQFKTVRSCRKSLSCPPFLPRPIQLPAPVDEISMLLTE

SEQ ID NO: 264162 - protein, 84 aa, Glycine max
  unsure (1)..(84): unsure at all Xaa locations
  Clone ID: PAT_MRT3847_8055C.1.pep
MESRVLSLAVNLSSLAQVRKVPREDVSIVSLXSVNDVGSVSDGRNMIWGKQLHSDLXSPVLKSDAVLLRQCYSAASSPSTKVVI

SEQ ID NO: 264163 - protein, 42 aa, Glycine max
  unsure (1)..(42): unsure at all Xaa locations
  Clone ID: PAT_MRT3847_80560C.1.pep
LSFILXLATHNLXIFSARAYDRCYXSVPXLPXGXLFIXMQML

SEQ ID NO: 264164 - protein, 51 aa, Glycine max
  Clone ID: PAT_MRT3847_80561C.1.pep
DLPLSFVGNIRPHAFVDKLPLHLSFSLQSRFPSHQLRMINSQTSHANGNGP

SEQ ID NO: 264165 - protein, 59 aa, Glycine max
  unsure (1)..(59): unsure at all Xaa locations
  Clone ID: PAT_MRT3847_80562C.1.pep
EPKPFIGFTLIVVDLVDKLVVKFLYDSLLPYHYLTVNFAPVSXTPPTNDLPVNGYLMSC

SEQ ID NO: 264166 - protein, 81 aa, Glycine max
  Clone ID: PAT_MRT3847_80563C.1.pep
RVPWSPTLFNSTASPPRIHGTLPIRRVIPVAWDDDERATGSLPSNTPVASCGTHHTLSHAFTATSYTRTSPRRLTSAIDVY

SEQ ID NO: 264167 - protein, 140 aa, Glycine max
  Clone ID: PAT_MRT3847_80564C.1.pep
KSCFNAQEVAVFLRKIGFEKDTTIYVTQSRWDESLDSLKDLFPKTYTKESIIPADKKKKFLDSEDSELEKVIDFYISSESDVFVPAISGLFYANVAGKRIGSGKSQILVPANIPDSSASASSFLSHYVSKKNHFAYSCYC

SEQ ID NO: 264168 - protein, 416 aa, Glycine max
  unsure (1)..(416): unsure at all Xaa locations
  Clone ID: PAT_MRT3847_80565C.1.pep
MGVDLRQVVAGVLTLTMFVMLIHMIKRDHFDAVDDKLPGTEDVSFESTNFDTTHVRKNIGIWKGDGDELKPCWVKPSEDNVDQTEGFVTFSLTNGPEYHISQIADAVLVARSLGATLVIPDIRGSQPGDKRNFEDIYDVDVFMKSMEGVVRVLKDLPSHVSTHKIAAVKVPNRVTEDYIAQHVEPIYRSKGSVRLATYFPSINMRKXGEKSDAEXQQETHELVDSMSDRMKTMSWMTEWQXVAVDLGERLMTKKGLXVCDLRCGKSRVDKEEIVKKRRXIQCEKDTTIFVKQSRWDESLDSLKDLFPKTYTKESIIPADKTYTKESIITADEKKRYLDSEDSELEKVIDFYISSESDVFVPAISGLFYANVAGKRIGSGKSQILVPANIPDSSASASSFLSHYVSKKNHFAYSCYC

SEQ ID NO: 264169 - protein, 60 aa, Glycine max
  unsure (1)..(60): unsure at all Xaa locations
  Clone ID: PAT_MRT3847_80566C.1.pep
HLDSIYAAVDAHSXRSFKLFDMALRYSNAHLEEDPIXHMHLSYSVYTLMERNLCRLIRAF

SEQ ID NO: 264170 - protein, 329 aa, Glycine max
  Clone ID: PAT_MRT3847_80567C.1.pep
MARAPFTSFPFVLIILLSIVHLSHCKTLKRDVKALNEIKASLGWRVVYAWVGDDPCGDGDLPPWSGVTCSTVGDYRVVTELEVYAVSIVGPFPTAVTSLLDLTRLDLHNNKLTGPIPPQIGRLKRLKILNLRWNKLQDAIPPEIGELKSLTHLYLSFNNFKGEIPKELANLPDLRYLYLHENRLAGRIPPELGTLQNLRHLDAGNNHLVGTIRELIRIEGCFPALRNLYLNNNYFTGGIPAQLANLTSLEILYLSYNKMSGVIPSTVAHIPKLTYLYLDHNQFSGRIPEPFYKHPFLKEMYIEGNAFRPGVNPIGFHKVLEVSDGDFLV

SEQ ID NO: 264171 - protein, 143 aa, Glycine max
  Clone ID: PAT_MRT3847_80568C.1.pep
VLSTLLQFNWIQLCIHTISVFRSPLSMIASTMVSRSFVWVYACFQFAILILLSHVFYTILNFNAILSILLSSFSGFGIAVSMNSLIMEFIGWRTSRRVQSSIENVNRTQQQHREHVQQQGQEDEGQHHLQRQQEHHLPQHGNS

SEQ ID NO: 264172 - protein, 184 aa, Glycine max
  Clone ID: PAT_MRT3847_80569C.1.pep
LKFEIGKEVGRGHFGHTCYAKGKKGELKDQPVAIKIISKAKMTTAIAIEDVRREVKILKALSGHKHLVKFHDAFEDANNVYIVMELCEGGELLDRILSRGGKYSEEDAKVIVLQILSVVAFCHLQGVVHRDLKPENFLYTSRSEDADMKLIDFGLSDFIRPDERLNDICGSAYYVAPEVLHRSY

SEQ ID NO: 264173 - protein, 58 aa, Glycine max
  Clone ID: PAT_MRT3847_8056C.1.pep
VIVDNISAVVGALYCSLYRRLCDHALRRSLLSRLSGKVSPRFTSDSLLARIPLGNAWG

SEQ ID NO: 264174 - protein, 91 aa, Glycine max
  Clone ID: PAT_MRT3847_80570C.1.pep
LALLPSTGTLRIKKQFIVPFLHASLHPNTQIITYLMPEKYRCFILFHFLVVVESSHFAKKSNNITLNFLEGLSCSALSSQHILATAYHSPF

SEQ ID NO: 264175 - protein, 54 aa, Glycine max
  Clone ID: PAT_MRT3847_80571C.1.pep
VQDFRKANAYPSISCKGNWIITIVPLYEKFSLAELQKRTSVLKKNFYGHQELIR

SEQ ID NO: 264176 - protein, 48 aa, Glycine max
  Clone ID: PAT_MRT3847_80572C.1.pep
FTTQEACGHKQLVLLFLISNLSSLIMVIFVGADHRFMPYLVALVTFCI

SEQ ID NO: 264177 - protein, 87 aa, Glycine max
  Clone ID: PAT_MRT3847_80573C.1.pep
HAFGHAFGRLNLQVRPRLHAGGGTYCTEWSPSTTTTSQKGVSPDVRDSAKQTISTMLGLVPWDHFSDIDTVYKHPLYRLICSCHKTR

SEQ ID NO: 264178 - protein, 38 aa, Glycine max
  Clone ID: PAT_MRT3847_80574C.1.pep
HIDMTSGPLWCKKGLNFNGLLFEAPLPKVRTLFQSPIF

SEQ ID NO: 264179 - protein, 158 aa, Glycine max
  Clone ID: PAT_MRT3847_80575C.1.pep
MILVICIVVPSLRICVANDSINVLQSMSDGERLVSKGGNFELGFFSPGSSQKRYVGIWYKNIPTQTVVWVANGANPINDSSGILTLNTTGNLVLTQNGSIVWYTNNSHKQAQNPVVELLDSGNLVIRNDGESNPEAYLWQSYDYRLHALLPRMKLGRH

SEQ ID NO: 264180 - protein, 59 aa, Glycine max
  Clone ID: PAT_MRT3847_80576C.1.pep
CFSTPMVFFDHANSSVHASSLLPAMSERAHLSTYLSIRANMVDSCLCIFVIREGVRERV

SEQ ID NO: 264181 - protein, 46 aa, Glycine max
  Clone ID: PAT_MRT3847_80577C.1.pep
YKNNGIGIWCQLITFSSIRHYDWINSLIQIRTKPVEFAMACAHSYG

SEQ ID NO: 264182 - protein, 88 aa, Glycine max
  unsure (1)..(88): unsure at all Xaa locations
  Clone ID: PAT_MRT3847_80578C.1.pep
WSGSCLXAAVLGGAPAFGPVLVLXXXVKQQNFFPPPFPSFVPLRTQXLPSPRSVFVPSPGICRNNGRYFYRFGCFVWASHKNPKKNTN

SEQ ID NO: 264183 - protein, 83 aa, Glycine max
  unsure (1)..(83): unsure at all Xaa locations
  Clone ID: PAT_MRT3847_80579C.1.pep
LYFFSYYDNWNSIFTPKKXIYTLFSRSNPRFYLFIYNLYVWEYESIIHFLRNXSYKLRLEYFRVFFERILIYQKTEHLVEVSN

SEQ ID NO: 264184 - protein, 176 aa, Glycine max
  unsure (1)..(176): unsure at all Xaa locations
  Clone ID: PAT_MRT3847_8057C.1.pep
KXAXTMMPLDEEILSKVAQDMVEEWLDCVDEEDSFEEVSLXSAALNGVEGLDYMERIPLATSXGFPNVLSRKNGEXGKRRFVSGDGEEMTLNPGTXVEEAYHKLIVELEKSVPHWLAXECPKVRNFLVQIFDKPKTRCFTIXPLEVNLGSARRFXKFARFFLKKGQLSFKLEHPPP

SEQ ID NO: 264185 - protein, 84 aa, Glycine max
  Clone ID: PAT_MRT3847_80580C.1.pep
ILEQHANIRCVRSRMAICKKDVWRVECGIPSGFPLTGICNSIFNEMLIRYSYEKLLRQERLVQVPSMPRRFDASFLRWRTDDCA

SEQ ID NO: 264186 - protein, 276 aa, Glycine max
  unsure (1)..(276): unsure at all Xaa locations
  Clone ID: PAT_MRT3847_80581C.1.pep
DRVVQHPPAPYAPLLSLPSHVELRRHQHGPLSAQSQRRRDSTGNRGGRPSPSKKPPSKDXRHSKVDGRGRRISMPIICAARVFQLTRELGHKSDGQTIEWLLRQAEPSVIASPASFYSVSLGCNKRCSALFSCSAPRPQQLAPTPFILGKRIRTDEDSSKDEDGSVGPSLVGPYAPPGPGVVPAWPDFGQIWSFVAAAAAPEMVSVPQQQQQQASLFAHHHRQQQQLAIGEALAARVGNYLPGHLNLLASLSSGPGNSGRRDDEPSLIVTSLQRWR

SEQ ID NO: 264187 - protein, 97 aa, Glycine max
  Clone ID: PAT_MRT3847_80582C.1.pep
ALYSFLPNMFFSLLTHCFSLLNRPNNPRRRLRPESDESTPAPNTFRCLCANRISLPFSPIFLLLVLAIDAESVSPPFPFRLMPQSPWTKLPIVLSLF

SEQ ID NO: 264188 - protein, 47 aa, Glycine max
  Clone ID: PAT_MRT3847_80583C.1.pep
CVHNSDMNHIPLTVPFVHSKPILSLHLMHCTPNCKILFVCVYQDMVT

SEQ ID NO: 264189 - protein, 78 aa, Glycine max
  Clone ID: PAT_MRT3847_80584C.1.pep
VPEIPGCDPRVPNLLYYTALFLSLHQMAAPAYLEHHVSEPAVCHCRAATTGDILINRCSAHTQMGPHRLKPQLASPEQ

SEQ ID NO: 264190 - protein, 128 aa, Glycine max
  unsure (1)..(128): unsure at all Xaa locations
  Clone ID: PAT_MRT3847_80585C.1.pep
NGPRVTFIYHPGLAGNXHTKSGVDGEMEPFLGEEEFDFLVWFMETVQHADFVVLKMNAGEAEIKFLSDIFENGAICSVDELFLSCSESGNGESETMSSRERCMDIYKGLRSNGVYVHQWWKAKLHQGA

SEQ ID NO: 264191 - protein, 67 aa, Glycine max
  Clone ID: PAT_MRT3847_80586C.1.pep
KQTQLTITNFRLGVYKSQTHILDLQGFIFYQVGVLNNPFIFPWVLRIKLIMQNNHFLKRLFLQNKIQ

SEQ ID NO: 264192 - protein, 88 aa, Glycine max
  unsure (1)..(88): unsure at all Xaa locations
  Clone ID: PAT_MRT3847_80587C.1.pep
FGSSARALPERIHLPSLEQNGERGRGNRGPRQPSFRDYRXRSRAELSNICDGMLKLLDTRLVPSAASGDSKVFYLKMKGDYHRYLAEF

SEQ ID NO: 264193 - protein, 47 aa, Glycine max
  Clone ID: PAT_MRT3847_80588C.1.pep
LDQFYTHTLTSYAHRSIQYILLRRFSNRCCSTYRCLILCHIVYIHFL

SEQ ID NO: 264194 - protein, 125 aa, Glycine max
  Clone ID: PAT_MRT3847_80589C.1.pep
ATSASLTTALLFLAPCHAPSPALFQAPLVAVTSSRAPQPRARLLDLPLTGHATQIRSGFSDVRRSHCHPPTGVHTRLSVGLTCIKSPMCCVRMVPLGATIRIVLLHPLLSVNAYVNWHHGFVYAA

SEQ ID NO: 264195 - protein, 87 aa, Glycine max
  unsure (1)..(87): unsure at all Xaa locations
  Clone ID: PAT_MRT3847_8058C.1.pep
MGGLANAVQTILANPMIRIFSGSRENHIGVAAYHMKGNVGRKVTSMAEEKPPRSAATPVAPXPAEPKPQDXSTSSAKEITKLSDVLA

SEQ ID NO: 264196 - protein, 167 aa, Glycine max
  unsure (1)..(167): unsure at all Xaa locations
  Clone ID: PAT_MRT3847_80590C.1.pep
SNRRRQKPKRYSEKEFVEALSDNEADYDSDDDIVGEAVYDEEYLQKRKQRKKASSSSGSEGDEEYHWDEDNVEDEEDDDEDSLSASEEXDKPRKFKQLAGRTRKETKLRSVGEIQSGLRRSKRAKTKSRINYRXYEISDSETEFIKSDKSNASDDHSDPTENGEYMM

SEQ ID NO: 264197 - protein, 46 aa, Glycine max
  Clone ID: PAT_MRT3847_80591C.1.pep
YRHPKPHGCALLTEQGDEQPLTTVALLLKQSHNSHLYLDRPLPINQ

SEQ ID NO: 264198 - protein, 388 aa, Glycine max
  unsure (1)..(388): unsure at all Xaa locations
  Clone ID: PAT_MRT3847_80592C.1.pep
MLCVNTAFTSFLPRKSTCVFSSKSTTPISCTLQGTVAEPKSTAAGEPLLLNAVRGIDVERPPVWLMRQAGRYMKSYQTICEKYPSFRERSENVDLVVEISLQPWHVFKPDGVILFSDILTPLSGMNIPFDIVKGKGPVIFDPIHTAAQVDQVREFIPEESVPYVGEALTILRKEVDNKAAVLAFVGAPFTLASYXVLHAGPSKNFSKIKRLAFSESNILHSLLQKFTTSMARYIQYQADNGAQAVQIFDSWATELSPVDFEEFSLPYLKQIIDTVKKSHPNLPLILYASGSGGLLERLALTGVDVVSLDWTVDMADGRRRLGPNIAVQGNVDPGVLFGSKEFITDRITDTVRKAGRGKHILNLGHGIKVGTPEENVAHFFEVAKSIRY

SEQ ID NO: 264199 - protein, 218 aa, Glycine max
  Clone ID: PAT_MRT3847_80593C.1.pep
MSLMPNSRVPLLLFISSIFFTSFPGLTFGAIVSLRSIEIFKTHEWLKATTTVYFLCKGENETVLPDVKKPHAIYAFNGQESWQPLSSFSSKKCKRCGFYEEDSITSDDAFDEWEFCPSDFAAPNGEYIRFKEKEFNATFLCPECLSLAGVDEHDDGKGMHIAVVVLLSILVSVTLILGVVGAYKFWRKKLREQDQARLLKLFEDDDDIGDELGLGSAI

SEQ ID NO: 264200 - protein, 187 aa, Glycine max
  Clone ID: PAT_MRT3847_80594C.1.pep
MGIDLKAGGKSKKTKRTAPKSNDIYLKLLVKLYRFLVRRTGSKFNAVILKRLFMSKVNKPPLSLSRLIKYTKGKEDKIAVVVGNITDDIRVYEVPALKVTALRFTETARARIEKAGGECLTFDQLALRAPLGQNTVLLRGPKNAREAVKHFGPAPGVPHSHTKPYVRAKGRKFERARGRRNSRGFRV

SEQ ID NO: 264201 - protein, 49 aa, Glycine max
  Clone ID: PAT_MRT3847_80595C.1.pep
NLNLLVSAVDVNGDVMRNFKGTHSLLTPSRLTMSSCAPRQVYSKTVSSG

SEQ ID NO: 264202 - protein, 90 aa, Glycine max
  unsure (1)..(90): unsure at all Xaa locations
  Clone ID: PAT_MRT3847_80596C.1.pep
PTLYVSLQGVCQCLKLALVLLGLSFRLVFDCILPHSSLLILELSVGSFSIFVFLDXLECLHILFIIEEGMLSVLGLCCRQXIFSPFFGFF

SEQ ID NO: 264203 - protein, 92 aa, Glycine max
  Clone ID: PAT_MRT3847_80597C.1.pep
TILVLHQSLPFLESEAHSSFFFFSSSLYVFEEVYLMTDFMKRKGTPQELHNNSKAPRGKNKTDLNSAGRVGDTRDDGSLHVFNSSDLRGLTF

SEQ ID NO: 264204 - protein, 108 aa, Glycine max
  Clone ID: PAT_MRT3847_80598C.1.pep
SYIACQQKVYTNLEGNKSHVVNPAWAMLALIEAGQGQRDPTPLHRAAKVLINSQMENGEFPQQEITGVFNKHCTISYSAYRNIFPIWALGEYRSRVLLCPSKGSTAIA

SEQ ID NO: 264205 - protein, 48 aa, Glycine max
  Clone ID: PAT_MRT3847_80599C.1.pep
NSISICFKHIIRPGSQSYLATDSCLPQTWTALCTYFQQEIGKKTRTRA

SEQ ID NO: 264206 - protein, 168 aa, Glycine max
  unsure (1)..(168): unsure at all Xaa locations
  Clone ID: PAT_MRT3847_8059C.1.pep
STLPRTRWNFVRFIMKKRDMLSXQVGINPYSMEGTGSANRLLSKGNDILGCDYASFDGLITKQVMSKMAEMINSLCGGDEKLXRERTHLLLACLSRMAICKKDVWRDECGIPSGFPLTDFCYSIFNEMXLISYFYKKKLLQAKSQSLFLHLLKRMIFWWNGDENKFLS

SEQ ID NO: 264207 - protein, 81 aa, Glycine max
  Clone ID: PAT_MRT3847_805C.1.pep
SHVTLCAQCTLSTNSSLLPLNAPKSAAPPVDLPPVPWSTLAVERSYSCFLTGDVSVLRRTIRLNCPTTRRAYATSSRTSIV

SEQ ID NO: 264208 - protein, 68 aa, Glycine max
  Clone ID: PAT_MRT3847_80600C.1.pep
GVSDMNTRAQGIDARWLYTVIASSNDHGVTCRYSTQITHDVTYLITGIVDIVEYMDLVATYKDIYVFI

SEQ ID NO: 264209 - protein, 144 aa, Glycine max
  unsure (1)..(144): unsure at all Xaa locations
  Clone ID: PAT_MRT3847_80601C.1.pep
PPPGPPPPPPHTPPPPHPPXTPPPRPPXPHXPAPAQPTPPTPPPPPPPPPXPPPPPPTTPPPPPPPPPPTHTPPPPHTPHPPLTQPPPLPQSHPQPTIAFHNPPPPTVSDGPIMVTPHSKMLVSSPNPAETPSTGFSQSSLSCF

SEQ ID NO: 264210 - protein, 79 aa, Glycine max
  unsure (1)..(79): unsure at all Xaa locations
  Clone ID: PAT_MRT3847_80602C.1.pep
LLRYRALHNLTFPAINPTSTANLYRXTFHPKVFLQHQQNXANKSKGVHNLQWTAVYKGAPGGTPVPSAAWMFQRRGPDL

SEQ ID NO: 264211 - protein, 67 aa, Glycine max
  Clone ID: PAT_MRT3847_80603C.1.pep
TSKAVTLGGLINSPPLPLKIQKLLSLSPSGDPINMLPNLIAPIYKNVPPQVNVFFIPPLRNNPFVFV

SEQ ID NO: 264212 - protein, 30 aa, Glycine max
  Clone ID: PAT_MRT3847_80604C.1.pep
HKSLKLQLFMMQRPVYHFAHLLIATTKPIY

SEQ ID NO: 264213 - protein, 82 aa, Glycine max
  Clone ID: PAT_MRT3847_80605C.1.pep
KDSSKAPPPGRNIHLLLRTVEESPNISEGKQRALNTNRRVLDHSLFIIGNDAVQGILDLRYVSGPDNICAFQMRGMFRIMCH

SEQ ID NO: 264214 - protein, 75 aa, Glycine max
  Clone ID: PAT_MRT3847_80606C.1.pep
ALPRIVVQQHSSQSQQQHRAKRHPSMNPLSPLFFKPKNSFLLAGGFSVGYPGGGWFPWVSGFCILENQGMCVCIE

SEQ ID NO: 264215 - protein, 57 aa, Glycine max
  Clone ID: PAT_MRT3847_80607C.1.pep
FFFRRSEKRGRALNLKVSFNTHFQPYEKIVRKEYHLVTFDLPYFAFFYNQKLFFYKG

SEQ ID NO: 264216 - protein, 58 aa, Glycine max
  Clone ID: PAT_MRT3847_80608C.1.pep
LMLAQLITVFDIYFHAEPAHRMYQTGPASPRDPPSLSGKARPLSGGCCPATGPSTPCL

SEQ ID NO: 264217 - protein, 63 aa, Glycine max
  unsure (1)..(63): unsure at all Xaa locations
  Clone ID: PAT_MRT3847_80609C.1.pep
VLRTQSVGIVFQAKCFESGETVAMKNVLQDRRYKNRXLQLMGVLDDPNVMSLEALIAFNYKYR

SEQ ID NO: 264218 - protein, 178 aa, Glycine max
  unsure (1)..(178): unsure at all Xaa locations
  Clone ID: PAT_MRT3847_8060C.1.pep
PPPPPTPPPPHPPPPPPPPPPPPPPPPPPPPPPPPPHPPTPTPPXHPPPPPPNHTTPPPPPPPPPPPPPQPPPPPPQTTPHPPPPPPXPTPQHPPPPPPPPPPPPPPPPPPPTPPPPPHPTPPHSPPPPPPIATPPQPPRVRHNTQSHPERANRAGGGGDKEIGKGRRKGGGTGEGGV

SEQ ID NO: 264219 - protein, 276 aa, Glycine max
  Clone ID: PAT_MRT3847_80610C.1.pep
MAKCLALSLIIAGLFIGLVSPQWNILNPKWGRSDEVVNRPEWNILNQRLGKGVVVGDNLKNYCESWRINVELNNIRGFSVVPQECVDHVKKYMTSSQYKADSVRAVEEIRLYMSGFCTLKDDGKDSWIFDIDETLLSTIPYYKKHGFGGEKLNATSLEEWMEKSKAPALDHTLELFHEIKNKGFKIFLISSRKENLRSPTVDNLVSVGYHGWNRLTLRGFDDELMDVKKYHSKVRQQLVDEGYRIWGIVGDQWSTFDGLPMAKRTFKLPNSIYYKA

SEQ ID NO: 264220 - protein, 50 aa, Glycine max
  Clone ID: PAT_MRT3847_80611C.1.pep
RFPPGKVTGQKSDILIQMPNGPLPRSDAAQAVKKMKIEKLDDDEDGEKEE

SEQ ID NO: 264221 - protein, 61 aa, Glycine max
  Clone ID: PAT_MRT3847_80612C.1.pep
GKDGTAPPHRCYCMTLSVILKAENPNPFFLNLRLSNETGPNTRKNILLLTKVPVLFKILFY

SEQ ID NO: 264222 - protein, 355 aa, Glycine max
  Clone ID: PAT_MRT3847_80613C.1.pep
EFPGRPRVRLFLNILERPVPSEGQPVDPDLRKSWGWWKVKKWTVHILNRLYTRFGDLKLQNPENRAFAQMFQKHYAGKILECHLNLLNVIRVGGYLPDRVINLILQYLSNSISRNSMYTLLQPRLDALLFEIVFPLMCFNDNDQKLWDEDPHEYVRKGYDIIEDLYSPRTASMDFVSELVRKRGKENLQKFIQFIVEIFRRYDEASAEYKPYRQKDGALLAIGALCDKLKQTEPYKSELEHMLVQHVFPEFSCPVGHLRAKAAWVAGQYAHINFSDQNNFRSALQCVVSRMQDSELPVRVDSVFALRSFIEACKDLNEIRPILPQLLDEFFKLMNEVENEILLCTSGTIVDSLGE

SEQ ID NO: 264223 - protein, 136 aa, Glycine max
  Clone ID: PAT_MRT3847_80614C.1.pep
MAGMSDMQNRQAGPLPPGQFRGAPLTRPRSDPVDREKTCPLLLRVFTKTGGHHSDEEFATRGKEPKDEVQIYTWKDATLRELTDLVKEGALAARKRDAKLSFAFAYPDKRGRYVVRPVGMAFSYGNNRRLDDAKTL

SEQ ID NO: 264224 - protein, 88 aa, Glycine max
  Clone ID: PAT_MRT3847_80615C.1.pep
SWGYNCPARVPNQKKIGLELHTIYYPEAWTVATVVPNEKENSHFSLPAHCPLCLPQTRGAGRPGALSNTRREAKGKSRSRGGSIFTNE

SEQ ID NO: 264225 - protein, 64 aa, Glycine max
  unsure (1)..(64): unsure at all Xaa locations
  Clone ID: PAT_MRT3847_80616C.1.pep
YSPTLSGSSEHTNARGKLGKKKKKQKNKKSCTREFFENXLEHIYLILHRIEDSTRFNHPSPPPL

SEQ ID NO: 264226 - protein, 112 aa, Glycine max
  unsure (1)..(112): unsure at all Xaa locations
  Clone ID: PAT_MRT3847_80617C.1.pep
MRDIYHSYLYKFGIDNTVLSNIPYHEIHGYGVDELNGSLSEERVSHGDAAALPKTLKSYNTLLSHGINIVNLVRRYLDRXSFHRXNLHKAGIHTSEQLILKDPHLITPNALS

SEQ ID NO: 264227 - protein, 134 aa, Glycine max
  Clone ID: PAT_MRT3847_80618C.1.pep
MISLGLSHLLQILTCILLLTRSFSKDDRKIYIVYMGDNPKGMESTELLHTSMVQSVLGRKIAADALLHSYKSFNGFVARLTKEEAARMKGIDGVVFIIPNRIHSLQTSRAWDFLGFPENVQRTNIESNHSRWSN

SEQ ID NO: 264228 - protein, 51 aa, Glycine max
  Clone ID: PAT_MRT3847_80619C.1.pep
VIYKSLQSKVFISLNIAVPSILSSIVVYTFGFLSQLRTSYRSLVVSQKQLR

SEQ ID NO: 264229 - protein, 114 aa, Glycine max
  unsure (1)..(114): unsure at all Xaa locations
  Clone ID: PAT_MRT3847_8061C.1.pep
PRDRFFFVEEAYNKLIVELEKSVPTLVGIEXPKDDKLSRLKIFAKPKTXRCFTILPMEFNLVVRQKLLNFVRLHYKKRDTLMFEVGINPYFMEWTGLANILLSKGKHILRCYYA

SEQ ID NO: 264230 - protein, 318 aa, Glycine max
  Clone ID: PAT_MRT3847_80620C.1.pep
RLEQSPNIISENILKCLSNILLRMSALKNPGSTCDMAPLWDLKPHNRDEGTEFWDPYGICLEFGKRDIGPYRQLCAIDAKSFNPKRTANTLFLLHRLKLLFRKVASVNLENLNHQEKLAFWINIYNSCMMNAFIENGIPENPQMAVALMRKATINVGGHVLSATTIEHFILRLPYHWKFTFSKGTKNHQMTARSIYGLELSEPLVTFALSSGTWSSPAVFIIYRASQVENELEMAKKEYLQAAVGISISKFLIPKLLDWYLLDFAKDLESLLDWICLQLPSDVGKEAIKFLEKRKTEPLSQYVQIMPYEFNFRYLLCT

SEQ ID NO: 264231 - protein, 166 aa, Glycine max
  Clone ID: PAT_MRT3847_80621C.1.pep
TGDQSPVSFTNSILNVFSRKKNETKHTFHTLPNSNEEKQHKSSSSSAAAKTTKDSRMHETKSGMPPPKVLHAYPGLSSPMDYALKETSPFLGGGQVVGGRVIRGYRPSSSYDLVEPMQYLFVRVVRARLAGSIDPYVEVKVGNFKGITKHYENTQDPDPAQVFAFA

SEQ ID NO: 264232 - protein, 445 aa, Glycine max
  Clone ID: PAT_MRT3847_80622C.1.pep
MHESKSGLPPPKVFHAYPGSFSPMDYALKETSPFLGGGQVVGGRVIHGYRPSSSYDLVEPMQYLFVRVVRARLTGSIDPYVEVKVGNFKGITKHYEKTQDPEWNQVFAFARENQQSTLLEVAVKDKNMLLDEVIGTVKFDLHDVPRRVPPNSPLAPEWYRIDKGKDKKKGELMLAVWFGTQADEAFPDAWHSDALSSGDISSSAYAHMRSKVYHSPRLWYVRVKVIEAQDLHVSENSQIHDAYVKLQIGNQILKTRPVQSRTMILRWDQELMFVAAEPFEEPLIVSVENRVGPNKDETIGAVIIPVDQTDKRADDRLIHTRWYHLEESISSVMDGEQGKKEKDKFFSRIHLSVCLDGGYHVFDGSTYYSSDLRPTSKQLWKKPIGLLEIGILSVDGLHPTKTRDGRGTTDTYCVAKYGHKWVRTRTVSVSLSPKYNEQYTWDVYD

SEQ ID NO: 264233 - protein, 95 aa, Glycine max
  Clone ID: PAT_MRT3847_80623C.1.pep
ESIERSVCVRACVCSVFFCINQPKYNRQLRHFNPTKIPIQLLLEREKIRILTEKNSEKTSNILNCATTNVGLVTQRKKGNKMHLSLTAVYETIIL

SEQ ID NO: 264234 - protein, 82 aa, Glycine max
  Clone ID: PAT_MRT3847_80624C.1.pep
DDSLLYISLISRMKEKDHFVSKVRKTIPLSPNNKTPIMAKKKDTHFHLKGYFVLPLKGHGKLQMWTTKFCSHNMQQRKHRFL

SEQ ID NO: 264235 - protein, 71 aa, Glycine max
  Clone ID: PAT_MRT3847_80625C.1.pep
MYAERCGARYARVTAPCTSCFVSAILKGETLYWDKNLQDMVMVICKIRLELGWSILLSLITLQNRTGNYLA

SEQ ID NO: 264236 - protein, 82 aa, Glycine max
  Clone ID: PAT_MRT3847_80626C.1.pep
FFSFFFFFFFFFFFFFFFFFQKFKKLGGNGLQKTLGGAPFDLSLTVFLLSLATTVPILCPILSWGGVSSVLGGACPNIFFSK

SEQ ID NO: 264237 - protein, 81 aa, Glycine max
  Clone ID: PAT_MRT3847_80627C.1.pep
FSKHSPLPKKKKPKKPKLPKPGKQTNSQNPNNQTSKLSHGQDPSYPKLQLYPKDMGFYFLTHKDIFTSKTHSHYPLPPTFI

SEQ ID NO: 264238 - protein, 78 aa, Glycine max
  unsure (1)..(78): unsure at all Xaa locations
  Clone ID: PAT_MRT3847_80628C.1.pep
LXSLNSXKFNXXXLPPLKPXSPIQQGAAXCFRLRFWLXFLLVILMDAASEAAGGGGGSTGRGIXGCXXTPNRYESQKR

SEQ ID NO: 264239 - protein, 169 aa, Glycine max
  unsure (1)..(169): unsure at all Xaa locations
  Clone ID: PAT_MRT3847_80629C.1.pep
MGSTAEVDESKLTSSEVEPADLEDDTLQLPAQEEEDLNRIKEXSRRRREAIMEKYKKQHQQVEAVVGNEGNDKDADIPNDISEACDGKTDDADYVEPSFAVGKSPENVNVASKKISPAGGLGEGTPKSERSEDKFCDDIFGETPTGVRKSGKGDGLLIERVGLHDNWDD

SEQ ID NO: 264240 - protein, 84 aa, Glycine max
  unsure (1)..(84): unsure at all Xaa locations
  Clone ID: PAT_MRT3847_8062C.1.pep
QDNYASVAAKPGTASGTKGYVGIHNLGFPDSLRKPELYRAMERHRFEHATEVQHXECIPQAIIGMAASCQGKCAIGNTAGLVLS

SEQ ID NO: 264241 - protein, 41 aa, Glycine max
  unsure (1)..(41): unsure at all Xaa locations
  Clone ID: PAT_MRT3847_80630C.1.pep
CTKFFVDYLLFSDCLISALIXKKKKKKKKKKKKKKKKKKKN

SEQ ID NO: 264242 - protein, 360 aa, Glycine max
  unsure (1)..(360): unsure at all Xaa locations
  Clone ID: PAT_MRT3847_80631C.1.pep
DILHGKQSVREKVEVKAIGTTTEGGGGGGPGKRWGHTCNAVKGGRLVYVFGGYGKDNCQTNQVHVFDTVKQTWSQPALKGSPPTPRDSHTSTAVGDNLFVFGGTDGMNPLKDLHILDTSLQTWVSPTIRGEGPPAREGHSAAVVGKRLFIFGGCGKSADNNNELYYNDLYILNAETFVWKCATTSGTPPXSPRDSHSCSSWRNKIIVIGGEDGHDYYLSDVHILDTDTLIWRELSTSGQLLPPRAGHSTVSFGKNLFVFGGFTDAQNLYNDLYMLDIDTGVWTNVTTATNGPSARFSVAGDCLDPFRSGVLIFIGGCNKSLEALDDMYYLYTGSAKCHLFATINFSNVTYGSDILLDYYI

SEQ ID NO: 264243 - protein, 52 aa, Glycine max
  Clone ID: PAT_MRT3847_80632C.1.pep
RELSRCLSLSVSFKILMKLSRVNGTNVSKQYSPPFAYRCNLVMFQYNVVHSW

SEQ ID NO: 264244 - protein, 45 aa, Glycine max
  Clone ID: PAT_MRT3847_80633C.1.pep
GEHQIAVVALCHDDSIVLSMMLLGSASWISSGVNDHIHHITFNAV

SEQ ID NO: 264245 - protein, 66 aa, Glycine max
  Clone ID: PAT_MRT3847_80634C.1.pep
VIVICERSFTWSLRMVTGTSNTSHIFFRIMATVPPRQHNVDDTIAWSHSPNGRFSLSFAYNLDHSI

SEQ ID NO: 264246 - protein, 74 aa, Glycine max
  Clone ID: PAT_MRT3847_80635C.1.pep
LIFMKMQMSCLTCLYSMNIHSSEALDFPTRCFKVKAVLYLPVFPSIKKSSVCTGKMLVTNELMIAWIPSSTLRQ

SEQ ID NO: 264247 - protein, 101 aa, Glycine max
  Clone ID: PAT_MRT3847_80636C.1.pep
HTRVKNRTPGEPRFKTPWKKRFPSGGIGENLKLLLPPRGPIWAPPRISGPSQSQAMGFESVESHRLKRGTRGFVALGPPGGFHGTEKKEFGLGHVFFVLKT

SEQ ID NO: 264248 - protein, 253 aa, Glycine max
  Clone ID: PAT_MRT3847_80637C.1.pep
ADTYLRGVVFLPERVVPVTAESDVAPQVRMTERTEIPIPVPVLNPETQIHSSVPSSGQSNKQPFEAELQVPVSVDLVLPTELYSGLSVSLGNQSAPVVTPMSDLSKIDSSISTGGIMPKGMSKPGPESQPASILSGFEGDKIIKQDGKLHEVDASRQAKESSADGGAIKDYQITSEPINSVPTVENTEKELPTGQQSMPSVYELNKLIADEPKHSVIEINQIPVSAERESMPPELKNNTVDNFMQKQGSPETG

SEQ ID NO: 264249 - protein, 255 aa, Glycine max
  Clone ID: PAT_MRT3847_80638C.1.pep
ETDSGERNRLIVLIIIIAVGGCLLALCCCFYIFSLLRWRRRIKAAVSGEKKKSPRTSSGTSQSRSSTDTNGPKLVMFNTKITLAETIEATRQFDEENVLSRTRHGLVFKACYNDGMVFSIRKLQDGSLDENMFRKEAESLGKIRHRNLTVLRGYYAGSPDVRLLVYDYMPNGNLATLLQEASHLDGHVLNWPMRHLIALGIARGIAFLHQSSLIHGDIKPQNVLFDADFEAHLSDFGLDKLTVTNNKHTMQLKPL

SEQ ID NO: 264250 - protein, 163 aa, Glycine max
  Clone ID: PAT_MRT3847_80639C.1.pep
NRQNDEIMELLWQNGQVVMQSQNQRPFRKPPQPPEANGGDGAISAREIRSSEAENYNNSQHLFMQEDEMAAWLHYPIHEDPPPFDHHDFGADIFYPPPNATASQNRGSAAVQSSFRTTELWHPAPRPPIPPPRRPEHAPSRIHNFAHFTKHGNASSSSKAAAD

SEQ ID NO: 264251 - protein, 188 aa, Glycine max
  unsure (1)..(188): unsure at all Xaa locations
  Clone ID: PAT_MRT3847_8063C.1.pep
SDFAYNKLIVELEKSVPTLVGIECPKDEKLPRLKIFDRPKTRCFTIFPMEFNLVVRQKFLNFVRLIINKTDKLSCQVXGINPYSMGWTGLANILLSKGNDXILRCDYASYDGLITKQVMIKMAQMINSLCGGDEKIVRVKTHLLLGCLSKXASFKERCSREVHWGIPSGFPLTVITHSHFNEISFKFF

SEQ ID NO: 264252 - protein, 43 aa, Glycine max
  Clone ID: PAT_MRT3847_80640C.1.pep
LDLNYKLKKIELLALLLKLADSNIIWLSMLIVYQIHANDSLPL

SEQ ID NO: 264253 - protein, 53 aa, Glycine max
  unsure (1)..(53): unsure at all Xaa locations
  Clone ID: PAT_MRT3847_80641C.1.pep
VETLERGFLINVFSERKCPGMLAGILDSFEELXLDVLDARVSCEYTFQLEAVT

SEQ ID NO: 264254 - protein, 150 aa, Glycine max
  Clone ID: PAT_MRT3847_80642C.1.pep
MEPEPHVNAVRDNYSLISTSTSELEAVYAVVNETSDSCLEDTKTITMETNAERDDDDSWETEEPSGVVSASVPSSTSDGPASFRSLNGKSDEGGNSCGSLSRIEGLGRAARRQLATVLNEFWGQLYDLHGQVTQEAKAGKIDLLLGVGVD

SEQ ID NO: 264255 - protein, 85 aa, Glycine max
  Clone ID: PAT_MRT3847_80643C.1.pep
PPDFLSMHLLSEKPVLSLKKEISYMGVVWALCTLTLITTLRAPVCEPIPIVLSPLKQILWPLFIKCETGETLGVPDLIGWWPIAL

SEQ ID NO: 264256 - protein, 162 aa, Glycine max
  Clone ID: PAT_MRT3847_80644C.1.pep
NQECSYDVVLSTPEFQSPSFQVINKTIQQCCFPLPPQHTSVLLFLSTSNLEIPSTNYTHIMSVVTAQPQTSPTAEVRLISTELQVQECYKLYVEPTRGCRKLTMEDEYMVSPKFPFNFKLPFFLSICEVTCDSYIEEELERLPISSGLARYLKPFILESVLV

SEQ ID NO: 264257 - protein, 538 aa, Glycine max
  unsure (1)..(538): unsure at all Xaa locations
  Clone ID: PAT_MRT3847_80645C.1.pep
MTTSFSDLLSSPTTHHNLGVFERPHHKSSSSDQTGSSGGVPKFKSTPPPSLPLSHHLPPIFSPSSYFNXIIPHGLSLAELLDSPVLLNSSNVLPSPTTGSFAGQGFNWKSSYGESQQHVKEEDKSFSSFSFQTQTHPPLPSSNGFQSSTGVVQTGWSFPEIAKQDGFASRMSMSMVKTETTSAMQSFNSENNNHRNGFQSDHKNYQPQQVQTLSRRSDDGYNWRKYGQKQVKGSENPRSYYKCTYPIKWIQXALDGQITEIVYKGTHNHPKPQAAKRNSLSASSLAIPHSNHGGINELPHQMDSVATPENSSISMEDDDFDHTKSGGDEFDNDEPDAKRWRIEGENEGMPAIESRTVREPRVVFQTTSDIDILDDGYRWRKYGQKVVKGNPNPRSYYKCTFPGCPVRNHVERASQDLRAVITTYEGKHNHDVPAARGSGNNSMNRSLPITNTTNNTSAATSLYTNNNSLQSLRPPAAPERTSSHFNPNMQQSSSGSFGFSGFGNPLMGSYTNQQSDNVFITRAKKEPGDDSFLDSFLC

SEQ ID NO: 264258 - protein, 237 aa, Glycine max
  unsure (1)..(237): unsure at all Xaa locations
  Clone ID: PAT_MRT3847_80646C.1.pep
MSMVKTETTSAMQSLTPENNNHRNGFQSDHKNYQPQQVQTLSRRSDDGYNWRKYGQKQVKGSENPRSYYKCTYPNCPTKKKVEKSLDGQITEIVYKGTHNHPKPQAAKRNSLSASSSLAIPHSNHGSNELPHHQMDSVATPENSSISMDDDDFDHTKSGGDEFDNDEPDAKRWRIEGENXGISAVGSRTVRXPRVVVQTTSDIDILDDGYRXWRKYGQKXVVRGNPNPRSYYKCTFP

SEQ ID NO: 264259 - protein, 68 aa, Glycine max
  Clone ID: PAT_MRT3847_80647C.1.pep
PTFVGFINSPPLFFFSPKVCFFFLCLGLFNPPPPLVFAIFFYNCSPLGFVITLYFCFFLFLKYYLWVF

SEQ ID NO: 264260 - protein, 66 aa, Glycine max
  Clone ID: PAT_MRT3847_80648C.1.pep
LGKNKGMPFEQKPKPYVGFSGEDFPPFKSKFPPQDVSQLFGIIAFLSSIKILNFFNQGERVLNTLI

SEQ ID NO: 264261 - protein, 79 aa, Glycine max
  unsure (1)..(79): unsure at all Xaa locations
  Clone ID: PAT_MRT3847_80649C.1.pep
MGLLVLLLGSLLGLSASSRISTHRSRLDLDLTKSTTQXTGSSLCQLWKSEHGRVYDNHDDEGKRLEMSKNNLSYTRDMI

SEQ ID NO: 264262 - protein, 156 aa, Glycine max
  unsure (1)..(156): unsure at all Xaa locations
  Clone ID: PAT_MRT3847_8064C.1.pep
HASGLQGAGKAFPNKIVXDDKLVLXNTQEFFDGNFSVDSWLPIFVNCLYPVSQLPSEAVVANVTCGSGRGGLPTTAWIMSAVTNRSLYINKWIRTVLGIGKKIVFFTRVDPFPVALLGVLFGVKNDNFGSNAPYXLFCRQFLRNCMSLNYYVDECP

SEQ ID NO: 264263 - protein, 89 aa, Glycine max
  Clone ID: PAT_MRT3847_80650C.1.pep
TGAADLGYPLKNWGGLGEEKTLSGVSNLLTLLTQKLELFMLAPSNGYKNLLTIDTTVKNLWGHKLLFDPKGAQDKLGCTLVPTLARYQN

SEQ ID NO: 264264 - protein, 47 aa, Glycine max
  Clone ID: PAT_MRT3847_80651C.1.pep
FIFFFFFFFFFFFLSLKISRGLDPIWNNPFLHFQQLIYYNNKNLNPI

SEQ ID NO: 264265 - protein, 66 aa, Glycine max
  Clone ID: PAT_MRT3847_80652C.1.pep
SSLMCFLSISLMTLYNLRSELSHLSRPSILCLIESTEKIIFFSETRIKNQPLHVDTSAWTSFSYCT

SEQ ID NO: 264266 - protein, 63 aa, Glycine max
  Clone ID: PAT_MRT3847_80653C.1.pep
GTDCIINSYSLPLRLTISIYLQSVLCTVHKKTRILCWSLTDAPGQQSTMQPLHRLESQGSVYS

SEQ ID NO: 264267 - protein, 71 aa, Glycine max
  Clone ID: PAT_MRT3847_80654C.1.pep
AKKGWAGGQKFTTSHFYFFIIHTFLLGPKMPLFNNIFFLGGTLRGLIGNPQNGLVFKGMAKRVSSRINFYF

SEQ ID NO: 264268 - protein, 133 aa, Glycine max
  Clone ID: PAT_MRT3847_80655C.1.pep
MHQAIPYRTSILTGTCDMAHAGGIKEFNLANPSNVAAMVSESAVVIIGKRGCCMCHVVKRLLQGLGVNPPVYEVDEDHEAAVARHLFPQGAETVQFPAVFLAGKLFGGLERVMATHISGELIPILKDAGALWL

SEQ ID NO: 264269 - protein, 49 aa, Glycine max
  Clone ID: PAT_MRT3847_80656C.1.pep
PRVPEIRAGWANPLNYGSLLASIQETMISQGMGDPAVPLGLEARGPTLQ

SEQ ID NO: 264270 - protein, 177 aa, Glycine max
  Clone ID: PAT_MRT3847_80657C.1.pep
MSWCYCAKPMTLQLPLQPRASSSFHSHVGGVTVTSSTLSLRLSSTLVFTHNLHFQPKLKRASTTVRCSSALTPQLKSTLDQVIASNKVVVFMKGTKDFPQCGFSNTVVQILKSLNVPFETINVLENDLLRQGLKEYSSWPTFPQVYIEGEFFGGCDITVDAYQKGELQELLEKAMLS

SEQ ID NO: 264271 - protein, 189 aa, Glycine max
  unsure (1)..(189): unsure at all Xaa locations
  Clone ID: PAT_MRT3847_80658C.1.pep
VGALDGGIPIAMPTVLSVTMAIGSHKLSQQGAITKRMTAIEEMAGMDVLCSDKTGTLTLNKLTVDKNLVEVFAKGVDKDHVILLAARAARTENQDAIDAAXVGMLADPKEARAGIREVHFLPFNPVDKRTALTYIDANGNWHRASKGAPEQIMSLCNLRDDAKKKVHAIIDKFAERGLRSLAVARQEVN

SEQ ID NO: 264272 - protein, 91 aa, Glycine max
  Clone ID: PAT_MRT3847_80659C.1.pep
PRVRVYSMKKGQIVRVDKEKYLNSINYLSVGHPPFYKGLDYIYQDRGEVLDIRNFETGEYALIAWVGIPTPPAWLPTYMLIKSDKLDYERI

SEQ ID NO: 264273 - protein, 151 aa, Glycine max
  unsure (1)..(151): unsure at all Xaa locations
  Clone ID: PAT_MRT3847_8065C.1.pep
FRKIFDKPKTRXFTILPMEFNLVVRQKFLNFVRFIIIKRDKLSCQVGINPYSMEWTGLANILLSKGNDILCCDYASFDGLITKHVMSKMAEMINCLCGGDEKLMRERTHLLLACCSRMAICNKDVWRVECGIPSGFLLTSFCNNLFNEMLI

SEQ ID NO: 264274 - protein, 52 aa, Glycine max
  Clone ID: PAT_MRT3847_80660C.1.pep
FCSCHSFICSSSLSDLSFAYEICSASAHSEGIASDLLQALATGTSYGHCKHK

SEQ ID NO: 264275 - protein, 94 aa, Glycine max
  Clone ID: PAT_MRT3847_80661C.1.pep
SHHLTVFFFTIGTKSINKIKVQGPKLVKKLLKTKSENSKKLRDCTSVKARGCHAQVRRMKGRGVFCSLMLILDTILKFPKWPHYHHSVRLFLGF

SEQ ID NO: 264276 - protein, 129 aa, Glycine max
  unsure (1)..(129): unsure at all Xaa locations
  Clone ID: PAT_MRT3847_80662C.1.pep
ESLRKFRNSEEERLKSENQHMQGXIKKDLEMLESEKESFRDSMKQEKHLLSEKVKNEKAQMLQDFELKMRNLENEIQKRQEEMEKDLQERERNFQEEMQRELDNINNLKGVTEKEWEEVKAEGIRLKNE

SEQ ID NO: 264277 - protein, 90 aa, Glycine max
  Clone ID: PAT_MRT3847_80663C.1.pep
PRGQIKVWTCPCCLSHTLGPLHHNLQFFRSQTWSRRSSTSTSCMIRLNTSAPNLRRELTRLIQFSKVRLMITSIINNTYFFYNWIASLQH

SEQ ID NO: 264278 - protein, 57 aa, Glycine max
  Clone ID: PAT_MRT3847_80664C.1.pep
HFFIFICKNQKQYQEMTYIKINFNLLKKFILFYFVFFSLQQVIIFKHSCLIKRGAGT

SEQ ID NO: 264279 - protein, 79 aa, Glycine max
  Clone ID: PAT_MRT3847_80665C.1.pep
FYFLFIILSYYLISFIIILFPTYYYYPLIISTTPYTPLTPPYYSSSSSFFFIPPIPFYHPLTTIPFYNLLTTIPFYHLT

SEQ ID NO: 264280 - protein, 82 aa, Glycine max
  unsure (1)..(82): unsure at all Xaa locations
  Clone ID: PAT_MRT3847_80666C.1.pep
RSWNVXAXPCXGXSXHDNQXIXXLXFXNXSLXVCNXNMXVISCFLGDIXLVVGXERGXVXXSXPPFTSXTXLXSXQFAVKKK

SEQ ID NO: 264281 - protein, 114 aa, Glycine max
  unsure (1)..(114): unsure at all Xaa locations
  Clone ID: PAT_MRT3847_80667C.1.pep
ITITDGIDKTSTPVXLIKRVDCYPLMRNSKQMPNVLXLAPEDNASLWSQLHYDTCNTLKMQDAYLVNLINVLRELDMHSPEEARQLRMKALSRIEWLQTADVPTIAQIEELHSL

SEQ ID NO: 264282 - protein, 82 aa, Glycine max
  Clone ID: PAT_MRT3847_80668C.1.pep
EERGAHKLLSLSLTLSLSLNHFPFPQSCDLLMSEKNKSKKLCVYMVANSSAISLWFGWFVTPLLGLCLLVYYPREIKILNYQ

SEQ ID NO: 264283 - protein, 53 aa, Glycine max
  Clone ID: PAT_MRT3847_80669C.1.pep
ICLWNKGVDSESFHPRFKSHEMRLRLSNGEPEKPLIVHVGRLGVEKSLDFLKR

SEQ ID NO: 264284 - protein, 112 aa, Glycine max
  Clone ID: PAT_MRT3847_8066C.1.pep
PAHTQLQLNKRKVTLIILTLKILVISQCHIQFSRLHVQTNFNSKSIFHQAAKIIIFNLFKRENMQNRYIVIKHRAWLHDFIETLFGKLEVHLCLASSSQMINVPKDIIECKH

SEQ ID NO: 264285 - protein, 75 aa, Glycine max
  Clone ID: PAT_MRT3847_80670C.1.pep
GESTANKFLFDLVKFAEDDKQPQIVSHYFVYQYRKLMRLCFKKKERQTKQFLSALVFSLSLSIWTYIYLSRGSHT

SEQ ID NO: 264286 - protein, 43 aa, Glycine max
  Clone ID: PAT_MRT3847_80671C.1.pep
IGISIDLHIHNHQGIRIHSHRLCLHLSKFRSVNPQTSEALSFR

SEQ ID NO: 264287 - protein, 61 aa, Glycine max
  unsure (1)..(61): unsure at all Xaa locations
  Clone ID: PAT_MRT3847_80672C.1.pep
ERPLXXFIXFLLFRNNLHQLXSQKAAFPTHFHHNPIKLFFLKFKQQLFNQMNLTSYNPKLY

SEQ ID NO: 264288 - protein, 75 aa, Glycine max
  Clone ID: PAT_MRT3847_80673C.1.pep
FSLLLYMCVLFSIALTYFYDDKFFNIFYEIRHKSYFFLKDISHIHKTYKSYTKPHKSFFCCVLVGFNVVNKNLNK

SEQ ID NO: 264289 - protein, 60 aa, Glycine max
  Clone ID: PAT_MRT3847_80674C.1.pep
LKIPYCLGNDIVPRQQFPLTLTFSNLPLLRPLGKCALWSHMICSADEHPPFILMNCNLRA

SEQ ID NO: 264290 - protein, 130 aa, Glycine max
  unsure (1)..(130): unsure at all Xaa locations
  Clone ID: PAT_MRT3847_80675C.1.pep
LEKVSSSEAPFVSGTASKYYVHAFGSQFSKYFPERXDQHRPXKGEAKVSQRIDPQHDEVQDQMETKLIKLFLSHVAKPKGSLMDIKYTNPKLPFVPTTEGGAIMXSGVLAKFFTEGKFRASPVFKRTHRN

SEQ ID NO: 264291 - protein, 136 aa, Glycine max
  unsure (1)..(136): unsure at all Xaa locations
  Clone ID: PAT_MRT3847_80676C.1.pep
LALLSPCLLWGPFRFFLSVAFSLSLALSLFXPAPRLASVPLXLAXXGCPGPPCLAACPGGASWLGPPXSGVXXSWLVSACLSVACXLXXVGSPLXGSFGLGPLFXWFCXXCCAWVLFRXCCSFFLPPFRFVPXAGR

SEQ ID NO: 264292 - protein, 65 aa, Glycine max
  Clone ID: PAT_MRT3847_80677C.1.pep
PLRWEPLEGMSKAGVYIVFVHPEKQITYSKGSNLVDASILPRQRCLDQCGRHRIWCLIIKRHHSV

SEQ ID NO: 264293 - protein, 236 aa, Glycine max
  Clone ID: PAT_MRT3847_80678C.1.pep
MMLPRTFFAFLLFALSCFRWLEYAESKLPKLPQEEVDALKEITSTMGATYWEFDSDSCHSKMLRLTPEPPKGSQSSIDCDCTSENNTCHVVGITFKRLNLPGMLPPYLAKLPNLTQVDFALNYLSGTIPKEWGSTKLTNISLFVNRIFGEIPKELGSITTLTYLNLEANQFSGVVPHELGSLSNLKTLILSSNKLSGKLPVTFAKLQNLTDFRISDNSFNGEIPSFIQNWKSLERL

SEQ ID NO: 264294 - protein, 98 aa, Glycine max
  unsure (1)..(98): unsure at all Xaa locations
  Clone ID: PAT_MRT3847_80679C.1.pep
MMLPRTFFAFLLFALSCFRWLEYAESKLPKLPQEEVSFFFXDALKEITSTMGATYWEFDSDSCHSKMLRLTPEPPKGSQSSIDCDCTSENNTCHVVGM

SEQ ID NO: 264295 - protein, 143 aa, Glycine max
  unsure (1)..(143): unsure at all Xaa locations
  Clone ID: PAT_MRT3847_8067C.1.pep
HASVFLGAGKAFPNKIVFDDKLVLANTQEFFDGNFPVDSWLPIFVNCLYPVSQLPSEAVVVNVTCGSGRGGLPTTAWIXSSAVNNRSLYINKWIRTALVRGXIFVFLLLVEPFPVVLLGVLFGDKNDILXSSNATYPMLTRLL

SEQ ID NO: 264296 - protein, 64 aa, Glycine max
  Clone ID: PAT_MRT3847_80680C.1.pep
RPSKLQEMGIKDICPRIYQYVQKPPLSRGRTPILGPDVSLGPIGRGKRHDCSHRCQVVDPSQRG

SEQ ID NO: 264297 - protein, 108 aa, Glycine max
  unsure (1)..(108): unsure at all Xaa locations
  Clone ID: PAT_MRT3847_80681C.1.pep
ALKAXXAXXPGSETKLDWKTIEGIAEDVPCCSLAYDAVLNLSLVDLLVSSGLFESKSAARRLLKQGGLYLNNNRVDNEGKRIEAADIVDGKVLLLSAGKKNKVLVRIV

SEQ ID NO: 264298 - protein, 41 aa, Glycine max
  Clone ID: PAT_MRT3847_80682C.1.pep
RVTMYVFITNFCYLELSFDSLIIDLDYNYIFFKTLYLTMFL

SEQ ID NO: 264299 - protein, 105 aa, Glycine max
  unsure (1)..(105): unsure at all Xaa locations
  Clone ID: PAT_MRT3847_80683C.1.pep
XATXXXXPXHXYLXXPVXCXFHLXXXXFLXXXXXXXLXSXRLTISXXCXQPNFXXXXXXXIHSXPXSLXFXFXXXLXXXXLXRTIXXXXXQXLXPNSELTYACXN

SEQ ID NO: 264300 - protein, 43 aa, Glycine max
  Clone ID: PAT_MRT3847_80684C.1.pep
AYSDACSLPIRGVFVPDRSSLLLVWTSTDAGVISWGYDAAVCP

SEQ ID NO: 264301 - protein, 117 aa, Glycine max
  Clone ID: PAT_MRT3847_80685C.1.pep
RIRFARALVRKADIMLLFLATSALTAESQSSVQEALEQACSGISSIVVAHSLSTLRNAHVIAIIDHAKVAQQGSHSHLLKIHLDGIHAAMMQMLGFTHLLVIGITSGSSYRIKGFHA

SEQ ID NO: 264302 - protein, 155 aa, Glycine max
  Clone ID: PAT_MRT3847_80686C.1.pep
PKHTQKPIFEYHTAFDGVALGIVSGVQQTYHQFHHANVPRLFSSELTIPVFLGRMLLGIPTILIVKFCSKALAKWTIPVVANTLGIPIKSTGYIPTLNGSVTGKKSDKLKQGYLQKLLSQHKAFDVDTGIRFVQYAGLAWSVVDLVPSLFSYMSL

SEQ ID NO: 264303 - protein, 94 aa, Glycine max
  Clone ID: PAT_MRT3847_80687C.1.pep
IKRRLYGKKKKNPHKKEVGGSGCSCWRLPKKTKFYFFPPQKIFPNKFQEGGISGWMEDTKPSWQRGGGVLPQRGVFGGALLTPPFMGVFFQGGG

SEQ ID NO: 264304 - protein, 225 aa, Glycine max
  Clone ID: PAT_MRT3847_80688C.1.pep
QQNSKLVEYLRDENVLERLLRYVIATKPATTPKEDAGEEGAGDADGPNRPSFFGKVAGRARSSSTAKSEDGEESKEERQRMKYAYVSCEILSSEVWSISEAVLENQDTLRQFWAYIKQPAPLDPVQAGYFTKVNESLLDRKMEEMLKFFKSLDNVVTDLLQHVDCPVIMDLLLKIISVEKNEGGQGIVDWLQQQNLVPHLISFLAPDQSTSTQTSAGDFLKAIIT

SEQ ID NO: 264305 - protein, 63 aa, Glycine max
  unsure (1)..(63): unsure at all Xaa locations
  Clone ID: PAT_MRT3847_80689C.1.pep
MRECISIHIGQAGIQVGNACWELYCLXHGIGPDGQMPSDKTVGGGDDAINTFFNKTGALKHIS

SEQ ID NO: 264306 - protein, 133 aa, Glycine max
  unsure (1)..(133): unsure at all Xaa locations
  Clone ID: PAT_MRT3847_8068C.1.pep
FVLANTQEFFDGNFPGDSWLPIVVNCLYPVSQLPSEAVVVNVSCGSGRGGLPTTACISSAVTNRSSDINKWIRTALGKGKKIGVLTRVDPFPAALXLAALFGVNNEILCFNATKPMLTRFLDNCKSLKYVDDE

SEQ ID NO: 264307 - protein, 105 aa, Glycine max
  Clone ID: PAT_MRT3847_80690C.1.pep
LNQCVYMGLVLHYGPMSTDLHNILLIFHLLKKLHQLEAPMINHHDHALTEQRNNQRSILTVPDTDRSPSRRARGGSFEEPGLMCNKACTPVDRNVNQDRIVSTKT

SEQ ID NO: 264308 - protein, 60 aa, Glycine max
  Clone ID: PAT_MRT3847_80691C.1.pep
EGQQNRFTYLYRNVSTSNQVLRLDSPSVSANSTHQANFKRICDNIWRIPREYGPAASRTS

SEQ ID NO: 264309 - protein, 35 aa, Glycine max
  Clone ID: PAT_MRT3847_80692C.1.pep
SVCLVACSDYLICSRVCVFISLFVCLFVCVSVRLS

SEQ ID NO: 264310 - protein, 41 aa, Glycine max
  unsure (1)..(41): unsure at all Xaa locations
  Clone ID: PAT_MRT3847_80693C.1.pep
SAGDALRVIYERNVXHXDXXLXSGXPVSXXTLTQXLLXXXX

SEQ ID NO: 264311 - protein, 131 aa, Glycine max
  Clone ID: PAT_MRT3847_80694C.1.pep
MGTLVGHVAPGMGFMLIGLWHLFNHIKLHALNPTSYTSPPWFPTSKHKYLELLLIMLGSAASISMELFIGPNRHQPLDPDLTIPSNHLHNFEHSSISLAFLLYAAFALVLDRLPYPAKRALTQLLGSIAFA

SEQ ID NO: 264312 - protein, 69 aa, Glycine max
  Clone ID: PAT_MRT3847_80695C.1.pep
TAAKTTEGPPHPPALSSKLNLGWLVYPSTPPNSWKGVVTIEDWVTFFFPFKLLIINVLHSRFTCLLVER

SEQ ID NO: 264313 - protein, 63 aa, Glycine max
  Clone ID: PAT_MRT3847_80696C.1.pep
PTRAGVFLLPEYTGSYTRGSTTLLLRPGRYEIKCLAGGGWKRSPKEPIKGESPTKNTLTIMEK

SEQ ID NO: 264314 - protein, 56 aa, Glycine max
  Clone ID: PAT_MRT3847_80697C.1.pep
PAMTQMIQNCMAQDFSWKGPAKQWEKVLLSLEVAGSVPGIDGDEIAPLAKENVATP

SEQ ID NO: 264315 - protein, 36 aa, Glycine max
  Clone ID: PAT_MRT3847_80698C.1.pep
FDRMLVVFPSPVNYAMRCSRTRWSTPLRTRVRTAWA

SEQ ID NO: 264316 - protein, 51 aa, Glycine max
  Clone ID: PAT_MRT3847_80699C.1.pep
GIRALVRELWCERAMLMLVLHISGGDEDDVLRPTSLLIFYFHISTLLEPSS

SEQ ID NO: 264317 - protein, 153 aa, Glycine max
  unsure (1)..(153): unsure at all Xaa locations
  Clone ID: PAT_MRT3847_8069C.1.pep
GSTVPGDGEEMTGILGTSVEEAHNKLIVELEKSVPTLVGIEXPKDEKLPRRKIFDKPKTRCFTILPMEFNLVVRQKFLNSVRLIMKKRDKLSCQVGINPYSMEWTGLANRLLSKGNDILRCDYASFDGLITKQVMSKMAEKINSLCGGDEKLM

SEQ ID NO: 264318 - protein, 88 aa, Glycine max
  Clone ID: PAT_MRT3847_806C.1.pep
GSRSSPAACECFRRGFMQNRVLDSFKLFFVIFLSSTTTIDLVNHCNAHWAFDFSPIVSCSWLKNHHQNRERKRRKHCSRSVRLRNEGP

SEQ ID NO: 264319 - protein, 117 aa, Glycine max
  Clone ID: PAT_MRT3847_80700C.1.pep
SWYNTIWLLVHNLHSCNFSPHDELRPDLSRSPSSPSSSASLSLSLYACVSLVVCLFCFISLWGWLPNAKKVQNLCFNNILLLYHQPLFFFLLNSPSPPFWWSFPSRRTALVDPGISG

SEQ ID NO: 264320 - protein, 358 aa, Glycine max
  Clone ID: PAT_MRT3847_80701C.1.pep
MGREVTGMQVVDKKPNGVIPASNGSSNDKVCISPKRTAAKVQAKDHEVNECTKANSFVEKSQEKMDGLMQKMGDSKKLSPPAARKEHTSHLVTHPSDLVTEKHGSHTQIVDAEADATGLNLSPNTNNMLSPISSKNSQPNSPFSSRKTLQHDKKNYDDEDNWSVASSAMSMRTARSKVTHGSAPTFRCSERAEKRREFYLKLEEKHRALREEKNQYEARFKEEQEAAIKQLRKNLVIKANPVPSFYYEAPPPKTELKKLPLTRPKSPKLSRRRSLGDALNPSPEVCSRGRHSTGGVGHTKGGSNASFPHKNNIRRNSNGVCKPKERTKEDKETKTAPPKITDHANADIPVQSCPLRPK

SEQ ID NO: 264321 - protein, 39 aa, Glycine max
  Clone ID: PAT_MRT3847_80702C.1.pep
SYSMVSDRFLSSATESGSKIIECHHGIRVPSVYDAEVCL

SEQ ID NO: 264322 - protein, 69 aa, Glycine max
  unsure (1)..(69): unsure at all Xaa locations
  Clone ID: PAT_MRT3847_80703C.1.pep
LNPVISCSRILGAGSYSISRQTVWNXMATVRTLLNFDSSKQSFCQFFIDLFRXGFLVDKTGEWTTLLQN

SEQ ID NO: 264323 - protein, 96 aa, Glycine max
  Clone ID: PAT_MRT3847_80704C.1.pep
LSILDALASVPEGILALKDCSNTIPVMVKLLMRVSENCTQYALSILWSVCNVAPDECSLIAWEARLAAKLLLVIQSRCHPNWKHHSTELLNWVSLN

SEQ ID NO: 264324 - protein, 349 aa, Glycine max
  unsure (1)..(349): unsure at all Xaa locations
  Clone ID: PAT_MRT3847_80705C.1.pep
MEMHSSIIFCMFFLPWLSMVGAKVPAMIAFGDSSVDAGNNNYIATVARSNFQPYGRDFVGGKPTGRFSNGRIATDFLSQAFGIKPYVPPYLDPNHNISHFATGVSFASAATGYDNATSDVLSVIPLWKQLEYYKGYQKKLSVYLGESRANETVAKALHIISLGTNDFLENYFAIPGRASQYTPSVFPFFLPGFAEFFFCHLVALRASXTPSGGSPPMGCLPLERTTNFVGGNECVSNYNNIALEFNDNLSKLTTKLKKDLPGIRLVFSNPYDILLQIIKRPAQYGFQVTSMACCATGMFEMGYACSRASSFSCIDASRNVFWDSFHPTEKTNGIIAKYLVKNALAQFLH

SEQ ID NO: 264325 - protein, 106 aa, Glycine max
  unsure (1)..(106): unsure at all Xaa locations
  Clone ID: PAT_MRT3847_80706C.1.pep
MAKLVFSLCFLGWSGCCFAFNSREQPXQNECPIPKLNALKPDNXRLKSEGGLMETWNLTTRQFKGAGVALFGXTLNRNALRKPSYTNGPQEIYIQQGKGIFGMIYP

SEQ ID NO: 264326 - protein, 76 aa, Glycine max
  Clone ID: PAT_MRT3847_80707C.1.pep
TAARRRQQGGRQTKARVFLSCNFNKQHQRNSLRCWCCRGILGKGPDDMGACLSTPQGCVGRRLTSPKNKTRNRRRE

SEQ ID NO: 264327 - protein, 339 aa, Glycine max
  Clone ID: PAT_MRT3847_80708C.1.pep
MAEKRFGVIGYALAPKKQNSFIRDSLVSLAKSRGIELVRVDSDKPLADQGPFDCVLHKLYGDDWKRQLQEFHTLYPNAVILDAPEAIERLHNRISMLQVVSELRIEDRPETFGIPKQIVIYDKATLLDPQAWESLKFPVIAKPLVADGSAKSHKMALVFTRDALNKLKPPIVLQEFVNHGGVIFKVYVVGEHVRCVKRKSLPDVSDEEKALGGVSEDLMSFSQVSNLATVNDCDGYYRLMHLDDDTEMPPDAFVVDIAGGLRRALKLNLFNFDVIRDARYGNRYLIIDINYFPGYAKMPGYEAVLTQFFCEVMLKKKQQEEQQQEEGNAPKEKEESLQA

SEQ ID NO: 264328 - protein, 57 aa, Glycine max
  Clone ID: PAT_MRT3847_80709C.1.pep
HLMLTTKGNMQRSRLDLSLRESRPKPFHFFFHLWMPSEYFYVRIFMEFEYFGGDYVK

SEQ ID NO: 264329 - protein, 136 aa, Glycine max
  Clone ID: PAT_MRT3847_8070C.1.pep
PCVRDSFEEVSLSAALNGVEGLDYMERIPLATSEGFPHVLSRKNGEKGKRRFVSGDGEEMTLIPGTSVEEAYNKLIVELEKSVPTLVGIECPKDEKLPRRKIFDKPKTRCFTIPPMEFNLVVRQKSLKFWEVQLFR

SEQ ID NO: 264330 - protein, 49 aa, Glycine max
  unsure (1)..(49): unsure at all Xaa locations
  Clone ID: PAT_MRT3847_80710C.1.pep
RRGPACGCXLAGPSGGXSPGSRGRRGFCGWGACLALGWXPAPPXAVVSR

SEQ ID NO: 264331 - protein, 105 aa, Glycine max
  Clone ID: PAT_MRT3847_80711C.1.pep
SLRSSLACRIRHNMIITINRLTPYYVSELLVVPIQRVLHATQRNYQMQTRNRTPDNVVLPSSTTSPQKMFGERNQHHTKDVSMKRRRCGRTRGRPGIRTGTARRT

SEQ ID NO: 264332 - protein, 64 aa, Glycine max
  unsure (1)..(64): unsure at all Xaa locations
  Clone ID: PAT_MRT3847_80712C.1.pep
XATTPFVXKSTSPQXSSFLVWQXTLXXXPPWEXXPSXPSXXSTPXSLLFFXLSXSXXXXMTLLF

SEQ ID NO: 264333 - protein, 55 aa, Glycine max
  unsure (1)..(55): unsure at all Xaa locations
  Clone ID: PAT_MRT3847_80713C.1.pep
TXRDRXILSSSVGISEPSLQLQIFIYHLXCSSSAVSNCYHSTISTSSSXSXTLLW

SEQ ID NO: 264334 - protein, 78 aa, Glycine max
  Clone ID: PAT_MRT3847_80714C.1.pep
KSISYLNYLWDSCRAWYVESRYSHRFLLLSRVSLTKGGYFRRLCRAFYPLPPHLMVYVSFLSFFFLFENKFLFQSVNT

SEQ ID NO: 264335 - protein, 149 aa, Glycine max
  Clone ID: PAT_MRT3847_80715C.1.pep
MIEPVLKKIIALSPIIQIRIIFLIIAVKIKEVAFLHLIIHAIFKAIIFIAARSIIKTFETQDIRKISQIRKLMPTTALRFNISNMSICGLIYTSGFYSKDIIIEESLNEKIAITILTIEIIRVICSVIYSIKIILMTNLIIHNTVKITN

SEQ ID NO: 264336 - protein, 75 aa, Glycine max
  unsure (1)..(75): unsure at all Xaa locations
  Clone ID: PAT_MRT3847_80716C.1.pep
SFLGVDIKFLEISELNNNRKPLSRKSLNVILFRFVPYICQCYNLADIIITAANSVNQIIYKEKKKGQXWCHKAPP

SEQ ID NO: 264337 - protein, 64 aa, Glycine max
  Clone ID: PAT_MRT3847_80717C.1.pep
HFYQPTALTHARHMYRGGFFFYWVFNFSFVSMGENHCFWKGLGCFACASISTTSLIVGRSTLCS

SEQ ID NO: 264338 - protein, 72 aa, Glycine max
  Clone ID: PAT_MRT3847_80718C.1.pep
SSSQVLRTRNRAGAGMGAPFTGLKSMAGLKTRKTNDDITYIASNGCRVQCMHETTPIGMKNLETLDYLPDDL

SEQ ID NO: 264339 - protein, 85 aa, Glycine max
  unsure (1)..(85): unsure at all Xaa locations
  Clone ID: PAT_MRT3847_80719C.1.pep
AGVSGSSNYSLIVTLCSLFLPYFLLPXPMPXXRNLLXLWXDFXGIXIXEVXXXXKXXXQSXSRKVSKKGKVXXXGXXKDLXQXAX

SEQ ID NO: 264340 - protein, 34 aa, Glycine max
  Clone ID: PAT_MRT3847_8071C.1.pep
LSLVITAKSPPTYLQFFPLLDTCRFKKHYLHHPS

SEQ ID NO: 264341 - protein, 65 aa, Glycine max
  Clone ID: PAT_MRT3847_80720C.1.pep
SKAANPVNFSMSYSQDEDAKNNQHLSHLGYKNPWVDAQAMDQIKNNPCIDMSKNASNTHELEASQ

SEQ ID NO: 264342 - protein, 89 aa, Glycine max
  Clone ID: PAT_MRT3847_80721C.1.pep
TPPVTSDSITVYSLVLSSPYISLTQTPLARILDDTIEWMRGRRTCHCGDSGLGSAPCAQQRTAPQDDQDCIESPPVPMVEPGHITCCCM

SEQ ID NO: 264343 - protein, 236 aa, Glycine max
  Clone ID: PAT_MRT3847_80722C.1.pep
QHTKMQLQEIQDNIKSRRNKIFLLMEEVRRLRVQQRTRRGQKVVNEEGEEKPDEMPDIPSSIPFLSHVTPKTLKKLYLTSMSFISAIIVFGGLIAPTLELKLGLGGTSYEDFIRSMHLPLQLSQVDPIVASFSGGAVGVISVLMLIEAINGEQQEKKRCKYCHGTGYLACARCSASGVCLNIDPISVCSASARPLHAPTTRRCPNCSGAGKVMCPSCLCTGMMMASEHDLRIDPFD

SEQ ID NO: 264344 - protein, 312 aa, Glycine max
  Clone ID: PAT_MRT3847_80723C.1.pep
MTTFSLYSHFLSSKNSIFHAPFKGNNNTKQFTFSKAANLLPLQPRLNVCFSSSKDAGSSDNTPSNFCIIEGPETVEDFMQMQLQEIQDNIKSRRNKIFLLMEEVRRLRVQQRTRRGKKVVNEEGEEEPNEMPDIPSSIPFLPHVTPKTLKKLYLTSISFISAIIVFGGLIAPTLELKLGLGGTSYEDFIRSLHLPLQLSQVDPIVASFSGGAVGVISVLMLIEANNVEQQEKKRCKYCHGTGYLACARCSASGVCLNIDPISVSTASARPLHAPTTTRCPNCSGAGKVMCPTCLCTGMMMASEHDLRIDPFD

SEQ ID NO: 264345 - protein, 79 aa, Glycine max
  unsure (1)..(79): unsure at all Xaa locations
  Clone ID: PAT_MRT3847_80724C.1.pep
NFHTTVLKKAAGGGMALYAPSKPGKAVKLGPSAAQTCMVTMRKTETKQASFGSAXFFQYRVKHSGPFSGVPPGYLTGES

SEQ ID NO: 264346 - protein, 120 aa, Glycine max
  Clone ID: PAT_MRT3847_80725C.1.pep
SAVDIPSEHLKTDGRPLDHTEITRNDLCCADEEIELSTDNIKEQRFMATSSAVDIPVEQLKTSCRKLDNTEITRNDLCCADRNFAGNQKNKLLILDLNGLLADFVSISDTDTSFRRYRRE

SEQ ID NO: 264347 - protein, 33 aa, Glycine max
  Clone ID: PAT_MRT3847_80726C.1.pep
CDSKKNSLCLVLHDSFSITFLIYLIYHSLFSST

SEQ ID NO: 264348 - protein, 60 aa, Glycine max
  Clone ID: PAT_MRT3847_80727C.1.pep
MSVIETHPMTPSYIPMNQFSLSIKPHQHCYAVSFHNETKSSGLNTMQHSPHYTCYVTWYV

SEQ ID NO: 264349 - protein, 132 aa, Glycine max
  unsure (1)..(132): unsure at all Xaa locations
  Clone ID: PAT_MRT3847_80728C.1.pep
MKLTMVVLMILLKGMMRTALNTEFYNLTPKSSTATGNNLKVQKGKKKEKLKSKKNKAMKDQFATRFSRQAKPREGSKKVHXNKGFIKKTQNVKKNQKKPTKIHRSYTIKRIKKIKKNDINKKKEKKNKKSKK

SEQ ID NO: 264350 - protein, 91 aa, Glycine max
  Clone ID: PAT_MRT3847_80729C.1.pep
SVLSDYDVETQAKRQHLIPKEVLVPLSMKSPSYSNFLAAKKPDQDRNCQSSAAGCSSAQKGLDFNLPEGRVHGGDLMLYFGGNLKNALGGI

SEQ ID NO: 264351 - protein, 187 aa, Glycine max
  unsure (1)..(187): unsure at all Xaa locations
  Clone ID: PAT_MRT3847_8072C.1.pep
MSLMAEAPNFLKLYSDGSVKRFDPEIVPASLESTKGYKSKDVIIDSSKPITGRIFLPDYPTSSKKLPLLVYFHGGGFCIGSTTWLGYHNFLGDFSVTSQSIILSVDYRLAPEHRLPIAYEDCYTSLEWLGDQVSCEPLLQQIDLTRVFLSGDSAGGNIAHXVAGKAIQNNECPLKIKGLMLIHPYFG

SEQ ID NO: 264352 - protein, 65 aa, Glycine max
  Clone ID: PAT_MRT3847_80730C.1.pep
FISSFMELISNQNMTRGNQHHLLTSTSNYGLEDQHCTILQNRRTKFVNISGGPPFCRLLAAVGRV

SEQ ID NO: 264353 - protein, 108 aa, Glycine max
  unsure (1)..(108): unsure at all Xaa locations
  Clone ID: PAT_MRT3847_80731C.1.pep
PPPPWIIFPVHNPPPNINKRIPPPLGKGKKIVFLSKVDPFPETLLVVFFGVKNKFLSSSPPTPMFRGLFXNCKSPKNLVKKGPFAFVNKNEIFYSLKKSAFLWPMRVF

SEQ ID NO: 264354 - protein, 111 aa, Glycine max
  Clone ID: PAT_MRT3847_80732C.1.pep
LPIRKQVFGWDKFWQKLMGHGNFLMQGIHSQMILERKKRPKFGNRTSRIGLGDYLKLGGTPVYNWSKAGAINFWAMPLKPVNNGGLYRLSMFSAVREMVPKLGRFPRVTSL

SEQ ID NO: 264355 - protein, 71 aa, Glycine max
  Clone ID: PAT_MRT3847_80733C.1.pep
VCFNAFTLQRSRSLYLLLVTSSIHLRTAFLLLTHPLSLSRYSVRMYDKYREAPSVMSDRLNCNGLETSLVG

SEQ ID NO: 264356 - protein, 48 aa, Glycine max
  Clone ID: PAT_MRT3847_80734C.1.pep
SSTDLVRQYADNIDLVFEQFAEYLVQMGNITPSSRWRGEIRKNCGGIN

SEQ ID NO: 264357 - protein, 114 aa, Glycine max
  Clone ID: PAT_MRT3847_80735C.1.pep
SGFPGRPTRPKKKKKKKKKKKKKKKRTKQKKTNQPTQHLPSNNIKYNIKLHSIQWPGRYNTTTGQGPALPQPNLLAWQPLLLFPGGVKKTRPDPPSLPIRSLDLFGERALPWSV

SEQ ID NO: 264358 - protein, 48 aa, Glycine max
  Clone ID: PAT_MRT3847_80736C.1.pep
LLTWIPINLKRPSLMVPALKKGMGHLRVKVLPVKCIKIQLEFLLLLFW

SEQ ID NO: 264359 - protein, 81 aa, Glycine max
  Clone ID: PAT_MRT3847_80737C.1.pep
PYEVSKEGLHRKALVDLYLALLVYLGETKLCNSHIVLSAKSNALVLLLYKTEHTIIEHTIHTSTNHDADLDERPREASDMT

SEQ ID NO: 264360 - protein, 73 aa, Glycine max
  Clone ID: PAT_MRT3847_80738C.1.pep
PIWMLNCFLRLLPYISVSRIVHRTINIIVRRYRISLDDCILQIENCFGLCVCRKQERYVLGAGTRLRSRDEVS

SEQ ID NO: 264361 - protein, 29 aa, Glycine max
  Clone ID: PAT_MRT3847_80739C.1.pep
QGTMYSLYAIKTIHIVDLSNRTLFTFFYN

SEQ ID NO: 264362 - protein, 90 aa, Glycine max
  Clone ID: PAT_MRT3847_8073C.1.pep
YYLSLLSRIQPWVRRFQHLCRVFTIFVNVLSLFLIIRSFLLIHTPLRKVVNLVNHIKFANYLYYHSKIVLCLSLYLLNCFSLMFGERIIK

SEQ ID NO: 264363 - protein, 55 aa, Glycine max
  Clone ID: PAT_MRT3847_80740C.1.pep
FMIFIFFFNLKIIFLIFIIYILISFNSYNFKNNIFSLYNFFILIFLIPIISNYKN

SEQ ID NO: 264364 - protein, 181 aa, Glycine max
  Clone ID: PAT_MRT3847_80741C.1.pep
MMEERNNNDAAEKLDEVMLPGFRFHPTDEELVGFYLKRKIQQRPLTIELIKQLDIYKFDPWDLPKLATTGEKEWYFYCPRDRKYRNSARPNRVTGAGFWKATGTDRPIYSSEGSKCIGLKKSLVFYKGRAAKGVKTDWMMHEFRLPSLTDSLSPKYIDQITIPANESWAICRIFKKPMLQL

SEQ ID NO: 264365 - protein, 41 aa, Glycine max
  Clone ID: PAT_MRT3847_80742C.1.pep
TKGDLQLYLMIASGWLLMIARPLTVSTGFGADERWMSKCLF

SEQ ID NO: 264366 - protein, 141 aa, Glycine max
  Clone ID: PAT_MRT3847_80743C.1.pep
LFTKGWVPSDANVSVFQPNAKQRGFRNGRLPLEMSSRTRAIYESVSKRKLLQAATVGDVVKVKDIVTVSKDGSGNFTTIGDALAAAPNKTASTAGYFLIYVTAGVYEENVSIDKKKTYLMMVGDGINKTIITGNRSVARAE

SEQ ID NO: 264367 - protein, 152 aa, Glycine max
  Clone ID: PAT_MRT3847_80744C.1.pep
GYSPLMTLSLYLLHLQLTLTQRGDGMVHSIAKYISPFPFTVPRLDPLLCVLGTKDISPTMMIHNKLRHSWLYELLTLLTSALHLLTTAQDQICQPLTLCKTTYDTEVQSPMAGTDDHVDSALATTTRGIFTLLQSTTTHLGSAIPEGHIGLL

SEQ ID NO: 264368 - protein, 111 aa, Glycine max
  unsure (1)..(111): unsure at all Xaa locations
  Clone ID: PAT_MRT3847_80745C.1.pep
GCATVHXNXVMXXXFXNQVIAHXELWKNHSPAKYXXKVFVLPKXLDENLAALHLGELGSXXIQISKSQADYISVXPVEGPYNPARCRYLVIELITLKVSEGTTKIGSINRL

SEQ ID NO: 264369 - protein, 43 aa, Glycine max
  Clone ID: PAT_MRT3847_80746C.1.pep
ISHQRKGAISSGNIYKLNLFTETMSFKHFYTKYSTRIYFITAS

SEQ ID NO: 264370 - protein, 45 aa, Glycine max
  Clone ID: PAT_MRT3847_80747C.1.pep
PVKVSKFFSITTFSYQVKMLTNYIIAVNCHLIKKFDKKFMCNFFR

SEQ ID NO: 264371 - protein, 297 aa, Glycine max
  Clone ID: PAT_MRT3847_80748C.1.pep
VLFSVRSDSHPIFGAPKFQLCDFQVLYCLSFRLLGKVALVTGGASGIGESIVRLFHIHGAKICIADVQDNLGKQVCQSLGDEANVVFVHCDVTVEDDVSHAVDFTVGKFGTLHIIVNNAGISGSPCSDIRNADLSEFDKVFSVNTKGVFHGMKHAARIMIPKKKGSIISLCSVASAIGGLGPHAYTGSKYAVLGLTKNVAAELGKHAIRVNCVSPYGVATGLALAHLPEDERTDDALVSFRDFTGRMANLQGVELTTHDVANAVLFLASDDAKYISGENLMVDGGFTSANHSLQVFR

SEQ ID NO: 264372 - protein, 155 aa, Glycine max
  Clone ID: PAT_MRT3847_80749C.1.pep
MTKLTILLIALLFIAHTCCASKWQQHQQESCREQLKGINLNPCEHIMEKIQAGRRGEDGSDEDHILIRTMPGRINYIRKKEGKEEEEEGHMQKCCSEMSELKSPICQCKALQKIMDNQSEQLEGKEKKQMERELMNLAIRCRLGPMIGCDLSSDD

SEQ ID NO: 264373 - protein, 122 aa, Glycine max
  Clone ID: PAT_MRT3847_8074C.1.pep
VSAVQEGPRKGEATLRPRVYSHYGEAQAQPDTCWCKAPIGCAQAPNGDRCYLQIIHCTSALPKNTECMTVLREVTLAHPWTMMTTCAGEGQYLNILLKLNDANGTLRMGVCTCYSLIGTGFD

SEQ ID NO: 264374 - protein, 51 aa, Glycine max
  Clone ID: PAT_MRT3847_80750C.1.pep
PQLSSSIQPSRHIRITTTTKYFFLLRKKKKIKHKSKLLHPNTCGRINIQGC

SEQ ID NO: 264375 - protein, 94 aa, Glycine max
  unsure (1)..(94): unsure at all Xaa locations
  Clone ID: PAT_MRT3847_80751C.1.pep
PTRPKKKKKKKRGGRFGGSRFPSPCLRRISFFLGYPKLNXRAAVYHRRAGETPGVPQLNGLAEHPLLAGWGNSERAGTDGLSNQLPSLMGDGAP

SEQ ID NO: 264376 - protein, 80 aa, Glycine max
  Clone ID: PAT_MRT3847_80752C.1.pep
DLDMQSPNALVIWMTVPPAHCSIFVQSSGASGLDGYEADEERVFRLEPPPKHESTRSCGNCGKVGWQSRIRSFAACVDVK

SEQ ID NO: 264377 - protein, 58 aa, Glycine max
  Clone ID: PAT_MRT3847_80753C.1.pep
SFTKGEHSFNGLRSTGGSLNGEHIQDYAPLLGIHIPYTLSTYAVIKLLLLLTATTCIL

SEQ ID NO: 264378 - protein, 297 aa, Glycine max
  unsure (1)..(297): unsure at all Xaa locations
  Clone ID: PAT_MRT3847_80754C.1.pep
PGRLSEIRPTTRSDTQTLWXYENDEMVQRAVSYVPGXYKIFDEILGNAGDNKQRDPSMDALKVSIDAEANTVSIFNNGDGVPVEIHQEEKVYVPELIFGHLLTSSNYNDNXRRTTGGRNGYGAKLTNIFSTEFVIETADGKRQKKYKQVFSDNMGKKSEPVITKCKVGENWTKVTFKPDLEKFKMDYLEEDVVALMKKRVVDMAGCLGKTVKVELNGQVIRMKSFRDYADLYLKSVEKSRPVPLPRIHAKVGERWEICVSLSDGQFQQVSFVNSIATIKGGTHVDYVTNQITNFVMN

SEQ ID NO: 264379 - protein, 185 aa, Glycine max
  Clone ID: PAT_MRT3847_80755C.1.pep
MSSPSKRREMDVMKLMMSDYTVETINDGLNEFNVEFHGPKESLYEGGVWKIRVELPDAYPYKSPSIGFVNKIFHPNVDELSGSVCLDVINQSWSPMFDLLNVFEAFLPQLLLYPNASDPLNGDAASLMMKDKELYDQKVKEYCERYALQLNSVEIEEDISGEESGSSGEEESASSDDEIPGRADP

SEQ ID NO: 264380 - protein, 80 aa, Glycine max
  Clone ID: PAT_MRT3847_80756C.1.pep
LLLSKLIHSAVYIDMDSVMSPAFSLEPNETLFRAFLGESLFIGAYFLFQKPCLSGVRVVLLPSVPFPVAVNAIMLALCST

SEQ ID NO: 264381 - protein, 331 aa, Glycine max
  unsure (1)..(331): unsure at all Xaa locations
  Clone ID: PAT_MRT3847_80757C.1.pep
MEVSAKVKVGGFLWLEGLVEACCLHRVVILCMRSNNLLMRTGQCFLLNGFIFLGSIFVLNSVVIPALWWILPDQSSQFVSHKLCDLGGTLKFYSFVRLALIQLFYVLWFYPLYVFSIVLSTIWYNDIAKYGYAAMGRSKFTVEKGSSQNNSPTLQNAHHVKGPXGLGGVMIGIGQQVYSILLLSVFFLEVYATGFIPYIGKLLNFLLLSWMYAYYCFEYKWNFNEVALDRRLDYFESYWPFFAGFGSPCVLAIFFFSPLVSYGIMAILFPLFVLTATGSESEQEISFEKHRWRAAGVERLPIFYVADKVSMWMLSLLPMEKGDQVQDRKAQ

SEQ ID NO: 264382 - protein, 54 aa, Glycine max
  Clone ID: PAT_MRT3847_80758C.1.pep
VLCPSFCLLLMISVSFQHKPASCEVLAHKGDRVKVHYQVSNFSSLSCGPRTIQF

SEQ ID NO: 264383 - protein, 82 aa, Glycine max
  Clone ID: PAT_MRT3847_80759C.1.pep
LQFSKQLVELHPHFHVTCIVPSLGSLPSASKAILETLPPNYINTILLPPVNPNDQLSQEDIPVLVKIHLTMSHSMPSIHKAL

SEQ ID NO: 264384 - protein, 65 aa, Glycine max
  Clone ID: PAT_MRT3847_8075C.1.pep
NACTQWVDPFDTFSRLFSAVPYSRFLSVVWLRRLLSAVTVSRLLVSECKRGRTRGRMRGRTRGRS

SEQ ID NO: 264385 - protein, 105 aa, Glycine max
  unsure (1)..(105): unsure at all Xaa locations
  Clone ID: PAT_MRT3847_80760C.1.pep
SFWPPRFPAGFLWGCLPPVASCCLXXCPFLRPFLSCCFPGSLWSPAAXLCXFSGSPPPPWGGFSFWXPLLWWLPPPLKKGSFVRAVXVPSCVSVLLVVVPRWVLL

SEQ ID NO: 264386 - protein, 121 aa, Glycine max
  Clone ID: PAT_MRT3847_80761C.1.pep
DSSQYIVVFNSMSAHVMAVTGLRVSSFTSSLASCPSIYQPWNLSLQTSKRGTIHNNLSIKCVAFNDNKVPSQIDLRTNNFEQVKRNSQMALLNSSDPIKILKMIDTIQRLGIEHHFKEEIN

SEQ ID NO: 264387 - protein, 73 aa, Glycine max
  Clone ID: PAT_MRT3847_80762C.1.pep
VYIWHRSSGDLIETLPGHSGAVNCVSWNPANPHMLASASDDRTIRIWGLKRLNVKYPNVRTNGVHYCNGGEFR

SEQ ID NO: 264388 - protein, 85 aa, Glycine max
  Clone ID: PAT_MRT3847_80763C.1.pep
GEPLIQGKTKIWIGISRAGGSQGEKCWNFSKPGGSFLGPPTLCNRFQECGAGQKPPPGTAGRLIFKTKSLIPNTIFGPLRSAIRY

SEQ ID NO: 264389 - protein, 68 aa, Glycine max
  Clone ID: PAT_MRT3847_80764C.1.pep
NFRGFYLFLLMITINPGGGIFTKCSSFRGPKGPRFPNFEREPNPPQKPGGLKKPPGQKKTRGDPPQYA

SEQ ID NO: 264390 - protein, 98 aa, Glycine max
  unsure (1)..(98): unsure at all Xaa locations
  Clone ID: PAT_MRT3847_80765C.1.pep
LRFFCRLCPSLVGVPLLFVLVVCAAPCSSVLPFFALSRALPLLLFLPSVLALXFRCVLLASSVPFSSPCSSPSFPLLYPGAWVGPGFPVRPRLASLLS

SEQ ID NO: 264391 - protein, 100 aa, Glycine max
  unsure (1)..(100): unsure at all Xaa locations
  Clone ID: PAT_MRT3847_80766C.1.pep
TSLLTDIFFFXVSIXFXKAFXLCGXXFXXSFPPPSVTPRXSXSLSVNHLSSXLKFPGXSIXXPKXKLKRIFXKPGXFKNKIQVLLSNFAXQINXHNYFXL

SEQ ID NO: 264392 - protein, 64 aa, Glycine max
  Clone ID: PAT_MRT3847_80767C.1.pep
SLRAKMFSMLDLNQKGETLTNSSESRPWNKYTWFECSFKYISIPHGWSILAKQHDSDRFSYDFT

SEQ ID NO: 264393 - protein, 166 aa, Glycine max
  unsure (1)..(166): unsure at all Xaa locations
  Clone ID: PAT_MRT3847_80768C.1.pep
RCGYVFLTNLYALXLAGYSLVHAEIPGDDFXATVWPNTPLPTXLRQLVMPPPVGERMXQLSMHGGDSQPPRIIAXPKQDLRSGXSVPAQFSTTASAHPSGEYTWATACKDIFKQCYLSXQQMCIQLEPSEEHENLRAKSSXTSIDAAILLLLMNIELLPSSFVGEL

SEQ ID NO: 264394 - protein, 198 aa, Glycine max
  unsure (1)..(198): unsure at all Xaa locations
  Clone ID: PAT_MRT3847_80769C.1.pep
MGILYDDVVIIRPPEKDGDPTLLTVNCPDKTGLGCDLCRIMLFFGLNIIRGDVSTDGKWCYIVFWVVGKQRTRWSLLKKRLIEACPSCSSASGISYYRSDLQPSKPSDVFLLNFSCHDRKGLLHDVTEVLCELELTIKKVKVSTTPDGKVMDLFFITDTRELLHTKKRKDETIEHLTEIMGDAIISIDIXLVXPEITA

SEQ ID NO: 264395 - protein, 114 aa, Glycine max
  Clone ID: PAT_MRT3847_8076C.1.pep
PHLLSIYIHSSSSHLFNLHKYIILQINRLIMEESGENWPSDNSYLDEVNDEFGSEDEEGGSFSGMGETDRKKRKRELAERFLALSATIPGFTKMGEGYKMTVDELVKTLRVAIS

SEQ ID NO: 264396 - protein, 47 aa, Glycine max
  Clone ID: PAT_MRT3847_80770C.1.pep
IFILYIKIFYIFFLIFFYFFFIFFFFFPILIPLNFYFFISSVCKFML

SEQ ID NO: 264397 - protein, 81 aa, Glycine max
  Clone ID: PAT_MRT3847_80771C.1.pep
SCVASLLTQSSIAQNLQSVRSTWRLIFTYGSSIRLVRNQSYRNRSCRWCQMYQWSASCVGGDHGRVEIVASDTSNVTIRRV

SEQ ID NO: 264398 - protein, 93 aa, Glycine max
  Clone ID: PAT_MRT3847_80772C.1.pep
VEQKKKNPTTPFFPTSSPLRLLCKIKISPPPKPWVPNSHPPPPKRVKKVLPPRGISWGNFHFYPLTKGFFVLTFKRVNYEIPKLFNVKTKIQV

SEQ ID NO: 264399 - protein, 59 aa, Glycine max
  Clone ID: PAT_MRT3847_80773C.1.pep
ERVSSVYPSVRLFHFVSFSLKCSSPPQLVCFGGVIFPSHGLVISNHPYPDILKPKKGSL

SEQ ID NO: 264400 - protein, 39 aa, Glycine max
  Clone ID: PAT_MRT3847_80774C.1.pep
QFEPRLKKTKIATSLKNSNFSPPYFNSITLFSFYQNLIN

SEQ ID NO: 264401 - protein, 315 aa, Glycine max
  Clone ID: PAT_MRT3847_80775C.1.pep
RSSEFGSRPEWAKPQQAAVPADKRWPGAGSNPSVSYSLASPLQVSPTSAKTEASYMAAGGDYKSLQPGSAREPVIVMQRPQTVNAKQIPAASMSSSPPGVAASWYPTNSIEVMRSNGFISHPPSTRSLSSNYFSSNQLYHQLQCQPPQQFVAGNSSSVDLLATNQGNSLWNKTAASPSLAAASSLGLFSRLGSAATSGATSPVDWSTGGTMQFDYTNIDWSLDRGLSPPRSNALLFGLSPFTKSSSTLYGSNASGTVAQTTVRSLPSNGSMVPLPGLQNGVVSSAETSGSRDWSSPFEGKDLFSLPRQFVSSPSL

SEQ ID NO: 264402 - protein, 71 aa, Glycine max
  Clone ID: PAT_MRT3847_80776C.1.pep
KYSIYGDMNHNGFKPANMVNNANLFSVIIMSLGSVTLHSLYCAGSVRQTTGSFYCKNPNVTLIRSQIFFRK

SEQ ID NO: 264403 - protein, 48 aa, Glycine max
  Clone ID: PAT_MRT3847_80777C.1.pep
AQCQICPLQHLNHLMDKNGDHIFIFRKYSMCFLSGHAWYPINRNLGYE

SEQ ID NO: 264404 - protein, 40 aa, Glycine max
  Clone ID: PAT_MRT3847_80778C.1.pep
KGNNNDLKFQVRCYNFTPSCNEDEICVIKIYITIKQPLEG

SEQ ID NO: 264405 - protein, 57 aa, Glycine max
  Clone ID: PAT_MRT3847_80779C.1.pep
IFTPIENKQIILKYIFIQTLFQKLHKTYNLYALSKTQLIKNTNLSITKGTQSIQLFL

SEQ ID NO: 264406 - protein, 44 aa, Glycine max
  unsure (1)..(44): unsure at all Xaa locations
  Clone ID: PAT_MRT3847_8077C.1.pep
XFRHXHLHXNPFISSLLFMSSXFSKKFTFSLKXSXINRHVKYVM

SEQ ID NO: 264407 - protein, 123 aa, Glycine max
  unsure (1)..(123): unsure at all Xaa locations
  Clone ID: PAT_MRT3847_80780C.1.pep
TLEACTHAAHNEKLPLRTVVQVQCFEQLQLRHAIAGTLMAADAAAEPARQSAALERETEXRPTRRIRVMTYSTCRNRXGMWNVPVRENHVLPLEIDRMMTRVHLMEHECSSMVRFIGKFDKSD

SEQ ID NO: 264408 - protein, 98 aa, Glycine max
  Clone ID: PAT_MRT3847_80781C.1.pep
AISPHELPKIFKNALSSTILIEIIKCLASLFTEDMDLVVSYLEHLTKVPRFDVIVMCLSSTNKDDIRKIWDEVFSGEATPIEYAEILDNLQSKFGLGQ

SEQ ID NO: 264409 - protein, 64 aa, Glycine max
  Clone ID: PAT_MRT3847_80782C.1.pep
LKVVQNLCILNWCCLSAEHFIPDLAYVRTKCNQLINQIDKPSLFVDERHITITSNLGTLVKCSK

SEQ ID NO: 264410 - protein, 163 aa, Glycine max
  Clone ID: PAT_MRT3847_80783C.1.pep
HSFLPRVRNPQVSCFSQKGFSIITDFIVGKALHAFCVKGVIHLGTFQANTLISMYSKFGSIEHAQHVFDKMPERNEASWNNLMSGFVRVGWYQKAMQFFCHMLEHGVRPSSYVAASLVTACDRSGCMTVGAFQVHAHVIKCGLACDVFDGTSLLNFYGPFGWV

SEQ ID NO: 264411 - protein, 73 aa, Glycine max
  Clone ID: PAT_MRT3847_80784C.1.pep
DQCCPPQMIRVSCILMGVLHFKSDAGLGGKGHPSSLEFYLMCFAKRCFPFFYGKHFNCRVWGDKKERKRNDPQ

SEQ ID NO: 264412 - protein, 61 aa, Glycine max
  Clone ID: PAT_MRT3847_80785C.1.pep
YCFLIKIHILFQRLLVLILVTNLRRFKYVFYICTTLLFCIAAYSTFFFSMTFQIFTFHTCY

SEQ ID NO: 264413 - protein, 89 aa, Glycine max
  unsure (1)..(89): unsure at all Xaa locations
  Clone ID: PAT_MRT3847_80786C.1.pep
FFKFKFFPHRVKIGGSVGVQTWIGIMERDPVKKDPAXRHVRSLMVGKKAKEIWTRAKKLARMAKRSVEEKGSSYTDFSSLIEDLRSRAS

SEQ ID NO: 264414 - protein, 539 aa, Glycine max
  Clone ID: PAT_MRT3847_80787C.1.pep
MASSLRISRLLSRSFLSASTTTPLFSRGGSGALGAGLSKFSTAAAIEEPIKPPLKVEHTQLLIDGKFVDAATGKTFPTLDPRTGDVISHVAEGDHEDVDRAVAAARKAFDRGPWPKMTAYERQRILLRAADLFEKHNDDLAALETWDNGKPYEQSAQIEIPMLVRLFRYYAGWADKIHGLTVPADGPYHVQTLHEPIGVAGQIIPWNFPLVMFAWKVGPALACGNTIVLKTAEQTPLSALYASKLLHEAGLPAGVLNVISGFGPTAGAAIASHMDIDKLAFTGSTETGKIVLELAARSNLKPVTLELGGKSPFIVCEDADVDEAVELAHFALFFNQGQCCCAGSRTFVHERVYDEFIEKAKARALKRAVGDPFKGGIEQGPQIDSEQFQKILKYIRSGVESGATLETGGDRFGNSGFYIQPTVFSNVKDDMLIAKEEIFGPVQSILKFKDLDDVIQRANNTHYGLAAGVFTKNINTANTLTRALRVGTVWVNCFDTFDAAIPFGGYKMSGQGREKGEYSLKNYLQVKAVVTSLKNPAWL

SEQ ID NO: 264415 - protein, 99 aa, Glycine max
  Clone ID: PAT_MRT3847_80788C.1.pep
GKWKWSFFYNKGELWARILDSKYGDWRHLEEPTRGNRASAWWKDINIIDPSGADGSLFDKGIKWKVACGEKTKFWEDGWKEDRVTFKLKYPTLFSISKQ

SEQ ID NO: 264416 - protein, 135 aa, Glycine max
  Clone ID: PAT_MRT3847_80789C.1.pep
MGRVRTKTVKKAARVIIEKYYTRLGNDFHTNKRVCEEIAIIPSKKLRNKIAGYVTHLMKRIQRGPVRGISIKLQEEERERRDNYVPEVSALDQEIIEVDPDTKEMLKLLDFGSLSNLQVTQPTVGMNFKTPRGAV

SEQ ID NO: 264417 - protein, 53 aa, Glycine max
  Clone ID: PAT_MRT3847_8078C.1.pep
VVSVSCLLLVFVLYCCVLQDKAGSLLLLYIILSRSYLKVAISALDMALGTVLF

SEQ ID NO: 264418 - protein, 61 aa, Glycine max
  Clone ID: PAT_MRT3847_80790C.1.pep
MDHHPDPSVSSIVLGECVHLMQKSLLHYDITHWETKVIAAKYGLHDQLNEALHLKNRPTDY

SEQ ID NO: 264419 - protein, 89 aa, Glycine max
  Clone ID: PAT_MRT3847_80791C.1.pep
KGEVPEISLQREKKTVRVGGGDVARLAATRDNKRGRISSRIAGLIRRRISVGIVIGGGDYAIRLRGEYRRRNLRLRLKTVVVGSGRRRG

SEQ ID NO: 264420 - protein, 172 aa, Glycine max
  unsure (1)..(172): unsure at all Xaa locations
  Clone ID: PAT_MRT3847_80792C.1.pep
MARPGNKIIQAKLVLLGDMGTGKTSIALRFVKGHFFPNQEPTIGAAFFTQILSLSEATVKFDVWDTAGQERYHSLAPMYYRGAAAAIVVYDISSVDTFVRAXKKWVQELQTHGNASYSVNKQMLCYLCVSNTSTSNGSEETSTREGGMVSLEASPKTAATSPALFYDFATWL

SEQ ID NO: 264421 - protein, 47 aa, Glycine max
  unsure (1)..(47): unsure at all Xaa locations
  Clone ID: PAT_MRT3847_80793C.1.pep
XWGFQKTTCINFLNXRPTTQGKGENRKPRKYEHPHKQGGRRTGGNDQ

SEQ ID NO: 264422 - protein, 52 aa, Glycine max
  Clone ID: PAT_MRT3847_80794C.1.pep
CRDCIEHLICTSSSIRGPALCCYRCCRDWVVINAFVNRDLSALLSYSKGPMM

SEQ ID NO: 264423 - protein, 108 aa, Glycine max
  Clone ID: PAT_MRT3847_80795C.1.pep
IGKGVRALPGGVILLFGLAYGRSWGPPGWVGSRELFPLEIRSFAPSIVVCVHMIFPAPGGPLFLQALCPPQIGVFLLFASLNIFLRLFVFFPLAGTQKVPIEGVYFLF

SEQ ID NO: 264424 - protein, 66 aa, Glycine max
  Clone ID: PAT_MRT3847_80796C.1.pep
IFKIGIYKWCLHPRNKIGDPNPFMQIFIFQTVNWQNDIRKFMTWDAITHLLKGIGNSHYFTFPPKG

SEQ ID NO: 264425 - protein, 54 aa, Glycine max
  Clone ID: PAT_MRT3847_80797C.1.pep
NRRAGKNPGVPQLNRLEENPLFPSWGKSKGAPPDGLSKKLATLNGNGNPPCRGP

SEQ ID NO: 264426 - protein, 45 aa, Glycine max
  Clone ID: PAT_MRT3847_80798C.1.pep
VIMEGDSVHLYRRQIIYLSFIFLRVNCILKYHVENYCEDQRYVNT

SEQ ID NO: 264427 - protein, 66 aa, Glycine max
  unsure (1)..(66): unsure at all Xaa locations
  Clone ID: PAT_MRT3847_80799C.1.pep
SYKMIFFIFFLFNLNTFFSTXCLDFGFNVYILKSLNLGLQDICFTNDFFNSKNIFFPKNITCKYYF

SEQ ID NO: 264428 - protein, 134 aa, Glycine max
  Clone ID: PAT_MRT3847_8079C.1.pep
DVLLAKAAQEVGVEWFDCPDQEDSSEEVSLSAALNGAEGLDYMERIPLATSEGFPHVLSRKNGEKGKRRFASGDGEEMTLIPGTSVEEAYNKLIVELQKSAPTLTGIECPKDEKLTRRKIFDKPKTRCFTILPM

SEQ ID NO: 264429 - protein, 82 aa, Glycine max
  Clone ID: PAT_MRT3847_807C.1.pep
NKKESYWRYGAKFDHALLARAKDGIRSTLSEEKTKPGWTFVFHLYCYIILASVSYILRADPITADCLSLLLVASSTTYFFCP

SEQ ID NO: 264430 - protein, 41 aa, Glycine max
  Clone ID: PAT_MRT3847_80800C.1.pep
ISIMSEGFVNGPCLIPSRVCFFFRDVSAVTCLPFKTVSMCG

SEQ ID NO: 264431 - protein, 192 aa, Glycine max
  Clone ID: PAT_MRT3847_80801C.1.pep
MEDDEKTPLVGEIEEVDASPVEEEGTSEREKRVRTKVPEAEIHLYRQGKGPVAVFKSALGGWEQDQLEIREDILEKYGMKSVFAFNPTAGGRGVPVRFNPRNGRSILTYRDGAVVYLDGEPKDSLVKPVTRILVGVALITFMITLVSRDTPNWLKKLNFSGVNFPPWILACVVIVFTRMRKRTRDFLKKRGW

SEQ ID NO: 264432 - protein, 166 aa, Glycine max
  Clone ID: PAT_MRT3847_80802C.1.pep
MENSSEDSSKSHGKTRQTANSKTPHKTGDMLANGHKQLVQSPPEWVRGNGLDEVVDLADMLQLRSRDWFLVFVERFLDPDGDTSLSNNGQIAGMLTQLKSVNDWLDEIGSSKNEGEPCQIPAETIDRLRKKIYEYLLTHVESAAAALTGGSQSYPRIQTAEIKERT

SEQ ID NO: 264433 - protein, 149 aa, Glycine max
  unsure (1)..(149): unsure at all Xaa locations
  Clone ID: PAT_MRT3847_80803C.1.pep
MFERTIRNAEEVFDQMRESGIGIEPEVTSFSILLHVNSRAHMPQLVLDQLRLMKEKGICPNVVMYTSVIKCLASCGWLEDAERLLEEMVRDGXSPCAATYNCFFKKFRGRKDGESALRMYKRMKEDGLCAPCSHRYVILIRMLLRFEMI

SEQ ID NO: 264434 - protein, 62 aa, Glycine max
  Clone ID: PAT_MRT3847_80804C.1.pep
RCMHQNTTCTPLPDCGPNHFITSLINACCSCDTNILSWPLEALFFESTLNVGLLETLSKSHK

SEQ ID NO: 264435 - protein, 71 aa, Glycine max
  unsure (1)..(71): unsure at all Xaa locations
  Clone ID: PAT_MRT3847_80805C.1.pep
ARGKYRAEXSEQDIFVIPAGYPVVVNATSDLTFFAFGINADNNQRNFLAGSEDNVMSQNPIKSRTLRFLGL

SEQ ID NO: 264436 - protein, 90 aa, Glycine max
  Clone ID: PAT_MRT3847_80806C.1.pep
LLVTEIENASAAFVPDLPQYQQAVMPRIFKKTLPEIKKAPLTTYFPKQNHVFLLATNKKLTAPFLFYPKFLVLETENIHTQNQPFCVISI

SEQ ID NO: 264437 - protein, 47 aa, Glycine max
  Clone ID: PAT_MRT3847_80807C.1.pep
IKTAKFQPKSITIRSPLVMHKSRFSELNFPWFQAQLMVWAKIYLMNG

SEQ ID NO: 264438 - protein, 112 aa, Glycine max
  Clone ID: PAT_MRT3847_80808C.1.pep
ASASYSFTISVLFLLFLHLSCFINNLNAKHTNASSHNHHHKHQHTQNPSLNTRLHMAFLGLQAWKQVIYSDPNNFTSNWVGPSVCNYTGVFCAPSLDDPKVTVVAGIDLNFA

SEQ ID NO: 264439 - protein, 68 aa, Glycine max
  Clone ID: PAT_MRT3847_80809C.1.pep
AVSHEPINPITRLISNQLLSSKITSFRAHRINHRCVYLIEQWKVKTNFLPCCMSHMTKNNLCALSTFH

SEQ ID NO: 264440 - protein, 68 aa, Glycine max
  unsure (1)..(68): unsure at all Xaa locations
  Clone ID: PAT_MRT3847_8080C.1.pep
TXXHTFSSVXXTKDLQMVNLTLRVLSRXXHREXXHHGPRXSVSXYDXXVXPCMGKEVFKAVVARSNXD

SEQ ID NO: 264441 - protein, 136 aa, Glycine max
  Clone ID: PAT_MRT3847_80810C.1.pep
MASEIFLALLITTFVVAASAGNFNRDFEITWGDGRAKILNSGELLTLSLDKTSGSGFRSRNEYLFGKIDMQLKLVPGNSAGTVTAYYLSSLGDTHDEIDFAGLGNLQWVQKNHMIYNYCTDTKRFPQGLHPECTIA

SEQ ID NO: 264442 - protein, 283 aa, Glycine max
  Clone ID: PAT_MRT3847_80811C.1.pep
MASEIFLALLITTFVVAASAGNFNQDFEITWGDGRAKILNSGELLTLSLDKTSGSGFRSRNEYLFGKIDMQLKLVPGNSAGTVTAYYLSSLGDTHDEIDFEFLGNLSGDPYILHTNVFTQGKGNREQQFYLWFDPTQDFHTYSILWNPQSIIFSVDGTPIREFKNLESKGVSFPKNQPMRIYSSLWNADDWATRGGLVKTDWSQAPFTASYRKFNAQACVWTSSSGSSCSSNNPSSNQAWLKQSLDSTGQARIQWVQKNYMIYNYCTDTKRFPQGLPPECTIA

SEQ ID NO: 264443 - protein, 59 aa, Glycine max
  Clone ID: PAT_MRT3847_80812C.1.pep
PCALLAMFINILITMNISIIMNILIIMNIVQKNRLYNLYSHEKLKVAIDPEKFIGMHSA

SEQ ID NO: 264444 - protein, 71 aa, Glycine max
  Clone ID: PAT_MRT3847_80813C.1.pep
NDGEPLDLFSPTRCGDYFSVAPLELKNMGFSFLGGGSGVFLMNVDPPPGPVFFPCGFCSLKARFLTHMGVH

SEQ ID NO: 264445 - protein, 171 aa, Glycine max
  Clone ID: PAT_MRT3847_80814C.1.pep
AHSVDGQDPRVIDSTASDHIFGNSSLFTSQSPPKIPHLITLANGTKVTSKGFGKFSIFPSLNLDPIHFVPNCPFNLVSLSQLTKALNFSITFDADSFVIQERDTSWLIGVEHESRGLYYLEISSSMSCFATPSPKLLHNHLGHPHLLKLKMVPSLNKLQVLECESCQLGKH

SEQ ID NO: 264446 - protein, 112 aa, Glycine max
  unsure (1)..(112): unsure at all Xaa locations
  Clone ID: PAT_MRT3847_80815C.1.pep
ADMTGQGMTLIQSATVPNXFRGAARTKGCLMVKMDVSGHAPNHMSESCSLQQRYVTLIIGTKRCDACERTKPDPHCWELMSPTNGCQPKNCSXKWSSKWAKLTILHLHLLID

SEQ ID NO: 264447 - protein, 39 aa, Glycine max
  Clone ID: PAT_MRT3847_80816C.1.pep
PRVRFYIDLTKELASWIVFLYHLDSHERLDRSSDVCYPL

SEQ ID NO: 264448 - protein, 107 aa, Glycine max
  Clone ID: PAT_MRT3847_80817C.1.pep
MPAQAIPEFAPNPAEQLPVICFHPWLRKDIPMNELGDYHHNLTPIRIKYQEVTGRVCGWQDHRIYIKGWASFCRRNKIERNDTCFCEVISGEDQVVKTLRVHVARRR

SEQ ID NO: 264449 - protein, 77 aa, Glycine max
  Clone ID: PAT_MRT3847_80818C.1.pep
VTYCLASVESPTPWVIRCNNCKCGQCDSNSVPGIRSNKFLSSSCKAILTVQFNQCYVIVVCSEPPQCIPRCEIVHSR

SEQ ID NO: 264450 - protein, 59 aa, Glycine max
  Clone ID: PAT_MRT3847_80819C.1.pep
FILSKEYKCDLTRLQKLRCIRYVHASCLRRRPSSWAKKFNNCLGGPQDPPVTNTSTSRL

SEQ ID NO: 264451 - protein, 66 aa, Glycine max
  Clone ID: PAT_MRT3847_8081C.1.pep
MQHSFSGSFSYYPLEASHDHHAPSHEDKALAALRNHKEAEKRRRERINSHLDKLRTLLPCNSKVYI

SEQ ID NO: 264452 - protein, 316 aa, Glycine max
  Clone ID: PAT_MRT3847_80820C.1.pep
MDGRRHSVDIPISKTLVALKRVRSLRDPSTNGVSRLSPLVDDGDWEDGSSNGVSLSLRFLNGSHVCDSNGNGLLRSSSLDFKGQKEQDTAEFELEMWNSKMNHCGISCQEGQQDDGLVYSNPKQQCISGDKSSNESCCSNHEGRGLDLVSIMPSSNHLKDGESCYLSTATRVEHSKSARKSLRKNQVKPSEVIGDIASHVGSQQCLSVFDAPSARSASEHITQDEDVLDNYHGCGLRSCWSKSPRFRESNHYSEIEGLPLILQHVSETDLNGHRNMRHIGGEISPTLETPRSLSMKFRPKSFSDLVGHNVIGKSLL

SEQ ID NO: 264453 - protein, 228 aa, Glycine max
  Clone ID: PAT_MRT3847_80821C.1.pep
MRKSKADEKILSYNDVVLRRSDLHILSGPYFLNDRIIEFYFSYLSSCHPSQDILLVPPSIAFWIIQCPVAEALGDFIEPLHLPDKTLVIFPVNDNDDVDRAEGGSHWSLLAYYRNANLFVHHDSCRSMNAAPAKQLYKGIAGYMGSSGSASEASFLECTNSPMQDNGYDCGLYATAIARVICNWHVNHKNADTNDLWFSAVKEQVSPSAVASMRGEILALIRDLMARH

SEQ ID NO: 264454 - protein, 76 aa, Glycine max
  Clone ID: PAT_MRT3847_80822C.1.pep
NQERVKLALSVSHHCPLVCINGPNGYENPTGMMINFRQCKLLIGSLFYNSRHLLKEFTYFYCLYFLTNPSVVFSQP

SEQ ID NO: 264455 - protein, 126 aa, Glycine max
  unsure (1)..(126): unsure at all Xaa locations
  Clone ID: PAT_MRT3847_80823C.1.pep
GHSNEPWXVTSTVEVAAPELSEPALXINFARDGMNRRDCLALVAVHNDSWMLYXTFYLGATINRNERKRAFNLINDLPTDLEGVTDRKPAXDTPTADSESKSKSITKRSSDGQGKSNTKFSYEGYE

SEQ ID NO: 264456 - protein, 60 aa, Glycine max
  Clone ID: PAT_MRT3847_80824C.1.pep
DMAYGNLMAPAATMSVTLCKAEDRHFAVLEQVHGNQSCIALCVRNSSSVAVIRYLLSNGV

SEQ ID NO: 264457 - protein, 100 aa, Glycine max
  unsure (1)..(100): unsure at all Xaa locations
  Clone ID: PAT_MRT3847_80825C.1.pep
GVXXEXEGKXXEKAPXEGDRGAHPXAEGGEXEGXDDAAGKGADXXXTGRXQEQPXGEKKQXGTXXKRXSKKGTPKREAEKQERXKKHXEGATKDRARKRK

SEQ ID NO: 264458 - protein, 79 aa, Glycine max
  Clone ID: PAT_MRT3847_80826C.1.pep
MRTVLSRLRGGTPSICRLNATAVSISGRNLCTDSNKVDEPFKVEEAETVNVPPPPTEKLLELGGNGVVESHIWREALDR

SEQ ID NO: 264459 - protein, 436 aa, Glycine max
  Clone ID: PAT_MRT3847_80827C.1.pep
MATLDPIQNGVSSDNPAAAEPPSTPAEDPTPDAAAEKRWPGWPGHCVFRLIVPVLKVGSIIGRKGELIKKTCEETKARIRVLDGAVGTSDRIVLISGKEDLEAPLSPAMDAVIRVFKRVSGFSEIDAKNKASAVAFCSVRLLVASTQAINLIGKQGSLIKSIQENTGASVRVLSGDEVPFYAAADERIVELQGEAMKVLKALEAVVGHLRKFLVDNSVLPLFEKTYNATISLERQADTTWVDKPSLHSASQPSIVTDLPLSTKRDSLFADRESQLDSLLPPSTMSMYGQDSSLSGLRSSALSRPSAPPIVTTVIQTMQIPLSYAEDIIGIQGTNIEYIRCTSGAILTVQESPVPDEIIVEIKGTSSQVQTAQQLIQEVISNHKEPLASNYSRLDTGLRSSYPQLGSSSYSSSSLSSQPYSGGYGSSGLGGYRTFRL

SEQ ID NO: 264460 - protein, 620 aa, Glycine max
  Clone ID: PAT_MRT3847_80828C.1.pep
IRLELLKRMIEILGGQPPDYVLRDAKNTSKFFKCIGSLQNIESSESSKNGRSVYQTLTVEEYEARELKKPSIGKEYFNQLNLEAIVTNYPYRKNLPKEDILKESQIRLALIDFLKGLVEFDPAKRWSPFQASKHPFVTGEPFTHPYKPPPETPHMPVVQNIKVDNHPGGGHWFAAGLSPNVSGKSRASLYSSPHFQMVQHPPANSYGSVGSHGSYNDSVGLGSSYGSYGESSNMFAYYSPIGPSGMNMHNQGSMSMLGNSPDARRRVKYQPGNGLGISPSAGNFAPLPLGASPSQFTPPSSYSQVSVSSPGHYGPTSPARGTSHGSPLGKTAAVSQFNRRKNWGHSGSPQTLETFSSHWQGQYPDSTSHTEGTSQALGSSPSYLQSNSNPGNWKQRGSGGLSANQNISSLMKPSASMNSQSTELVYDNAETGISLPDPGDWDPNYSDELLLQEDGSDESSLTTEFGRSMNLGATETWAGFGRFNHVSSTNTPPIIMQRLNGPSQAFTNVEMGSLPMHDLQATYVPSMSKHFHLMPHILQNSPSRFGYQSVQRFTHGRPPHGAEWNQIKIQAPSSGFSSVGPRSPRNNSFTNSMTWGRRMNPPVSSMPPTSRARKDYARID

SEQ ID NO: 264461 - protein, 82 aa, Glycine max
  Clone ID: PAT_MRT3847_80829C.1.pep
PNSPSRFAPQSVQRFSHGSPPHGPEWNQIKIQAPFSGFSSVDPRSPRNNSFTSSMTWGRRMNPPVSSMPPTSGPRKDYARID

SEQ ID NO: 264462 - protein, 180 aa, Glycine max
  unsure (1)..(180): unsure at all Xaa locations
  Clone ID: PAT_MRT3847_8082C.1.pep
RYLPCDKIASVLTTSDERLVGTQHEGYDPFLGGIQKYATPMMPLDEEILSKVAHDMVEEWFDCVDEEDSFEEVSFSAALNGVEGLDYMERISLATSEGFPHVXLSRKNGEKGKRRFVSGDGEEMTFIPGSXLEEAYNKLXLELEKSVPTLXGFECPKDEKLPXAKICDKPKTPLFTILPI

SEQ ID NO: 264463 - protein, 151 aa, Glycine max
  unsure (1)..(151): unsure at all Xaa locations
  Clone ID: PAT_MRT3847_80830C.1.pep
RNRTGKKGDDPRRTGLPATTTRGNKGEGPKQQPEKTKPKSKRRGMQGKXQPNHGEGTNERRKKDXEEEAEAPEENPHKGEDGQEHKTGTNKERRANEEAKEXARQDKTDPETRQKRAENRPSKDQRNRQEEEKRKKKGXPEGTNREEGTKK

SEQ ID NO: 264464 - protein, 221 aa, Glycine max
  unsure (1)..(221): unsure at all Xaa locations
  Clone ID: PAT_MRT3847_80831C.1.pep
MAGECSQAMASKSNADQNIKLGQKRKEQSEDEEEEEYDQENEEPSNQKKPRLVWDAELXYDXLAAINHLGIDTPNAFPKRILDLMNVEGLTRENIASHLQKYRLGLKKSTQQPSMVATLGNSDPYQQMDSIEGFRTLSGSGGMISTTLPSYASGGLFCRLNSPSGLRGINSSLLVQPVHSQNIDSKSIKTLGNMQLSMFSAQTSSLLQGHSNINRWVTIFS

SEQ ID NO: 264465 - protein, 85 aa, Glycine max
  Clone ID: PAT_MRT3847_80832C.1.pep
DLQTVQMHEPQIRGPARKNRRLQADLHPENNPGLNQHQRTRPSDLHVFLLWILGRACTWTTCIGITEKKIRYFEKKKKRAAGRDL

SEQ ID NO: 264466 - protein, 91 aa, Glycine max
  unsure (1)..(91): unsure at all Xaa locations
  Clone ID: PAT_MRT3847_80833C.1.pep
QNXXKRXLYIXGXPXXSSXSSSSLSXMAPXKXNSSGNXXMPCSQGENGFVSSFXLFPXKVVQEXLQSPVQGSGDHLXEXSEALRMLAKVSG

SEQ ID NO: 264467 - protein, 217 aa, Glycine max
  unsure (1)..(217): unsure at all Xaa locations
  Clone ID: PAT_MRT3847_80834C.1.pep
KTNFFTIQKKKKKKRRPNIKGRKLTYTSQATGRPPFSATHAPPFWPPCFSLPPWLTPWLPPPPSPACPPRLPPPVVPPKGLAPTPLPPYWALCLVPGPRPLSLLLALYPRCAPPPFPVPXPRPSARPPPPFPLPFSVPPPPCPSPCLPLGAPLLCCRFTSWPPHFPPPTLVYAAEFTVRGPPPSPPRFSRPSPLAFPPPPPSGTFFFPPWPARPPPP

SEQ ID NO: 264468 - protein, 415 aa, Glycine max
  Clone ID: PAT_MRT3847_80835C.1.pep
MAGVSLKCGDCGALLRTVEEAQEHAELTSHSNFSESTEPVLNLICTACSKPCRSKTESDLHTKRTGHTEFVDKTSEAVKPISLEAPKVDATASSENPSAAASTDQNEEMVVPEVDKKLLEELESMGFSTARATRALHYSGNAGLESAVNWIVEHENDPDIDQMPLVPTNTKIEAPKPSLTPEELKAKQQELRERARKKKEEEEKRMEREREKERIRIGKELLEAKRIEEDNERKRLLALRKAEKEEEKSAREKIKQKLEEDKAERRRRLGLPPEEPSAAKPSPAPVVEEKKSFVPVRPATKAEQMRECLRSLKQNHKEDDARVKRAFQTLLTYVGNVARNPDEEKFRKIRLSNQSFQDRVGSLRGGIEFLENCGFEKIDGGEFLFLPRDKIEMAVLNSAGSELDSAIKNPFFGVL

SEQ ID NO: 264469 - protein, 472 aa, Glycine max
  Clone ID: PAT_MRT3847_80836C.1.pep
MAGVSLKCGDCGALLRTVEEAQEHAELTSHSNFSESTEPVLNLICTACSKPCRSKTESDLHTKRTGHTEFVDKTSEAVKPISLEAPKVDATASSENPSAAASTDQNEEMVVPEVDKKLLEELESMGFSTARATRALHYSGNAGLESAVNWIVEHENDPDIDQMPLVPTNTKIEAPKPSLTPEELKAKQQELRERARKKKEEEEKRMEREREKERIRIGKELLEAKRIEADNERKRSGSASKFIVAHLVFCFECTQLQEKNASSCRLLALRKAEKEEEKSAREKIKQKLEEDKAERRRRLGLPPEEPSAAKPSPAPVVEEKKSFVPVRPATKAEQMRECLRSLKQNHKQCFSTIVCLLKYCDTLAYLRVHLFLEQEDDARVKRAFQTLLTYVGNVARNPDEEKFRKIRLSNQSFQDRVGSLRGGIEFLENCGFEKIDGGEFLFLPRDKIEMAVLNSAGSELDSAIKNPFFGVL

SEQ ID NO: 264470 - protein, 52 aa, Glycine max
  Clone ID: PAT_MRT3847_80837C.1.pep
HFCSFIVVGSDLCKQQPYIGLCYLKSFASWKTCARLGLRDYIRLVGYAVKHV

SEQ ID NO: 264471 - protein, 69 aa, Glycine max
  Clone ID: PAT_MRT3847_80838C.1.pep
VFTPNLRRESLTFEAGSLVLKASHLMRRCCNCVCGDALAKIEFESGIRCVLSTYVRETRGFSDELNSSN

SEQ ID NO: 264472 - protein, 238 aa, Glycine max
  unsure (1)..(238): unsure at all Xaa locations
  Clone ID: PAT_MRT3847_80839C.1.pep
MMGGQSSKIPSNSGVPTPIKMGTHSLYAADLNSYEAACVEDPNLQSLDATIQERTNRVITSLANGIEVRSISIESLGEMTGSLLEMNQDVAKVILECQXDIWNKKDRELFCLVEDFFENSLQTLEFCNALDKCLNRARERHVIVKSAITCFEEEVQNGVEGSTYLKTLQELKGFKEAGDPFTEEFYSFVQSVYQQQASMLKKLQIRKQKLDKKLKSLKTLKKVSNAIFXAAFVSGLIF

SEQ ID NO: 264473 - protein, 66 aa, Glycine max
  unsure (1)..(66): unsure at all Xaa locations
  Clone ID: PAT_MRT3847_8083C.1.pep
LYRCFIIFFVGIIHYRDLVXLLYESVKPIFLTWSFHHNFFAIFALXLLITNYSCLSSYPIYTVIIK

SEQ ID NO: 264474 - protein, 63 aa, Glycine max
  Clone ID: PAT_MRT3847_80840C.1.pep
THQTKVRVSNLQHHIEISSKAKLNLCFNFLSFTVFISTYFPCNPPPKTPKHPPVPKPPSPNLA

SEQ ID NO: 264475 - protein, 165 aa, Glycine max
  Clone ID: PAT_MRT3847_80841C.1.pep
EKDAATPFWFCRTTSSLTSCMVREIAKPSQNQVHSLCTILTPTHLFSLNASIQAASHFRVSFFSHNWTSQILLTHFLHFVTVFSEGIYSSERRQRNSEISTETQCRIVFWVLDLVTFRALFFLTSQSQDLIEHLKLCNCWSLRQLVIDCDPIVFTLLILEVGFTL

SEQ ID NO: 264476 - protein, 117 aa, Glycine max
  Clone ID: PAT_MRT3847_80842C.1.pep
KRNIYEYVHMLFNEYDRNAQNMNGVGENAGITEGMATRLGPQSQATPNRRRCGTEEADAAGHSNLEPSPAAAAADLTRRGGAGPTEKGRRGGPQRALGKKSLNRNKQKNIRRYKLIM

SEQ ID NO: 264477 - protein, 101 aa, Glycine max
  Clone ID: PAT_MRT3847_80843C.1.pep
KASEAQHSNPHHPYRYESSPQSTLHGHHVRKLFIVISYLLPQNDDKTLSVVVTCPYKKEEDLTTPPPCEIGFFLSGSCCMLLGPFRVTLARRRPSSTLIFI

SEQ ID NO: 264478 - protein, 142 aa, Glycine max
  Clone ID: PAT_MRT3847_80844C.1.pep
IRKTLTVLNHLHSLSTILTPTHTFSLSINASGSSAIHFRLSFFSHNWPSQILFTLFLHFLTLFSSGRNSSQRYQPNSQTQCRIVFWVLDLATFGAFSFLTYQSLDLIEHLKHCNCWGLRQLVIDCDPIVFTLLILEVRFNLW

SEQ ID NO: 264479 - protein, 32 aa, Glycine max
  Clone ID: PAT_MRT3847_80845C.1.pep
FSWLKCYANNLKVIDSILAWIINFKLIHNTFF

SEQ ID NO: 264480 - protein, 95 aa, Glycine max
  Clone ID: PAT_MRT3847_80846C.1.pep
LVKTEHAVLFVFLMEQSWGKWPLDMGMDEHRDLRDEEEFLRNILNEPSESEMATAGSTKMPPRTYILAVDNYTIIPTTPEPTFRKRTRQPHNLNL

SEQ ID NO: 264481 - protein, 142 aa, Glycine max
  Clone ID: PAT_MRT3847_80847C.1.pep
MAGTLNLTPLTGAGRTLRPPFRISIRAFTATAIDSRRAASLYEVLRIKQNASAVEIKSAYRNLAKVYHPDSALRRSESDERDFIEIHDAYETLSDPSARALYDLSLMAARDDNRSFSSLVAAPNGSSGFYYQTRKWETDQCW

SEQ ID NO: 264482 - protein, 75 aa, Glycine max
  Clone ID: PAT_MRT3847_80848C.1.pep
CDLVTSLIIFVISSMCEVYSRILCGFTRKMNNEFILCLCVCACVMSTGRCSHVSKELIFVTESSQWTTSILERVY

SEQ ID NO: 264483 - protein, 75 aa, Glycine max
  Clone ID: PAT_MRT3847_80849C.1.pep
YDACLALKHLQGHHLKYFQSYTGAQIPSVGLGTRHADPGWESATLTTDTQVGYRHHSCARAAKTHQRWALLLDAV

SEQ ID NO: 264484 - protein, 144 aa, Glycine max
  Clone ID: PAT_MRT3847_8084C.1.pep
ILSKVAQDMVEEWFDCVDEEDSFEEVSLSASLNGVEGLDYMERIPLATSEGFPHVLSRKNGEQGKRRFDSGDGEEMTLIPGTSAEAAYNKLIVELENRDPTLVGIECPKDEKLPRRRTFDTPMTRCFTILPMEFNLVGPQKNLN

SEQ ID NO: 264485 - protein, 116 aa, Glycine max
  Clone ID: PAT_MRT3847_80850C.1.pep
YYSRPSKNVPPPGKNFSLAKNCVFIGPPVPSKQKPNFGFPLKWPPKKKFLFINRNFFFFPKPFIREVKFFFPGAMPFVKSPPPLGCSPLFFIPSGFPFPPHFPKCSLQKKKAPWGF

SEQ ID NO: 264486 - protein, 68 aa, Glycine max
  Clone ID: PAT_MRT3847_80851C.1.pep
TMSSTSSGVTVIRAACAHRGKSECGMSEQPMVNKKLGGFANLGCTQTEPFGLPQNQCQKKKSRKKSTC

SEQ ID NO: 264487 - protein, 127 aa, Glycine max
  unsure (1)..(127): unsure at all Xaa locations
  Clone ID: PAT_MRT3847_80852C.1.pep
TRQAPTREQKRNTQEAKKPTTGTNXSXKPNTARTHHTPKPSRXPAAREKEGXXHNKHNTREAKKPVFFVETGAGARTVTDAKVNIKGPMCAXIEIPPPTPQQISIGSPPKKHSIGSFESPRKTAPNQ

SEQ ID NO: 264488 - protein, 60 aa, Glycine max
  Clone ID: PAT_MRT3847_80853C.1.pep
FHSKVWHPSSVARSCSFLVIRGTSRCLLFPTRSLNASMLALIASHHGALVASLHIDSPPG

SEQ ID NO: 264489 - protein, 125 aa, Glycine max
  unsure (1)..(125): unsure at all Xaa locations
  Clone ID: PAT_MRT3847_80854C.1.pep
NCDARNATVKSSGWASLVQVFLTNGTRTDHFDACKWSXSDPHSWELIFPIEVCGPNNGFKMWSSEWANQHSWHLSFLIDNPKQFTVFDILLEISQDFEIAGKPFMPAFFVPQETARXSEKAESYA

SEQ ID NO: 264490 - protein, 490 aa, Glycine max
  unsure (1)..(490): unsure at all Xaa locations
  Clone ID: PAT_MRT3847_80855C.1.pep
MGFRVRNLNPVFRTCITRLSSSNFLPPVLESLNSHPLESCLTENPAFKIPRRWHLGHSHSHHDDRHHYHKEGENIFRLGLAADIGLATGKAFTGYLSGSTAIIADAAHSVSDVVLSGIALLSFKVAKAPRDKEHPYGHGKFETLGALGISCMLLATGGGIAWHAVDILMGLFSSGPEIVSQTLAHGHKHSHGHGGHHHGIDMEHPILALNMTIVSICVKEGLYWITKRAGEKQGSGLMKANAWHHRADAISSVVALIGVGGSILGVKFLDPLAGLLVSGMILKAGAETGYQSVLELVDAAIPAQXLDPIKQTILQVDGVKGCHCLRGRRAGSYLYLDVHIEVDPFSSVSAAHDIGENVRHQIHKSHPTVVEVFIHIDPAMSHASHQRDSWSGDMNQSSIVPAEDSNIEGIVSDIISSNFPQMSVERIARHMFQSKIVLQIEVSMPPDIPIGHAMEMAKLAEKEIFKAVSNTIHVSIQLRLGQPFPQINHT

SEQ ID NO: 264491 - protein, 89 aa, Glycine max
  unsure (1)..(89): unsure at all Xaa locations
  Clone ID: PAT_MRT3847_80856C.1.pep
PTPPANLFEKMAQGLRSHQLDWGIPGGFKGLQDKTNDXTLSNSHVPDYSTQAHVTAYVEHTYGMSRDYVHKEIKPLLNMCIQAPRSITT

SEQ ID NO: 264492 - protein, 57 aa, Glycine max
  Clone ID: PAT_MRT3847_80857C.1.pep
AKDGAENGYGAKAAEILDQVRGRGFRHEKTKKKRGSYRGGQIDLQSHSVKFNYSDED

SEQ ID NO: 264493 - protein, 374 aa, Glycine max
  unsure (1)..(374): unsure at all Xaa locations
  Clone ID: PAT_MRT3847_80858C.1.pep
MPATPPSNKGRISTLFAFTPRQVLLSNQTMKHTTDNGTPISEHKVLLHQSIARYLERSGFSKTLKKFLSEAHIEKNDLEGSPVDLEEMCLKYLEICGKDGKSNINDQNEQVAGGHSKNKEEGKSKEKKKKKSKLVSESLATNVEDNHLESVATVEENKVKDGVSTDAKVINGSEKEKKSKSKMKKKDKQSGQGDVIEQIGDPNETVSKEENIEASNKEMMHEVEKDSKKRKRPISEENGQQVADEETKRQKNRKXNESKEQTNGNLEKGGEKSSVQGSLKKQQKGSVEKKPVKPAFQRVQVDKIQFTDERLQDNSYWAKDGAENGYGAKAAEILDQVRGRGFRHEKTKKKRGSYRGGQIDLQSHSVKFNYSDED

SEQ ID NO: 264494 - protein, 101 aa, Glycine max
  Clone ID: PAT_MRT3847_80859C.1.pep
DHGGPSARSSNSSPSVLILSRCRSSHYMVPHIPCSHRRYLYYNLFFMGGNPHVVEAYVKRMYCAVIRRILGTIDNGTCGVGLYKWASYFNIIDLLSMLHKK

SEQ ID NO: 264495 - protein, 70 aa, Glycine max
  Clone ID: PAT_MRT3847_8085C.1.pep
AREDLKIISEVYYKRNSDLLEHAIAKETSGDYRKCLLTLSGNEDLQLCFQGIRDYELRTVSYTCVRWFHV

SEQ ID NO: 264496 - protein, 179 aa, Glycine max
  unsure (1)..(179): unsure at all Xaa locations
  Clone ID: PAT_MRT3847_80860C.1.pep
MRALFLLLLLELAFLASDGDSFDIAYXXKENLKHNKCFQRFYIERDSYRNQSCHAQCNLLNEXKEECEECEIPRPXPRPQHPLREPQXPDEKEEDEHEXPRSISFIRPQXPLRTXELEQIEEHERPLKDEKRVEYVSEQEDQDDDDEHDERLIPLLRSPHQIEXRKQEYDDDDEQQLET

SEQ ID NO: 264497 - protein, 759 aa, Glycine max
  Clone ID: PAT_MRT3847_80861C.1.pep
MLDGILGRGFTAKCKSLIKLTNRRIDVIRRKRRATEKFLKKDIADLLLNGLDINAYGRAEGLVVELTLSSCYGFVENCCEFVLKHLPAMQKLSGCPEECRMAVSSLMFGAARFSDLPELRDLRQIFQERYGNSMECYVNQEFAANLNFKSSTLENKVCLMQEIASEFSINWDSKDFKLRMSRSSANVQGHNACMSNHDKPSHGKDFTQKEVRNDVLLEKNCDLANNGCRFRNGKEAVVLNRLDHDLHSRSVLPGNGFKPLNGHEVLRKRDAHDNSGRQEITVEKSDKGCWKEGSMLKPIGHPSQQKTVEQFEGGSKLQYSRGNITPPRANQGSMLKLFGHPSQQKNVEQFEGGSEQQRSRGNATPPRENQVSMLKSFGHPSQQKIVEQFEGGPKLHYSRADITPSRANQGSMLKSFGHPSQQKTVELFKGGSKLQDSIGNTTPLRENQDAAIARKSPSDVGSHFNSNANEPFAVNHAGLPGADKSERETQSDETPALKPCYSNVIPPPYVKHPNSKQQSSTRGANIISSLTDSGGISTYHSAHEKPDAAYVMERRIQIDLDSSDQDWQGNRHERLSKQSCDKEISIREDAEEVPVVKPRSMRRRHSRSRPPGYYDASNEDSELERKSRSRSRRRDESRRGLKAMLDDERYQNAEEERVIDKLLIHYSKKPSVLVPEKLKRNSKIHHAHDSTRELLQNGSGYASRSFSLPREKQKEAEIKKKVFTRAATFEPVRSLEARHVHPKLPDCDDLAARIAALRG

SEQ ID NO: 264498 - protein, 59 aa, Glycine max
  Clone ID: PAT_MRT3847_80862C.1.pep
DDLDQSHFRLEDKTFQKEHECMSDRLNVSKGNNNKSKQYFPYLKGVSIGLFFFNGKIYT

SEQ ID NO: 264499 - protein, 46 aa, Glycine max
  Clone ID: PAT_MRT3847_80863C.1.pep
FRFFSWENVFKICSRLVIQKCLRRDFEHGFPGENVFKISLKTFLYY

SEQ ID NO: 264500 - protein, 49 aa, Glycine max
  Clone ID: PAT_MRT3847_80864C.1.pep
MARELKRFMLGVSVSKNNSHVCGCGGGSRKIGGCHSSTSESLACLKGQG

SEQ ID NO: 264501 - protein, 109 aa, Glycine max
  unsure (1)..(109): unsure at all Xaa locations
  Clone ID: PAT_MRT3847_80865C.1.pep
ACLRVLEGHEVLVRCIRFDNKRIVSXAYDGKIKVWDLVAALDPRAPAGTLCLRTLVEHSGRVFRLQFDEFQIVSSSHDDTILIWDFLNDPAAQAEPPRSPSRTYTYISR

SEQ ID NO: 264502 - protein, 120 aa, Glycine max
  Clone ID: PAT_MRT3847_80866C.1.pep
KKGTSEVFVLGPPGVQNVEEEMVSFFHLPVVVGAQFPAKRPLIFKVVRGTQKLQRFSFKKARGQIPHANDIFFKKNRFLLPPLCFVKGGAHFFLGKPRGDVASLFWGGAAPKFFFWAPNF

SEQ ID NO: 264503 - protein, 214 aa, Glycine max
  Clone ID: PAT_MRT3847_80867C.1.pep
MSASKSGSRKRASESERAKSDKNKRSATDNFDLDLDFDLSDDIKGIVSALHLIRDKAQKDGQKKNEETISSVGSEVKSMIEGLRSKIEKDRQSFAKALSKSSKEYESSLKNETAKFQAFHENFCKEKATSLQALKDIISKFEEEKEKLFVRYEQLRKKERVMISEQEKACNHKIAQLEDSLRKKKQDDKTFSILRKTLGSFLESTSDEDFPPDD

SEQ ID NO: 264504 - protein, 565 aa, Glycine max
  Clone ID: PAT_MRT3847_80868C.1.pep
MPTKTSTPSSQSPKLSHLRPQYIPNHIPDSSYVRILDTTLRDGEQSPGATMTAKEKLDIARQLVKLGVDIIQPGFPSASNSDFMAVKMIAQEVGNAVDDDGYVPVIAGFCRCVEKDISTAWEAVKYAKRPRLCTSIATSPIHMEHKLRKSKDQVIQIARDMVKFARSLGCNDIQFGAEDATRSDREFLYEILGVVIEAGATTVNIADTVGIVMPLELGKLIVDIKDNTPGIANVIISTHCHNDLGLATANTIEGARTGARQLEVTINGIGERAGNASLEEVVMALASKGDHALNGLYTRINTRHILETSKMVEEYSGMHLQPHKPLVGANAFVHASGIHQDGMLKHKGTYETISPEEIGHKRTTRIGIVLGKLSGSQALRKRLEELGYDLKEDEVDSVFWQFKAMAEKKKVVTDVDLKALVSYKAFHAESIWKLGDLQVTCGTIGLSTATVKLVNIDGSTHVACSIGIGAVDSTYKAINLIVKEPTKLLDYSLNSVTEGIGVNVTARVVICRENNHTSTYAFTEDANYPTFSGIAAEMDVVVSTVKAYLVALNKLLRWKESFRCA

SEQ ID NO: 264505 - protein, 102 aa, Glycine max
  Clone ID: PAT_MRT3847_80869C.1.pep
PQIFVAQNWLWFTPKICFPLCFSSYQFLLFSNKKGGPKLFVPFRPQNGGEIFFTKGFPPLRGFPFSPFPPLGPLTPLKGKPCHHKKWAFFCWEAPTIKKTKA

SEQ ID NO: 264506 - protein, 138 aa, Glycine max
  unsure (1)..(138): unsure at all Xaa locations
  Clone ID: PAT_MRT3847_8086C.1.pep
LFYLAVRQKLLNFARFIMKKRDKLSCQVGINPYSMEWTGLANRLLSKGNDILCCDYAWLDGWITKQVMSKMAELINSLCGGDEKLMRVRTHLLLACCSRVAICKKDVRRVECGIPSGCALTGVXNSITHEMLIRYSYE

SEQ ID NO: 264507 - protein, 153 aa, Glycine max
  Clone ID: PAT_MRT3847_80870C.1.pep
LRVRPRVRTGLQRYNCTMTRTLLAVTAALCALAVAPAYPAVHHPKRLGRGNYFADEILADINKTAFGILDNVAEKQKLVQWTFGYSLERAADFADGLTGDWPAKIESLGAQAEQDFDIDATVCIRDGIDSLGGDIFAVRSSTQKCVAKRHEPL

SEQ ID NO: 264508 - protein, 82 aa, Glycine max
  Clone ID: PAT_MRT3847_80871C.1.pep
PRVRRLREDDRRGQHPFLFCSFFRSGFPLVSGLVSFSNNRSTIMTRGSQRDRDRERAQARTGAKGKQNSSPGSFRSRIIDLR

SEQ ID NO: 264509 - protein, 40 aa, Glycine max
  Clone ID: PAT_MRT3847_80872C.1.pep
SLVESMKSRSLSFPNCLKSGSISISSGSMQVQRTHHIFII

SEQ ID NO: 264510 - protein, 51 aa, Glycine max
  Clone ID: PAT_MRT3847_80873C.1.pep
SGVGTRSFPPSYFNISWPDLAFSYDINAPLYYRYISHLHQQGKSLATILHY

SEQ ID NO: 264511 - protein, 39 aa, Glycine max
  Clone ID: PAT_MRT3847_80874C.1.pep
LVPLGVCEQRDFLKHLVLDTYICCPSVRLPAVVYIKWPE

SEQ ID NO: 264512 - protein, 99 aa, Glycine max
  unsure (1)..(99): unsure at all Xaa locations
  Clone ID: PAT_MRT3847_80875C.1.pep
KXXDTVPGXSXDFLGAXXARVYDDEXRKWISXXXXXGIGXXXVNSKDGPPXLEQPKMXLEKXXTYXNMPXQEXENVKRVQLADKDWXXAAXGNXNEDAX

SEQ ID NO: 264513 - protein, 62 aa, Glycine max
  Clone ID: PAT_MRT3847_80876C.1.pep
NIISKKTKKRAQVISPLPEAAEGEPIPEAVTSQASEPVTVELKISMHCEACANKQLKRKILK

SEQ ID NO: 264514 - protein, 41 aa, Glycine max
  Clone ID: PAT_MRT3847_80877C.1.pep
KLNYEHFLSSIWGSLHSLSVFPCLVSCRVHVAISSASHEWH

SEQ ID NO: 264515 - protein, 35 aa, Glycine max
  Clone ID: PAT_MRT3847_80878C.1.pep
FVMAEGFATHARMGCGCWYGSRTLFSCVALAFTLR

SEQ ID NO: 264516 - protein, 58 aa, Glycine max
  Clone ID: PAT_MRT3847_80879C.1.pep
LSQHNMTYSYYIIITSLHLIFCFYKYSLKLVNLMHKRIPTYVRIPFCLPHLDITPHFI

SEQ ID NO: 264517 - protein, 164 aa, Glycine max
  unsure (1)..(164): unsure at all Xaa locations
  Clone ID: PAT_MRT3847_8087C.1.pep
SNDNIDLLLSIDLLGLQGAGKAFPNKIVFDDKLVLANTQEFFDGNFPVDSWLPIFVNCLYPVSQLPPEAVVVNVTCGSGRGGXPTTAWIXSAFNNLSSHINKKILSALGRGKKSVFLTRVDPVTVSLLAVLSGFKNEMLCSNNHNYMLTAIIENCKILKYMGDE

SEQ ID NO: 264518 - protein, 54 aa, Glycine max
  Clone ID: PAT_MRT3847_80880C.1.pep
SSHIQTGAIYYMACFVKIKNMLHTHILTTKVSLRQLLLLLNTGVFSYISLSLLP

SEQ ID NO: 264519 - protein, 74 aa, Glycine max
  unsure (1)..(74): unsure at all Xaa locations
  Clone ID: PAT_MRT3847_80881C.1.pep
GARAPXRAYAARRRQKGMCQVTTXDGRRXISGGXTGGMIQEPMGVIGDSYKWDWRTMTWIQRTGQKFGGWFSWA

SEQ ID NO: 264520 - protein, 75 aa, Glycine max
  Clone ID: PAT_MRT3847_80882C.1.pep
AMRSSACIYDLLLKALYMLVEMASTLVTTASKYFYQCNHKYKLVLSFLPFYCFFYMYRKFYLGREGMAGEILEAF

SEQ ID NO: 264521 - protein, 71 aa, Glycine max
  Clone ID: PAT_MRT3847_80883C.1.pep
SLVFRTLDSCIFSLFITDSLLPSPARNFLWGWFRARGFERASIRSGRRLFLHLSGTWLRATRFYPRLLSYE

SEQ ID NO: 264522 - protein, 28 aa, Glycine max
  Clone ID: PAT_MRT3847_80884C.1.pep
MIQCSCCVSGWRSSRYCSVAKGWRNRCE

SEQ ID NO: 264523 - protein, 95 aa, Glycine max
  Clone ID: PAT_MRT3847_80885C.1.pep
TKTPLTSLFILTANQPHSYIRTYAWFSFKLCGPQDIWGPPKRHANRPWWDPNLKHSWKMSSLQETANNSKESCICIETQRRRPTAKFNATSNLDK

SEQ ID NO: 264524 - protein, 338 aa, Glycine max
  Clone ID: PAT_MRT3847_80886C.1.pep
MDLFTGDHFPVPDHVAPFPDSGDLLFAADLLSHRHNPQKFRPIRSVPTAPIANPSPPPLSHDPIPSGSGHAPCHESSLSFDAEDEDEDDDNSSASTKGHGPRKKRRKMVRKLEDFAKDLVVKVMEKQEQMHKQLLEIIENNERERIKREAAWKNEEMERIRKDEEARAQENSRNLALISFIQNLLGHEIQIPQQPAKPCSKREEDEVEASARKELNNDPGDNRWPDVEVQSLITVRTSLEHKFRLMGSKGTIWEEISEAMNGMGYNRSAKKCKEKWENINKYYKRTIGSGKKRRQNSKTCPYFDELDILYRKGLLSIGNALSNTCGVPQIEVKELNET

SEQ ID NO: 264525 - protein, 60 aa, Glycine max
  Clone ID: PAT_MRT3847_80887C.1.pep
LKIDNRTATQVIMYALSCKNYLLRNLSMNTHRIFFSRIKKTKISFILQNFHSCKLSPLAF

SEQ ID NO: 264526 - protein, 51 aa, Glycine max
  Clone ID: PAT_MRT3847_80888C.1.pep
HAYLHDLLILLNTSHYRGRTILNSTRATRESPIVPTSFDEYHKAVIFQQTH

SEQ ID NO: 264527 - protein, 79 aa, Glycine max
  Clone ID: PAT_MRT3847_80889C.1.pep
ISLFMKFRPSSSDSENWKEGGSEKKIISRFVSVKGQTFGEWGLFFRLCLSVSVVGPNEIMVFRYVIPGRFFSLHFSGDQ

SEQ ID NO: 264528 - protein, 71 aa, Glycine max
  unsure (1)..(71): unsure at all Xaa locations
  Clone ID: PAT_MRT3847_8088C.1.pep
FLSLTSLSHIXHGLPNTNNPQISEITAHPSSPNPPXPSXPLSHHPXXXPXPPPPTLAXXNFVHXXXHXWWX

SEQ ID NO: 264529 - protein, 197 aa, Glycine max
  Clone ID: PAT_MRT3847_80890C.1.pep
MINGNGRNEISSFQSLSAQLWRAVTRARKFNDPAKTSTFRMAVNCRHRLEPKMDAFYFGNAIQSIPTVATVGDILSRDLRFCADLLHRNVVAHDDATVRRGIEDWESAPRLFPLGNFDGAMITMGSSPRFPMYENDFGWGRPVAIRSGKANKFDGKISAFPGREGNGSVDLEVVLAPATMAGLENDMEFMQYVTQFV

SEQ ID NO: 264530 - protein, 98 aa, Glycine max
  Clone ID: PAT_MRT3847_80891C.1.pep
CGSSSCPQFGWPDGAVARPVRARRLEAEWVEQYEPGVYITFTTLQCGKKGLKRVRFSRKRFSEKEAEKWWEENQGTVYHKYGIEGYINNNTSQSQVKG

SEQ ID NO: 264531 - protein, 111 aa, Glycine max
  Clone ID: PAT_MRT3847_80892C.1.pep
LENQHRQMPMRCYLAGNQEQEMVKYHPEQGGHQSRRGTHHQEEENEGGSILSGFNLEYSEHAVIVDKQIAKNVQGESESEDKGAIETEKGGLSVIKPPTDEQQLRPQEEEE

SEQ ID NO: 264532 - protein, 57 aa, Glycine max
  Clone ID: PAT_MRT3847_80893C.1.pep
VSLDDMFFLFMLDDVFWPCLMYIHILPNCYFIFQLLLFTFKQMKKNEKNRKRMKLNT

SEQ ID NO: 264533 - protein, 208 aa, Glycine max
  unsure (1)..(208): unsure at all Xaa locations
  Clone ID: PAT_MRT3847_80894C.1.pep
MIQSQEISMLPIFCFCAGMFFTNRMWTIPEPKGLARTTAMEAEKLNVVSEGCNSRILQDKEVKQKIGSMEISXRLNIATLGQTLLGDGSKPRVYIGCXLAAAKAAQESIRSGAPVAEDIKMSESSGRRRYLMVVGINTAFSSRKRRDSVRETWMPQGEKRKKLEEEKGIIIRFVIGHSATSGGILDRAIEAEDRKHGDFLRLDHVEGY

SEQ ID NO: 264534 - protein, 61 aa, Glycine max
  Clone ID: PAT_MRT3847_80895C.1.pep
KCNVRMVLGDQIMEFCTNKTSWCFVTRSIGLYFVKFNRLLMLTFYIIVYCLMLIHTLLLFA

SEQ ID NO: 264535 - protein, 84 aa, Glycine max
  unsure (1)..(84): unsure at all Xaa locations
  Clone ID: PAT_MRT3847_80896C.1.pep
KIERARLIKKLTKIKEEQRLIAKATNLMQEIAMKTFNTITKTERIAFILKQXRLYLDHRNYIHTQILXRKISTRVFNADISKEK

SEQ ID NO: 264536 - protein, 66 aa, Glycine max
  Clone ID: PAT_MRT3847_80897C.1.pep
YSSRQTASYNPNAYRCIRQIEGIYTYLSEYDTTIEMMVHTSIRDQIMIKCVVQLLIIIQCKPTRSP

SEQ ID NO: 264537 - protein, 48 aa, Glycine max
  Clone ID: PAT_MRT3847_80898C.1.pep
GPYLMDYGEALSFPCFREFILCRCVGLDTYLRFSYAWLAFEAVVTTHS

SEQ ID NO: 264538 - protein, 99 aa, Glycine max
  unsure (1)..(99): unsure at all Xaa locations
  Clone ID: PAT_MRT3847_80899C.1.pep
XICXWGXPWXHLXSXXXAXYXXXXXXHLXLTLALCXXXXXXVSXSXXXTXXSXLXXXXXXPHWITXXXXXXXNKSPTQCTMLXXSSXXPYXXSMCXXXR

SEQ ID NO: 264539 - protein, 31 aa, Glycine max
  unsure (1)..(31): unsure at all Xaa locations
  Clone ID: PAT_MRT3847_8089C.1.pep
RIIFRYLWPFSKMVRALIHKFKFPGAXFPPN

SEQ ID NO: 264540 - protein, 128 aa, Glycine max
  Clone ID: PAT_MRT3847_808C.1.pep
IPTHRTQFLSSSQRFNSQFFKNFSRFHQFESYCFFALFSLPNSVICGIPCDFRVWGCWIRVHCDGDGNLRVEVLNLWIFFRSESFFRGSLMASAQVLPNSTASSRKQEHLEAGKRRLEEFRKKKAAER

SEQ ID NO: 264541 - protein, 172 aa, Glycine max
  Clone ID: PAT_MRT3847_80900C.1.pep
MPVHALPFSKDSPPPKPKEAHFRGVRKRPWGRFAAEIRDPWKKTRKWLGTFDTAEEAARAYDAAARTLRGPKAKTNFSYILAPAFHLPPPVLTTPEAHALAQAQAQEQLARQVEFCGPPFFFATDVASTAPVRSEYKGYKLENIAGFVVSKEEQKEKNKPFLFDLNLPAPLF

SEQ ID NO: 264542 - protein, 48 aa, Glycine max
  Clone ID: PAT_MRT3847_80901C.1.pep
QQTRNIIWILLTSLLSGLAKLYLTPFSFQKRHFKGGRSKFQLSSLKQS

SEQ ID NO: 264543 - protein, 66 aa, Glycine max
  Clone ID: PAT_MRT3847_80902C.1.pep
WRFSPPRGFLVPFIGGGHPSCFNKPPFWFLREPFLKEGPPKAFKGGVFLFPQNWGTLGPGVPPEPP

SEQ ID NO: 264544 - protein, 68 aa, Glycine max
  Clone ID: PAT_MRT3847_80903C.1.pep
GSGTLRYFWSNSTSSRTSTFQPLCSEHRDFSADAAEPSPWLILVMQSIHDLDQHQAIMSMEGFMGQVA

SEQ ID NO: 264545 - protein, 152 aa, Glycine max
  Clone ID: PAT_MRT3847_80904C.1.pep
EGQRLYVAISSEGEEKRGEELLKKLLESLIGDGESPFLKNISRCLDSKHLDLVRACLITVTWLSSSLSMLFSAGLHLPAFLSIISQLKGILENGELELKTLASLSLLNFSKISECKTLLKTMAEDIGPLLHELDDVTWTAKQLHAIVSRENL

SEQ ID NO: 264546 - protein, 88 aa, Glycine max
  Clone ID: PAT_MRT3847_80905C.1.pep
VQGTVVFLLLFVCSLSLSFLSHIHPCLSRKPFFLFSLSYDIIILPLKILSYLCLFSPFPLFLSSHKLCGLVFRCMNVLFLALVASSVS

SEQ ID NO: 264547 - protein, 46 aa, Glycine max
  Clone ID: PAT_MRT3847_80906C.1.pep
VGVYRPCLKKKRWGVGKQHCRWQILLETKILQFFAPLGTHFVLAVS

SEQ ID NO: 264548 - protein, 136 aa, Glycine max
  unsure (1)..(136): unsure at all Xaa locations
  Clone ID: PAT_MRT3847_80907C.1.pep
XHXXXXXSXXXXXXXTXXXXXXXXTQXXXXXXLXPGXXXXSRDXXXXXLXXAQXXXMXIXXXXXXXAXXATXXXXLXXRFXSXNXXTXXXXSXLXXLXXXXXXQXXXSXSQXXXRXXIFWXFXXXXEXXTXXXXXT

SEQ ID NO: 264549 - protein, 87 aa, Glycine max
  Clone ID: PAT_MRT3847_80908C.1.pep
MEYLRLSLFLCMLSLSATSPSSFASPNSIRADYAVNLNATNFDAVLNDTPATFALVQFYAHWCPACRNYKPHYEKVARLFNEPDAVH

SEQ ID NO: 264550 - protein, 79 aa, Glycine max
  Clone ID: PAT_MRT3847_80909C.1.pep
FGQRYAIQNIFDIHTASIPSNVLHIAAKCKHVRIISQRKKGINYYQTIQICHSALRWIRIHLMVCDRHPESIYYFLKIK

SEQ ID NO: 264551 - protein, 114 aa, Glycine max
  unsure (1)..(114): unsure at all Xaa locations
  Clone ID: PAT_MRT3847_8090C.1.pep
CLQGAGKAFPNKIVFNDKLVLANTQEFFDGNFPVDSWLPIFVNCLYPVSQLPSEAVVVNVTCGSGRXGGLPTTAGISSAGIKCSLDINKKIRTGLGTGMNTVCFTKCESFPAAL

SEQ ID NO: 264552 - protein, 82 aa, Glycine max
  Clone ID: PAT_MRT3847_80910C.1.pep
PTLVAAFVVAALFIAPRVVVSSNFFGLSYVLSRNSKGRFTYFHWLCSLNYKIYTLFSICLLFSKICTRNIEDNFFFWFQYKS

SEQ ID NO: 264553 - protein, 232 aa, Glycine max
  Clone ID: PAT_MRT3847_80911C.1.pep
MGGRKKKFIDKKNSATFQLIARDTSDPSFSQSDRVFVRVDNNPVSFPVADDSAFDDSPDDYYYDDGGGGVSGGPLPEGVRREILELGFPDDGYNYLNHLREIKNTGAGAAFFHNPKFKLQHLPRDVKAYDASRLQISEADGEAVENTIYSVASKTTSVRVQKAVDPEVAALLDDDDLSRLGSDVEDLEEDFVVQANLLEEEDEEDDEKDPICNETSFSEESAIHRGTMHTHC

SEQ ID NO: 264554 - protein, 46 aa, Glycine max
  Clone ID: PAT_MRT3847_80912C.1.pep
DGGAHGGGYCGCAGAGGGGGYGAGGAHGGGFGGGGGKCECPCGLFP

SEQ ID NO: 264555 - protein, 86 aa, Glycine max
  Clone ID: PAT_MRT3847_80913C.1.pep
FKDNGNNIQVKVEIMLIEGDNIAKAITDHVRVHSIRKLVIGITKSNLSKSVSRRRNAIANKVLKNVPEICDIKIICDGKKVIDQNI

SEQ ID NO: 264556 - protein, 53 aa, Glycine max
  Clone ID: PAT_MRT3847_80914C.1.pep
CGGHASSTDGGFTGDAGSGPYVESFEAESYHGCRKAKFAPNVFPLRDNYKREE

SEQ ID NO: 264557 - protein, 129 aa, Glycine max
  unsure (1)..(129): unsure at all Xaa locations
  Clone ID: PAT_MRT3847_80915C.1.pep
DVSQFSDIYQEEHFINYLTPDIRIVRQLPKELQSLDLEAIGSVVTDVDMEKEAKPSFYLKHILPIILKNQVVHFVGFGNRLAFDPIAFEXCRCNFHALQFVPRIQETGALLLKRLREHSGLIGPLDRYL

SEQ ID NO: 264558 - protein, 634 aa, Glycine max
  unsure (1)..(634): unsure at all Xaa locations
  Clone ID: PAT_MRT3847_80916C.1.pep
MVSASEPDRCSRTSRTPSRLSSSRRSQSHFSSWYPRKRAKLLLSLIAFLAFVFFHNWFMLLRLQHQPDPIPKPTLRSSSVSLSLKRKWNKPSNKKKSQKGNYARMLALAAHALAENKREPKDLWQEPFVPASSWRPCADQRNWEPNGMCGXNLTMIHIVYVYKXCNYKRKIKVQADTHSLLSCTVXPIEGKNGYILVTANGGINQQRVAVCNAVVVARLLNSTLVIPKFMYSSVWRDVSQFSDIYQEEHFINYLTPDIRIVRELPKELQSLDLEAISSVVTDVDMEKEAKPSFYLKHILPIILKNQVVHFVGFGNRLAFDPIAFELQPYYALPNWGTSYXRFRCRCNFHALQFVPRIQETGALLLKRLREHSGLIGPLDRYLVGPFAESMKEKSESNAKKASKYLALHLRFEIDMVAHSLCEFGGGEEERKELEAYREIHFPALSLLKRTTKLPSPSELRSEGLCPLTPEESILMLAALGFNRKTHIYVAGSNLYGGGSRLVALTNLYPKLVTKENLLSSSELEPFANYSSQLAALDFIGCTASDAFAMTDSGSQLSSLVSGYRIYYGGGRMPTIRPNKRRLASIFMKNSTIEWRVFEQRVRKAVRQTKHVQTRPKARSVYRYPRCKECMCRTD

SEQ ID NO: 264559 - protein, 135 aa, Glycine max
  Clone ID: PAT_MRT3847_80917C.1.pep
EALNISDLQMLKDGKWIAVKPNPDALIIIIGDLFQAWSNGVYKSVEHRVVTNPKLERFSVAYFFCPSDDTVIESCSTEPSLYRNFSFGEYRQQVREDVHNLGYKIGLPKFLLSTGDKIVCMNMYHEFNFPTSTGT

SEQ ID NO: 264560 - protein, 145 aa, Glycine max
  unsure (1)..(145): unsure at all Xaa locations
  Clone ID: PAT_MRT3847_80918C.1.pep
AGVDLGTREGATGTNHFGQEGKGPFFLTGSMDGIKPGIHGNHGQAVGETTNGGPPTGXQFKPKNKEQGDPEDEKPPAGEPGKDKAGEEGNDKLQIKERRKPLTGPNTIQGRAGGGRGRSEEPGKGGQEPMKTTGQGRGRRTRGTI

SEQ ID NO: 264561 - protein, 59 aa, Glycine max
  Clone ID: PAT_MRT3847_80919C.1.pep
QIHSHVTARHSSIQPCTQIQVTIITDSYHLNMQYHLCLKQKLPFLTLSVHHIRPFGCNR

SEQ ID NO: 264562 - protein, 139 aa, Glycine max
  unsure (1)..(139): unsure at all Xaa locations
  Clone ID: PAT_MRT3847_8091C.1.pep
LKHLSRVLWLAREDXKASLWSQLHCVTCYNREMQEAYLVNLENVLRELYLHSPEEARQLKRKALSHIEWLQKADVPTIAQIEEFHTMHRIMNAPDSNDNIDLLLSIDLLGIQGAGEAFPNKIDFDDTLVLANTQEMFDG

SEQ ID NO: 264563 - protein, 75 aa, Glycine max
  Clone ID: PAT_MRT3847_80920C.1.pep
ESRIFQAIGVCFILKHPKEKFFVNWGVSKTVCGIFRGLSMPCKQFIFPQPPPPYFSPPRFSLINVGSLGVPPNPF

SEQ ID NO: 264564 - protein, 213 aa, Glycine max
  unsure (1)..(213): unsure at all Xaa locations
  Clone ID: PAT_MRT3847_80921C.1.pep
HASAFTLKTLLFLCFCSFHFPLSTSSESNPSFPKEALPNKHGYLPISPTSTSSIFYAFYEAQNSTLPLSQTPLLIWLQGGPGCSSMIGNLYELGPWRVTESLTLQPNPGAWNRIFGLLFLDSPIGTGFSVASTRQEIPTDQNGVAKHLFAAITSFLQLDPVFKNRPIYITGESYAGKYVPAIGYYILEKNAXLKVSERVNLAGVTIGDGLTDP

SEQ ID NO: 264565 - protein, 68 aa, Glycine max
  Clone ID: PAT_MRT3847_80922C.1.pep
RPKKCREPPASTKSGADQLVKHYWPPQLCTVQKTRMHLCGHVSQLVVCPSIKKCNVELLSMQVIARVV

SEQ ID NO: 264566 - protein, 116 aa, Glycine max
  Clone ID: PAT_MRT3847_80923C.1.pep
VQTSNTHCNTWPEEWVSRHHAIVAIFWQWRHAEELLNYARKDASAIIPLAPRLACVRHLIDAAQRSAEEETTATVVEETAPYLKLDGATGNLAKVTANEAKVPTAEALVDSKAEYA

SEQ ID NO: 264567 - protein, 102 aa, Glycine max
  Clone ID: PAT_MRT3847_80924C.1.pep
IGRVFSGPAPILHRRFRGGQRTRLQRLERAVIMVDVGVAVERLRRRRRRIAVDVVVVAVRESSDGGGQHRRVHGGSHHHVWRLWLRLFTRIHSGSRSGGVGI

SEQ ID NO: 264568 - protein, 106 aa, Glycine max
  Clone ID: PAT_MRT3847_80925C.1.pep
LCWVSQKLSTNLHLIKLNQIVYMINSVGFQIGELECSPLLIPPGVGGLYIICVKKCFDKKCHDIKPTNAINDCIIGCGLIKSIDINIDARDIANLVDLCLQKCRNK

SEQ ID NO: 264569 - protein, 85 aa, Glycine max
  Clone ID: PAT_MRT3847_80926C.1.pep
SSVYPERMQIICNSVTTPLKSKRSARTELSSGDCLVEGKDRYQSVASCSIFNSNVGQLSNTYVPFYRKSLIMKFPRISTYHPKNS

SEQ ID NO: 264570 - protein, 111 aa, Glycine max
  unsure (1)..(111): unsure at all Xaa locations
  Clone ID: PAT_MRT3847_80927C.1.pep
MEQLKPSAPNSSPLTPLAFLDRAATVYAHVPSLVYNHTTFTWSLTRRRCLQLASLLSSLGIRRGSVVYVLAPNVPAMYELHFAVPFGGAILNNINTRLDARTVCVILXHAN

SEQ ID NO: 264571 - protein, 56 aa, Glycine max
  Clone ID: PAT_MRT3847_80928C.1.pep
LFSPLEKFQYGKRSIPEINGGSVCCKSSFFFMLLEFFFFVFKSSLVSFPICDGEES

SEQ ID NO: 264572 - protein, 61 aa, Glycine max
  Clone ID: PAT_MRT3847_80929C.1.pep
GIPMALGLLATILFFIDSSYSHLVRAYDDADDAIFYESLDDDFDGRWIVSDKEDYNGVWKH

SEQ ID NO: 264573 - protein, 163 aa, Glycine max
  unsure (1)..(163): unsure at all Xaa locations
  Clone ID: PAT_MRT3847_8092C.1.pep
RVGGRVGKNGEKGIRRPVSGDGEEMTLIAATSVEEAYNKLIAELEKSVPTLVGIECPKDEKLPRRKIFDRPKTRCFTILPMELNLGGRQKFLNFARFIMKKRDKLSCQVGINPYSMEWTGLXNRSLSXGNDVLRCESARYEGLITKHVMSKMAEMINSSCGGD

SEQ ID NO: 264574 - protein, 56 aa, Glycine max
  Clone ID: PAT_MRT3847_80930C.1.pep
LPIVSFLFFDKWEMIFYGYRTTWLPCFLIFNQCWLVMIKRLEEEHCPCDLGQRVGS

SEQ ID NO: 264575 - protein, 86 aa, Glycine max
  Clone ID: PAT_MRT3847_80931C.1.pep
IHPFPHISKISSLELNLVECSAFHRSTSHYSQGDNQAEWASVKKMLPLQSLDQSGSDSSRMKEICLWTDPGHPIPPQSRLCNLKSG

SEQ ID NO: 264576 - protein, 113 aa, Glycine max
  unsure (1)..(113): unsure at all Xaa locations
  Clone ID: PAT_MRT3847_80932C.1.pep
MLLRAFAFLSARFFQLKYFLSFSHCNKKCSSQSFKVESPNLKYTXLTFMSMYYYETTELAHENIKGTYQRVDKPTTDEWEXKTNTHVPKLRVMLTGWWGNNVSTATAGVIANR

SEQ ID NO: 264577 - protein, 59 aa, Glycine max
  unsure (1)..(59): unsure at all Xaa locations
  Clone ID: PAT_MRT3847_80933C.1.pep
ELIHSFLKGPHNPKDFWGRGHSVLDLEYTELQQRRELXIPPRNTNAIHNAGPGETTFLL

SEQ ID NO: 264578 - protein, 50 aa, Glycine max
  unsure (1)..(50): unsure at all Xaa locations
  Clone ID: PAT_MRT3847_80934C.1.pep
PTHFGPQPTIYSNAGMFVYXHNLDTYRDLLQTVQVTKPTLFAEQDYVNMY

SEQ ID NO: 264579 - protein, 188 aa, Glycine max
  unsure (1)..(188): unsure at all Xaa locations
  Clone ID: PAT_MRT3847_80935C.1.pep
TRPDLISVLPTPINRIAFSTNTTHLSHPSISIYSLIRKINNANGDWIDDKIXESWVLNRNSIDDKEREFSVHASTLTTENRIDSNAIXTLTHSHHLSNNNSGYQMIEQPGAIYLRYLVDIHKKHIMVYEFNTYCLAQRRISPAKYQTITXSQTLRRANNFHFPSDGKPFSLRLALPPPSKEILVIGSI

SEQ ID NO: 264580 - protein, 127 aa, Glycine max
  unsure (1)..(127): unsure at all Xaa locations
  Clone ID: PAT_MRT3847_80936C.1.pep
LVKLPKVLNFKPLMVALIGPGDFLLREFSRLDPPPVLHLSDQALDWFVSEINRFPDAGVKDGAHNIISIGRYMNGSLCYGRXEDVNPKLVQQCDFGARANLNPMAAMFAGIVGHKVVKACPGKLHPL

SEQ ID NO: 264581 - protein, 69 aa, Glycine max
  Clone ID: PAT_MRT3847_80937C.1.pep
AEESDNLDCFQYVIFGTNNLLVFNERKQVVGSVARIYFKCLLKDSKSQCQFFANSQVNFTKRAGNIIAD

SEQ ID NO: 264582 - protein, 74 aa, Glycine max
  Clone ID: PAT_MRT3847_80938C.1.pep
EKGSIIQVRLQKIELQRPDKDSCWEWTLSAPSYRSESTSPHNGDLKHGAEQGRNPMSYTLNSTLNCRKIEIRFK

SEQ ID NO: 264583 - protein, 178 aa, Glycine max
  unsure (1)..(178): unsure at all Xaa locations
  Clone ID: PAT_MRT3847_80939C.1.pep
MEESTKRKHTNLIHELIQGKELTKQLSDHLVSSSPTSHETNELLVEKILLSYEKALTMLNWGSIMGEAKTTSGNIMDSHCSFTNGESPRSEVVDREFEHKAVFKKRKTMPRWTEXIVKICSRTGLEGSLDDGYSWRKYGQKDILGATFPRRYYRCTQRNVQRCLASXQAQRSDEDTTT

SEQ ID NO: 264584 - protein, 144 aa, Glycine max
  Clone ID: PAT_MRT3847_8093C.1.pep
MSSTEVAATTKKGGRGKPKTTKSVSRSSKAGLQFPVGRVARYLKAGRYAQRVGSGSPVYLSAVLEYLAAEVLELAGNAARDNKKTRIVPRHIQLAVRNDEELSKLMGSVTIANGGVLPNIHQNLLPKKAAGKGKPEIGSASQEF

SEQ ID NO: 264585 - protein, 48 aa, Glycine max
  Clone ID: PAT_MRT3847_80940C.1.pep
CVCTGLFGRRSIMGWKRDGSEAFLIHVISKIKLKVVVCMVWMFKYGWV

SEQ ID NO: 264586 - protein, 245 aa, Glycine max
  Clone ID: PAT_MRT3847_80941C.1.pep
FINMTYDYPSIVRIYDSPVNPEQTMAMLFLVLTLSLTIYVELQGSSYEEKNSGMLKGKSVSKSPLSSKISKSRIGDLVTEVGAETISVISDSEVCMFWHNSPVLSKWYADKQKGFDSEVAGDKNTGEKLSMKWFSNIVSGNMLSSFSDPIDGEGKENHGKISSLVSNSSVLTLSSVSKVKITSGVCCSSLSRRDKSIFSTNNSLGSWDEGEDETRSSLSCFVSSFPWISSWIRLVYFLLVLSSIL

SEQ ID NO: 264587 - protein, 30 aa, Glycine max
  unsure (1)..(30): unsure at all Xaa locations
  Clone ID: PAT_MRT3847_80942C.1.pep
FQHVQSGEHMAAMGVLGLLEVFNKXKFQQS

SEQ ID NO: 264588 - protein, 41 aa, Glycine max
  Clone ID: PAT_MRT3847_80943C.1.pep
KSAYNRVTPVLSKWGPSISYMVLFFSDPVIMSEFMPIILMQ

SEQ ID NO: 264589 - protein, 81 aa, Glycine max
  Clone ID: PAT_MRT3847_80944C.1.pep
EDEDCAVCLCIMGETEERIITLRCGHVFHRDCLNTWVGFNNATTCPLCRDSSGKRESGKLFRAEILLLDSCSIKRFSLENN

SEQ ID NO: 264590 - protein, 57 aa, Glycine max
  Clone ID: PAT_MRT3847_80945C.1.pep
PRAESLDRLEEEMVKDMSSDFKLDIFSQHDPEEPWLVTTITSKMFLDEKANSVQTIR

SEQ ID NO: 264591 - protein, 187 aa, Glycine max
  Clone ID: PAT_MRT3847_80946C.1.pep
QKGSNNIMPSPRANASFFIDLFQKKTPPVKDLGALSGSPFIGQGRGFSPMFRLTNQSGTGRPDPALAPSYRQTLNRVCPLDVAPNVPGALDSPPLVFENQYFKALAAGGGFFNFDQTLFPFPPPRGFVGLFSRPQTGFFKAFVEGKFKKGAFQSGRPGEVRTNSRLVKARPINLGLRSPPPMGGAGK

SEQ ID NO: 264592 - protein, 93 aa, Glycine max
  Clone ID: PAT_MRT3847_80947C.1.pep
CVRWRSIIYSHTFIMYCRYCAKRTIFPVKVLPLVEQMTLPCIVFIALFYGSGHAVSQWVYVMFWMGFQIRLDPCPWPFVNGDYSCTSRFFMSR

SEQ ID NO: 264593 - protein, 40 aa, Glycine max
  Clone ID: PAT_MRT3847_80948C.1.pep
LVPFGTLQGVSSVLIDNKLTNTAQRIFLLTLSSLFTRLHG

SEQ ID NO: 264594 - protein, 55 aa, Glycine max
  Clone ID: PAT_MRT3847_80949C.1.pep
SAVLGVCTFSFYPVRITKSSPGGFCCEVCFSLRFLLALWWTGQWCSLNLVIRPIR

SEQ ID NO: 264595 - protein, 162 aa, Glycine max
  unsure (1)..(162): unsure at all Xaa locations
  Clone ID: PAT_MRT3847_8094C.1.pep
RLVGTEHVVYDPFLGLTQKYATPMMPLDEEILSKVAQDMVEEWSDCVDEEDSFEEVSLSAALNGVEGLDYMERIPLATXSEGFPHVLSRXNGEKGXRRFVSGDGEEMTSTPGTTVEEAFHKLIVELEKSVPTLAGTXCPKDEKPFSSQIFCKPXTRFFTIFL

SEQ ID NO: 264596 - protein, 155 aa, Glycine max
  Clone ID: PAT_MRT3847_80950C.1.pep
PLIQGFCRTFGMRLPSGERREWLKPIMFSAGIGQIDHLHISKGEPDIGMLVVKIGGPAYRIGMGGGAASSMVSGQNDAELDFNAVQRGDAEMAQKLYRLVRACIEMGDKNPIISIHDQGAGGNCNVGKEIIYPKGAEIDVRAIVVRDHTMSGLEI

SEQ ID NO: 264597 - protein, 89 aa, Glycine max
  Clone ID: PAT_MRT3847_80951C.1.pep
LLFSVYVMFRVVLSCAYFKRGILFSSRKCKITTWKIKGRYFTGSDFRSFPLFKKKKKKKKKKGGPPIRNLVTRGLNSGRDLSGVQFSPK

SEQ ID NO: 264598 - protein, 335 aa, Glycine max
  Clone ID: PAT_MRT3847_80952C.1.pep
MALVSHVCVRCVATPTSPESPNSAPLPDPRQTKVLLPKKKPQKWSTGVAPGEYGGPPTTTKLRKYWGGDDEDPLASDDYMWNKEFMGRFQKLIEEPNAQPPPAKEEPSGFLSLNRVMSLDSLEVDLSKELAAPVNHNAHLQIDAETNVTGSNRVRYKSAPTRREQEKWDRATKAATGGSDVMFREIRQSREDPKVLAAQAEEQYNKLKRKLQIFTLGIGGVGLVSAYVSYSPEIAASFGAGFLGSLAYIRMLGSSVDSLRTDGAKGFVKGAIGQPRLLVPVVLVMVYNRWNAILVPEFGSMHLELIPMLVGFFTYKIATFAQAIEEAITVATRKT

SEQ ID NO: 264599 - protein, 85 aa, Glycine max
  unsure (1)..(85): unsure at all Xaa locations
  Clone ID: PAT_MRT3847_80953C.1.pep
IHSRKISNVQAYNNECKLDREEKFLDRPRNLQAMAIYCEAIAKMEEYHRDITELQXDWIIDTGNVESQLELWSSPQVYQTLEHQM

SEQ ID NO: 264600 - protein, 219 aa, Glycine max
  Clone ID: PAT_MRT3847_80954C.1.pep
GYWRFNYSATTCLPILYYSFIPSLYLLKAIPLFPKMSSPWFIPFAYVILGESSSTLIEGLISGGTIKGWWNDLRMWLYIRTSSYLFALIDIVWKFFGRSYSSFAVTTKIVEDDDVSQRYKNEVMEFGTSSPFFTVLATLALLHLFCLLATIKELVLCKVALTGEKMALQVLLCGFLVLINFPIYQGLFLRKDKGRLPSSHTIKSTTLALSACIFFKIWN

SEQ ID NO: 264601 - protein, 287 aa, Glycine max
  Clone ID: PAT_MRT3847_80956C.1.pep
GPQCRAVVHFAGKNHFLRTIAEDMLRADSSLQRSHDEVALLDTYALVRSNLVIGSGKKNRKRAYTPLDDQSDGTYHQCQQCVTEVAGFRCKYDTVHLQCQACGGMMPSRTGFGIPQYCSGCDRSFCGAYWHALGVTGNGSYPVCSQDTLRPISDHSISRIPLLAHEKNLHEQNITDSCIRQMGRTLPDVISEWIAKFENREIDRRRMMLNHAEMITARTFVCQDCYHKLVSFLLYWFRLSIPKHLLPPDESAREDCWYGYACRTQHRSQEHAQKRNHVCRPTRGSNM

SEQ ID NO: 264602 - protein, 101 aa, Glycine max
  unsure (1)..(101): unsure at all Xaa locations
  Clone ID: PAT_MRT3847_80957C.1.pep
GXXXXXXAXXXCXAXGGPLRXARAXXXXPXPLSPXXXXXAGVXAPXXVXRWVCXAXRXAXXXXRRXXLVXXGXXLXXRGACXVPXLXCVXXXXXRSVXXRX

SEQ ID NO: 264603 - protein, 90 aa, Glycine max
  Clone ID: PAT_MRT3847_80958C.1.pep
SISCLIICSKVSQWEFFVHPPQWLCDFQLKSVLNFVPPRLFSLPLIKLFEVVDSSKARIRIYVPFILWCTTRGNTSSICILTDPLLVFRF

SEQ ID NO: 264604 - protein, 69 aa, Glycine max
  Clone ID: PAT_MRT3847_80959C.1.pep
AFLIIFRLWTFKKFSLSWATLASCFREAHNLLKEGVLQFGLRPSFKNVSRKKARVLGNLQPPEGLGGPG

SEQ ID NO: 264605 - protein, 144 aa, Glycine max
  Clone ID: PAT_MRT3847_8095C.1.pep
MSSTEAAATEKKGGRGKPKTSKSVSRSSKAGLQFPVGRVARYLKAGRYAQRVGSGSPVYLSAVLEYLAAEVLELAGNAARDNKKTRIVPRHIQLAVRNDEELSKLMGSVTIANGGVLPNIHQNLLPKKVAGKGKTEIGSASQEF

SEQ ID NO: 264606 - protein, 82 aa, Glycine max
  Clone ID: PAT_MRT3847_80960C.1.pep
RSRAPHTILGQLMRLFTRLTPRPASVGQGRLETGRKPTMGTVYRSTHAQEGHSKEATEHNPPGEYCRDYGKRTPINKMSGRA

SEQ ID NO: 264607 - protein, 62 aa, Glycine max
  unsure (1)..(62): unsure at all Xaa locations
  Clone ID: PAT_MRT3847_80961C.1.pep
NQLHNLLQSLTXMKMTQNLKKMKNQSLSLKKSVKFTKLLQQKTQNNILFKNNKTKKNTNIED

SEQ ID NO: 264608 - protein, 53 aa, Glycine max
  Clone ID: PAT_MRT3847_80962C.1.pep
ECSPPPLFPKGGGKPGFLNLPPMAPLEKKPPPPPGKGPTPPGGRRPKKLIPPP

SEQ ID NO: 264609 - protein, 129 aa, Glycine max
  unsure (1)..(129): unsure at all Xaa locations
  Clone ID: PAT_MRT3847_80963C.1.pep
PSADAIYMKWILHDWNDEPCIKIFKNCRKAIPEKTGKVIIVGHVFXPEGKELFPNVGIAFDMMLFAPNAGGKKRAEKNWKWLFKETGFGGFNIIKINAFPSIIEGFSILKKCPFPNCMWVLCCMGCCYY

SEQ ID NO: 264610 - protein, 59 aa, Glycine max
  Clone ID: PAT_MRT3847_80964C.1.pep
VQLEPTSLHPECSSEPCCQTPAQQDHASYSALIKPPGFTFSQFRKTEVYLYSPLPSRLF

SEQ ID NO: 264611 - protein, 160 aa, Glycine max
  unsure (1)..(160): unsure at all Xaa locations
  Clone ID: PAT_MRT3847_80965C.1.pep
YSTHSEGYSAKPLYLXXXYDKIEIHTARCDFENTQYYISCCGDAWGDAFFSHYHYERHLHILCAHTLSHYYYSFCDKRSWDTSSSSSSCGEGHASHKHTKPLLLLCVXXMSLAPNSARGIRENTDAHIESNIQSXTQFLFSLLYISTPLXXTWGKKEISI

SEQ ID NO: 264612 - protein, 44 aa, Glycine max
  Clone ID: PAT_MRT3847_80966C.1.pep
ITNYLNILYIYIYIYIYKTLNTIENQNSCIIHTQSYRFNNTCTY

SEQ ID NO: 264613 - protein, 40 aa, Glycine max
  Clone ID: PAT_MRT3847_80967C.1.pep
GPCPTKETHTELDSPLWQNNNLFIFLTATTSMYQNQLLIL

SEQ ID NO: 264614 - protein, 47 aa, Glycine max
  Clone ID: PAT_MRT3847_80968C.1.pep
TFLLNFLSRKASKNLGQVNFDQHNLIYKGWMVCFIAVIRQSKACKVE

SEQ ID NO: 264615 - protein, 100 aa, Glycine max
  Clone ID: PAT_MRT3847_80969C.1.pep
KYCILSSRFYDLTGLQNGILKRGREIFLTGCYLRTPTGGSGHSRLLPTEYLVILWGEVMVKDFLILNLATVKINWTNKRSECVGSTYIHACFEVKSNDLI

SEQ ID NO: 264616 - protein, 121 aa, Glycine max
  Clone ID: PAT_MRT3847_8096C.1.pep
HSPEEARQLTRKALSRIEWLQKADVPTIAQIEEFHSMQMMMNAPDSNDNIDLLLSIDLMVLQGARKALANKIVFNDKLVMANTQEFFDGNYPADTWVPIYGNCIYPVRQLPLEAVGGNATC

SEQ ID NO: 264617 - protein, 41 aa, Glycine max
  Clone ID: PAT_MRT3847_80970C.1.pep
QLVFSSTEAYFMVYLLTHRPEAAKQIIFLKGLLQTKQRPQK

SEQ ID NO: 264618 - protein, 162 aa, Glycine max
  Clone ID: PAT_MRT3847_80971C.1.pep
DNIIKLEDSELCMGLETASFGESRSKNSYHTSVGHSEENIHVEGRKGPSQMLNCGSEECEQCTNSLGRSIPRPDSLYLPSMHRYCKHSSITERMRHYSNYQMVHRTRLGLPKEGENGSYNFLEPKIKDSPLAIVNMHTDKLQLFGEDIRIRNSVPGDSLFAH

SEQ ID NO: 264619 - protein, 62 aa, Glycine max
  Clone ID: PAT_MRT3847_80972C.1.pep
GLRLGWFQRHDDAKFATADYDAGTSVYFAFHSCNCCMQPGWCQRFKLEFTFEYNYLEADLLV

SEQ ID NO: 264620 - protein, 97 aa, Glycine max
  unsure (1)..(97): unsure at all Xaa locations
  Clone ID: PAT_MRT3847_80973C.1.pep
MIGVKSFGKTWTGETITLDVEISDTIDNVNARMLDPERIPPCRHRVIFAGKHLEDLLTVADYNRXEETSLQLELRRTSWMQMFVKTLTGKTISLEDE

SEQ ID NO: 264621 - protein, 101 aa, Glycine max
  Clone ID: PAT_MRT3847_80974C.1.pep
HASGRLLWDRLPTKDNLAKRQIQTNSDLCPFCHSKPESASHLFFTCDKIQPLWWEFLSWVKEDRIIHCRPMDNFLQHSPTAGTQAIARRWKIWWLAATNSI

SEQ ID NO: 264622 - protein, 173 aa, Glycine max
  unsure (1)..(173): unsure at all Xaa locations
  Clone ID: PAT_MRT3847_80975C.1.pep
GVKNGFDSKNKGGQKDHPICAHCGIQGHTKAQCYKQNGYPPNYKKNKPSSNSANQVSSRSVNQVSLSSMSQDSPSQFQLTAQQYNQLMSLLQGQTSNVTVPHQNHGDSNGMIMSASSFNLLRDCWLVDSGASTHXCLSIVFNKAITLPNHIVVPVVAVGTVQLSSTLLLHKIS

SEQ ID NO: 264623 - protein, 95 aa, Glycine max
  Clone ID: PAT_MRT3847_80976C.1.pep
KTHWGLFLIKPGWPKKKEPGFIFLGNQKEGAPPFKTRAAFFPLSSFPGPVVVVKPLFSSPAKSPFLSSVFSYAFATTHLPLKKFRLGCAPLKINA

SEQ ID NO: 264624 - protein, 86 aa, Glycine max
  Clone ID: PAT_MRT3847_80977C.1.pep
VKAENGKLAINGNPITIFQERDPSKIKWGDAGAEYVVESTGVFTTMEKAGAHLQGGAKRVIISAPSADAPMFVMGVNHEKYDNSLK

SEQ ID NO: 264625 - protein, 90 aa, Glycine max
  Clone ID: PAT_MRT3847_80978C.1.pep
RSKKFSEKTKEKKRNPSFRCFLYISILFPCTPNMIPSEHYWTQTRPNHFLGHGSATCSTSGALTLRSVGSGSSLHPNPTRSNSKSLPRQT

SEQ ID NO: 264626 - protein, 77 aa, Glycine max
  Clone ID: PAT_MRT3847_80979C.1.pep
YWPSKSFLPEKPWGVNNPRLAYWPFEALEGAREIKPIFLTIRGSIIRERTEEHGGLGKLKGIRPLGRPLGRTRGSTR

SEQ ID NO: 264627 - protein, 66 aa, Glycine max
  Clone ID: PAT_MRT3847_8097C.1.pep
TTSITLDVGGENKDSVCFHSFKICSAWVAPEHSKLMHHADHGRTGNDEGPSGTDGKPIPDRVPVPR

SEQ ID NO: 264628 - protein, 190 aa, Glycine max
  Clone ID: PAT_MRT3847_80980C.1.pep
MSESESAAAHKYGGGLLTSSNHGVKTEGFVQRGHSWYVATDIPSDFLVQIGEANFHLHKYPLVSRSGKLSRVIYESHDPDLNKIVIDDIPGGAEAFELAAKFCYGIAVDLTAGNISGLRCAAEYLEMTEDLEEGNLIFKAEAFLSYVVLSSWRDSIVVLKSCEKLSPWAENLQIVRRCSESIAWKACANP

SEQ ID NO: 264629 - protein, 383 aa, Glycine max
  Clone ID: PAT_MRT3847_80981C.1.pep
STPKFSEELKFASCMRKFTFNGLKVATRNFRPESLLGEGGFGCVFKGWIEENGTAPVKPGTGLTVAVKTLNHNGHQGHKEWLAELNYLGDLVHPNLVKLIGFCIEDDQRLLVYEFMPRGSLENHLFRRPLPLPWSIRMKIALGAAKGLAFLHEEAQRPIIYRDFKTSNILLDAEYNAKLSDFGLAKDGPEGEKTHVSTRVMGTYGYAAPEYVMTGHLTSKSDVYSFGVVLLEMLTGRRSIDKKRPNGEHNLVEWARPVLGDRRMFYRIIDPRLEGHFSVKGAQKAALLAAQCLSRDPKSRPLMSEVVRALKPLPSLKDMAISSYHFQIARVDRTMSMPNHKNGIRTQLVSVPRKGQPVRTLSSPNVPHGSPYLHHTKSPKPIG

SEQ ID NO: 264630 - protein, 299 aa, Glycine max
  Clone ID: PAT_MRT3847_80982C.1.pep
NSAPSFLIPTLPISTTTEKSEQMIETSEASVYGVMASWLTPSNLFIFINLVIGTIAISSRFANTTKRQHQLVRSPSLLERLASFNLCYHKHEPTTRMMTTTTTMFHRVVDPVERLDEFRLDQVPSSSLLDRVRSFNLGFYKSDNIERHGPVHNSDLPQLVQLDRLPSSSLLDHVKPLNLEIERPDLVHRLDSSQLDRVSSISLLERVRSFNLGFSKVEMEKPDSIQQQLTRAPSILQRLKSSLSFEPESEVTGGGELAEETEEEGVDAKADDFINRFRQQLRLQRLDSIIRYRDMLKRY

SEQ ID NO: 264631 - protein, 86 aa, Glycine max
  unsure (1)..(86): unsure at all Xaa locations
  Clone ID: PAT_MRT3847_80983C.1.pep
MHTSLIQESAARRMRNLQYVTYRMKTGYGARTSEDICAXRRLGVKAHNMYGSYTNPDXVLXATQGHIHGEQGASYSKTGNQQAYCY

SEQ ID NO: 264632 - protein, 60 aa, Glycine max
  Clone ID: PAT_MRT3847_80984C.1.pep
TNYFKALTRGYQSSPRYLEPVTSPWEASWIQISCRNSSRRTVRAMHSKICPLVVVYELAN

SEQ ID NO: 264633 - protein, 65 aa, Glycine max
  Clone ID: PAT_MRT3847_80985C.1.pep
HHGQIQRLGRTEVDADHGTGHRRHRHGGGGLRMRRISVWVCHRSHSNMIICVKKKVRFLCDTVVI

SEQ ID NO: 264634 - protein, 81 aa, Glycine max
  Clone ID: PAT_MRT3847_80986C.1.pep
RPRSHGRITPRVRYRNHLYGQGTDRPVNGAVCGFDSGELRLFVSESENATGLESISSVIEERDSKKFVWENGCLLHCELPI

SEQ ID NO: 264635 - protein, 90 aa, Glycine max
  Clone ID: PAT_MRT3847_80987C.1.pep
DERYKNRELLIMRSMDHCNAVTLKHCLFSTTSRDELSLNLVMESVPESLHRVLKHYSDMNQRMPLMYVQLSYYQICRGLARFHTVPGACH

SEQ ID NO: 264636 - protein, 77 aa, Glycine max
  Clone ID: PAT_MRT3847_80988C.1.pep
TQKPSRTMGGGGKETAGGGEEWRRLVKLVLLILITSQSLTSLIPFVFLLLINVSSRKTHAYRIWISHFCSPRLQTQT

SEQ ID NO: 264637 - protein, 72 aa, Glycine max
  Clone ID: PAT_MRT3847_80989C.1.pep
TLISKTFKQPRDSKPHLCNFKSLSYLAISNPHSHHFHSLSHLCFHFSVVTLLTTLTHNSFVPNATFTTHKTA

SEQ ID NO: 264638 - protein, 103 aa, Glycine max
  unsure (1)..(103): unsure at all Xaa locations
  Clone ID: PAT_MRT3847_8098C.1.pep
NKLMCLKKPCFILHKCVLKKRRTKKLQNIINXKYKKKIIKYYRSPFSCKLQLSLISNHHYPLSWVWKKILVINFIFASVRLLLNQDATIPNQSNNSIIFTLRL

SEQ ID NO: 264639 - protein, 89 aa, Glycine max
  unsure (1)..(89): unsure at all Xaa locations
  Clone ID: PAT_MRT3847_80990C.1.pep
EPILEERXKKKGXEXYXMXDEIDEYDVGXLKEYXGKKLXXATKEGLKLDEXRVXKXXKKKEXXKKXFDDXCKVXKXIXLXXXVXKVVVI

SEQ ID NO: 264640 - protein, 60 aa, Glycine max
  Clone ID: PAT_MRT3847_80991C.1.pep
SLYTFKSSLLLIKGCMLDDLKRVGQINRNSPVLICSQFGWNCRGDLILVARLRVLGLCIK

SEQ ID NO: 264641 - protein, 76 aa, Glycine max
  Clone ID: PAT_MRT3847_80992C.1.pep
QSEALRCIHIGLLCVQHQPTDRPDTTSVVTMLSSESVLPQPKKPVFLMERVLVEEDFRQNMNSPTNEVTISELEPR

SEQ ID NO: 264642 - protein, 157 aa, Glycine max
  Clone ID: PAT_MRT3847_80993C.1.pep
MLPRKRASEGGVVVEGDTDPTNSSNSGAASFSKKARIGSLAACSGAGAAESAVNVSGQGFGSGSGDDSVGNSVGGMALGNSQPAEIDEDLHSRQLAVYGRETMRKLFASSILVSGMQGLGVEIAKNLILAGVKSVTLHDEGNVELWDLPTDFVFTRK

SEQ ID NO: 264643 - protein, 103 aa, Glycine max
  Clone ID: PAT_MRT3847_80994C.1.pep
LLTLSNISLFSFFPISRCKTLSQGGLSINLCPILFNLHSFPFPPSYSRSFQFQLPPYFSFFLILIASFLLTLSPAYSYLHYLNCSISDFSPSHKLPFLNSKYF

SEQ ID NO: 264644 - protein, 279 aa, Glycine max
  unsure (1)..(279): unsure at all Xaa locations
  Clone ID: PAT_MRT3847_80995C.1.pep
MGELATEKHVRYILSVEKRKDNFESVVMEHLRMNGAYWGLTTLDLLGKLHSVDVDEVVSWLMSCQHESGGFGGNVGHDPHILYTLSAVQVLALFDKLNVIDVDKXIVSLQNEDGSFSGDMWGEVDTRXYIISCKNMDGGFGCTPGGESHAGQRSLDLVDKDLLGWWLCERQVKSGGLNGRPEKLPDVCYSWWVLSSLIMIDRVHWISKEKLIKFILDCQDTENGGISDRPDDAVDVFHTFFGVAGLSLLEYPGLKPVDPAYALPVDVVNRIFFTKEGLK

SEQ ID NO: 264645 - protein, 52 aa, Glycine max
  Clone ID: PAT_MRT3847_80996C.1.pep
VNRANRGALVSGSLNFPNHICPRKKPPEFFPYFFFLGTQIFGEKKQKFFFFF

SEQ ID NO: 264646 - protein, 344 aa, Glycine max
  unsure (1)..(344): unsure at all Xaa locations
  Clone ID: PAT_MRT3847_80997C.1.pep
HFSFVSLPRPFWVWIPTVPLTTTTFTGKMGELATEKHVRYILSVEKRKEDFESVVMEHLRMNGAYWGLTTLDLLGKLHSVDVDEVVSWLMSCLTDSMKDSVVVGHHPXFLYTLSAVQVLALFDKLNVIDVDKVTNIVSLQNEDGSFSGDMWGEVDTRFSYIAICCLSILHCLDKINVEKAVKYIISCKNMDGGFGCTPGGESHAGQIFCCVGALAITGSLDLVDKDLLGWWLCERQVKSGGLNGRPEKLPDVCYSWWVLSSLIMIDRVHWISKEKLIKFILDCQDTENGGISDRPDDAVDVFHTFFGVAGLSLLEYPGLKPVDPAYALPVDVVNRIFFTKEGLK

SEQ ID NO: 264647 - protein, 98 aa, Glycine max
  unsure (1)..(98): unsure at all Xaa locations
  Clone ID: PAT_MRT3847_80998C.1.pep
SSIGLLGFIYQGCSVFSNVIGTXALHSVPIWHLLFFHDKFNGLKFVALLLTVWGFLFYVYYHYLDDKKAEAEKSDGLGVSTSEVEIRSWDGPPPLCSH

SEQ ID NO: 264648 - protein, 236 aa, Glycine max
  Clone ID: PAT_MRT3847_80999C.1.pep
GSSGSSGSSSSRGSSGLLRFSEVVSLFHEFGHVVQQICNRASFTRISGLCVDPDFVEIPAQLLENWCYESYSLKLISGFYQDITKPLKDDICKSIKRWRTSFSALKLKQDILCCLFDQIIHSADNIDIQELFKHLHPMEMLGLPILEGTNPASYFPSTVIGYEAACYSRIWSEVFAADIFTSKFCNDVSNQQAGRQFRNKVLASAGVKDPIDVLSDFLGREPSIQAYIENKVKYVL

SEQ ID NO: 264649 - protein, 99 aa, Glycine max
  Clone ID: PAT_MRT3847_8099C.1.pep
PFRFPGEKIPLGVRGKPLLPKLSPLFPPVKKKGFPKKIWGLSKVQGVQCVPLGILAPLGNFKTLMGFFCKRVFSFFFLNWAFFSENYWSGEMVYLFNFG

SEQ ID NO: 264650 - protein, 112 aa, Glycine max
  Clone ID: PAT_MRT3847_809C.1.pep
VLRVMCDMVDDRNKYVRCLKKRLVRLELKKRGYVHHNFPLQTTSYLPFLSPPKTTCTYAGYVHHPTLEEKAKINLALNNVTTIFYEISLSSSCNEPAMDDFKFKPYKQLFVH

SEQ ID NO: 264651 - protein, 111 aa, Glycine max
  Clone ID: PAT_MRT3847_80C.1.pep
FTPCFHEISLERAFFWKGSPFLKYERYPVRVNPPPNKKNFPFPLYCYFPFLVPFLLGGWEIFLFPLVLPKLRCWGIFPPKWKEKPVSLFFIHGNPPCFGGAPPRLLFPPPS

SEQ ID NO: 264652 - protein, 75 aa, Glycine max
  Clone ID: PAT_MRT3847_81000C.1.pep
MTGDMTTMPDTGTGMNPSRSVEAAVIYNQNTPWYDQWTFCVGTIIGAVIADSNHQVIFRARAAQAVESFKSNPHK

SEQ ID NO: 264653 - protein, 592 aa, Glycine max
  Clone ID: PAT_MRT3847_81001C.1.pep
RSRHYAGTRYLRRGVNDKGRVANDVETEQIVFEDVPEGLPVQICSVVQNRGSIPLFWSQETSRLNLKPDIILSKKDQNYEATRLHFENLVKRYGHPVIILNLIKSHERKPRESILRSEFGKAIDFINKDLSQENRLRFLHWDLKHFQSKATNVLLLLGKVAAYALTVTGFLYCQVPPTPRPEDCIKCPSISFQSTRQADVDNKDGNTLERKPSGESNLANGNHFVKPPMFQRGVLRTNCIDCLDRTNVAQYAYGLAALGHQLHALGIIDHPKIDLDDPLSDDLMGFYERMGDTLAHQYGGSAAHKKIFSERRGQWKAATQSQEFFRTLQRYYSNAYMDAEKQNAINIFLGHFQPQLGKPALWDLGSDQHYDIGRYGDDDASLCGNSELWLFRSFVKRCFSDGSIIDGNSTPMSTPNPKLEKFSKLGLQDQSEEGSKAFCESSPEISTSSETESDMSFSRYTPLMPHRHLFGDIQRERFFHSDHISYSGHGDSFSSSNFVDLDWLSSGNSCEEEPFERLSITNSSIARLSSENVINGVIMGGDTPSTSDLDSNNKGRERTGSELSNRDGRSKVLEEFPDTFVNWVTNGQTLCN

SEQ ID NO: 264654 - protein, 81 aa, Glycine max
  Clone ID: PAT_MRT3847_81002C.1.pep
LYVKLQFIRVENTGLMIALALSGVGRYWMRHFYFSPYFNSLLAQTLVEIKVCSFESTGTFVKRYFCKFYGDISCEKNFTWI

SEQ ID NO: 264655 - protein, 222 aa, Glycine max
  Clone ID: PAT_MRT3847_81003C.1.pep
DALALTVTGFLYCQVPPTPRPEDCIKCPSISFAYGNIDKGSFQSTRQADVDNKDGNTLERKPSGENNLANGNHFVKPPMFQRGVLRTNCIDCLDRTNVAQYAYGLAALGHQLHALGIIDHPKIDLDDPLSDGLMGFYERMGDTLAHQYGGSAAHKKIFSERRGQWKTATQSQEFFRTLQRYYSNAYMDAEKQNAINIFLGHFQPQLGKPALWDLSSDQHYDI

SEQ ID NO: 264656 - protein, 55 aa, Glycine max
  Clone ID: PAT_MRT3847_81004C.1.pep
GIRRVHGQETSELQQFLKRDRNKKERLEKKITRSTKKIRNSSVSILNLRRWVCMD

SEQ ID NO: 264657 - protein, 61 aa, Glycine max
  Clone ID: PAT_MRT3847_81005C.1.pep
LELHCGVMYVSEREENNLWLNLLMKIRLQLSTFLSNGQSSGSTKITIISYGVRNNRRKQEQ

SEQ ID NO: 264658 - protein, 63 aa, Glycine max
  unsure (1)..(63): unsure at all Xaa locations
  Clone ID: PAT_MRT3847_81006C.1.pep
XXGGFFFFFFXXXXKPKKVFYLGIVLGPLIGQRPLWFVPLKILICEKISKGAGGDPNLSGPFF

SEQ ID NO: 264659 - protein, 72 aa, Glycine max
  Clone ID: PAT_MRT3847_81007C.1.pep
KFKRSIYRLHLKFRRTQETSKLFETFTMTHIGLNYLVMQCYEIYSAHSTKSLNALEYIFNQTSIWKSIETLS

SEQ ID NO: 264660 - protein, 86 aa, Glycine max
  Clone ID: PAT_MRT3847_81008C.1.pep
HRVHFQVSVSRRWGQHFFLHTIVSNATSFTVKTSLLPHHVWHSQETIILTLIALPPHPNQIAVGSRVLSPIETAGDLLRMPPFQRI

SEQ ID NO: 264661 - protein, 305 aa, Glycine max
  Clone ID: PAT_MRT3847_81009C.1.pep
MSKCSAGIGAHSKVAKRRDGHVAAGVTKAGVGTSDPTNSKAKELRASTKVGHKRSRQSASDDDKKAANGKAVKDTKVQENRVDPNRRSSRKKQHVSYTENDKDGNFGNSSKRPRHHESSNNNPASFTDGVGGQNGKIRNKASAPPEETVLRNKTKVEQTNVLRKEASNSDLNDRKSKADNCSPLKSNLPPSSEICCPDPDFSDFERDKAEGCFAVNQLWAIFDNTDSMPRFYALVKKVYFPFKLRITWLEPDSDDQGEIDWHEAGLPVACGQFKLGQSLKTSDRFMFSHQFHCIFRGDRGTYRVQ

SEQ ID NO: 264662 - protein, 56 aa, Glycine max
  Clone ID: PAT_MRT3847_8100C.1.pep
DPSDKIFGTRSRHQILEHTNSGYDDKSTAESPVILNSYGAQKTMTDVAHDDNRIEQ

SEQ ID NO: 264663 - protein, 119 aa, Glycine max
  Clone ID: PAT_MRT3847_81010C.1.pep
SVSSTCSTPALPLPVHLNRFSKFRFNQSCPQTVMTNLYPLLGAHLPKQTPLAAAQRGGSSEFGRFDEPNDSILEQGGVRGFPQRRHHGCVRERAESAATQDLESDLDLMPFRAKKFPQR

SEQ ID NO: 264664 - protein, 129 aa, Glycine max
  unsure (1)..(129): unsure at all Xaa locations
  Clone ID: PAT_MRT3847_81011C.1.pep
MSGGVGPTGSDISLPQEQEVDHKEQQEQHSLKNLHKTITTTPHKPTFLSFRHLNCLAVVVVLSSSGMVAPEDXAFVLFSIIYMYFLSKMAFPSLHPSKEEPLVFHPKNKAPCPSMCLMGGHHLDLYAPN

SEQ ID NO: 264665 - protein, 52 aa, Glycine max
  Clone ID: PAT_MRT3847_81012C.1.pep
EVSILLYSSRIQHITLSHTIIVHHFSPVAMTVYMVAAMWELVLWHQFKLNYT

SEQ ID NO: 264666 - protein, 59 aa, Glycine max
  Clone ID: PAT_MRT3847_81013C.1.pep
WCHVRDTCHQTRPHMVVILYRNRRCDVNERVGGHTTCLPSMCSIINKNACPQRLQLHRQ

SEQ ID NO: 264667 - protein, 51 aa, Glycine max
  Clone ID: PAT_MRT3847_81014C.1.pep
RERERERERERERERERERERERERERERERERERERERERERTSLEFFGS

SEQ ID NO: 264668 - protein, 54 aa, Glycine max
  Clone ID: PAT_MRT3847_81015C.1.pep
KRVLEEGVFVVKIHIFFFFQWIRLLGSVDVFRYYQYNCDKGKTYKVPEIVFNSF

SEQ ID NO: 264669 - protein, 97 aa, Glycine max
  Clone ID: PAT_MRT3847_81016C.1.pep
DYFAVRYDPYPFYHVNHPEFIDIAREELETLGTTERSSAPEKEVQGISWKNYGKEATPQERRVFSAVLGIFLTYTSSERAEHTCAGCYLNFWLYTSF

SEQ ID NO: 264670 - protein, 35 aa, Glycine max
  Clone ID: PAT_MRT3847_81017C.1.pep
CSLEHLIYLHMPISWFYQKMYLQLPLQVWILCNDC

SEQ ID NO: 264671 - protein, 37 aa, Glycine max
  Clone ID: PAT_MRT3847_81018C.1.pep
SAKLTALDITSTYEFTTPGSGFKDGLKLALTPYKETC

SEQ ID NO: 264672 - protein, 48 aa, Glycine max
  Clone ID: PAT_MRT3847_81019C.1.pep
TTGGAPKRFPKGPGGVPGGGGSGFPKGAGGAPKTGGARKSGPTVEKVD

SEQ ID NO: 264673 - protein, 128 aa, Glycine max
  unsure (1)..(128): unsure at all Xaa locations
  Clone ID: PAT_MRT3847_8101C.1.pep
YLFIYLLTYYCIIYLLKKNDCYTFHQTSYIDTPEQNGVVERKHCHIAKTTYSLLLCTYVPSEFWGXEVLTVVHVINKIPSSVTSGLSSFQKLYGCPLIQQYVCFLVMVMVRKDIIIMILSYTIFIFSF

SEQ ID NO: 264674 - protein, 119 aa, Glycine max
  Clone ID: PAT_MRT3847_81020C.1.pep
PQTIFFTFSLCTPIWHQFATEGCVFDYTTSTLSSLLTETPSTRSEPPHSKPRDLNVTLSTSHFPISNLGFTLSDALLNLSLSLFRSFAAELAEVKAKLLEADDELVKALAVKTRREAKR

SEQ ID NO: 264675 - protein, 43 aa, Glycine max
  Clone ID: PAT_MRT3847_81021C.1.pep
ARIKNFGARWIVLAGFKSYYSSNLIVEQKELQLVLFDRETSVT

SEQ ID NO: 264676 - protein, 58 aa, Glycine max
  Clone ID: PAT_MRT3847_81022C.1.pep
NKGGGGGGFITSDSSVFMCTGRIFPQRVTCTSLPCFLAYKCFACVMCTNNVCDIILLQ

SEQ ID NO: 264677 - protein, 75 aa, Glycine max
  Clone ID: PAT_MRT3847_81023C.1.pep
LCYVDWCFCCCRYIYSCIYYAIFNLNCLFLFVCPSMENSYQIACVNLVSFVQLLYEYIAFEDWFPMVCNFVYLFT

SEQ ID NO: 264678 - protein, 65 aa, Glycine max
  Clone ID: PAT_MRT3847_81024C.1.pep
MMDNVVSTLYNVLFNCCWFDLSSRDESDVNECQIQKLNALKPDNRIESEGGLIETWNPNNKPFEC

SEQ ID NO: 264679 - protein, 89 aa, Glycine max
  Clone ID: PAT_MRT3847_81025C.1.pep
DSISVRPGVPFLVGRKFVTTMWDSGWRKMQQVHIACLLKHLGLAVYVQPEKVLSGAWCYGTTLHHELNVGETIHGPVVQKMRSKINLEP

SEQ ID NO: 264680 - protein, 85 aa, Glycine max
  Clone ID: PAT_MRT3847_81026C.1.pep
ESPFICTFFNFFDEYLCFVSARVGPPRDWNNLGGKIGPVVLHCKGSLFFRIIVFGKFLERSLCGATQKIFVESIGIWNPGKLPQG

SEQ ID NO: 264681 - protein, 68 aa, Glycine max
  unsure (1)..(68): unsure at all Xaa locations
  Clone ID: PAT_MRT3847_81027C.1.pep
SHPRCSVIHGVKWSTXVLLHVDSFEKHVGARGDCSDNHVSCXRWTSLGECTYDPDYTIGSSDIPGYSS

SEQ ID NO: 264682 - protein, 134 aa, Glycine max
  Clone ID: PAT_MRT3847_81028C.1.pep
SIEDGISASQRNPYSLTPIDNCARAPSFKDPKYLPFPFQCFFFSITNSPYNPFYLSQPLHTHTHTHTQPALLFLSHFYSKYIHHYNLLLVLILEKILCFVEDGLVGALGMGEYLWQQALHELVLEGARCIEKGI

SEQ ID NO: 264683 - protein, 278 aa, Glycine max
  Clone ID: PAT_MRT3847_81029C.1.pep
MSHFGRKLSRSSTVRRRFHHRVSLLQRCLLRVLHRILLCSGSKATNATYSMLPPALPSPPPPVSSDGELGREEMDLSSSAVFQTHDLDSDLVSLKISLLGDCQIGKTSFLAKYVGDEKEQQGNQREGLNQMDKTLVVEGARISYCIWEVQGDGKSEDQLPMACMDSVAILIMFDLTSRCTLNSVVGWYKEARKWNQTAIPVLIGTKFDDFIQLPIDLQWTIANEARKYAKALNATLFFSSATYNINVNKIFKFITAKLFDLPWTVERNLTVGEPIIDF

SEQ ID NO: 264684 - protein, 75 aa, Glycine max
  Clone ID: PAT_MRT3847_8102C.1.pep
RGTVANISACSSIQPSPQSSSFPSPTRIDGNHPSSFLIPFIRNITSIPDNLPPLRISNSAPVTPALSSPRSSKRK

SEQ ID NO: 264685 - protein, 66 aa, Glycine max
  unsure (1)..(66): unsure at all Xaa locations
  Clone ID: PAT_MRT3847_81030C.1.pep
HPPPYYPXRTGFSISNARFVIIGFNFIPLAGTGRTKPRSSNFLDELPPLEPSNGTSSTSTILPLFL

SEQ ID NO: 264686 - protein, 86 aa, Glycine max
  Clone ID: PAT_MRT3847_81031C.1.pep
WRVEITSWGMSMLQTSIDFVSAASRSITCDDRMWCSLPAAALGPFPTAANPPPVVTTNCRVIGYHSFIHTHTHGVSLYSPSVVNTT

SEQ ID NO: 264687 - protein, 180 aa, Glycine max
  unsure (1)..(180): unsure at all Xaa locations
  Clone ID: PAT_MRT3847_81032C.1.pep
MLKCVMEILXSESSVITTYYFNWSTSTGAVFLAYLGLTVLPVNIGVGSYISNMFQDRQILLASEIMVLIGVLLSFQVIIPYSEPQYICSGLLLFVSAEVLEGVNLSLLSRVMSSRLFRGTYNGGLLSTEAGTLARVIADATITLAGYGGVSRLLNVTLLPSFFICVGSIIATCYTYNSLY

SEQ ID NO: 264688 - protein, 47 aa, Glycine max
  Clone ID: PAT_MRT3847_81033C.1.pep
GISLAAAVEKRSSVFDWLPTGFSGLGKWPFEKPVGHSPVLILIENGF

SEQ ID NO: 264689 - protein, 696 aa, Glycine max
  unsure (1)..(696): unsure at all Xaa locations
  Clone ID: PAT_MRT3847_81034C.1.pep
MVAFGKKLKDRQIQEWQGYYINYKLMKKRVKQYAQQIQLGTLDRRHVLKDFSRMLDNQIEKIVLFLLEQQGLLACQITKLGEQRDALQEEPEISKIIELREAYRALGQDLLKLLFFVEINAIGLRKILKKFDKRFGYRFTDYYVKTRANHPYSQLQQVFKHVGLGAVVGALSRNLHDLQDRQGSYLSIYDQPTLPLQDPVVDSINAAVDRLTNSTNFLNFLGQHALIMHEELPSPSEEHVDDQRYHFMSLLLNLANTFLYMVNTYIIVPTADDYSMSLGAAPTVCGIVIGAMAVAQVFSSVYFSAWSNKSYFRPLVFSSIVLFLGNILYALAYDVSSIWILLIGRLLCGFGSARAVNRRYISDCVPLKIRMQASAGFVSASALGMACGPALAGILQINFKISKLTFNQNTLPGWVMXAVAWLIYLVWLWITFKEPAREAEEDHTPHQSNDEVNNALEKGLKQPLLISSENKVDEDADQDCDDSEEAPEESRQPVNSIVMAYRLLTPSVKVQLLIYFMLKYVMEILLSESSVVTTYYFNWSTSTVAVFLACLGLTVLPVNIVVGSYISNMFQDRQILLASEIMVLIGVLLSFQVIIPYSEPQYICSGLLLFVSAEVLEGVNLSLLSRVMSSRLSRGTYNGGLLSTEAGTLARVVADATITLAGYVHQSMLLNVTLLPSLFICVTSILATCFTYNSLY

SEQ ID NO: 264690 - protein, 72 aa, Glycine max
  Clone ID: PAT_MRT3847_81035C.1.pep
RRPHTSDQIYDVFRSLNGIGAPKDLALVLLDPLYFCSSNFTLLHLHCPITIIILIHRFSLIISNGIYDIMLH

SEQ ID NO: 264691 - protein, 76 aa, Glycine max
  unsure (1)..(76): unsure at all Xaa locations
  Clone ID: PAT_MRT3847_81036C.1.pep
APRDKGRAGKPSGNAGGKDXQKXGGRKRPRGRXADENRDPAKKTREGQXTSNTEKEGGRANNASERESGGPKAKTN

SEQ ID NO: 264692 - protein, 127 aa, Glycine max
  Clone ID: PAT_MRT3847_81037C.1.pep
DRTQGGGGRHRQVRDQPGKTQPTGLLRRHPVSELIRVPDIGSGEGEVIELFVKVGDRIEADQSILTLESDKASMEVPAPKAGIIKSLKVKLGDRLKEGDELLELEVEGAAAAAPAAAPAPAAQAAPV

SEQ ID NO: 264693 - protein, 114 aa, Glycine max
  Clone ID: PAT_MRT3847_81038C.1.pep
GPSRIKKKKNIPKNKALKPNRPTHWFQNKKKGPLNQPPNLEVVGKVIKRGQPMPSKKFPLPNPQKKGKKKKKKKLFFLKDGKTGGPNPILGNGAQKNPFNPLKKKRNLGTFYFF

SEQ ID NO: 264694 - protein, 150 aa, Glycine max
  unsure (1)..(150): unsure at all Xaa locations
  Clone ID: PAT_MRT3847_81039C.1.pep
HASAHTKDKLFSFYDTITIFGLAFTLNPAKSFQYDNLLSTTNRISPSASVYQTLLAIKPRFNRGIHSYMIPRDGQPHQQQQQASSLIYSLVNRSLRNDIYXTILRTASLYNCLFETNLHATVPVLIIKTRGIIRDIYNTDNYLGLVTTDL

SEQ ID NO: 264695 - protein, 74 aa, Glycine max
  Clone ID: PAT_MRT3847_8103C.1.pep
EEQLHYQCMLLIDLLKARNTAAHIPQTPHNSFSEEAGENNARQTKKPQCRTFSSKVSHQYRIRVINQLIRVRQR

SEQ ID NO: 264696 - protein, 30 aa, Glycine max
  Clone ID: PAT_MRT3847_81040C.1.pep
NFPWNTDCHSLLGMINSSPEPTIAEPHVKM

SEQ ID NO: 264697 - protein, 306 aa, Glycine max
  Clone ID: PAT_MRT3847_81041C.1.pep
MIKPFGASIYHLFVLIKHLKITTMSTMKNNFKDQDHLYSSWSFSKLMAFFFLLISISYLFYSLRFVSHSFDCDQTPHIPTITHRISSNTPSEEESTPPFEEVTNISHIVFGIGASAKLWKQRKEYIKLWWRPNEMRGVVWLEQKVKTEPQDENFLPPLRISSDTSRFKYKNPKGHRSAIRISRIVSETLRLGMEDVRWFVMGDDDTVFVAENLVKVLQKYDHNQFYYIGSSSESHLQNIYFSYNMAYGGGGFAISYPLAVALEKMQDRCIQRYPGLYGSDDRIQACMAELGVPLTKEKGFHQVDAL

SEQ ID NO: 264698 - protein, 58 aa, Glycine max
  Clone ID: PAT_MRT3847_81042C.1.pep
DIRPYTQVYVSHKEWRSICGHAGSSTRLMIVKPHLEFSSFGDALSLIVPIPTMYYLRG

SEQ ID NO: 264699 - protein, 35 aa, Glycine max
  Clone ID: PAT_MRT3847_81043C.1.pep
HKMKQFRKGPGFRDFLYLSKLFYSEQSHQLVQGET

SEQ ID NO: 264700 - protein, 68 aa, Glycine max
  unsure (1)..(68): unsure at all Xaa locations
  Clone ID: PAT_MRT3847_81044C.1.pep
MKFDSTISVAFMVTATDEKSMTGYGSPVEFLSHVDYGLXGRSVFGYTVCXGGYDSNAGATANVLEWST

SEQ ID NO: 264701 - protein, 88 aa, Glycine max
  Clone ID: PAT_MRT3847_81045C.1.pep
YQLPTQDPHSGDYTDSYTDPYTILPPPPPHTQYDLPTPKAAHILTSLLSHTHQSDPHAVSFTQLPRHPSSHQHKQAHRGLTHTRAFLC

SEQ ID NO: 264702 - protein, 80 aa, Glycine max
  unsure (1)..(80): unsure at all Xaa locations
  Clone ID: PAT_MRT3847_81046C.1.pep
DKEEVQHHISVLLFVGLSCGIAMLLFTRLXFGAAIITAFTGPKNVXVVPAASNYVKIRGLASPAXLLGWVAQSARCKYAI

SEQ ID NO: 264703 - protein, 100 aa, Glycine max
  Clone ID: PAT_MRT3847_81047C.1.pep
PLSWVSFWRPSTALRSPRYHQSGQPWHQQVVPTGGIAGAVPQHLLLRLWEQLLARQLLHAVVQHGQVVVPYSYSYRLRLSVVYFSFFWVTFGFFSPSLQY

SEQ ID NO: 264704 - protein, 42 aa, Glycine max
  Clone ID: PAT_MRT3847_81048C.1.pep
SVMTVSGGVGLSVYDNGAKVQTYRTHDVKCNQIHYYDAVTLP

SEQ ID NO: 264705 - protein, 55 aa, Glycine max
  unsure (1)..(55): unsure at all Xaa locations
  Clone ID: PAT_MRT3847_81049C.1.pep
SECDCELDIITTTIDSINFYFVFQDNXVRYCESAIGTVEIQFCLLDESSCSQNKL

SEQ ID NO: 264706 - protein, 150 aa, Glycine max
  Clone ID: PAT_MRT3847_8104C.1.pep
FVFFFFFFFFFFCFFLFLITVFVFVNLHMRSTEKKKRKNRPKNWSPQGFPRKVQTTKKGPRGGGETGKTKPGPLRGPTFTWGEVYKRPGIPQEKPRRQKGGTPGPQHQKPPPLNFRAESGGLKWGKPHHQRAGRKRATFGGKKGGEKGQR

SEQ ID NO: 264707 - protein, 74 aa, Glycine max
  Clone ID: PAT_MRT3847_81050C.1.pep
VRLDIFLGVGTFLFDIFSLGDIRNDSLICYIVFSNMLTERVQFRLFWKNGLVIFLSPFTVFRASVVNEAFSSPC

SEQ ID NO: 264708 - protein, 51 aa, Glycine max
  Clone ID: PAT_MRT3847_81051C.1.pep
GGRGSPNRYITLFITHKHKKAVLTYDSGCPSSHYQKPPLRIHTLIFTLENN

SEQ ID NO: 264709 - protein, 59 aa, Glycine max
  Clone ID: PAT_MRT3847_81052C.1.pep
PLSGVVVRSGCGFLVPVGAVSPSSSVVVVRFFFFFLCPGCGVAPLLTLKIWGFALPLEP

SEQ ID NO: 264710 - protein, 64 aa, Glycine max
  Clone ID: PAT_MRT3847_81053C.1.pep
FWVLRAVLSVLFGVRFWRRFSFPSGALLSCPSSWGVRGFFFPCPPPSVVFSRVSPAWVHPGSPV

SEQ ID NO: 264711 - protein, 45 aa, Glycine max
  Clone ID: PAT_MRT3847_81054C.1.pep
IIISPNMLKGLKLADKLLFPVLFNDVVFPMNYEDNCNIRFFAIYF

SEQ ID NO: 264712 - protein, 58 aa, Glycine max
  Clone ID: PAT_MRT3847_81055C.1.pep
FHQRQPQIKRKKIVSTLETMFKWSCDVIFLIYRQCIKKIHDRFISYFSRRKIQKKYIV

SEQ ID NO: 264713 - protein, 124 aa, Glycine max
  Clone ID: PAT_MRT3847_81056C.1.pep
GACCRLHFFFLFFFLKMKRLKTEPPSSRRFRLSHFLFGVGVLYLVFISCNFSQFTKVVASLSGVETYNGIGSDKVATIGDAEDADLSKPFVRSGYKDAFHWRLGDGRGPGSLLLRPMVGTHGGG

SEQ ID NO: 264714 - protein, 98 aa, Glycine max
  Clone ID: PAT_MRT3847_81057C.1.pep
KTFPIRMGNFFYQHSITKTSWETKFSIPNTRMNRPEQFLPPFLNYGNFKNLATLKSEMKNLGGKYFLTRPGGITGILVRAPNVLKRLGVSKTHGYWKI

SEQ ID NO: 264715 - protein, 174 aa, Glycine max
  Clone ID: PAT_MRT3847_81058C.1.pep
FLQIAFTSLVYPSLILAYMGQARLESRHHDVEQEYHFGFYVSVPEKLRWPVLVIAILAAVVGSQSIITGTFSIIRQCSALSCFPRVKVVHTSSKIHGQVYIPEINWLLMLLCLAVTIGFRDTKLMGNASGLAVVSVMLVTSCLMSLVIVICWHKNVMLAIGFGLFFGTIEALFF

SEQ ID NO: 264716 - protein, 51 aa, Glycine max
  Clone ID: PAT_MRT3847_81059C.1.pep
FFINSNYPIMYIYFHLINSLLYKILIDLHAHFKQNRFPSFRRKAVPSWGPL

SEQ ID NO: 264717 - protein, 191 aa, Glycine max
  unsure (1)..(191): unsure at all Xaa locations
  Clone ID: PAT_MRT3847_8105C.1.pep
ASLLIVCILESGYVNGHFSSLKITLEVTAPPLQEQAVDAELNNVTVTCALNNTLPAVTDSAYYTIHLKLCYVPVTPXDRASTKTEDYLKRHTSCHHYIVNIPYYASYNTVQRFEWLHQRDAPKATYFVRAYAIHSNYDELAYGQTTDSKNSTNLFYIHAVYGRHASRDICSICFRAFYVESLYSLIYTAKR

SEQ ID NO: 264718 - protein, 118 aa, Glycine max
  Clone ID: PAT_MRT3847_81060C.1.pep
SQSGPSRLILIITKIVKWTCLLHSFKFHIAIGTATLLSGLAKYSHYWRCPNPTFLPNGQISDAIDDSPIKGNKEDDDKPMGDSHGMADIDAADAALEGQHACGFICSDTSRSTNGRTG

SEQ ID NO: 264719 - protein, 126 aa, Glycine max
  Clone ID: PAT_MRT3847_81061C.1.pep
TVLSRGLASKCANVVAGAGSGSLKEEVNSRDGRIEHLNSHLNELHVEHVQLIAGMEEAHKHVEELKSKAKQLEEEVERQRTVILEGAEEKREAIRQLCFSLEHYRDGYNMLRQHVMGHRRVPVLAA

SEQ ID NO: 264720 - protein, 621 aa, Glycine max
  Clone ID: PAT_MRT3847_81062C.1.pep
MAASGVHSCKQMRRLESRKSHSWWWDSHISPKNSKWLFENLEEMDRSVKRMLKLIEEDADSFAKKAEMYYQKRPELVALVEEFYRVYRALAERYDHVTGELRKNIPSDLQSQGSGISDAGSEPSSTWPSPTPKRGGRLKSSTRAAGFEYFLGSSGNGTDVYQKDGDESSTLTDSEEESDDSSVNNYSGFSRNGSDLGINRRIMELETELREVKEKLWMQEEEHADGSTRGSRNENTEDVYTKINAYEQELMTVNEKLRLSEEEITKQKIELQKYRLFNTENLEAGFESSLTKKHINEGGEAHKMIEVEGSIDGVDKELFDQNGEIETLARELRITKENLKASEMQITSLKFEANKSSERIQQLHDQLELARKDISTWKTKFNSEKRESTKLHERLARLRTSLSDRDHEIRDLKTEVSDAEQKIFPEKAQLKSEMSKVLEERTHLEEQIREWESRGRCFEDDIRRIQSEKMEMEEALKGEIQLLKAGIEQRENNIKELNTSIDTLKLEKDNLHVEVGSLKEEVNSRDGRIEHSSRHCSRLHVEHVQLIAGMEEAHKHVEELKSKAKQLEEEVERQRTVILEGAEEKREAIRQLCFSLEHYRDGYNMLRQHVMGHRRVPVLAA

SEQ ID NO: 264721 - protein, 44 aa, Glycine max
  Clone ID: PAT_MRT3847_81063C.1.pep
LMKINQACRISYEFLPNIHLIQINNKNSDYSTTITTKLIGGNTC

SEQ ID NO: 264722 - protein, 508 aa, Glycine max
  Clone ID: PAT_MRT3847_81064C.1.pep
PRVRQARINPEDAYAGTYTHCEIHPSLILGVCASIIPFPDHNQSPRNTYQSAMGKQAMGIYVTNYQFRMDTLAYVLYYPQKPLVTTRAMEHLHFRQLPAGINAIVAIACYSGYNQEDSVIMNQSSIDRGFFRSLFFRSYRDEEKKMGTLVKEDFGRPDRANTMGMRHGSYDKLDDDGLAPPGTRVSGEDVIIGKTTPISQEEAQGQALRYTRRDHSISLRHSETGIVDQVLLTTNADGLRFVKVRVRSVRIPQIGDKFSSRHGQKGTVGMTYTQEDMPWTVEGITPDIIVNPHAIPSRMTIGQLIECIMGKVAAHMGKEGDATPFTDVTVDNISKALHKCGYQMRGFETMYNGHTGRRLSAMIFLGPTYYQRLKHMVDDKIHSRGRGPVQILTRQPAEGRSRDGGLRFGEMERDCMIAHGAAHFLKERLFDQSDAYRVHVCERCGLIAIANLKKNSFECRGCKNKTDIVQVYIPYACKLLFQELMAMAIAPRMLTKEVKTTNQKKKGA

SEQ ID NO: 264723 - protein, 359 aa, Glycine max
  Clone ID: PAT_MRT3847_81065C.1.pep
MNDLLTESFEIPRGQGHGGGGDIELGEYARNSGDLGLDSFFKKVQELDKQYAKLDKLLKKLQDAHEESKAVTKAPSMKAIKQRMEKDVDEVKKTAHYLKTKIEELDKENLANRQKPGCGKGSGVDRSRTATTISLKKKLKDKMAEFQTLREAIHQEYREVVERRVFTVTGTRADEETFDRLALHPAVNRSVLPASVISLYCTYLCYSALASEPRDYECNGLHKHSKAVSTGTITLGLATTVLSVVYSAVRAGSSAAVLSPPSSPRAGKPLLPLDAKEDEEKEKAKPVTYSYAFFHLIFSLASMYSAMLLTGWSTSVGESGKLVDVGWPSVWVRIITSWATALLYLWSLIAPIMFPEREF

SEQ ID NO: 264724 - protein, 54 aa, Glycine max
  Clone ID: PAT_MRT3847_81066C.1.pep
TLLLVSTSVLTTIGVQKHTSFDKQGESFCFVYCNLREKEIRIWMILTIHNPLKY

SEQ ID NO: 264725 - protein, 51 aa, Glycine max
  Clone ID: PAT_MRT3847_81067C.1.pep
SRDSVEYGCEQPTVGLFFLQASRSLHMTTLVCMRADAYACLGGLRHGYRLL

SEQ ID NO: 264726 - protein, 134 aa, Glycine max
  Clone ID: PAT_MRT3847_81068C.1.pep
LLPSTLPLATVHHHQRQFQATKPAPVKLQPLHNFALPLLNGVRTTSIIRNRLSLPLKPPPLHEAEHDNTDNSVHKPWNLRLRKPHSSPRPPSKSAPDLLHPHHSTSNNNDNNNPALKCQLRGHAVHGLRGGNSG

SEQ ID NO: 264727 - protein, 67 aa, Glycine max
  Clone ID: PAT_MRT3847_81069C.1.pep
LCIVEFPINPGDGDSSYPFIIHDFILIRLHLLIFLKKLFIVIFAKINYDLWEFNLLQTQMHKLSVGN

SEQ ID NO: 264728 - protein, 62 aa, Glycine max
  Clone ID: PAT_MRT3847_8106C.1.pep
TLPVYSFLLYTPLSRCIEAESVNRHKSAITKGSILVPVTVSRLFLSDTIGCILPTAPLCVIL

SEQ ID NO: 264729 - protein, 97 aa, Glycine max
  unsure (1)..(97): unsure at all Xaa locations
  Clone ID: PAT_MRT3847_81070C.1.pep
SYPLRFSERANSSPALTSHIVGYTHMLPTRHLKXAMESFXHGKSSAQELHKAAEHLMSSIWKQMADAVLKYIPNCTISLYYQVLDTTPMLGASPSRY

SEQ ID NO: 264730 - protein, 80 aa, Glycine max
  unsure (1)..(80): unsure at all Xaa locations
  Clone ID: PAT_MRT3847_81071C.1.pep
KNYLSGQVPNHFFMXKNLTILYLYHNSLSXIDTLTVLIXHLTYLHLSYNKLTVKIPDDLVRLNNLKYLNLYINHLSWNVP

SEQ ID NO: 264731 - protein, 54 aa, Glycine max
  Clone ID: PAT_MRT3847_81072C.1.pep
QFKPFITILCIYFLLFVIVCETLTCLTSIALVQISLRKLKYVFLSVRNHTKIVP

SEQ ID NO: 264732 - protein, 199 aa, Glycine max
  unsure (1)..(199): unsure at all Xaa locations
  Clone ID: PAT_MRT3847_81073C.1.pep
ACLQIPQKLEVMRSWPTPSDVKSLRGFLGLTGYYKRFVQNYGRIARPLYNLLKKDGFKWNEEAEEATRKLKIAMAEIPILTISDFTQPFTVETDASNKGLGVVLMQQGRPLAFLSQSLSNRAQKKSVYERELMAIVLAIXKWRHYLMGCNFTILTDQKSLKFLTNQRLLGEDQFKWSSKLMGFDFDVGHKLGCENKEAD

SEQ ID NO: 264733 - protein, 99 aa, Glycine max
  unsure (1)..(99): unsure at all Xaa locations
  Clone ID: PAT_MRT3847_81074C.1.pep
RTRPRTRGRTRGRKEPQDNEDQAQTETNGHKPPPGEAEPPKGPMPDPKKFXHSKIALAKNTVGGTILRIDLXANSLTEGTFRASAALQRTHPIKGMIKM

SEQ ID NO: 264734 - protein, 55 aa, Glycine max
  Clone ID: PAT_MRT3847_81075C.1.pep
MIWANVFLYLGEQFASTKQPRNLGKRRTWHVPLVFRNLGLFFQDRSPCMSETIFI

SEQ ID NO: 264735 - protein, 82 aa, Glycine max
  unsure (1)..(82): unsure at all Xaa locations
  Clone ID: PAT_MRT3847_81076C.1.pep
MSCCGGNCGCGSACKXGNRHAGGLLXCTPDXLSYTGVTHNRTLGLGGAPSKXQFGSAEMGVPVENDGCKGGANXTCNPCTCK

SEQ ID NO: 264736 - protein, 93 aa, Glycine max
  unsure (1)..(93): unsure at all Xaa locations
  Clone ID: PAT_MRT3847_81077C.1.pep
RKSYPTVSADYQKAVEKANIELKGFIAXEKICAPLMLRLAWHSAGTFDKGTKTGGPFGTIKHPPELAHSANNGLDIAVRLLEPLRAKFPILGN

SEQ ID NO: 264737 - protein, 56 aa, Glycine max
  Clone ID: PAT_MRT3847_81078C.1.pep
ICRSHNSSMTTSQYPSQVELSNWLTILSAREISGGVTPRQFSFPTNCLYHYGSKSG

SEQ ID NO: 264738 - protein, 78 aa, Glycine max
  Clone ID: PAT_MRT3847_81079C.1.pep
RLNIISLCPAEKKNHLLPVFLVHFFPPLGAFFFTASLRVLALFLLRLAPHFSLLVSSHLGPPRFCQLGSSLGTSCFSV

SEQ ID NO: 264739 - protein, 584 aa, Glycine max
  Clone ID: PAT_MRT3847_8107C.1.pep
MASTNALSSASILRSPNRQSLTRRANHNGRVNYRKPNNRFSVKASAKEIAFDQHSRSAMQAGIDKLADAVGLTLGPRGRNVVLDEFGSPKVVNDGVTIARAIELPDPMENAGAALIREVASKTNDSAGDGTTTASVLAREIIKLGLLSVTSGANPVSLKRGIDKTVQGLVEELEKKARPVKGGDDIKAVASISAGNDELIGQMIAEAIDKVGPDGVLSIESSSSFETTVEVEEGMEIDRGYISPQFVTNPEKLIVEFENARVLITDQKISAIKDIIPLLEKTTQLRAPLLIIAEDVTGEALATLVVNKLRGILNVAAIKAPGFGERRKALLQDIAILTGAEFQASDLGLLVENTSVEQLGLARKITISKDSTTIIADAATKDELQARVAQLKKELSQTDSVYDTEKLAERIAKLSGGVAVIKVGAATETELEDRKLRIEDAKNATFAAIEEGIVPGGGTALVHLSTHVPALKDKLDDADERLGADIVQKALIAPAALIAQNAGIEGEVVVEKIKSGEWEVGYNAMVDRYENLVEAGVIDPAKVTRCALQNAASVAGMVLTTQAIVVEKPKPKAPVAGAPQGLTV

SEQ ID NO: 264740 - protein, 41 aa, Glycine max
  Clone ID: PAT_MRT3847_81080C.1.pep
THSSELNSAPYFTRIYSFPLFYNTRDRHHIMNKLYTNYSIT

SEQ ID NO: 264741 - protein, 197 aa, Glycine max
  Clone ID: PAT_MRT3847_81081C.1.pep
MNFFKSVFADEPDEPDSPPAESDNPYPPQSHHDSAWSFGGLIQTLASKSESVLENYRRDLEEFGSGLRKETAVIREAASRAVQDLPASLDVGASVAQESLESVGQAIDDIGSTVWNSTAQIISHGRDSLLASDFDSDSFDSSNYDNNNASKKLLSGSGSSDRGLDLKRYSRFDTLVRALQCDVNTYLEEPEDLGNSM

SEQ ID NO: 264742 - protein, 35 aa, Glycine max
  Clone ID: PAT_MRT3847_81082C.1.pep
LNKYPYESASPRNLSISCHVKRTYLCVHIFNELIN

SEQ ID NO: 264743 - protein, 89 aa, Glycine max
  Clone ID: PAT_MRT3847_81083C.1.pep
KSIIFFQHTLFYHMSPKYSKHEIYMCFRFNQHSSLLTYVNRSSVPNAIRQQNTSNYALKRSLLSTKREGIHLREKCHFSQSWQHFKEET

SEQ ID NO: 264744 - protein, 40 aa, Glycine max
  Clone ID: PAT_MRT3847_81084C.1.pep
MMRQKIWSVAIVFAFGISFCLKDKDGTGGQRQHRVPAEAG

SEQ ID NO: 264745 - protein, 117 aa, Glycine max
  Clone ID: PAT_MRT3847_81085C.1.pep
IEVVKTKDKYCYGTNGKEGGSGVTYQEMVEDEAKDIKNVPLGPIHKLIAENTKSNSLVIKKPHVVIPPHIIAEAISTIRDIDIRWSGPITQKEMEYVEQYVLAKYPEYAGLIEGDGN

SEQ ID NO: 264746 - protein, 93 aa, Glycine max
  unsure (1)..(93): unsure at all Xaa locations
  Clone ID: PAT_MRT3847_81086C.1.pep
QLCSFPQSRRXLLXPTNISSXSGIXXDXXPSPXSSPXTLQXTPTRPXXTGSXKVGRRGTQLAXXGXERXLGGXLXHPRKEGVXXQWKRXXXXX

SEQ ID NO: 264747 - protein, 61 aa, Glycine max
  Clone ID: PAT_MRT3847_81087C.1.pep
MRIVSIKYAFCLTEAQVSEKSFVEWYKLLASLLWRMGFNILLFHCKNVFWTCFFLHVMVLC

SEQ ID NO: 264748 - protein, 138 aa, Glycine max
  Clone ID: PAT_MRT3847_81088C.1.pep
MSNMIEVRVPNLDCEGCASKLKKALFKLKGVDEVEVEMEAQKITVRGYGLEEKKVLKAIKRAGKAAEPWPFPGHAHFSSFYKYPSYIVNHYYDAYKSEATNGVHSFFHTPAVYSVAVASDEAFASLFSDDNPHACTIM

SEQ ID NO: 264749 - protein, 167 aa, Glycine max
  unsure (1)..(167): unsure at all Xaa locations
  Clone ID: PAT_MRT3847_81089C.1.pep
FICIINVALVGMLAPYARIGKPSISSGFLGRIQKAYAALPSSVXFQQRLGTYFYKGIMYGAVGFACGIIGQGIANMIMTAKRSIKKSEEDIPVPPLVKSAALWGVFLAISSNTRYQVVNGLERLVEASPLAKQVPPVALAFTVGVRFANNVYGGMQFVDWARWSGVQ

SEQ ID NO: 264750 - protein, 47 aa, Glycine max
  Clone ID: PAT_MRT3847_8108C.1.pep
AYTKVTMNFYIICLYIEIQMKVQKLYICPDRSCGSYYNVNAITISPL

SEQ ID NO: 264751 - protein, 226 aa, Glycine max
  Clone ID: PAT_MRT3847_81090C.1.pep
MASSSAAEGVSMDDDYETLIATTDVELLKRAWRNEKAAPEILRYESKLVSRVNKVIQLMEEIVEEKSSGGTDPLSVSLYQMDLDRTLFLLRSYLRIRIQKIEKYVFHIQKTEELRNRLSKYEKDFAKMCENDLEQHLDESVLSKLPKDYKSVLRQSSMSEEDDMVPEPQLDTFVLCRSKEYLTGIQLEDGPVDDRSKLFEMEPGVLHFICYKSIKALVESGKIDLL

SEQ ID NO: 264752 - protein, 149 aa, Glycine max
  Clone ID: PAT_MRT3847_81091C.1.pep
PTRPVIDTCCATFAEIQKRGKDFWAEFELYLADLLVGLVVNVALVGMLAPYARLGKPSISSGFLGRMQKAYAALPSSVFEAERPGCRFSVQQRLGTYFYKGIMYGAVGFACGIIGQGIANMIMTAKRSIKKSEEDIPVPPLVKSAALWG

SEQ ID NO: 264753 - protein, 50 aa, Glycine max
  Clone ID: PAT_MRT3847_81092C.1.pep
ILVFVCMDLTGAFNDLLQEQDGLSVIKYAFSKGITFLDTAYFYGVNAYEL

SEQ ID NO: 264754 - protein, 79 aa, Glycine max
  Clone ID: PAT_MRT3847_81093C.1.pep
LYAWLGSLDEMKRRVYIACRRWRTSQLYQLELVCMIDVAVTASEGRLEKNVITKDGRLDILLLTYKESWSCRKRHMNHH

SEQ ID NO: 264755 - protein, 121 aa, Glycine max
  unsure (1)..(121): unsure at all Xaa locations
  Clone ID: PAT_MRT3847_81094C.1.pep
NSLMSRLRAQLEPFRYVADEASPWEEKSAVARLANKVNKSKRNKLWRKKKRKRVVEMLAKEHEQFEQIDREADEWIAREHAKEIANSKVLKMKXIAKSKAREEKKRVEAEIELLLVVRRLQ

SEQ ID NO: 264756 - protein, 73 aa, Glycine max
  Clone ID: PAT_MRT3847_81095C.1.pep
TLCQLLSRAEPIISLSLSLYKFLLHCQTSIIHIYPTQSNDILQYPQTLILEPNHSPIQHPNEFFFDSKILYSI

SEQ ID NO: 264757 - protein, 76 aa, Glycine max
  Clone ID: PAT_MRT3847_81096C.1.pep
LFFFFFFFFFFFFFFFFFFSQSDSPFFLITILVKSEIIQREYNIYSLSHTLSISLWEIINVTSSWGHLGIQPGRVG

SEQ ID NO: 264758 - protein, 41 aa, Glycine max
  Clone ID: PAT_MRT3847_81097C.1.pep
ICFLFLIYTGILHLILDIFFLRIESLVFQKFYFTSLLLVVS

SEQ ID NO: 264759 - protein, 55 aa, Glycine max
  unsure (1)..(55): unsure at all Xaa locations
  Clone ID: PAT_MRT3847_81098C.1.pep
GGVWIDICLYXGGGGGGSFCKNLSHRSILAPLRKGGGRXFIAKILLKEVRLLCIL

SEQ ID NO: 264760 - protein, 110 aa, Glycine max
  unsure (1)..(110): unsure at all Xaa locations
  Clone ID: PAT_MRT3847_81099C.1.pep
QELDKVQKYVMDTPYLLPILNTLTFFYDNNTSXSAXNLRSTNTKRALFINCESLRTCSXRQVASDSEENPVHSLAACCDRIPKASYLCIASTADITGTTKRLRQELETTS

SEQ ID NO: 264761 - protein, 102 aa, Glycine max
  unsure (1)..(102): unsure at all Xaa locations
  Clone ID: PAT_MRT3847_8109C.1.pep
IKRSRITXSSKRSKITSSSKSSRFWKVKLVITPXXLMDILSQEARTKELIESVRIVAKCGVAAGGILPVSAAASIVSDQWSLSSSGRSACDSSKIDALVVDM

SEQ ID NO: 264762 - protein, 63 aa, Glycine max
  Clone ID: PAT_MRT3847_810C.1.pep
IYYLCQQTNTKNKKRLGVHATNQLLKEKQELPRQTTRSYPSSRAMIQLEKQAALCHPVSLGTT

SEQ ID NO: 264763 - protein, 46 aa, Glycine max
  Clone ID: PAT_MRT3847_81100C.1.pep
RYVSGGDASKAKVSKEGSALQFCRSMEDYETELCESPTGIPSHPYL

SEQ ID NO: 264764 - protein, 46 aa, Glycine max
  unsure (1)..(46): unsure at all Xaa locations
  Clone ID: PAT_MRT3847_81101C.1.pep
XSIXSXCSHXNXLLCXQLRTXLHFFADXRXFXPHRSRFRWLXDQIS

SEQ ID NO: 264765 - protein, 56 aa, Glycine max
  Clone ID: PAT_MRT3847_81102C.1.pep
PRVREAVRAHMAFCNMFKLNPAVRVADGMRQMLRRRSGDMSKPESAKKYESSVTLY

SEQ ID NO: 264766 - protein, 57 aa, Glycine max
  Clone ID: PAT_MRT3847_81103C.1.pep
ILERENKKTRSVLLLFLPLNFKPINSSSQLNGFHKLYFSYTLTLRKNRRGIGISPST

SEQ ID NO: 264767 - protein, 62 aa, Glycine max
  Clone ID: PAT_MRT3847_81104C.1.pep
KLVWENVSRGPVYGLSPHRFGSKSKLAPFKRRSPLRKIRPGVIPQEFRHLGNQELSLKKVPW

SEQ ID NO: 264768 - protein, 72 aa, Glycine max
  Clone ID: PAT_MRT3847_81105C.1.pep
MLHFTIARDPELNNTCLSLSLFLSLVQGYLVFLQFSDHIPTLHPNTPYFLPLPVNPTLILNTCVYEPISNHS

SEQ ID NO: 264769 - protein, 74 aa, Glycine max
  unsure (1)..(74): unsure at all Xaa locations
  Clone ID: PAT_MRT3847_81106C.1.pep
XXLXNSLXXKXEVKVXAPXXNVHKVSNFTIYIHNXQXXIXRHPPNXLXPXPXPIWIDHXYTXXXSARDALXSSE

SEQ ID NO: 264770 - protein, 42 aa, Glycine max
  Clone ID: PAT_MRT3847_81107C.1.pep
QIYLNEAMGYSVDVTASDILMVYIKEGSVDLALRWLRFMGSS

SEQ ID NO: 264771 - protein, 150 aa, Glycine max
  Clone ID: PAT_MRT3847_81108C.1.pep
EVPGQNAYAYFYPPTNPDFQASEEEKPPLLLKSHGGPTAETRGILNLSIQYWTSRGWAFVDVNYGGSTGYGREFRERLLGRWGIVDVNDCCSCATYLVNSGKVDGERLCITGGSAGGYTTLAALAFKETFKAGASLYGVADVNMLRAETS

SEQ ID NO: 264772 - protein, 69 aa, Glycine max
  Clone ID: PAT_MRT3847_81109C.1.pep
FGSKHPGEVLIFAQGTLFPFSQKGENPKGAPLFLAGLLWKSLKKIFLFKIYKLVFFWPLKSPPLFVWGG

SEQ ID NO: 264773 - protein, 124 aa, Glycine max
  Clone ID: PAT_MRT3847_8110C.1.pep
TFNKKQEDVLFNTKKQLCISSESQGKQVAVFQCESNGELVLELISRPSFNFRGVRPAKVLGKTSINLGDLQDVASKLPKEKWLDLTSTVNWSKPIGIRIGLSLTPPVSAPYELHFVSMYPFKGS

SEQ ID NO: 264774 - protein, 90 aa, Glycine max
  Clone ID: PAT_MRT3847_81110C.1.pep
VATTGQACAPGFNSYYHRVLIYGRGRCVILHTVAHDQHCVLPSMSAAHYLHSSGSYWAISCLHAAQSNLGHATLFEKLSVWAISYMLCEH

SEQ ID NO: 264775 - protein, 243 aa, Glycine max
  Clone ID: PAT_MRT3847_81111C.1.pep
MLGKTRKVSARGEAVAANYAFGPSEDDVIIKHRLLTRTTTTRGDPPLKKLQKKFTTFVSEVDKDEDINYNDCEKLARAFLQELTTFEIPLLKSKAIVEANVREKENFNELKEEMNRQILLAQSDIEDLKKQLEESKVERRHKEECEAIRKLIAMQPPRSETMKVISELEKEIAALDAENTAGSRLLELRKKQFALLLHVVDELQNTIEEEQKSLVEEMRMATEELKNGMVDTNGGAEAMAIDQ

SEQ ID NO: 264776 - protein, 141 aa, Glycine max
  Clone ID: PAT_MRT3847_81112C.1.pep
MATPATTKRKPVFVKVDQLKPGTNGHTLTVKVVSSKPVKTVSTRGGRPTVLAARPSRIAECLVGDETGTIIFTARNEQVDHMNAGATVILRNAKIDMFKGSMRLAVDKWGRIEPTDPANFDVKEDNNLSLVEYELVNVVEE

SEQ ID NO: 264777 - protein, 161 aa, Glycine max
  Clone ID: PAT_MRT3847_81113C.1.pep
MPGIVRNGVHHDEGGSNDLNGDHDSTSKEPLNLVKSPRGGSVSPQRGQGDDGANFGGDEVVEPSIEQLYENVCDMQSSDQSPSRQSFGSDGDESRIDSELRHLVGGRMREVEIMEEEVGEEKGLPEGSSSSEISSALGGLSNDKKLNQVDEIQEVQPAGMQ

SEQ ID NO: 264778 - protein, 69 aa, Glycine max
  unsure (1)..(69): unsure at all Xaa locations
  Clone ID: PAT_MRT3847_81114C.1.pep
HTQLLIEGKFVHAASGKTLPTLNPITREVIAQFAVGHSDDLYRSTSAAQKAFDHXPWPKMTAYEQQMIL

SEQ ID NO: 264779 - protein, 50 aa, Glycine max
  Clone ID: PAT_MRT3847_81115C.1.pep
TTVIHTLLSVDEDNILHVELQNERSKLDRSLNEVTQMFGDGVCDYADVSG

SEQ ID NO: 264780 - protein, 98 aa, Glycine max
  Clone ID: PAT_MRT3847_81116C.1.pep
LARVLYVSNCVSICAFMPCCYSEYPFSEADAYDDVNLQHQNTPRYPSHHVCPHINVVLHLTGDWNSPAPLGCYHGCCRGKLTARWQHSVHPHALQTYS

SEQ ID NO: 264781 - protein, 75 aa, Glycine max
  unsure (1)..(75): unsure at all Xaa locations
  Clone ID: PAT_MRT3847_81117C.1.pep
MSEDVFIIDGGPTPFVNRVIIELAENGINYDYKEQDXLRNNTSIELXMNPLYMNIPVLINIIQPIFKSTNAAHLI

SEQ ID NO: 264782 - protein, 404 aa, Glycine max
  unsure (1)..(404): unsure at all Xaa locations
  Clone ID: PAT_MRT3847_81118C.1.pep
MGSKDENSKAWKWGLGLVYIFAVATIWIAASFVVQSVVDAGVSPFLVTYICNSLFVVLIPIVEIGRYLEDSYGSLWFWRSEKSNPHSKGRVGESEKAILLKDNDAGNEASESLVLEEVDVIQERNNGSELLPADKVVGVSADQVNVIENISNHLDEKGRWSRCRVAKVSLLICPFWFLAQLTFNLSLKYTTVTXTIIVSLGDSQSGLATVASNPLLGDIFALASAGLYAVYITLIRKKLPDDDGKSGEASTAQFLGFLGLFNVLIFLPVALILHFTKXESFSTLTWKQLGLIIGKGLLDNVLSDYLWAKAVLLTSTTVATAGLTIQVPLAAIVDTLTGNAPRFMDYLGAIAVMIGFTGINIPSDTFSKSTETTVALENENLNTRTEELTLSISQDSVAISLHCT

SEQ ID NO: 264783 - protein, 42 aa, Glycine max
  Clone ID: PAT_MRT3847_81119C.1.pep
SNFHTHFYRPLLLRPKTRDINVNINTNSVSQHSTMVTTLLKF

SEQ ID NO: 264784 - protein, 88 aa, Glycine max
  Clone ID: PAT_MRT3847_8111C.1.pep
WEDTLLLAQGEHQGACACRCLPRPCRNPTPRRRRRLRTCYSARRFCRLRFRSSSSGRGRRTPFETRRGFSARGTGKTDVIRALPMKTL

SEQ ID NO: 264785 - protein, 79 aa, Glycine max
  Clone ID: PAT_MRT3847_81120C.1.pep
DISYFDKERVGDLTSRLAADCQRLSHVIGNDLQLILRNSCQGTGAIINLMALSWPLALSALVICSILSAIFLVYGQYQR

SEQ ID NO: 264786 - protein, 42 aa, Glycine max
  Clone ID: PAT_MRT3847_81121C.1.pep
NIMFILNMGTIKFPCDTTIEVQLQLFKLPPTINILNLSKGTT

SEQ ID NO: 264787 - protein, 160 aa, Glycine max
  Clone ID: PAT_MRT3847_81122C.1.pep
MTDEDKPKAFSGGHHNHPPPQPQPFPAAQYGTFQGVANYPPPQPHPAIGFPHPVPPPGAVDSSAPPPPYYPGYQAVPGYAVAEGRPVRERRLGCCGLGCGWCLFILGFFLAGIPWYVGAIIMLCSRVDYRETPGYIACVVAAVLGTIAIILGGTEGVDDW

SEQ ID NO: 264788 - protein, 65 aa, Glycine max
  Clone ID: PAT_MRT3847_81123C.1.pep
AFSGVHTSAQYQLTNRCTRFIHSFSFNSGSQLYIFFITSLGELGPRLRWEYVSRFKFPDKTLMSI

SEQ ID NO: 264789 - protein, 269 aa, Glycine max
  Clone ID: PAT_MRT3847_81124C.1.pep
MASNLQMSPQVEQIHGEIRDNFRALANGFQKLDKIKDANRQSNQLEELTDKMRECKRLIKEYDREIKDEEGRNPPEVNKQLNDEKQSMIKELNSYVALRKTYMNTIGNKKLELFDNGAGASVSTAEENVQLASEMSNQELINAGTKTMDETDQAIERSKQVVHQTIEVGTQTAATLKGQTEQMGRIVNELDSIQFSIKKASQLVKEIGRQVATDKCIMLFLFLIVCGVIAIIVVKIVHPNNKDIRDIPGLAPPVPTRRLLYVRSGDHFD

SEQ ID NO: 264790 - protein, 269 aa, Glycine max
  Clone ID: PAT_MRT3847_81125C.1.pep
MASNLQMSPQVEQIHGEIRDNFRALANGFQKLDKIKDANRQSNQLEELTDKMRECKRLIKEFDREIKDEEGRNPPEVNKQLNDEKQSMIKELNSYVALRKTYMNTIGNKKLELFDNGAGVSVPTAEENVQLASEMSNQELINAGTKTMDETDQAIERSKQVVHQTIEVGTQTAATLKGQTEQMGRIVNELDSIQFSIKKASQLVKEIGRQVATDKCIMLFLFLIVCGVIAIIVVKIVHPNNKDIRDIPGLAPPVPTRRLLYARSGDHLD

SEQ ID NO: 264791 - protein, 168 aa, Glycine max
  unsure (1)..(168): unsure at all Xaa locations
  Clone ID: PAT_MRT3847_81126C.1.pep
VSFFIAFGNSGDDTINSEAFPHKLAQFEEIHEKVVLKXSQEEFFTTWSSQVRPAATLSADGCPYLYAMVHDSSVSTXIPGDYVIGDKLTTINNVACXGLNPAIXESRLLGTMPQSISQHTVGNXMATVRTPLNYYSSKQSHSQLASDLISGGILMDTTRALFTLIQDS

SEQ ID NO: 264792 - protein, 104 aa, Glycine max
  unsure (1)..(104): unsure at all Xaa locations
  Clone ID: PAT_MRT3847_81127C.1.pep
GLXRPPWGXCXSRLSXFXXLGLFXLSCPLPSXLSGFFLRGRLLXXLVPPVVAPLXCXLPPPCCLLRLXRRLXXCRXXPAPRWLXGVXASLSXPVXLARWVLPGG

SEQ ID NO: 264793 - protein, 63 aa, Glycine max
  Clone ID: PAT_MRT3847_81128C.1.pep
EMRSEDARTGRIFINLHIVTLTSSMPWQSVTANYMVYVFSGEGDGLKKALGLASLTSVIVAVN

SEQ ID NO: 264794 - protein, 123 aa, Glycine max
  unsure (1)..(123): unsure at all Xaa locations
  Clone ID: PAT_MRT3847_81129C.1.pep
VNSHSSHNISGIREVFISVCIPANSCISFNSTINCHLWERANHNLYTIISDHCXFCNPSCSKPHTLLHNTNHCSDSYSFKFITLTLLHYHTILFTVFSSPPMQNNHITQNWIIYHTDSKPCTY

SEQ ID NO: 264795 - protein, 127 aa, Glycine max
  unsure (1)..(127): unsure at all Xaa locations
  Clone ID: PAT_MRT3847_8112C.1.pep
DEEILSKVAQDMFEEWFDCVDEEDSFEEVSLSAALXGVEGLDYMERIPLATSEGFPHVLSRKNGEKGKRRFXVSGDGEQMTLIPGTTVEEVYNILIFDLEKSVPTXLVAIDCPKDXKLLRLKIFSKP

SEQ ID NO: 264796 - protein, 79 aa, Glycine max
  Clone ID: PAT_MRT3847_81130C.1.pep
AMKDASLQIYGVVEKKRPPSVERPLNVELETSSISNMSSVNHIKKLTGVLQPVPSSLFVSRANSPDNYEKNSNVQFINP

SEQ ID NO: 264797 - protein, 106 aa, Glycine max
  Clone ID: PAT_MRT3847_81131C.1.pep
YCFSSECSEKCRCPRHDLQLSPGLCHHGVSGLAKPLLCFWPWIWKPQPLCSPTTSLPFLPLPPFSQCPQGPAWLELEGRPSLWKQGGLQSLAIKRLKAAGRSGSRL

SEQ ID NO: 264798 - protein, 55 aa, Glycine max
  Clone ID: PAT_MRT3847_81132C.1.pep
RTGIGQICVRDGICLNLLDGFHSMPFPPALKNYEKLTVLIFEAYKVLLLFIFIFP

SEQ ID NO: 264799 - protein, 57 aa, Glycine max
  Clone ID: PAT_MRT3847_81133C.1.pep
VCSVLLLVMHVLWCLISESHMSLIWVFKCTLIIVCSISLDGFLHILLLTLQAHSTPS

SEQ ID NO: 264800 - protein, 40 aa, Glycine max
  Clone ID: PAT_MRT3847_81134C.1.pep
NLCNLLYSEHQMKFKQCVCTPCFKKVLTNPFLGRKVCRVR

SEQ ID NO: 264801 - protein, 109 aa, Glycine max
  unsure (1)..(109): unsure at all Xaa locations
  Clone ID: PAT_MRT3847_81135C.1.pep
GGGGSGCLSGXXGFSGVALWRLXCSWSXALSCSLGWXGXXCCWSXXLCGPALCFRLLCCLWXXXXFCSPXLALGWGLWGXLXPFFGPLARAXRFQLLVGFXPRVRXHIT

SEQ ID NO: 264802 - protein, 107 aa, Glycine max
  unsure (1)..(107): unsure at all Xaa locations
  Clone ID: PAT_MRT3847_81136C.1.pep
XPXXXXXXAXXSXSLQXXXNRXXSXXXXXXPXAFTPLRCSLXXXXXXXGRXXLPXXLXSPXXXXXXPXPXXXXWXRPXXAXPXLEPLERLXRLEXEPNSEXTYACXR

SEQ ID NO: 264803 - protein, 94 aa, Glycine max
  Clone ID: PAT_MRT3847_81137C.1.pep
NYKQFRLNTRNFYELDTPREEATPTFFTNYSEPSFRLMLQLYAWITFSSSALVSAIESSMPLSLVALIIVPLLTRTHLDYVLLSEHSVFFPLPL

SEQ ID NO: 264804 - protein, 100 aa, Glycine max
  unsure (1)..(100): unsure at all Xaa locations
  Clone ID: PAT_MRT3847_81138C.1.pep
APGKSAFFHRGAPSGAFVLFSQAARSRELLMGSVFFDRSQLRMRTHSINDLRGGGVVPPRADKSSLTXWPTDCYRPPSPLVVNRMVSIGRAVSRSDEAWV

SEQ ID NO: 264805 - protein, 52 aa, Glycine max
  unsure (1)..(52): unsure at all Xaa locations
  Clone ID: PAT_MRT3847_81139C.1.pep
MRERLCIHIGQAGVHVXNACWELYCLEHAMHAEAQMPNGHTISGGDDAFNNF

SEQ ID NO: 264806 - protein, 439 aa, Glycine max
  Clone ID: PAT_MRT3847_8113C.1.pep
MGHSEENSDVAARQKAIDDWLPVTGSRNAKWWSSAFHNLTAMVGAGVLSLPFAMSNMGWGPGATVLILSWVITLYTLWQMVEMHEMVPGKRFDRYHELGQHAFGDKLGLWIVVPQQVVVEVGTCIVYMVTGGKSLKKVHDTLCPDCKDIKTSYWIVIFASVNIVLAQCPNLNSISAISFVAAAMSLIYSTIAWGASINKGIEANVDYGSRATSSADAVFNFFSALGDVAFAYAGHNVVLEIQATILWSEDTPSKKPMWRGVILAYIGVAFCYLPVAFIGYYMFGNSVDDNILITLERPAWLIAAANLFVFVHVVGGYQVFAMPVFDMIETYMVTKLNFPPSTALRVTTRTIYVALTMLIGICIPFFGSLLGFLGGFAFAPTSYFLPCIIWLKLKKPKKFGLSWTINWICIILGVMLMIVSPIGALRNIILSAKNYEFFS

SEQ ID NO: 264807 - protein, 97 aa, Glycine max
  Clone ID: PAT_MRT3847_81140C.1.pep
PRRRSVRPIIALIAAREAVEGREHGGVRIVGERLGAECPEVVLSKGARREGVDQRHVSRGLQQTVQQRGPPVLVHGAVVLVECRGPGGRTSCAHRDI

SEQ ID NO: 264808 - protein, 97 aa, Glycine max
  unsure (1)..(97): unsure at all Xaa locations
  Clone ID: PAT_MRT3847_81141C.1.pep
LIICFAAWAINGSARHHPNGGSSLPARGGRFKVDPTLEEREHFCALKEEYTRGITPHEKECLEKDPMKLFMEGGIEDLAMMLLEEIESLXHAKDDLD

SEQ ID NO: 264809 - protein, 105 aa, Glycine max
  Clone ID: PAT_MRT3847_81142C.1.pep
FTQHIVIHLSTYSYYSTKMSTIGDYMGYSGDSEDKSGSQSSHVTGKKSPPTLAGGMSYAESPKDRKGSQSSGNGTQTHEDVSMRDKLSHTDDSRKKYGSKKSQGR

SEQ ID NO: 264810 - protein, 48 aa, Glycine max
  Clone ID: PAT_MRT3847_81143C.1.pep
RSKKLALFFTSQFQSLHITLIGMIHRSCCSAPPSRMPVVTAAKFKPSG

SEQ ID NO: 264811 - protein, 110 aa, Glycine max
  Clone ID: PAT_MRT3847_81144C.1.pep
MYVVPPPQRSDPGSGSGDLRVYQAWKGSNKFFLQGRFIFGPDVRSLALTIILIVAPVAVFCVFVARKLMDAFSDHWGISIMAVAVVFTVYVCLFLSNMSFFFSLYVQLCW

SEQ ID NO: 264812 - protein, 54 aa, Glycine max
  Clone ID: PAT_MRT3847_81145C.1.pep
NPLYLPKHIPIINLISSIFNFYLPSSSTHIYSYTKKSYKFISPPLYKPNINPKS

SEQ ID NO: 264813 - protein, 87 aa, Glycine max
  Clone ID: PAT_MRT3847_81146C.1.pep
KHHTNQHERTKCQRHGPLIAPRKQCHASSKPTRTLPPRLPLSPFTHFSPPVVSIPPPPAHSGPPLPHRSAPFPPVQKRGAPYPNGPR

SEQ ID NO: 264814 - protein, 324 aa, Glycine max
  unsure (1)..(324): unsure at all Xaa locations
  Clone ID: PAT_MRT3847_81147C.1.pep
MVGGGNRREEGSLGVEQXTNVFAALDTLKKKKKSDKEKSKGSSTKSQAQSGEGRGPSRIWAPAPLNAKSWADVDDEDDDDYYATTAPPQSVWGVSEPHHSKEDKHGNFEDSESEEDILDEGDDEVEEEHDHEPEESLKPEPEVKKDAEVPLPPPKETERQLSKKERKKKELAELEALLADFGVAPKQSKDGQDESQGAQDKTGVETDGDGEKKENVPAESKTSKKKKKKDKASKEVKESQDQPNSSDTNNGPDLATGTENVEEDTSTVDVKERLKKVASTKKKKSSKEMDAAARAAAQEAAARSARLAAAKKKEKNHYNQQPIR

SEQ ID NO: 264815 - protein, 45 aa, Glycine max
  Clone ID: PAT_MRT3847_81148C.1.pep
NAERCDQCSYNCYYFMVAKTSKTFKDWLLKPCHFSLLTMACIALA

SEQ ID NO: 264816 - protein, 42 aa, Glycine max
  unsure (1)..(42): unsure at all Xaa locations
  Clone ID: PAT_MRT3847_81149C.1.pep
SFVGIFCXLXSLSLSWMKSFKXLXXDNLXWXQQKXLCXXXQA

SEQ ID NO: 264817 - protein, 151 aa, Glycine max
  Clone ID: PAT_MRT3847_8114C.1.pep
VVEAYNKLIAEGEKRDPTGIGIECPKDEKLACRKIFDKPKTRCCTILPMEFNLAVRKKFLNFVRLIMKKRDKLSWQVGINPYSMEWTGLANKLLSKGNDILCCDYASFDGLITKQVMSKMAEMINSLWGGDEKMMRERTHPVEAWCSRKAI

SEQ ID NO: 264818 - protein, 80 aa, Glycine max
  Clone ID: PAT_MRT3847_81150C.1.pep
LKTHFNRKWVRNQGPTPKKTRPKSSLFDGGKKVFVFHLKPLASKKKSPSKGVKSSKHLVDALFLSFIKDVNLGAAGKLPF

SEQ ID NO: 264819 - protein, 66 aa, Glycine max
  Clone ID: PAT_MRT3847_81151C.1.pep
QKQTWVTYTGVWTHNLLKTWNIKKLFEHHIIKITGTFIGLPKWGDPLKRESIQAYILYYWHNFFFF

SEQ ID NO: 264820 - protein, 91 aa, Glycine max
  Clone ID: PAT_MRT3847_81152C.1.pep
ATIAHLHVVPVLFQHSLTKSGDEYSKTPVSISDVIHSRVKALTFRNPSTVADFALALKLSKRYRLLHPHYIDLAYRDRALHVSINSFVTSR

SEQ ID NO: 264821 - protein, 158 aa, Glycine max
  Clone ID: PAT_MRT3847_81153C.1.pep
MAEKLAPEKRHSFVHNGQKVFEWDQTLDEVNIYIALPPNVHSKQFYCKIQSKHLELGIKGNPPYLNHDLTSPVKTDSSFWTLEDDIMHITLQKRDKGQTWASPILGQGQLDPYATDLEQKRLMLQRFQEENPGFDFSQAQFSGNCPDPRTFMGGIRSD

SEQ ID NO: 264822 - protein, 157 aa, Glycine max
  Clone ID: PAT_MRT3847_81154C.1.pep
RASRATRPPTPPVILGQKVFEWDQTLDEVNIYITLPPNVHSKQFYCKIQSKHLELGIKGNPPYLNHDLTSPVKTDSSFWTLEDDIMHITLQKRDKGQTWASPILGQGQLDPYATDLEQKRLMLQRFQEENPGFDFSQAQFSGNCPDPRTFMGGIRSD

SEQ ID NO: 264823 - protein, 62 aa, Glycine max
  Clone ID: PAT_MRT3847_81155C.1.pep
LYDLLPCLPGLPPAPLLLVARAILVVYSISMHAITSVQTASHLVVFLCGLSPFCIGFSINPK

SEQ ID NO: 264824 - protein, 37 aa, Glycine max
  Clone ID: PAT_MRT3847_81156C.1.pep
RKASELMQAMQESGYQPDFQTHWSLISNLNSAKAKDT

SEQ ID NO: 264825 - protein, 71 aa, Glycine max
  unsure (1)..(71): unsure at all Xaa locations
  Clone ID: PAT_MRT3847_81157C.1.pep
NFYKESCPKAEDMITEQVKLLYKRHKNTVFFWLRNISHDCAAHRCEASLLLDSTKRNLSENKTERXYGLRN

SEQ ID NO: 264826 - protein, 52 aa, Glycine max
  Clone ID: PAT_MRT3847_81158C.1.pep
GGGSLGIWVPLPLHMGLRAFPGFFRIGTGSGPWEFLRSSWVPMAYPQIIGSH

SEQ ID NO: 264827 - protein, 60 aa, Glycine max
  Clone ID: PAT_MRT3847_81159C.1.pep
SAFSHGPAVAQAPSKALGGLEGKSLVRHYMNYGGTKPGRSAGATSEDPTLNNHAALKGYG

SEQ ID NO: 264828 - protein, 252 aa, Glycine max
  unsure (1)..(252): unsure at all Xaa locations
  Clone ID: PAT_MRT3847_8115C.1.pep
FGSRLPTGSVYPTRDENGNLLVTEFGLCKYKDHQTLSIQEVPENSAPGQLPRTVDVIAEDDLVDSCKPGDRVAIVGIYKALAGKSKGSVNGVFRTVLIANNVSLLNKEANAPIYSAEDVKNIKEIAARDDAFDLLSNSLAPSIYGHSWIKKAVVLLMLSGVEKNLKNGTHLRGDINMMMVGDPSVAKSQLLRAIMNIAPLAISTTGPGSSGVGLTAAVTSDQETGERRLEAGAMVLADRXVVCIDEFDQMND

SEQ ID NO: 264829 - protein, 49 aa, Glycine max
  Clone ID: PAT_MRT3847_81160C.1.pep
HSSSFRITNGKDDTVAVYYYCRSSCCKHSLCLNYRNFIDAKFILSCLIL

SEQ ID NO: 264830 - protein, 41 aa, Glycine max
  Clone ID: PAT_MRT3847_81161C.1.pep
LTSQGLLQRLNGIMDLDVNPFQQFFPHDVKLISSQFYFIPL

SEQ ID NO: 264831 - protein, 52 aa, Glycine max
  Clone ID: PAT_MRT3847_81162C.1.pep
RLTGYWLLHKISQKQKRGGVTTIILGTKTLTGSTQGVILTRPNSFFPHLDFF

SEQ ID NO: 264832 - protein, 36 aa, Glycine max
  Clone ID: PAT_MRT3847_81163C.1.pep
QSSQSQVISRSISLMTTNQTKTRDIQIQQPVLAIDS

SEQ ID NO: 264833 - protein, 88 aa, Glycine max
  Clone ID: PAT_MRT3847_81164C.1.pep
MLFFLFFFLLNSQDMSKVLGSCGQHEGGSILLSAEKVKDAAKAGLSAAAMKAKLFADHEEREIQRLCANIVNNKLKRLELKLKQFAEI

SEQ ID NO: 264834 - protein, 52 aa, Glycine max
  Clone ID: PAT_MRT3847_81165C.1.pep
MQEDKEKSATLDYHQCPYFQLAPVVFKKCLGLDFTSESPSTRTHRKRKETLL

SEQ ID NO: 264835 - protein, 187 aa, Glycine max
  Clone ID: PAT_MRT3847_81166C.1.pep
LFPDNVTHVSTRVAGTVGYLAPEYALLGQLTKKADVYSFGILMLVIISGKSSSIAAFEEDYLVLVEWAWKLKGENRLRHLVDSELSEYDESVVYRFLIVALFCTQSAAQHRPSMKQVLEMLSKEVHLNEKALTEPGIYRWHSTGKKCGSLNETSSSQAIKYKRTENPHEANSTHFSGTDIVTEMPSR

SEQ ID NO: 264836 - protein, 71 aa, Glycine max
  unsure (1)..(71): unsure at all Xaa locations
  Clone ID: PAT_MRT3847_81167C.1.pep
FTFNSLGYPXHHXCFSIYPXSLLPLIPRIFLLNLLSLSFFSLHLTHTRTILPFSSFDVLGTIQSEFVYHGD

SEQ ID NO: 264837 - protein, 84 aa, Glycine max
  Clone ID: PAT_MRT3847_81168C.1.pep
RGRSFRRLFCEHARCWEYPNTLMLETWLKNQRTRSRSQKIAYIEGPSLVPEELKTLVQLMNTSMANNIDQTSKQVTNKLTFMPE

SEQ ID NO: 264838 - protein, 99 aa, Glycine max
  unsure (1)..(99): unsure at all Xaa locations
  Clone ID: PAT_MRT3847_81169C.1.pep
RIALFVDIDTSRCIMWDIKLTNCNIGLRITTVGGTIERDELXPTFPTDGSDGACVVLQRSNSLMRNSILAITDGLTFYTRIHVARAVNRCFKRRAWSDI

SEQ ID NO: 264839 - protein, 115 aa, Glycine max
  Clone ID: PAT_MRT3847_8116C.1.pep
VCQKSLNFVRLIIMKRDKLSCQVGINPYSMQWTVLANRLLSMGNDILCCDYARLDGLITKQVMSIMAEMINSLCGGHEQLMRETTHLLLACCSRMAICKKDVRRVECGIPSGLPL

SEQ ID NO: 264840 - protein, 50 aa, Glycine max
  Clone ID: PAT_MRT3847_81170C.1.pep
SEQQGPIMRWPVVPRCVFKMSHSDALREEVDHCQGKKIAFMIKRFVTGQI

SEQ ID NO: 264841 - protein, 106 aa, Glycine max
  unsure (1)..(106): unsure at all Xaa locations
  Clone ID: PAT_MRT3847_81171C.1.pep
MLIAVHVDPHSKEERXQPCNEDEALSRESEQRDYCEFRIHRNKIPSFFGSNRFESVIXNQYGRIRGLQTLLQHFXQLQNFPDYRILQFNCTSNTLLLLNHADADYL

SEQ ID NO: 264842 - protein, 50 aa, Glycine max
  unsure (1)..(50): unsure at all Xaa locations
  Clone ID: PAT_MRT3847_81172C.1.pep
INVYGHTIRELXQSGTKTSXILRXISLTILFFLRKNHFKDILSCLYIMHK

SEQ ID NO: 264843 - protein, 50 aa, Glycine max
  Clone ID: PAT_MRT3847_81173C.1.pep
TSLEHYCISLHLHRPRRRKMPWRGSSRIWAVTSSRPASPTPTWTTVKTGK

SEQ ID NO: 264844 - protein, 45 aa, Glycine max
  Clone ID: PAT_MRT3847_81174C.1.pep
LPISPTLNLTYSLLIPMTILKSTGAINFLISFYFIHYLFTSIKIQ

SEQ ID NO: 264845 - protein, 65 aa, Glycine max
  Clone ID: PAT_MRT3847_81175C.1.pep
LFWEPKLKKQLEGTSHMLGGFGHQYAHHIYGGDNGIPLYRDVLSTLTERKVKNSLYPKGWVAQKF

SEQ ID NO: 264846 - protein, 64 aa, Glycine max
  Clone ID: PAT_MRT3847_81176C.1.pep
GSSVTLCMLFCAVPHDQSLHRDHVVLYQKPYMDHSSSKDCCCDYISHLDHRILHSITVRSVLIV

SEQ ID NO: 264847 - protein, 84 aa, Glycine max
  Clone ID: PAT_MRT3847_81177C.1.pep
GLVSSGKTPISSSFFCYLVCVCVCVSVFLTVPCLCPLFTAAATVISCGIHTLTDSNNIMMCLLSFATYSYITHSSSPSYFLLEH

SEQ ID NO: 264848 - protein, 69 aa, Glycine max
  unsure (1)..(69): unsure at all Xaa locations
  Clone ID: PAT_MRT3847_81178C.1.pep
MRPRCLALGMRDNKGYDACKKKPASLRSSDQERKEGVPWTEEEHXRGFFRELLKYGKGGWXRNISRNFG

SEQ ID NO: 264849 - protein, 86 aa, Glycine max
  Clone ID: PAT_MRT3847_81179C.1.pep
FTAKGAGHISRPLPKNISLLKPTLTRKDRQEATPTPTFLPFFFSSFEQQRQYNPKNLYLILLSNLNFNVIDYRLKQLRHFTNPESI

SEQ ID NO: 264850 - protein, 132 aa, Glycine max
  unsure (1)..(132): unsure at all Xaa locations
  Clone ID: PAT_MRT3847_8117C.1.pep
SSRVGLSNDFLCCDYACFDGLITXHAMSKMAEVINSLCGGDEKLMRERTHLLLSCCSRLAFRNKDLWKVECEILSGFPLTVICHIISNDMLIRYTYEKLLRQAKAPSMFLPFFKNYVPVCVYGDDNLTRVHE

SEQ ID NO: 264851 - protein, 84 aa, Glycine max
  unsure (1)..(84): unsure at all Xaa locations
  Clone ID: PAT_MRT3847_81180C.1.pep
MQSAPEGAIVTHIPGFSVPLPFMXYAGYVTVDETHGMNLLYYSVESEGYTYKDPVDLQLIGGPVCSSCDGCIFERGTCNIEAAY

SEQ ID NO: 264852 - protein, 130 aa, Glycine max
  unsure (1)..(130): unsure at all Xaa locations
  Clone ID: PAT_MRT3847_81181C.1.pep
SILVGWEXXXYDMXXXXNEXXYGXXILEVKWXSWRXVVEXXXXFGCERIXEEXVEXXKEXXXXEXYRXEXKXVXXXGYFYXRXXEVNGKEKFVLSIDGXVLCNIGYXKKXGYGVEKFXWRLXDEWGXKGN

SEQ ID NO: 264853 - protein, 93 aa, Glycine max
  unsure (1)..(93): unsure at all Xaa locations
  Clone ID: PAT_MRT3847_81182C.1.pep
TRAATQFATRAPTRPIDRSSSPDCNIVGAMLXGDTYHTNPENACRSLVVEPLKRGRPILLDTYLSTYATIEPDINSLVQLXSSTTKGDCGQGI

SEQ ID NO: 264854 - protein, 239 aa, Glycine max
  unsure (1)..(239): unsure at all Xaa locations
  Clone ID: PAT_MRT3847_81183C.1.pep
REVIASILSDSLKRERVLSLCDASDGRRVASPRALPXLLREAFSQTEAHMNNYYEGCTATVLLVWTDGGENFFAQCANVGDSXCIITVNGKQIKMSEDHKFTNYSERLRIEETGEPLKDGETRLYGINLARMLGDKFLKQQDSRFSSEPYISQVVHIDQASKAFAILASDGLWNVISVKKAIQLVLQMRERCYSERQNTAEKIASLLLNEAKTLRTKDNTSVIFLDFDTFNRFSCKVES

SEQ ID NO: 264855 - protein, 54 aa, Glycine max
  Clone ID: PAT_MRT3847_81184C.1.pep
FGHPIPTKGSVRTAGGHCSLLGLSDQSGDLHKPKVRVLHYLAPPIMLDKYTPSV

SEQ ID NO: 264856 - protein, 63 aa, Glycine max
  Clone ID: PAT_MRT3847_81185C.1.pep
PTSLIRQLMIMCAFSTTASCPAYMNIVYTRQHIYRSLILAKNYIIITTFIPNTIVNSMSMLSL

SEQ ID NO: 264857 - protein, 71 aa, Glycine max
  Clone ID: PAT_MRT3847_81186C.1.pep
SAPMAHAVITCGLVTSSLINRIGYLQNGGTPPSGCCIGVRSLIAAVVTTGDRQTVSNWLKVGRQANLRLKS

SEQ ID NO: 264858 - protein, 84 aa, Glycine max
  Clone ID: PAT_MRT3847_81187C.1.pep
GSSSWPWTRTIGDTGSVEANAPMGLDPTTCVYGEKMCPGKLIALGAMIAPRCQPSHDCCCTHEIQINLYRSGSWRDFSYVWRHL

SEQ ID NO: 264859 - protein, 71 aa, Glycine max
  unsure (1)..(71): unsure at all Xaa locations
  Clone ID: PAT_MRT3847_81188C.1.pep
FKRAGLGSRPTFFEMAAAEQLPASLCTSLTYSIGVLDLRXPFLNKLLDFEDXSLPLLMLVLEYFTLRTTDA

SEQ ID NO: 264860 - protein, 99 aa, Glycine max
  Clone ID: PAT_MRT3847_81189C.1.pep
HEAPPSASPPAGASKAVVFVISNVDDLMNWAWRGSIWSMTFRLLCCSEEMMYTGAACYDLHRFCIIFRTSPRQSDCVIVSGSLTNKRAPALRKVYDPMP

SEQ ID NO: 264861 - protein, 234 aa, Glycine max
  unsure (1)..(234): unsure at all Xaa locations
  Clone ID: PAT_MRT3847_8118C.1.pep
PTRPGKRRFASGDGEEMTLIPGTSVEEAYNKLIVELEKRVPTLIGIECPKDEKLPRRKIFDKPKTRCFTILPMEFNLVVRQKFLNFVRVIMKKRDKLSCXVGINPYSMDWTGSANRLLSKGNDILCCDYASFDGLITKQVMSKMGEMINSLCGGDEKLMRERTHLLLACCSRMAISKKDVWRAEXGIPSGCPLTVFCTXLFNEMLIRYKYENYCARLKLQVCFSILQKFVSLGG

SEQ ID NO: 264862 - protein, 98 aa, Glycine max
  unsure (1)..(98): unsure at all Xaa locations
  Clone ID: PAT_MRT3847_81190C.1.pep
FFSVGCVATRFGVAQPIVILLYFIILHVHFTDCCICMLYTKFCACTIEKNHFSEFKIFESCDEQTLAFFFSKKKIWXXXXXXXXXXXXXXXXXXXXXX

SEQ ID NO: 264863 - protein, 68 aa, Glycine max
  Clone ID: PAT_MRT3847_81191C.1.pep
SCGCTYPTLTSAVESFWPLGDSNLLHNCRHIPKSLRELIDSLLLLPTDCVVLMTQLFIVPILFLMNFY

SEQ ID NO: 264864 - protein, 59 aa, Glycine max
  Clone ID: PAT_MRT3847_81192C.1.pep
VLLHLNSNQSCVFQDMSLQGHVSKQQHLHQQDPTLFFCSNFNSQGFLNHALASSSIASI

SEQ ID NO: 264865 - protein, 61 aa, Glycine max
  unsure (1)..(61): unsure at all Xaa locations
  Clone ID: PAT_MRT3847_81193C.1.pep
RGEAIKGNRETTMGRENGKKLKILGLQRFKTSGSFPKKQINKWDSSLXIQFDMGNICHLLC

SEQ ID NO: 264866 - protein, 81 aa, Glycine max
  unsure (1)..(81): unsure at all Xaa locations
  Clone ID: PAT_MRT3847_81194C.1.pep
KPKIPDKIGIPPDQQRVIXFAGQQLQDGRTLADSYILKESTLHLVLRHCGGDLQCQTNRAIAISSTMNAYDITQSSSLCRP

SEQ ID NO: 264867 - protein, 60 aa, Glycine max
  Clone ID: PAT_MRT3847_81195C.1.pep
DRFNTEQLNKYFFSKNDKKKTKITFKGGSSLHYWGLFSIITINYMDQYLQLCLALINTKN

SEQ ID NO: 264868 - protein, 231 aa, Glycine max
  Clone ID: PAT_MRT3847_81196C.1.pep
MAEAAKSRDARRRRRILQQGSDRLAFITGRIQTLPDPLSSSQPQSQSHHPNVDDSDSISQNPEPDNTVIQTPPKHEGENEISTVPEPKPEPEPEQFQLQPPQTEEPKRFITPSDITRSINSSRVTRLCCSVLVAILVILSYPKFFSTVITFRPLYLVLVTNLTVVIARLFSGKQRGSERRDNRGSSGDGGGEYAQLASILELCVVAQNVADAVFMDCAVYAVVLVCGLSVL

SEQ ID NO: 264869 - protein, 64 aa, Glycine max
  Clone ID: PAT_MRT3847_81197C.1.pep
DGQMESGFWPTVYFDFINHIPYCWNIDDYFDFILCSPHAQQNSLTFTPKYGFDLIPGHGIPHGM

SEQ ID NO: 264870 - protein, 167 aa, Glycine max
  unsure (1)..(167): unsure at all Xaa locations
  Clone ID: PAT_MRT3847_81198C.1.pep
AELIAPAKPTPREVKKLSDIDDQEGLHCQIPFIQYYGHNQEFSMKDPAEVIXKALTKALVXYYPYAGRLREGACQELMVXDCNGECXLFIGADAYCHAVTVXPSCLLHPPLSCLYELLRHVPGSRGGTNXILLLIQVTRLXCGGFIIALRLNHSMSDRFGIAKFMEA

SEQ ID NO: 264871 - protein, 74 aa, Glycine max
  Clone ID: PAT_MRT3847_81199C.1.pep
KAKGIPSRRKKSPQREIWKNFQPPPPSTFLENSPFGKCVFPLKLDNVAYIYKLNWRSFLLLRPSFWKVSFQGIR

SEQ ID NO: 264872 - protein, 102 aa, Glycine max
  Clone ID: PAT_MRT3847_8119C.1.pep
YPEGSGHTEKGGVFRLQTPPLHNPRGRGEPRATHAIKPLRTGKRQHKQTSIIAGKDTAGRAGRENKPDNETRDQHRPRPTSGHHHHKYNDNHRDNTNRDDLV

SEQ ID NO: 264873 - protein, 74 aa, Glycine max
  Clone ID: PAT_MRT3847_811C.1.pep
DLIPARVQINFDQKLRQTSVSGYERARNLSFSIKASFWPRSKSIVATRYEENLLFFDATNHNFSSEFIMILYST

SEQ ID NO: 264874 - protein, 51 aa, Glycine max
  unsure (1)..(51): unsure at all Xaa locations
  Clone ID: PAT_MRT3847_81200C.1.pep
CVWWCLHCGPPLVILFYAIXRLLFKYAVAVILLCGVSGGYKILVLSTIKSV

SEQ ID NO: 264875 - protein, 44 aa, Glycine max
  Clone ID: PAT_MRT3847_81201C.1.pep
GLIVAGRSIMMDVCGVRCHIERGVEYTKSEFFHNVLCMQSTLES

SEQ ID NO: 264876 - protein, 61 aa, Glycine max
  Clone ID: PAT_MRT3847_81202C.1.pep
SHPIIPCLLLTQKRPYKSHTTPCLKPSSTLFPFTIPFSNFSDSAHGFSFLSITYSLGIIVI

SEQ ID NO: 264877 - protein, 57 aa, Glycine max
  Clone ID: PAT_MRT3847_81203C.1.pep
ANQLSSYARFYLVTCSLLVTMSRQHVLYVSKKNVSFISKEFIILSALFRKQQDVANM

SEQ ID NO: 264878 - protein, 45 aa, Glycine max
  Clone ID: PAT_MRT3847_81204C.1.pep
RCFLKMRGNFNFGPKGRKKRGVLPYPLADARDRSRGFFLRPKKKK

SEQ ID NO: 264879 - protein, 418 aa, Glycine max
  unsure (1)..(418): unsure at all Xaa locations
  Clone ID: PAT_MRT3847_81205C.1.pep
MPGHRSKSEKHDVDGGGGEKQLRRDPYEVLGVSRNSTDQEIKTAYRKMALKYHPDKNANDPKAADMFKEVTFSYNILSDPDKRRQYDSAGFEAVESDNQELELDLSSLGAVNTMFAALFSKLGVPIKTTVSATVLEEALNGLVTIRPLPLGHNIAKRVEKQCAHFYSVTITEEEAQAGFVCRVQSPDKSKFKLLYFDQEDNSGLSLALQEDSAKTGKVTSAGMYFLGFPVYRLDQTMNSIAAAKDPDTSFFRKLDAFQPCELTELKAGTHVFAVYGDNFFKSANYTIEALCAAPFSEEKENLRNIEAQILSKRAEISKFEAEYREVLAQFSDMTNRYAHEMQAIDELLKNRNEIQASYTSAPLKRTTSRSNXRSSEXKNSSKEAKEDGQAKEKRSTRERPKKKKWYNLHLRVDKRKAC

SEQ ID NO: 264880 - protein, 74 aa, Glycine max
  Clone ID: PAT_MRT3847_81206C.1.pep
EMQAIDELLKNRNEIQASYTSAPLKRTTSRSRSKNSSKEAKEDGQAKEKRSTRERPKKKKWYNLHLRVDKRKAC

SEQ ID NO: 264881 - protein, 309 aa, Glycine max
  unsure (1)..(309): unsure at all Xaa locations
  Clone ID: PAT_MRT3847_81207C.1.pep
MPGHRSKSEKHGGGGEKPLRRDPYEVLGISRNSTDQEIKTAYRKMALKYHPDKNANDPKAADMFKEATFSYNILSDPDKRRQYDSAGEAVESDNQELELDLSVXYTMFAALSKLGVPIKPPVSATVLEEALNGLVTIRPLPLGHNIAKRVEKQCAHFYSVPITEEEAQAGFVCRVQSPDKSKFKLLYFDQEDNSGLSLALQEGSAKTGKVTSAGMYFLGFPVYRLDQTMNSVSSYCKRIVFNLILSIYFHLKIWLWNYFYLQIAAAKDPDTSFFRKLDAFQPCELTELKAGTHVFAGYGDNFFKSAFSN

SEQ ID NO: 264882 - protein, 48 aa, Glycine max
  Clone ID: PAT_MRT3847_81208C.1.pep
ILGCRRIFFILKKKKSWTLQVHIYNGLPQGEDFNQITFHILIVKKPSF

SEQ ID NO: 264883 - protein, 178 aa, Glycine max
  Clone ID: PAT_MRT3847_81209C.1.pep
RILDSLGKSARVLEKSLEDSEWEYDSVDQSTRDPTNRLDRTEEGSESLEGNLDRPGKIIESPDAKNPDSLEKRPNSLEGRLRGLEKKSGTLLESSRSPETNPENMKGPSPAASSPSPNTRSSSTDRSTDWLREWLLHRSRNSLQDNQEDNLVNRTNGSSQNSPGTDQIHHTESMMKYK

SEQ ID NO: 264884 - protein, 162 aa, Glycine max
  unsure (1)..(162): unsure at all Xaa locations
  Clone ID: PAT_MRT3847_8120C.1.pep
CLQKAVELTIAQIEELGSFQRMISAPHSNDNIDLLLSIDLLGLQGAGKAFPNKIVFDDKLVLANTQEFFDGNFPVDSWLPIFVNCLYPVSQLPSEAVVVNVTCGSGLGGLPTTAWISFAVNNXRSSDINKRIRTALGKGKKIGFPTRVDPFAVALLAVLFGG

SEQ ID NO: 264885 - protein, 43 aa, Glycine max
  Clone ID: PAT_MRT3847_81210C.1.pep
PAWSLAYALSRALKLTYTCTLLNNYRIESPRLNSLTYTFQHFD

SEQ ID NO: 264886 - protein, 77 aa, Glycine max
  Clone ID: PAT_MRT3847_81211C.1.pep
CDNTTGRDPSLAKLRCSQYHGSCHRVCVASFPCPRYGCTHRTDVPRSSIGCNLCTVISIPWQALIAAAIHTQCIITT

SEQ ID NO: 264887 - protein, 90 aa, Glycine max
  Clone ID: PAT_MRT3847_81212C.1.pep
GSPFPRNQFCLERVPPPAKDKSVGKNLSGGSKASSFSPSIPEKVVEIAPPAARVRPQRAIGRQSTYGLSESESANDFDNEDYSDFEEDEA

SEQ ID NO: 264888 - protein, 84 aa, Glycine max
  unsure (1)..(84): unsure at all Xaa locations
  Clone ID: PAT_MRT3847_81213C.1.pep
TLLHLXXVTPKLQQHSXXVISYTRSSLTFPASXXXSNCXXPKTLVHXXXXRXXXCIRVFLSIFFCTXTWXLPXTQRRLILPYAI

SEQ ID NO: 264889 - protein, 150 aa, Glycine max
  unsure (1)..(150): unsure at all Xaa locations
  Clone ID: PAT_MRT3847_81214C.1.pep
TCQKTWSHYWIVSDSNQQVSKGGKNHETYGKELSEPLVTFALFCGTWSLXAVRIYTASQVENELEMAKREYLQAAVGISISKFLIPKLLDWYLLDFAKDLESLLDWICLQLPSDVGKEAIKFLEKRKTGPLSQFVHIMPYEFNFRYLLCT

SEQ ID NO: 264890 - protein, 108 aa, Glycine max
  Clone ID: PAT_MRT3847_81215C.1.pep
RPSSQSSHLKLDIFFFFPVSDLRKFLNPKPRGFRRTPQPWVKETFYSLLSGRPPFFGFFTWSKSPYFSPSPRVAFPQTPPFLKKGKVFFLNTYPFSPEGRGAPFLPPP

SEQ ID NO: 264891 - protein, 184 aa, Glycine max
  unsure (1)..(184): unsure at all Xaa locations
  Clone ID: PAT_MRT3847_81216C.1.pep
ELTIPSNLSKPAALRPKLSPKLRSAATTTIVCSTTNNNNNNNVSSDLKAFSTTLALSSILLSTPLPTGADISGLTPCKESKQFTKREKQSIKKLESSLKLYEAGSTPTLAIKASVEKTKRRFDNYAEXGLLYSSDRLPHLIVNRNQKHXSEFITPRILFLYISGXDQLDNQSCLITIKDEKKPT

SEQ ID NO: 264892 - protein, 111 aa, Glycine max
  unsure (1)..(111): unsure at all Xaa locations
  Clone ID: PAT_MRT3847_81217C.1.pep
RDTLHVQAVQXGNQIGGIAREEMXDEHRIDATEHYVSKSHHQLERVNVHYSESRGGPYVARAALMDLEPRTMDSXRCAACGKIYRPDNCAFCHNGAGNNVRIGHDTDGAEL

SEQ ID NO: 264893 - protein, 51 aa, Glycine max
  Clone ID: PAT_MRT3847_81218C.1.pep
KDEGMLNSAEIGHLDWVLVLKKKEKRRFGAAVSKKLVSQFMIGYWRVYVWV

SEQ ID NO: 264894 - protein, 43 aa, Glycine max
  Clone ID: PAT_MRT3847_81219C.1.pep
LHRTMCTAFPTSIQTHSKLLRRRLMNSFISKRNQVPNLSQRQY

SEQ ID NO: 264895 - protein, 164 aa, Glycine max
  Clone ID: PAT_MRT3847_8121C.1.pep
VLNGVEGVDYMERIPLATSEGFPHVLSRKNGEKGKRRFVSGDGEKMTLIPGTTVEEAYNKLIVELEKSVPTLVGIECPKDEKLARRKIFDKPKTRCFTILPMELNLVVRQKLLNFARFIMKNRDKLICQAGINPYSMEWTGLANTLLSNDNDILCCDMLDLMFD

SEQ ID NO: 264896 - protein, 109 aa, Glycine max
  Clone ID: PAT_MRT3847_81220C.1.pep
YLDWNSPNQLKQLGVIENCPDQHLCAEGKGLPTCEVKRSWVTKVHLERSILEKNLAETINVRVFDERMDLMRAAIAEAYGTPDHEGLSVFDICIPPEYPNEPPMVHYTS

SEQ ID NO: 264897 - protein, 60 aa, Glycine max
  Clone ID: PAT_MRT3847_81221C.1.pep
TVLATTRPKFCISHQLTNVLKYNFFKINVFIIHNIVFTKSTKLKIEIKFGIGGVNQLKLR

SEQ ID NO: 264898 - protein, 68 aa, Glycine max
  unsure (1)..(68): unsure at all Xaa locations
  Clone ID: PAT_MRT3847_81222C.1.pep
YGNVDRHSDEYGNPDHTGXLTYVDTKIVANYNHDPNNQHNITVIYPEKDTYRHHYGREYYGHTHNQHD

SEQ ID NO: 264899 - protein, 74 aa, Glycine max
  Clone ID: PAT_MRT3847_81223C.1.pep
GFPKYLWSKKMALPSPGKSFGITLPKTILKTTKSSNKLGLGLKWKKGLRKEIWSFSWGTPFFSPLINQKNSFIS

SEQ ID NO: 264900 - protein, 149 aa, Glycine max
  unsure (1)..(149): unsure at all Xaa locations
  Clone ID: PAT_MRT3847_81224C.1.pep
MWPGPRRRRGTGSGGISGLFSDAMATMESVVRRMVPQDYAEMQERLVGVMGVQFETRLDERLAEHGLTGDADAEPVLGARYETRLPARSXARSCIRSSGSSAFSYERTSEGGSVDPPRRSQKSKFNRRLPGRTACMTDCLHEPLPNELC

SEQ ID NO: 264901 - protein, 82 aa, Glycine max
  Clone ID: PAT_MRT3847_81225C.1.pep
ASSIILLIKYKYTATPQCFLTRKWSLSCFLPSTAIEHLVFKSRGKKSFKGSSWNTFFGKVFNDQELMHWCQSLCQVLFFTEK

SEQ ID NO: 264902 - protein, 73 aa, Glycine max
  Clone ID: PAT_MRT3847_81226C.1.pep
KPKGKPPKASRRLTRSSPGKKPAPFGKPATKKKAPAKKAPVKGVYPKSVKSPPKKASAKKGGRKLKCGGERGF

SEQ ID NO: 264903 - protein, 60 aa, Glycine max
  Clone ID: PAT_MRT3847_81227C.1.pep
SMILFGKVFFIFNKKYIISLECSVVHINSHEGLMVLSLKKEGCLNFLTSILVRRETLLVY

SEQ ID NO: 264904 - protein, 166 aa, Glycine max
  unsure (1)..(166): unsure at all Xaa locations
  Clone ID: PAT_MRT3847_81228C.1.pep
GEVILAFGNLADDTINFEAFPHKLVXXXXIXEXXXXKFLQKEFXTXXSTXXPPATTXXXDXCPYLYAMVHDSSVSTIPRDFVIGVKLATINNMCAYGLNPGXSGSRLLGTIPQSISQQTVLNHMATVRTPLXFDPSKQSFCIXLLPSRGGILVTXLRLDTLLQLLH

SEQ ID NO: 264905 - protein, 157 aa, Glycine max
  unsure (1)..(157): unsure at all Xaa locations
  Clone ID: PAT_MRT3847_81229C.1.pep
XNTXXXXWXLXSXXXXXXHXXXXXXQFLXDXXXXXXMXVXIXVIXXXXXGCXXXXLITXXSXXXXXXXXLSXSSXHXLXIXXXXXXXXXXLVXXXXCXXXXXXXRXAXXXVXXXCXXXFXLLXXXXFXXXLXXXSXXXXXXXSXVXRIXXXTYQXXP

SEQ ID NO: 264906 - protein, 49 aa, Glycine max
  Clone ID: PAT_MRT3847_8122C.1.pep
FVTYSSSFVSITFMIKVKLQPLSYTATDDACIRFKCHQRKKVLICRLLS

SEQ ID NO: 264907 - protein, 117 aa, Glycine max
  unsure (1)..(117): unsure at all Xaa locations
  Clone ID: PAT_MRT3847_81230C.1.pep
LNLQYSRCNHHHLPHPQHNPHHFRQTPHHHQLCQPQHEYHPNSQQQPPCHPHHQPPFQHAPQPYXNLHHQPEPDPPHQPDPPLQPQPPLQSHLPLEPQPPLEPHPPLEPQPPQLVQP

SEQ ID NO: 264908 - protein, 62 aa, Glycine max
  unsure (1)..(62): unsure at all Xaa locations
  Clone ID: PAT_MRT3847_81231C.1.pep
SYIPXREXISTAXXACXXRLXLXXIXNXXIIDSXXXXIXXCMLQHRVXARAEFRAYVRVXAT

SEQ ID NO: 264909 - protein, 84 aa, Glycine max
  unsure (1)..(84): unsure at all Xaa locations
  Clone ID: PAT_MRT3847_81232C.1.pep
GCIRGWELPLPLPWPVXXGASHSCSATATTLSRAVIRKWNWGIKGPRRMVLGLGLGVSFLSMAGTKSFIASAKIKGVPSVDLIL

SEQ ID NO: 264910 - protein, 51 aa, Glycine max
  Clone ID: PAT_MRT3847_81233C.1.pep
SLGAIMEVATFKIMLAKNRFHTLKLSTNVVLFFSILVNVKILTTPSLLCHN

SEQ ID NO: 264911 - protein, 45 aa, Glycine max
  Clone ID: PAT_MRT3847_81234C.1.pep
EIVDQVWFVKLAASVIRSGSYTHGVGCSSRNSASSAMIRAASTAF

SEQ ID NO: 264912 - protein, 76 aa, Glycine max
  Clone ID: PAT_MRT3847_81235C.1.pep
IIVLSLSLSLSLSIMIQVSGCMWWKFYLIYEGFLRSTSSLRSPYKKKLHILCITHEKFVYKLQRRYLNRTLIHQFC

SEQ ID NO: 264913 - protein, 66 aa, Glycine max
  Clone ID: PAT_MRT3847_81236C.1.pep
SDVRSPGADFSHIHSDVCQPWILVSDIWRPPWGRSKTYPVTSLSHLWLAYVMASDMRPLSKAPILL

SEQ ID NO: 264914 - protein, 168 aa, Glycine max
  Clone ID: PAT_MRT3847_81237C.1.pep
MQSLGQNEASLACPQGCCPTSLLFNPPPPPPQSQNTTAKPRNSSAECRHSFAATTASSIFPNTKFTNHESLPSLHESFSEFKKVYPQYSETDQVDHVRAKEYYHLSFSNQSCLDYIGIGLFSYYQRQHHHDTSKTQLASSSTPQYSDNIPFFSISYKTGNLKTLLLHG

SEQ ID NO: 264915 - protein, 51 aa, Glycine max
  Clone ID: PAT_MRT3847_81238C.1.pep
MVLIISAIKLVEMTKKKKKKKKKKKKKKKNKKKKKKKKIGRKNIKKNKKGG

SEQ ID NO: 264916 - protein, 70 aa, Glycine max
  Clone ID: PAT_MRT3847_81239C.1.pep
PSVISFMFLDETISNSFPSYHLRKSFRNHIHTVQFPLLACSIFFRIQCDNNNKSYQLFSRLRCWGILTNK

SEQ ID NO: 264917 - protein, 132 aa, Glycine max
  unsure (1)..(132): unsure at all Xaa locations
  Clone ID: PAT_MRT3847_8123C.1.pep
KTSATLQFRKLADCEVLKRNCKGMSNVLWVAPEDKASLWSQLHYVSCNNLEMQEAYLVNLANVLRELCLHTPQEALHLXKKALSRIEWLQKADVPTISHIVEFHXSMHRMMNAPHSNDNIDLLLSIVFLGLQ

SEQ ID NO: 264918 - protein, 73 aa, Glycine max
  Clone ID: PAT_MRT3847_81240C.1.pep
SLNPSYWFFIYSKVLPNGFTYSFSRFPSTSSNRATRIVKKYIFFFNFVKSEFRIFSNKKLCLYFKLSIMDKKY

SEQ ID NO: 264919 - protein, 65 aa, Glycine max
  Clone ID: PAT_MRT3847_81241C.1.pep
HASAQVEAENPVEMVLVMTVEPGFGGQKFMAETMDKVRILRKKYPSLDIEVSQPIYLSVTSCLLS

SEQ ID NO: 264920 - protein, 86 aa, Glycine max
  Clone ID: PAT_MRT3847_81242C.1.pep
GALLWDTLIIHFIHENRLNESKQSSISGFSVWVLASGAHLWTAYLNLFLTFVCHQSKSCEHILCMMRPPDDTSPNLASYVATISLR

SEQ ID NO: 264921 - protein, 178 aa, Glycine max
  unsure (1)..(178): unsure at all Xaa locations
  Clone ID: PAT_MRT3847_81243C.1.pep
KGQSWVPYPFSXILMVPTQFPCPVCCKPFNRSNNMQMHMWGHGSQYRKGPESLRGTQPTGMLRLPCYCCSPGCRNNIDHPRAKPLKDFRTLQTHYKRKHGIKPFMCRKCGKAFAVRGDWRTHEKNCGKLWYCICGSDFKHKRSLKDHIKAFGSGHAAYGIDGFEEEEEPASEVEQDND

SEQ ID NO: 264922 - protein, 75 aa, Glycine max
  Clone ID: PAT_MRT3847_81244C.1.pep
PQNTTQWAALQSLDWGKTVVTPIKSLWKHIPFSTCGVIEKRPTDSAFQNMRTLKRECDTRCEGAYNAPRVLGHAQ

SEQ ID NO: 264923 - protein, 48 aa, Glycine max
  Clone ID: PAT_MRT3847_81245C.1.pep
RLREDDRRATHIPYKSWLYSESWLVQFKYTLYKIKWLAKFFNFKKWKG

SEQ ID NO: 264924 - protein, 96 aa, Glycine max
  unsure (1)..(96): unsure at all Xaa locations
  Clone ID: PAT_MRT3847_81246C.1.pep
XXXXXTQNXTQXXXEXXTXXYXKSXQXXNXPHLNKTXTXXXXXXXXTXXXXXXXXNTSKXXXXNKKXXXXPTQXKXXXHXKNXXKXXXXQXXXKTX

SEQ ID NO: 264925 - protein, 111 aa, Glycine max
  Clone ID: PAT_MRT3847_81247C.1.pep
HLTVRSTTPSACIDIYTDYLSTIRAEVRHRPTCCHPGTLPHATTGTPPVRTTVTHPAPTCNWPCTNCTHELPTITYGLYRMAVAIRNRSLKFHTSHRGLLYIVLTLDSRFL

SEQ ID NO: 264926 - protein, 814 aa, Glycine max
  Clone ID: PAT_MRT3847_81248C.1.pep
MSASKSGGGSGRGQQGDYHWRNRHGRDKVARLEEIFKECTHPNEVRRRQIGEELGLDPEQTINERLDTDALRLENERIQSENNKMRETLENLSCGSCGGRAMEPVKHQLSLQVLRGENILLTKECERITSLMANNGININPALLPVLPSSSSHDALGGSLLNQPVGIPAHNQFISNHDNHYIPAAIPTPFQDNPIVSPPSHNQDINPAPTIDQHIPTLDDPTLIGDNSPLISSFDYNIPALVTALDRNLPAMIHPHDQNNSIPSAEKEIHQVSNNSNNNLSALELDAVQILNNDMLPQPMKSLSKDMDSVQMLKIAEDAMEELMKLLSLNEPFWFRSLLDGKFNLRHDCYKRIFGRSNCLSGPHVRMESSKDSRVVKMSGAQLVEMFLNSDKWVDLFPTIVKKAQTIQVLESGSSGNRNGALQLVNAEMHILSHLVPSREFLFLRYCKQIEVGIWAIGDVSIDSSTYKTTVSHARRLPSGCLIQEKSSEGLCMVSWMEHVEVNEKMQTHNLFRDTICGNNAYGADRWVMTLERMCERFASYSAKTIPSCETGGVVRSPDVKRNIMHLTHRMVKMFCGNLDMQDNPNFPNLTRMNNNGVKLSIRVNHTGPNEPKGTIIGAAICFRVPLSPQIVFDNLIDNNKRAKWDTLCDGSAGHEIQRISTGSNPGNCISIMRPFIPKENNMVILQESYVDALGSMLVFAPFYMEGLDLIMKGEDSSLFPILPSGLTISWDYQSNKVPEGQSGQVGQSRGSLKNLIHSYGKSIGPKDLSVTYSACSSRYNNRSVTKTEATKSSKRKINPGKKKREEFRKVGVE

SEQ ID NO: 264927 - protein, 107 aa, Glycine max
  Clone ID: PAT_MRT3847_81249C.1.pep
EEPLYLSIPNTQEKREHGPEATSLSTSGCVGSSFYGRWGTSLDGEDYTMLAKTEPSQVRMGKGKPTRLQPMMNNVDEGKRIFAPLVEITHNIIGKKRFTQLIGRGFA

SEQ ID NO: 264928 - protein, 153 aa, Glycine max
  Clone ID: PAT_MRT3847_8124C.1.pep
SCKAFPNKIVFDVKLVLANTQEFFDGNFPVDSWLPIFVNCLYPVSQLPSEAVVVNVTCGSGRGGLPTTAWISSAVNNRSSYINKRIRTVLGKGKKIVFLTRVDPFPVAILAVLFGAKNENLSFNATYPMLTRLFENCKSTKNFWLMSGSFAFG

SEQ ID NO: 264929 - protein, 869 aa, Glycine max
  unsure (1)..(869): unsure at all Xaa locations
  Clone ID: PAT_MRT3847_81250C.1.pep
MFLIINRWEVGDNARCKNHRLFICGNSAYGAERWVMTLERMCERSPDGRRNIMHLTHSMVKMFCGNLDMKDDKNFPHLTRMNNGGTRIFKECTHPNEVRRRQIGEELGLDPEQVKFWFQNKKTHIRTINERLDTDALRLENERIQSENNKMRETLENLSCGSCGGRAMEPVKHQLSLQVLRGENILLTKECERITSLMANNGININPALLPVLPSSSSHDALGGSLLNQPVGIPAHNQFISNHDNHYIPAAIPTPFQDNPIVSPPSHNQDINPAPTIDQHIPTLDDPTLIGDNSPLISSFDYNIPALVTALDRNLPAMIHPHDQNNSIPSAEKEIHQVSNNSNNNLSALELDAVQILNNDMLPQPMKSLSKDMDSVQMLKIAEDAMEELMKLLSLNEPFWFRSLLDGKFNLRHDCYKRIFGRSNCLSGPHVRMESSKDSRVVKMSGAQLVEMFLNSDKWVDLFPTIVKKAQTIQVLESGSSGNRNGALQLVNAEMHILSHLVPSREFLFLRYCKQIEVGIWAIGDVSIDSSTYKTTVSHARRLPSGCLIQEKSSEGLCMVSWMEHVEVNEKMQTHNLFRDTICGNNAYGADRWVMTLERMCERFASYSAKTIPSCETGGGWLLFIFFARSKVILILIYLIFVRSPDVKRNIMHLTHRMVKMFCGNLDMQDNPNFPNLTRMNNNGVKLSIRVNHTGPNEPKGTIIGAAICFRVPLSPQIVFDNLIDNNKRAKVQSXNSYTWHEIQRISTGSNPGNCISIMRMLXGSMLVFAPFYMEGLDLIMKGEDSSLFPILPSGLTISWDYQSNKVPEGQSGQVGQSRGSLVTLMFQLLASSTSKIDNVDMKLIGSINTLVTSTVEKIKDALNCSNSK

SEQ ID NO: 264930 - protein, 170 aa, Glycine max
  unsure (1)..(170): unsure at all Xaa locations
  Clone ID: PAT_MRT3847_81251C.1.pep
MREGKLQCSQFCHFNISKEIKFKAFRILLCNPSAIRHLYWLASTRWEVGDNARCKNHRLFICGNSAYGAERWVMTLERMCESLCYSFFSVIRSPDGRRNIMHLTHSMVKMFCGNLDMKDDKNFPHLTRMNNGGTRLSRSVRVNHTKPDEPKDMLPAFXLPLSPQNVFDCL

SEQ ID NO: 264931 - protein, 74 aa, Glycine max
  unsure (1)..(74): unsure at all Xaa locations
  Clone ID: PAT_MRT3847_81252C.1.pep
XGSAFLFLRRAGRASSYEITWGVHCRAVMIAYSGGSASTDEFAEASSRDTITRRCFFVSSQGDAHGSRMEKVPT

SEQ ID NO: 264932 - protein, 80 aa, Glycine max
  Clone ID: PAT_MRT3847_81253C.1.pep
ILGGIQESMTEIECGMEDRHNHVEILLLVNAENAANAIFVMIIIIMRIAGKISTRNMELTDILLHTMVQTMLLRVVDLMK

SEQ ID NO: 264933 - protein, 113 aa, Glycine max
  Clone ID: PAT_MRT3847_81254C.1.pep
MCGSIRAYVLHGAKDLKIENRELTAPAPNELQVAVRSTGLCGSDLHYYNHYRNGDIIVKEPMSLGHESAGVVVAVGSEAQANFKVGDKVALEVGLPCGECDRCKEGMYNICRA

SEQ ID NO: 264934 - protein, 73 aa, Glycine max
  Clone ID: PAT_MRT3847_81255C.1.pep
DPDDLVNASFSSSCDSFEGTVRSSSTGNNKGNLSCSLNDNQSTNPSRSNNNNSSASGLFPSLFVAFLIFVNML

SEQ ID NO: 264935 - protein, 194 aa, Glycine max
  Clone ID: PAT_MRT3847_81256C.1.pep
GHETTGSVLTWTLYLLSKDSSSLAKAQEEVDRVLQGRRPTYEDIKNLKFLTRCIIESLRLYPHPPVLIRRAQVPDELPGGYKLNAGQDIMISVYNIHRSSEVWDRAEEFVPERFDLDGPVPNETNTDFRFIPFSGGPRKCVGDQFALMEAIVALAIFLQHMNFELVPDQNISMTTGATIHTTNGLYMKLSRRLK

SEQ ID NO: 264936 - protein, 55 aa, Glycine max
  Clone ID: PAT_MRT3847_81257C.1.pep
GMSLLVIDTENKFVSTGFAKEIARVAQGKYYYLPNASDAVISSATKEALSALKSS

SEQ ID NO: 264937 - protein, 34 aa, Glycine max
  Clone ID: PAT_MRT3847_81258C.1.pep
HQEACKELRSSRFFLKLLEAVLKTGNRMNVGTIR

SEQ ID NO: 264938 - protein, 96 aa, Glycine max
  Clone ID: PAT_MRT3847_81259C.1.pep
ASHVTHKHVAFDRQLIIAVQIAAESASFRAIEGCDLSILGGIQDGHQFPPHALGHFALSERCSIIRPGNYPERPEVVTQPRSVSMQCMECRIFQKS

SEQ ID NO: 264939 - protein, 155 aa, Glycine max
  unsure (1)..(155): unsure at all Xaa locations
  Clone ID: PAT_MRT3847_8125C.1.pep
QIFATPMMPVDEEVLSKVAQDLVEEWPDCVDEEDSFEEVSASAALNGVEGLDYMERITLATSDGCPHVLSRKNGEKGKRRFESGDGEQMTLIPGTTVEEAYTKLIVELEKSAPTLHGIACPKDEKLPRSTIFDKPNTRCFTILPMDXTLEARQKF

SEQ ID NO: 264940 - protein, 50 aa, Glycine max
  Clone ID: PAT_MRT3847_81260C.1.pep
SSESVWLKVAKMYPFGQQGQQIKGDIAGNAEECSRISPTSPVLEGSLTKA

SEQ ID NO: 264941 - protein, 55 aa, Glycine max
  Clone ID: PAT_MRT3847_81261C.1.pep
QGFEYIVFQTHHNAVTSYLKDVFRAIPSEERAHSYNLQVASDCVVVCLESEPIRS

SEQ ID NO: 264942 - protein, 69 aa, Glycine max
  Clone ID: PAT_MRT3847_81262C.1.pep
LTKLPYKFNGDLKPSFLTSKGMGLNPFGGWGFGNFQPLPIKPKTGLIKNQPAPKLFPPFKTPVWRVPVP

SEQ ID NO: 264943 - protein, 39 aa, Glycine max
  Clone ID: PAT_MRT3847_81263C.1.pep
RSSSSSGEYFEVGISTHQINMLLTGGFGREPLPPDMSQC

SEQ ID NO: 264944 - protein, 200 aa, Glycine max
  unsure (1)..(200): unsure at all Xaa locations
  Clone ID: PAT_MRT3847_81264C.1.pep
MWVQERVVLDRDLELANSLFFFSPSAVGGVCNMAALPTAELSDANATHVASCDVRVLHPVFKVYGGATAFSGPVVTVKVFEDNVLVRELLETKGEGRVLVVMXDGGGSLRCALMGGNLVQIAYNMGWAGIVVNGCVRDVDDINACNIGVRALASHPLRSNKKRTGEKNVPVYVGGTFIREGEWLYADNDGILVSKFELSN

SEQ ID NO: 264945 - protein, 82 aa, Glycine max
  Clone ID: PAT_MRT3847_81265C.1.pep
PRFRIKKKKKKKKKKKKKKKKKKKKKKKKKKIKKKKKKKKKKKKKKKKKGGGRFKESNLITRCLQGKSFFLGAPKLNSWAGF

SEQ ID NO: 264946 - protein, 74 aa, Glycine max
  unsure (1)..(74): unsure at all Xaa locations
  Clone ID: PAT_MRT3847_81266C.1.pep
KKGKIIVIDMVINEKQDEQKITELKLLWDVSMACAFNGKERNEEEWNKLFXEAGLQDYKISPLTGYLSLIEIYP

SEQ ID NO: 264947 - protein, 166 aa, Glycine max
  Clone ID: PAT_MRT3847_81267C.1.pep
MAALPTAELSDANATHVASCDVRVLHPVFKVYGGATAFSGPVVTVKVFEDNVLVRELLETKGEGRVLVVDGGGSLRCALVGGNLALIAHNMGWAGIVVNGCIRDVDEINASDIGVRALASHPLRSNKKRTGEKNVPVYVGGTFIREGEWLYADNDGILVSKFELSN

SEQ ID NO: 264948 - protein, 80 aa, Glycine max
  unsure (1)..(80): unsure at all Xaa locations
  Clone ID: PAT_MRT3847_81268C.1.pep
YDRKNTNNIKHSGXIFLHNGDEIARVMSPRSMGKDLSGAINEILGTCVSVDSSEYSTGRHGLWQDITDGEVEGHSRMKLL

SEQ ID NO: 264949 - protein, 91 aa, Glycine max
  Clone ID: PAT_MRT3847_81269C.1.pep
NPPRELFVPLKLWGPINFPLALVLVPLLNFGGRQKIGKNFNLRLLKKRAGFCVGHPFHFLIPFGLRGLPLFKDYKTVFDNAKTNPIKHPCF

SEQ ID NO: 264950 - protein, 61 aa, Glycine max
  Clone ID: PAT_MRT3847_8126C.1.pep
KYDQSLYTLVVNDFPFDLKLFYFIFKRCPLPNVNVLRYYVNILFWVRCHVTRKFCRMCTVL

SEQ ID NO: 264951 - protein, 154 aa, Glycine max
  unsure (1)..(154): unsure at all Xaa locations
  Clone ID: PAT_MRT3847_81270C.1.pep
NLDDEWFKKXDYKLPVFQKNGETNLDDIEAVFKDSEEHHVTEKNEQQSTAMNAFELISMSKGLNLENLFDTEQGLVSFSELNEKVNLMKKVLMGREQFSSLLSTLVLMPLLEGIPLILSTISFKLPSVSIAFSSSSIQEQITRLKGNEFDFSHI

SEQ ID NO: 264952 - protein, 49 aa, Glycine max
  Clone ID: PAT_MRT3847_81271C.1.pep
MDANPRSLEGGTSPFEGHKITIGFPSIFVRSDPPIYLIKGSGGILFSPP

SEQ ID NO: 264953 - protein, 110 aa, Glycine max
  Clone ID: PAT_MRT3847_81272C.1.pep
MRSEAFQTANIYRLLLKAVKKHIGKEENKKHFIEFVTSEFRNNRNLSDNVAIQQKIKLARDYTFLLNSVHHHKDLLFSYNIAVDRSDEVKRTLGKSASSVGLQLPEVYQP

SEQ ID NO: 264954 - protein, 123 aa, Glycine max
  Clone ID: PAT_MRT3847_81273C.1.pep
KSLSALGDVISSLSSGGQHTPYRNHKLTMLMSDSLGGNAKTLMFVNVAPTESNLDETNNSLMYASRVRSIVNDPNKNVSSKEVARLKKLVAYWKQQAGRTLEYDDLEEIQDERPTKENGNGNR

SEQ ID NO: 264955 - protein, 338 aa, Glycine max
  unsure (1)..(338): unsure at all Xaa locations
  Clone ID: PAT_MRT3847_81274C.1.pep
MTEISKSLLFTFTIIISFGLCILYASAELQRFAHSSKHDGALSFLVLGDWGRRGAYNQSLVTFQAERRAPXMGKVGEKVYIDFIVDIEENYXGNGLTSDHDNAFQDSFTTIYAAKSVHYQWYSVLGNHDYRGDAEAQLSPVLREIDSRWQSLWVDGIENELVMSCLSVSAPXLMSDYXAPPENKYDWRGIGPQKSYISNLLKDLELALRGSTAKWRIVVGHHAIRSVGHHGDTQELINRLLPILQANNVHFYMNGHDHCLEHISDTESPIQFLTSGAGSKAWRGDIEGMNRRGVNFFYDGQGFMSVKLTQTDATIEFYDVFGNVLHRLTSSKQLHSSM

SEQ ID NO: 264956 - protein, 38 aa, Glycine max
  Clone ID: PAT_MRT3847_81275C.1.pep
MADQLTDEQISEFKEAFSLFDKDGDGLFSLSLSQVLCI

SEQ ID NO: 264957 - protein, 81 aa, Glycine max
  Clone ID: PAT_MRT3847_81276C.1.pep
KGSARNRSLPQLPPISISSLLASLLIAHQGIMSFYHLHLYQSTRVWSFRMFCMIVVSYRMPFNPSLNLDEQVLVWVVIFFR

SEQ ID NO: 264958 - protein, 97 aa, Glycine max
  Clone ID: PAT_MRT3847_81277C.1.pep
MSSKESCRSELRIAIRQLSDRCLYSASKWAAEQLVGIEQDPAKFTPSNTRFQRGSSSIRRKYKTHEITGYPIAGVSYVATPAMEEDELVDGDFYLLA

SEQ ID NO: 264959 - protein, 123 aa, Glycine max
  Clone ID: PAT_MRT3847_81278C.1.pep
QKLGLGVIYSLTFFFANFGPNATTFVVPAEIFPARFRSTCHGISSASGKLGAMVGAFGFLYLAQNQDPSKADAGYPAGIGVRNSLLVLGVINILGFMFTFLVPEAKGRSLEEISGEQEEETKV

SEQ ID NO: 264960 - protein, 793 aa, Glycine max
  unsure (1)..(793): unsure at all Xaa locations
  Clone ID: PAT_MRT3847_81279C.1.pep
NSARGKIVNKCGGLPLAIRTVGNILRAKFSQHEWVKILESDMWNLSDNDSSINPALRLSYHNLPSYLKRCFAYCSLFPKGYEFYKDQLIQLWMAEGLLNFCQINKSEEELGTEFFNDLVARSFFQQSRRHGSCFTMHDLLNDLAKSVSGDFCLQIDSSFDKEITKRTRHISCSHKFNLDDKFLEHISKCNRLHCLMALTWEIGRGVLMNSNDQRALFSRIKYLRVLSFNNCLLTELVDDISNLKLLRYLDLSYTKVKRLPDSICVLHNLQTLLLTWCYHLTELPLDFHKLVNLRNLDVRMSGINMMPNHIGNLKHLQTLTSFFIRKHSGFDVKELGNLNNLQGTLSIFRLENVTDPADAMEANMKQKKHLEGLVLDWGDKFGRRNENEDSIIERNVLEALQPNGNMKRLTVLRYDGTSFPSWFGGTHLPNLVSITLTESKFCFILPPFGQLPSLKELYISSFYGIEVIGPEFCGNDSSNLPFRSLEVLKFEEMSAWKEWCSFEGEGLSCLKDLSIKRCPWLRRTLPQHLPSLNKLVISDCQHLEDSVPKAASIHELELRGCEKILLKDLPSSLKKARIHGTRLIESCLEQILFNNAFLEELKMHDFRGPNLKWSSLDLQTHDSLGTLSXNKLKLEIEGCPKLVASREDWGFFKLHSLKEFRVSDELANVVSFPEYLLLPSSLSVLELIGCSKLTTTNYMGFLHLKSLKSFHISGCPRLQCLPEESLPNSLSVLWIHDCPLLKQRYQKNGEHWHKIHHIPSVMITWQMKHAAHSSVCSYPVFYVKYLCFIFWWN

SEQ ID NO: 264961 - protein, 86 aa, Glycine max
  Clone ID: PAT_MRT3847_8127C.1.pep
LSLLSAGTVDFCLSFLVRLMPGFYIVVGCFWPSHLSLRSCKLCFWLYASLRTLPRLTFCLFPCHFPSMELFCYFIAVHSRVMPRLK

SEQ ID NO: 264962 - protein, 76 aa, Glycine max
  unsure (1)..(76): unsure at all Xaa locations
  Clone ID: PAT_MRT3847_81280C.1.pep
FLECKKPIWVAICPATGTPPVSEGRSRILWVEAQANXKSEQRSNCLEGREEVESTASSSSYTRPFFFFSSLISLEQ

SEQ ID NO: 264963 - protein, 134 aa, Glycine max
  Clone ID: PAT_MRT3847_81281C.1.pep
NERGLVIRGWAPQVVILRHRAVGAFLTHCGWNSVMESVVAGVPMLAWPMTADQYTDATLLVDELKVAKKVCEGENTVPDSDVLSRVLAESVSGNGAEVRRALQLKTAALDAVREGGSSDRDLRCLMERLRFPLQ

SEQ ID NO: 264964 - protein, 176 aa, Glycine max
  unsure (1)..(176): unsure at all Xaa locations
  Clone ID: PAT_MRT3847_81282C.1.pep
KGAASPLGHQLTSTSSWTLGDPRVLCDLSQRHLPPYMKRTLFSVYACPSEKPSYHVNDAVDGYPYMESHLTGTPIIPVILWFLSNLDAYRTVVNCILIWIDVGLPARYVIVGPLTIATTLMNTTIDWLSDSHSLPWALGDPHTVLTLYGIICYSDRCQCTAPXLTLTGRKREPVQL

SEQ ID NO: 264965 - protein, 43 aa, Glycine max
  Clone ID: PAT_MRT3847_81283C.1.pep
NIGRLTFFLLKDPYFILFTSPGLIFSFNLLRYYYFYKITHTLN

SEQ ID NO: 264966 - protein, 82 aa, Glycine max
  Clone ID: PAT_MRT3847_81284C.1.pep
ARIDEAADAYRICSVNGCAKGSGYISRLVLSHTRLYAANRSMGMRQDDYWPCAIRFQSVPNTIPTVVTILLSPSNIMVKWYL

SEQ ID NO: 264967 - protein, 130 aa, Glycine max
  Clone ID: PAT_MRT3847_81285C.1.pep
LSNPETFFKIIFKPTIFFLPLGNSKRKARSPQIPSTPPAPEKKLKPSPTKTFTFPLPPPPELQPQKSPPQHTNPFTSFENTPPPPPKRHCPPRGPPPQFEKQGTPPEEKTPPHIGPTNPGKALFGTHKLF

SEQ ID NO: 264968 - protein, 77 aa, Glycine max
  Clone ID: PAT_MRT3847_81286C.1.pep
FESGIKFSSDTQDNQALAKRPKQYFLFLYRMDLCRSLPTMTTHKNYISLSQKASRLSRIFIVYLQQHDQSRVRKQYI

SEQ ID NO: 264969 - protein, 49 aa, Glycine max
  Clone ID: PAT_MRT3847_81287C.1.pep
LEASWHEMELLVFLASSALGLTLSVDITIETVIRWHQEPPLGLAQMAVS

SEQ ID NO: 264970 - protein, 47 aa, Glycine max
  unsure (1)..(47): unsure at all Xaa locations
  Clone ID: PAT_MRT3847_81288C.1.pep
MVLSXAHXXXPXLFKPAWXXXXACSVPXTHSSSSRKQSXSSLXXXYA

SEQ ID NO: 264971 - protein, 95 aa, Glycine max
  Clone ID: PAT_MRT3847_81289C.1.pep
SSQSCMSSSRDPYRLTLSVQTTSAVINALIIGLATTCKLTIAMITGHALTILRSHAMIALLSTLLTKFVTAQDQGSQIATEAVYAHRLGTSFGSV

SEQ ID NO: 264972 - protein, 73 aa, Glycine max
  unsure (1)..(73): unsure at all Xaa locations
  Clone ID: PAT_MRT3847_8128C.1.pep
LRPRRHVAGVPARTCIAALXHGXXXHXXQXXXSSATTHATLKLVIINQRKKXTTXQIXTSNXXRICXAXNGXS

SEQ ID NO: 264973 - protein, 54 aa, Glycine max
  Clone ID: PAT_MRT3847_81290C.1.pep
VGGKASCRRNFSMDVVLSDAGGQPVDKEKKVLLHFWMPTPGHQWRIQAMIKHPF

SEQ ID NO: 264974 - protein, 88 aa, Glycine max
  Clone ID: PAT_MRT3847_81291C.1.pep
DITRLLRQHHHQTLQTLRPRRLACRSQRRPGGAGEGDEAAADRGEDEEYGNELNGFTKSEVTVIDTSSPAWKEDKYVFRKNNVCKVTE

SEQ ID NO: 264975 - protein, 50 aa, Glycine max
  Clone ID: PAT_MRT3847_81292C.1.pep
PHMGTVKKRLQTDGYLLREGGIKACFVLYIMYNRLLFATYNYFSFYIDPL

SEQ ID NO: 264976 - protein, 271 aa, Glycine max
  unsure (1)..(271): unsure at all Xaa locations
  Clone ID: PAT_MRT3847_81293C.1.pep
GSSLLVCLSLTHSLCDRGKQVLNSFPLIVFFFILFSTVSADEVSKTFIFRVDSQSKPTVFPTHYHWYTSEFAQETSILHLYDTVFCGFSAVLTSHQVASISQHPSVLAVFEDRRRQLHTTRSPQFLGLRNQRGLWSESDYGSDVIVGVFDTGVWPERRSFSDLNLGPIPRRWKGACETGASFSPKNCNRKLIGARFFSKGHEAGAGSGPLNPINETVEFRSPRDADGHXTHTXFTXXGRYAFQASMXGYAAGIAXGVAPKARLAVYKVCWK

SEQ ID NO: 264977 - protein, 55 aa, Glycine max
  unsure (1)..(55): unsure at all Xaa locations
  Clone ID: PAT_MRT3847_81294C.1.pep
VSLXAIXXLAYVCXACLXXXSWVGIXFTMMMXPPEDLXXRXTLXXXKSPLGWXVW

SEQ ID NO: 264978 - protein, 106 aa, Glycine max
  Clone ID: PAT_MRT3847_81295C.1.pep
FVALFPVSSKRVASKTFIRTVSNVGPANSVYRVSVEAPASGVTVKVKPSRLVFSEAVKKRSYAVTVAGDTRNLKMGQSGAVFGSLTWTDGKHVVRSPIVVSQIEPL

SEQ ID NO: 264979 - protein, 773 aa, Glycine max
  unsure (1)..(773): unsure at all Xaa locations
  Clone ID: PAT_MRT3847_81296C.1.pep
MGKQVLNSFRPPVVFLLFFIVFSVVSCDEASKTFIFRVDSQSKPTIFPTHYHWYTSEFAQETSILHVYDTVFHGFSAVLTHQQVASISQHPSVLAVFEDRRRQLHTTRSPQFLGLRNQRGLWSESDYGSDVIIGVFDTGVWPERRSFSDLNLGPIPRRWKGACETGVRFSPKNCNRKLIGARFFSKGHEAGAGSGPLNPINDTVEFRSPRDADGHGTHTASTAAGRYAFQASMSGYAAGIAKGVAPKARLAAYKVCWKNSGCFDSDILAAFDAAVNDGVDVISIWSIXIDGIASPYYLDPIAIGSYGAVSRGVFVSSSAGNDGPSGMSVTNLAPWLTTVGAGTIDRDFPSQVILGDGRRLSGVSLYAGAALKGKMYQLVYPGKSGILGDSLCMENSLDPNMVKGKIVICDRGSSPRVAKGLVVKKAGGVGMILANGISNGEGLVGDAHLLPACAVGANEGDVIKKYISSSTNPTATLDFKGTILGIKPAPVIASFSARGPNGLNPQILKPDFIAPGVNILAAWTQAVGPTGLDSDTRRTEFNILSGTSMACPHVSGAAALLKSAHPDWSPAALRSAMMTTATVLDNRNQIMTDEATGNSSTPYDFGAGHLNLGRAMDPGLVYDITNNDYVNFLCGIGYGPKVIQVITRAPASCPVRRPAPENLNYPSFVAMFPASSKGVASKTFIRTVTNVGPANSVYRVSVEAPASGVSVTVKPSRLVFSEAVKKRSYVVTVAGDTRKLKMGPSGAVFGSLTWTDGKHVVRSPIVVTQIEPL

SEQ ID NO: 264980 - protein, 272 aa, Glycine max
  Clone ID: PAT_MRT3847_81297C.1.pep
MTPVNLAGQFGDTTYTKVFVGGLAWETQKETMKKYFEQFGEILEAVVITDKATGRSKGYGFVTFREPEAAMRACVDPAPVIDGRRANCNLASLGVQRSKPSTPKHGGAGRNFRVMGSFQTGFGGGVGSAFPSAATFPHYAIQQGIPYNVYGYSPYSPDYTYPTSYYGVYGGATAQYPVYGSGPAAAAGGMMSGGAAFYPYLQYGGEGSGGGGTSGQGYGVNYPPQAHLFQYSPIASTAGYAQHYGTPTMSLAPSPALQSGVTMPLQAPIPHR

SEQ ID NO: 264981 - protein, 68 aa, Glycine max
  Clone ID: PAT_MRT3847_81298C.1.pep
RKALGCSVGQGQHCRVIRDVPLGVAIYKREAPFVSAAYVGVVSTRIPENVTRIGVLGCLNTPSPSSFF

SEQ ID NO: 264982 - protein, 127 aa, Glycine max
  Clone ID: PAT_MRT3847_81299C.1.pep
GSRQGIPYNVYGYSPYSPDYTYPTSYYGVYGGATAQYPVYGSGAAAAAFYPYLQYGERSGGGGTSGGYSSGQGYGVNYPPQAHLFQYSPIASTAAATAGYAQHYGTPAMSLAPSPALQPLPLPCNQA

SEQ ID NO: 264983 - protein, 161 aa, Glycine max
  unsure (1)..(161): unsure at all Xaa locations
  Clone ID: PAT_MRT3847_8129C.1.pep
MVLELLLLIEKRDSAKVTSVGGARTYGVTEADGRASMPGDRTGNDMNDVKLRDDXETEATNVDGIGAVTGHIIETTIGGRNGHPKLTMSYVAXRDVRHGSFGVGLQAKMLXESDETVALKKVFHDQGYMIRELQXTMRLVDHANDGALRHCLFSASEKAEL

SEQ ID NO: 264984 - protein, 482 aa, Glycine max
  Clone ID: PAT_MRT3847_812C.1.pep
SRGQGFRSKIFAEGDFLRRKIDSNLEETAMTSLPRDIHGAPPESLVVKLAEILGNYKTLRKMALFWCRVVAELRKLWFEEQYLPGVPQDEIPDLKSCLLYQQFQVINCCISRKRFRIIATESLDSMMMQANSDIKESTDCSAEASASPVLYARLNSGELVLRLGADHPAGDMTLLETGEPVYSPITQEGPLLTEDLIRETEEFVLRTGSVGAGCSQLLSDMQAFKAANPGCILEDFVRWHSPPDWTDNEASTEDSDVFDSGEPLSARGQLSRRMQKEGNLWRELWETSKPVPAVKQAPLFDEDLAVEGILNAFEEMHPSDLFGQLFVSLLGLGFGIAEPMLSGNSDFSKLFYDCKEYIITACQNNKLNEKVDGLVQVYETVEKMLLNPEEALKMIKQTEESTTVTGEPRSPFKRLSLIFGGKDKLLRKSVSKDQTNDEEKSGRQSFSSFFDSKSSLFGKKPPKSGSPSPSEKSSIDTGWPVV

SEQ ID NO: 264985 - protein, 135 aa, Glycine max
  unsure (1)..(135): unsure at all Xaa locations
  Clone ID: PAT_MRT3847_81300C.1.pep
LERANLQEAARTYSVDFYXQYSKLIHEWIIASNWRGLLKFKETPVXIPIDELXPAREIAXQFCSGAMSYGSISSEALTVFTLTINKMGGXSNSSHXMEQPSRLDPLSXRIINSKKTSINQAATRRFKVSSYYLTN

SEQ ID NO: 264986 - protein, 267 aa, Glycine max
  Clone ID: PAT_MRT3847_81301C.1.pep
MTPVNLAGQFGDTTYTKVFVGGLAWETQKETMKKYFEQFGEILEAVVITDKATGRSKGYGFVTFREPEAAMRACVDPAPVIDGRRANCNLASLGVQRSKPSTPKHGGAGRNFRVMGSFQTGFGGGVGSAFPSAATFPHYAIQQGIPYNVYGYSPYSPDYTYPTSYYGVYGGATAQYPVYGSGPAAAAGGMMSGGAAFYPYLQYGGEGSGGGGTSGQGYGVNYPPQAHLFQYSPIASTAGYAQHYGTPTMSLAPSPALQSVCFAVPQA

SEQ ID NO: 264987 - protein, 149 aa, Glycine max
  Clone ID: PAT_MRT3847_81302C.1.pep
MTPVNLAGQFGDTTYTKVFVGGLAWETQKETMKKYFEQFGEILEAVVITDKATGRSKGYGFVTFREPEAAMRACVDPAPVIDGRRANCNLASLGVQRSKPSTPKHGGGGRNFRVMGSFQTGFGGGVGSSFPSAATFPHYAIQQGIPYNV

SEQ ID NO: 264988 - protein, 48 aa, Glycine max
  Clone ID: PAT_MRT3847_81303C.1.pep
WKNCLWVPLVKVIAVFILISHTHFQRARFPSVSTLQGPSLFSFLGPSK

SEQ ID NO: 264989 - protein, 55 aa, Glycine max
  Clone ID: PAT_MRT3847_81304C.1.pep
RPRTIFFFFFLISLSYVWTGELNPQHGHSSELRYLTSDSRANENPFKTTNTGHGY

SEQ ID NO: 264990 - protein, 38 aa, Glycine max
  Clone ID: PAT_MRT3847_81305C.1.pep
GWLNIVLAYDMVWVRSVTTEISFGHTKSALALNTQPRA

SEQ ID NO: 264991 - protein, 364 aa, Glycine max
  Clone ID: PAT_MRT3847_81306C.1.pep
RVRAEPCPSSPINIVDTALSSINLVNSVTNAFDKRNDFPSMLQLIAIRRIGITPVFLVPLGDTLAPDIITLSDRPWLLHSARHSLSYSSISFQPSTHVTPVCSVECPKGILFVAENSLHLVEMVHSKRLNMQKFHLEGTPRKVLYHDESKMLLVMRTELNCGTCLSDICIMDPLSGSVLSSFRLELGETGKSMELVRVGSEQVLVVGTSLSSGPHTMATGEAESCKGRLLVLCLDHVQNSDSGSVTFCSKAGSSSQKTSPFREIVTYAPEQLSSSSLGSSPDDNSSDGIKLDENEVWQFRLTFATKWPGVVLKICPYLDRYFLATAGDAFYVGGFPNDNPQRVRRYAMGRARFMITSLTAHFTR

SEQ ID NO: 264992 - protein, 72 aa, Glycine max
  Clone ID: PAT_MRT3847_81307C.1.pep
PLRRVAELSSFTPHAYTTTPQKGYYSTGNAESIPGLPPLSSEDMLSLPPRPLELTVLRPPGDPTEMNRWNSR

SEQ ID NO: 264993 - protein, 47 aa, Glycine max
  Clone ID: PAT_MRT3847_81308C.1.pep
EELKNAYLRVAYKMGVHFLMKRIETLKCTVKIIYEQSHYLFCIPPLT

SEQ ID NO: 264994 - protein, 89 aa, Glycine max
  unsure (1)..(89): unsure at all Xaa locations
  Clone ID: PAT_MRT3847_81309C.1.pep
XNXXSXAFYSXEESXMQXLLQRFKSXFENLTXLLIASRXLDFFXXGXRYXXQVLXXAVVXPLYFSGKIXXGVINXSLXXXNQXLAIFPH

SEQ ID NO: 264995 - protein, 104 aa, Glycine max
  unsure (1)..(104): unsure at all Xaa locations
  Clone ID: PAT_MRT3847_8130C.1.pep
TPCVHVLLHYXXVNLGGSRSKRXFKFSGSVQLFEEQGDNGLSCQRSEFKPIPPCESDSVSAPIDYLSKRQSIFLVFANYCYVFDAFRLPTATFIEQRSRTKWIK

SEQ ID NO: 264996 - protein, 200 aa, Glycine max
  unsure (1)..(200): unsure at all Xaa locations
  Clone ID: PAT_MRT3847_81310C.1.pep
MRGRFPYDENGRIILEEGYLVYECNHMCRCNKSCPNRVLQNGVRVKLEVFXTEKKGWAVRAGEAILRGAFVCGYIAEVLDVQEARDRRKRYGAEHCSYLYDIDARVNDMGRLAREQAQYVIDATKFGNVSRFINHSCSPNLVNHQVLVESMDCERAHIGFYASRDIALGEELTYDYQYELMPGEGSPCLCESLKCRGRLY

SEQ ID NO: 264997 - protein, 141 aa, Glycine max
  unsure (1)..(141): unsure at all Xaa locations
  Clone ID: PAT_MRT3847_81311C.1.pep
MAQYKFQKTTVVPYGSDVVDIILYRSQRMSPAVVHTGFAIARVRQVYMRTVTHTQLNFDDWLYTIHRERPRLDDSHSFYRDLLHELYCRDHCXLAMGRDNTDRTLIGXIATDYAQLLKYGDSLYRCXVXKAAALGRLCTEI

SEQ ID NO: 264998 - protein, 53 aa, Glycine max
  Clone ID: PAT_MRT3847_81312C.1.pep
AGLCSLVFKFIAVLDYFCYCFWDNYFLFLVEYCFVFIITPWGIWCSYSTIELF

SEQ ID NO: 264999 - protein, 88 aa, Glycine max
  unsure (1)..(88): unsure at all Xaa locations
  Clone ID: PAT_MRT3847_81313C.1.pep
FQRALSPPLWGPNGPFKAIKKGGGKAIKKVGTYEEAPPPLVFNRVXKDFKIISKVFSKKNSVFFWHVFAKETFGGYKKFLFPLLGKKN

SEQ ID NO: 265000 - protein, 55 aa, Glycine max
  Clone ID: PAT_MRT3847_81314C.1.pep
HDSACLSISADDLNESQDFLIIGLPSKPLILFIIVQNICTLCFPSKPGFIMAGSA

SEQ ID NO: 265001 - protein, 199 aa, Glycine max
  Clone ID: PAT_MRT3847_81315C.1.pep
MTTKGTTHSEPNNTECCMCGDLGFSDQLFQCKACQFRSQHRYCSNLYPKPESLGTCNWCLSQREDTKERSTNSSNSSSSIRNNDDESRIKRIRNGNSYNSAQNIGPVKKGVKGSVLHLQIHKPIKKPKSPESSRSPSASNSPPKSSPVLVSTRKRIVTNGTLEERLRRTRSEDITRSGATKQVFRNKVRRYKLLDEVSS

SEQ ID NO: 265002 - protein, 35 aa, Glycine max
  Clone ID: PAT_MRT3847_81316C.1.pep
SLSMWSRPEMNNKTCLFLNSPNATCGPVRPLYTIA

SEQ ID NO: 265003 - protein, 117 aa, Glycine max
  Clone ID: PAT_MRT3847_81317C.1.pep
MDAKSRISPTRLTDKKCVPCNLKELRPMSEDAAHTLMPQVAEWNLVNEDGVMKLRRSWAVKTFTKGLEFFRIVAVLAENEGHHPDLHLVGWNNVTIEIWTHAVGGLTENDFILAAKI

SEQ ID NO: 265004 - protein, 73 aa, Glycine max
  Clone ID: PAT_MRT3847_81318C.1.pep
LEVGATRSSSVVVQGGSLHDLPVGVLACHIKLFFMESDQSFNGRHFAYSVPRRDFRWLTYSPYLEYPFEHITC

SEQ ID NO: 265005 - protein, 404 aa, Glycine max
  unsure (1)..(404): unsure at all Xaa locations
  Clone ID: PAT_MRT3847_81319C.1.pep
MPYCNVGTQLPSPVADVPLKNDIKIFYRTYGGGPTKVLLIIGLAATHEAWGPQIKGLTGATVSNDDDDDDVRVVWSXKGNGGIHVCAFDNRGVGRSSVPVEKSEFSTKIMAKDAIALLDHLGWKKAHVFGHSMGAMIACKVAAMVPDRVLSLALLNVTGGGFQCFPKFDDKTISVAYRFLKAKTPEQRAAVDLDTHYSQEYLEEYVGTDKRRAILYQQYVKGISTTGMQSNYGFDGQLNACWTHKMTETEIEVIKSAGFLVSVIHGRHDIIAQIYYAKRLAERLHPVARMVDLHGGHLVSHERPEEVNQALFDLIKASEVNMSPHDWTNLPKKESWWKEKRVLIRTNIQAGSNVSLNCCMLEKLHLFLLYLFGLLVLAFEYGRKLLGSLKPAQAGGSPSYIESQ

SEQ ID NO: 265006 - protein, 137 aa, Glycine max
  unsure (1)..(137): unsure at all Xaa locations
  Clone ID: PAT_MRT3847_8131C.1.pep
IRTRKKTHYLFPKKRNHSPCPLKLSLFPHSPXERXXXRQXQRXPRGXEXXAEPXXPXXEHNXPRXQXQQKGRRXARPRRHRRQQKQQRHQQQQPRPRQSPNAPSPKPKRFFFPPPPQEEEGEKEEEEKKKKKGGGGG

SEQ ID NO: 265007 - protein, 59 aa, Glycine max
  Clone ID: PAT_MRT3847_81320C.1.pep
INPSLSLKYLFNFSINIIKMTLICYYWVRTYLLRKGINHPLNQQTLPLLTCPNVKCQCI

SEQ ID NO: 265008 - protein, 353 aa, Glycine max
  unsure (1)..(353): unsure at all Xaa locations
  Clone ID: PAT_MRT3847_81321C.1.pep
HASADAWAQLWNDRKHCYNTAMERQRTLLHELMSTAFLMLRNTEVAVRSFMMLRPRFPHPSGGTSSATAPSQTPGATASIKSSSXDLLLWYCLLKTISVFTANSFKILRSILGECHQWIEELEXLLLLDSERNASANGSSLLQSLPKVMTNVHDFFVHVAAKVESIHQYIESMKSAYLADQRHRGEVNDPFLEADRRETARQEAASKRVHPTLHLPANSQPSTQVAGLFSSSGTQAALTAPQTSAATSSLSSGSGFSLFSTPSSAPSSSMLSSLFTTPTPAPGPQTSLFGSTSVPGSASTPSLFGNTTPLFSTTPATNSLFSSPFVSGAATGSGASFGPGTKNQRVKSRTARR

SEQ ID NO: 265009 - protein, 170 aa, Glycine max
  Clone ID: PAT_MRT3847_81322C.1.pep
NSARGGINTAMERQKTLLHELMSTVKDMLRNTEVAVRSFMMLRPRFLHPSGGTSSATAPSQTPGATIAPSSSSQPTTASIVPVFDFYSGLPRKPSPFLQQTVLRFEKYLGECHQWIEELEQLLLLESERNASSNGSSLLQSLPKVMTNVHDFFVHVAAKVESIHQYIESM

SEQ ID NO: 265010 - protein, 40 aa, Glycine max
  Clone ID: PAT_MRT3847_81323C.1.pep
SMIWSDSTSSNSSLILIRKICKASIKAGVRYIIIIEDSKV

SEQ ID NO: 265011 - protein, 52 aa, Glycine max
  Clone ID: PAT_MRT3847_81324C.1.pep
CNSVRVTQSLHPQFDYLLAKNIIIIDFRKMFLQRKVFNIHRRSWYRLKTISS

SEQ ID NO: 265012 - protein, 57 aa, Glycine max
  Clone ID: PAT_MRT3847_81325C.1.pep
MSSLSVRNGRHTFSAGNRVRSPSGNVACMFAGNGGVKSSQCKFLAGAIIVRLPRPLR

SEQ ID NO: 265013 - protein, 43 aa, Glycine max
  unsure (1)..(43): unsure at all Xaa locations
  Clone ID: PAT_MRT3847_81326C.1.pep
ARGATTMLXIHGQISTVQTVKDLFVPSAVSLAVPLALMSLTSE

SEQ ID NO: 265014 - protein, 109 aa, Glycine max
  Clone ID: PAT_MRT3847_81327C.1.pep
AEVKINYTEDPKKKEDPKINYIADPKEQTMADPKKNYIADKKNWRTNQIQKTNPNRTNKKNIYSFLSSETTARHLAAALAGASTPSCSRPEGISMPLHSSLQQTSPLHS

SEQ ID NO: 265015 - protein, 69 aa, Glycine max
  Clone ID: PAT_MRT3847_81328C.1.pep
SRVDPRVRFLSLSENPNPGSSFAPLSLSATTGSGIKVLEWKNSMLGMSQISSSRVGLLAIKSGTSLHSL

SEQ ID NO: 265016 - protein, 36 aa, Glycine max
  Clone ID: PAT_MRT3847_81329C.1.pep
WVRVLLIYIIHIVALLLSLEPTFEQCCAYMPLHNPF

SEQ ID NO: 265017 - protein, 60 aa, Glycine max
  Clone ID: PAT_MRT3847_8132C.1.pep
LYLFLSKFISLIPLTHYLLYDKLFKDVLNDLFSRTIPFFLSHHALFDTSGNLLFFPLSKF

SEQ ID NO: 265018 - protein, 102 aa, Glycine max
  unsure (1)..(102): unsure at all Xaa locations
  Clone ID: PAT_MRT3847_81330C.1.pep
PLKKTPFKNLTFLVKVNPYPKFFKRMAFFFKPQRVKPKKKKLPKKRKPVFKKEASPPNFVGKAGFPPRGSDFDXTKFPTFFKWGGVSQKTLRFKFSYKIFVW

SEQ ID NO: 265019 - protein, 66 aa, Glycine max
  Clone ID: PAT_MRT3847_81331C.1.pep
SVTAVSTTTVSTNRCSQYPTGAVGPPLQKYREASFSCDLAFVPPSQAVAVFSFHDSRQIPRLKKYF

SEQ ID NO: 265020 - protein, 121 aa, Glycine max
  Clone ID: PAT_MRT3847_81332C.1.pep
NEKANLVIERAAASTRKLTTETNDLKKQTRIFRQRLQVMLESQLEVVKSSEWDELLANDDISQYDEIEKILGSNLDKNSEGSVESTPIAEEQPSSQAPAPSNAAEPAAAKTVVIFPDGESK

SEQ ID NO: 265021 - protein, 42 aa, Glycine max
  Clone ID: PAT_MRT3847_81333C.1.pep
KVSDYFEYQNLTDNARNLLSLSYQNCINATLASPLIICSIYL

SEQ ID NO: 265022 - protein, 42 aa, Glycine max
  Clone ID: PAT_MRT3847_81334C.1.pep
ERIYKRFFCWTLYAFIRIIKLCFFGLHIIYFHHYFLFNIKRN

SEQ ID NO: 265023 - protein, 132 aa, Glycine max
  unsure (1)..(132): unsure at all Xaa locations
  Clone ID: PAT_MRT3847_81335C.1.pep
AIGIKNEXMLISELQHTNLVQRLGFCIHEEKRILIYEYMPNKXLDFYLFDCTRSMLLDWKKRFNIIERISQGILYLHKYSRLKIIHRDLKASNILLDENMNPKISDFGLARMFMQQEFTGTTSMIVGTYGYM

SEQ ID NO: 265024 - protein, 59 aa, Glycine max
  Clone ID: PAT_MRT3847_81336C.1.pep
GKIIIIVTKDYSISCVCSLQHDHTKVGPCCFSHTENEPPSSLIILNNLCFWCMLYNFGF

SEQ ID NO: 265025 - protein, 48 aa, Glycine max
  Clone ID: PAT_MRT3847_81337C.1.pep
CEKTTEGSLFVFHTSLALSILIHFKIYVFNDKISIYTFINNQKLSMNA

SEQ ID NO: 265026 - protein, 187 aa, Glycine max
  unsure (1)..(187): unsure at all Xaa locations
  Clone ID: PAT_MRT3847_81338C.1.pep
SSESLQLRGTLRGHNGWVTQIATNPKYPDMILSCSRDKTLIVWKLTRDDHSYGIPQKRLYGHSHFVSDVVLSSDGNYALSGSWDKTLRLWDLAAGRSTRRFEDHTKDVLSVAFSVDNRQIVSGSRDKTIKLWNTLAECKYTITDEGHSDWVSCVRFSPNHHNPIIVSAGXDRMVKVWDLANCKLKIN

SEQ ID NO: 265027 - protein, 66 aa, Glycine max
  Clone ID: PAT_MRT3847_81339C.1.pep
PTRPDRCHLRMNSGYGARTPEVTCASWRLAGEACTIFGFETIPEECLESTHEYIHGDQYRSYSTTV

SEQ ID NO: 265028 - protein, 66 aa, Glycine max
  Clone ID: PAT_MRT3847_8133C.1.pep
HLTHMYSHTNINTNTWNAMQPSYLYEKKKNNIPIPISLIHDTPTPTCNQTPSHIQILHMLHSPPAL

SEQ ID NO: 265029 - protein, 58 aa, Glycine max
  unsure (1)..(58): unsure at all Xaa locations
  Clone ID: PAT_MRT3847_81340C.1.pep
LVNENNNKNIFYGVDIHSEHDMRQLSSNKNMKYDHQYHSXTVNIQLWLGESTLHDLTE

SEQ ID NO: 265030 - protein, 65 aa, Glycine max
  unsure (1)..(65): unsure at all Xaa locations
  Clone ID: PAT_MRT3847_81341C.1.pep
SXQPIHSVGKKRPSGLESKFFWVDFGKFLQTKTNNYSLKAXXDFFPPISVNLPFCPYNRXIGLLL

SEQ ID NO: 265031 - protein, 123 aa, Glycine max
  unsure (1)..(123): unsure at all Xaa locations
  Clone ID: PAT_MRT3847_81342C.1.pep
FVPPPWGICGGPKIXAVWGGFYFPNFFKGFFHSSFFQDFWEAPSLFERRNASDYVPRGFPNPPIPGGPCFPVKFRAQVFYPHFLPSFSFRCPQGGPHHIFSFLGAALFPFSLWLAFYFKVRVF

SEQ ID NO: 265032 - protein, 140 aa, Glycine max
  unsure (1)..(140): unsure at all Xaa locations
  Clone ID: PAT_MRT3847_81343C.1.pep
DTRTLGPATYFVTDAYXWAIINVGSFTASNSPVYKSFVPNQVTGTVNSELLQXARLSAXSLTYYGLWLENGFYNITLQFAETAILDSTRSWESLGRRVFDIHIQGTRVLKDLDIHKEAAGMLYQAIQRQYRFAVTENYLE

SEQ ID NO: 265033 - protein, 63 aa, Glycine max
  Clone ID: PAT_MRT3847_81344C.1.pep
CQSRTILWETAGSGRYGAMSPHPSRRPSFTIGPRPKYALTISERFLLGPLVSLSTWPLPWDPL

SEQ ID NO: 265034 - protein, 100 aa, Glycine max
  Clone ID: PAT_MRT3847_81345C.1.pep
AGGFPKEPPGPGGGELKNWGAYPQLTPQSFSRGVPRKNFLRQERVSPMLKNGPPKGLFAKKKMAQYCFKIWPTGPFTKFFLGGEFPRSILRLPRGWPLVS

SEQ ID NO: 265035 - protein, 47 aa, Glycine max
  Clone ID: PAT_MRT3847_81346C.1.pep
ERWLGLEYRGFRVWELEIRVKKQINLSYECATNLVKDLYKSLVVPRA

SEQ ID NO: 265036 - protein, 128 aa, Glycine max
  Clone ID: PAT_MRT3847_81347C.1.pep
TSIIKYPLLKIQILNREKEREMAFTISRSQSALTDREKENLDNLVDKECATTEGMISSQLKLKSSLSSKASSHQSMDKHAILRRIRQRRFNNKAKTALEALIGTSEANNTGTAQEQKWLQLGDSFSSP

SEQ ID NO: 265037 - protein, 80 aa, Glycine max
  Clone ID: PAT_MRT3847_81348C.1.pep
QSEWNLPWEMTTVRHEEGGFFFFFFCYPLVCPCLPCSAYRALVFVLVIMPASLSLQPYTYVPHNCHSLPHSPFLHRSSLR

SEQ ID NO: 265038 - protein, 86 aa, Glycine max
  unsure (1)..(86): unsure at all Xaa locations
  Clone ID: PAT_MRT3847_81349C.1.pep
HPPPPGSPPPGLAIITNHHNKPPPLIPIIPNLFMHPRPNGISNPPXWXHARQQVSVVPQLRFCASVLFRWELRPGAIIHESWSGKY

SEQ ID NO: 265039 - protein, 63 aa, Glycine max
  Clone ID: PAT_MRT3847_8134C.1.pep
NCKCDKLNYQRFQHQLGFLERKRQAARGEAKREREKRGLKINTPNDVRREEWLKKMMSRSDKG

SEQ ID NO: 265040 - protein, 48 aa, Glycine max
  unsure (1)..(48): unsure at all Xaa locations
  Clone ID: PAT_MRT3847_81350C.1.pep
LFFLXXSXLXXVXGXXXLXXSGRFXFPPPXVIVVCLFXLMGGEIFDPP

SEQ ID NO: 265041 - protein, 40 aa, Glycine max
  Clone ID: PAT_MRT3847_81351C.1.pep
RLTTEKTYHISWWKNPATYFRLHNNLINILCVLSISTYKI

SEQ ID NO: 265042 - protein, 70 aa, Glycine max
  Clone ID: PAT_MRT3847_81352C.1.pep
CLTITSKLIKRFIKISLSRVVQTLKESSLPTISVPGSYFNTEQWKYFIRNHHFFYLAYHTLYLYFFLPFA

SEQ ID NO: 265043 - protein, 65 aa, Glycine max
  Clone ID: PAT_MRT3847_81353C.1.pep
PCVREAQGFRFSIRGHAPHRLHHRWGRLDLIQPMLSRYLHSEKTTPRMRRKRRKRPLNPDKKNKT

SEQ ID NO: 265044 - protein, 52 aa, Glycine max
  Clone ID: PAT_MRT3847_81354C.1.pep
ARGNIPRSSTLALIHVDSNFPETNVIYWPVHILYNAEPLPTPYPGYSMTFSS

SEQ ID NO: 265045 - protein, 94 aa, Glycine max
  unsure (1)..(94): unsure at all Xaa locations
  Clone ID: PAT_MRT3847_81355C.1.pep
VRVSHTLCWTLIQYGIKHSRAFANISNTGDFIASMEEACVPVCXGGDSGVQHTSSEPYRALFWVLSQHQKPVDDVMLLYSVLRYGVPVHVSNFL

SEQ ID NO: 265046 - protein, 74 aa, Glycine max
  Clone ID: PAT_MRT3847_81356C.1.pep
IGLAGGSGSGGLMAGTSNSGRQVWPWQPKPLQDHCRRHAANTAIQQAVYLQQLRGSLIKRWQQQQTTINMITTR

SEQ ID NO: 265047 - protein, 423 aa, Glycine max
  unsure (1)..(423): unsure at all Xaa locations
  Clone ID: PAT_MRT3847_81357C.1.pep
MAPSISKTVELNSFGLVNGNLPLSITLEGSNFLANGHPFLTEVPENIIVTPSPIDAKSSKNNEDDDVVGCFVGFHADEPRSRHVASLGKLRGIKFMSIFRFKVWWTTHWVGSNGHELEHETQMMLLDKNDQLGRPFVLILPILQASFRASLQPGLDDYVDVCMESGSTRVCGSSFGSCLYVHVGHDPYQLLREATKVVKXSKNLFCKLIYFIXVVIIDKFGWCTWDAFYLKVHPSGVWEGVKGLVEGGCPPGMVLIDDGWQAICHDEDPITDQEGMKRTSAGEQMPCRLVKLEENYKFRQYCSGKDSEKGMGAFVRDLKEQFRSVEQVYVWHALCGYWGGVRPKVPGMPQAKVVTPKLSNGLKLTMKDLAVDKIVSNGVGLVPPHLAHLLYEGLHSRLESAGIDGVKVDVIHVSLYSAFLFSF

SEQ ID NO: 265048 - protein, 56 aa, Glycine max
  Clone ID: PAT_MRT3847_81358C.1.pep
KKHQLSHLKTKRRGFICLISQVLGCANKKSLHRIPYNSKRKFGGEAKQGNRVQSLP

SEQ ID NO: 265049 - protein, 113 aa, Glycine max
  Clone ID: PAT_MRT3847_81359C.1.pep
QFRARPTLFGYVQFDTTKNRFLVAGDEFTIKFWDMDNTNMLTSVEAESGLLASPCIRFNTDGILMGGSTNDNGVKILANAKGIRLLRTAENHTFDASRVASAADVKVKRLIFC

SEQ ID NO: 265050 - protein, 39 aa, Glycine max
  Clone ID: PAT_MRT3847_8135C.1.pep
SKSLCKRLHSNNSEQFSIWSRPFVVIMNHQSFTTMKHPT

SEQ ID NO: 265051 - protein, 130 aa, Glycine max
  unsure (1)..(130): unsure at all Xaa locations
  Clone ID: PAT_MRT3847_81360C.1.pep
MVRVSVLGDCLNNICNAERTGKRQVLIRPSSKVIVRFLTVMQKHGYIDEFEEIDDHRSGKIVIQLNGRINKCGVISPRFNVQLTQIENXVNLLMPARSFGYIILTTSAGIMDHEEARRKHVAXKILXFVY

SEQ ID NO: 265052 - protein, 150 aa, Glycine max
  unsure (1)..(150): unsure at all Xaa locations
  Clone ID: PAT_MRT3847_81361C.1.pep
XXXIFANDDLEYQTKFXXERLGMGXXRMXLESIFNRIHPQSLEYTSFGKPHPSVFKNAEILLEKLVASLYDDFYDINHDNTSYFKTLYMIGDNPAVDIKGARQTGHPWFSILTRTGVFKGKENHDKFSADLVVDTVEEAVDYILTKECAS

SEQ ID NO: 265053 - protein, 62 aa, Glycine max
  unsure (1)..(62): unsure at all Xaa locations
  Clone ID: PAT_MRT3847_81362C.1.pep
XVIKTQGTIPEPVPATEAPATEQAAAEVPVQEEQQATEVPAPESTTEAPKEDTTEAPTTEAV

SEQ ID NO: 265054 - protein, 180 aa, Glycine max
  unsure (1)..(180): unsure at all Xaa locations
  Clone ID: PAT_MRT3847_81363C.1.pep
LLLGLELTGFPFLAAXRPPNGFESIEEALPEGFRERVQGRGIVDEGWVQQQLILGHPSVGCFITHCGAASLTEALVNKCRLVFLPHLGADQLINCRMFSRKLRVGVEIEKGEEDGLFTKESVCKAVKIVMDDGNEVGREVRENHSKLRNFLLSDNVESECVDGFCKGLHDLLNLKRLVMC

SEQ ID NO: 265055 - protein, 40 aa, Glycine max
  unsure (1)..(40): unsure at all Xaa locations
  Clone ID: PAT_MRT3847_81364C.1.pep
YLSIAMLXTSLXXWLSLFQESDSAXVEXPGXXVCYRXVHR

SEQ ID NO: 265056 - protein, 89 aa, Glycine max
  Clone ID: PAT_MRT3847_81365C.1.pep
RSLFITLYPAFPHLISPLIIRYFLATLTSLCYIPLPDYVLLCLSHHTFCLGFHLLTLALRTRSPLSRSIYCLRVVPSPPPKRTDGASYS

SEQ ID NO: 265057 - protein, 296 aa, Glycine max
  unsure (1)..(296): unsure at all Xaa locations
  Clone ID: PAT_MRT3847_81366C.1.pep
MAFHRASKAKPKSARSRILLLAAAVTAIALLLLFSSLLSTTVSKANLLQQPFEKYLYWGTRIDCPGKHCRSCEGLGHQESSLRCALEEALFLGRTFVMPSGMCINPIHNKKGILHHSTNASSEELWDASSCAMDSLYDTELMSDTVPVILDNSKEWYRVLSTSMKLGARGVAHVEGVSRFELKENSRYSDLLLINRTASPLSWFMECKDRNNRSAIMLPYSFLPSMAAGKLRDAAEKIKALLGDYDAIHVRRGDKIKTRKDRFGVARSLHPHLDRDTRPEFMXCRIAKWVPPGKNL

SEQ ID NO: 265058 - protein, 183 aa, Glycine max
  Clone ID: PAT_MRT3847_81367C.1.pep
MERSTKLFSAALVLCVVVMAHQTAAQELKGKNLINKVCTITPSRDLCVGILSSDPIRSPDADLKDLAVISLRVAARNASGILSEAKMLIDDDNLDPDVQQGLADCKETILDAESQLEDTIASLLVDSDTDTQVWLKAALAAIDTCDASIPGDDDVLSVKSAMFRRLCNIAIAITKRLNKPLKF

SEQ ID NO: 265059 - protein, 56 aa, Glycine max
  Clone ID: PAT_MRT3847_81368C.1.pep
NTLFMHAPSLILKEKIVTKQQFKHFLYTISSLMIFYKKVTLFKCRLLSNHALVNKN

SEQ ID NO: 265060 - protein, 81 aa, Glycine max
  unsure (1)..(81): unsure at all Xaa locations
  Clone ID: PAT_MRT3847_81369C.1.pep
SILTEXLPRGSLYRLXHXADSRIDEVRRLKMAFDVAKGMNYLHSSHPTIVHRDLKSPNLLVDTNWGVKGLHFGMSRLKHHT

SEQ ID NO: 265061 - protein, 77 aa, Glycine max
  Clone ID: PAT_MRT3847_8136C.1.pep
PLWKKLGFGPLWKRERAVFFWGHWFFIFSKNFDYALLRCWKCLGPKIFGGPNKEINRAPGVVIFKGRLESLYQKKVV

SEQ ID NO: 265062 - protein, 32 aa, Glycine max
  Clone ID: PAT_MRT3847_81370C.1.pep
KYQLNLESPKKLTDNGIAFVQPLHKLQTLTKR

SEQ ID NO: 265063 - protein, 72 aa, Glycine max
  Clone ID: PAT_MRT3847_81371C.1.pep
RLREDDRRGQQGRKRSGFLLSFCVSSIPIILLCLSINSGSCSFFLDTTTRVLPKTTVVFCLSPCWGICLDTH

SEQ ID NO: 265064 - protein, 62 aa, Glycine max
  Clone ID: PAT_MRT3847_81372C.1.pep
KGSVRAISARSYQLGASTQSSHRLPHVPPGATVVTALSNQRAQFHNNNNGVCGNAPHSNHMN

SEQ ID NO: 265065 - protein, 171 aa, Glycine max
  unsure (1)..(171): unsure at all Xaa locations
  Clone ID: PAT_MRT3847_81373C.1.pep
LEARKPYFRTFSAIAEKYGPIFILKLGCHPTLVVNSREIAKECLTTNDXGFASRPITSAGKILGYNNAVTGFSPYGKYWREIRKMAILEILSSYKLEKLKHVRDTETLSLVKDLCSSISCPKNVNGSTTHXPISNLLEHMSFNIIVRMIAGKRFGGDTVNQEDNEAWKLRY

SEQ ID NO: 265066 - protein, 39 aa, Glycine max
  unsure (1)..(39): unsure at all Xaa locations
  Clone ID: PAT_MRT3847_81374C.1.pep
ASAHTLFIWAILXSSPTCNSVAVFXGVXAGGDLVVXLLS

SEQ ID NO: 265067 - protein, 369 aa, Glycine max
  unsure (1)..(369): unsure at all Xaa locations
  Clone ID: PAT_MRT3847_81375C.1.pep
MAASVVVSTSLSVCFNYGYHRRPSISALSCHSNSITKTNLKLSSQCFSNSNSVAPIYCRKFVARTSIGENESESEKELGFVGEDSAVFELGKQKVSSWIYFTAILGVVLYVLNVAWIDNSTGYGKAFIDAVSTLSDSSEVVMLILILIFAGVHSGLASFRNTGEKLIGERPFRVLFAGISLPLAVSTVVYFINHRYDGLQLWQLQDAPGLHQLLWLSNFISFFFLYPSTFNLLEVAAVDKPKLHLWETGIIRITRHPQMVGQVIWCLAHTIWIGNSVAVAASIGXIAHHLFGVWNGDRRLAIRYGEDFELFKSRTSVVPFAAILDGRQKLPKDFYKEFIRLPYLTVTALTLGAYFAHPLMQAASFNLHW

SEQ ID NO: 265068 - protein, 58 aa, Glycine max
  Clone ID: PAT_MRT3847_81376C.1.pep
KGVKDSIGARFTEKGFELVILDPYKKRGNVLCFNKVLGLASKRFLVEKVVLIYRTIKQ

SEQ ID NO: 265069 - protein, 74 aa, Glycine max
  Clone ID: PAT_MRT3847_81377C.1.pep
LLISVCWGLCCRTKKTSFDRFMCKTIIIQEHHKSMQLYHLTTGLVVVSLGASCVILKYILDVLILIELLVLQSL

SEQ ID NO: 265070 - protein, 110 aa, Glycine max
  unsure (1)..(110): unsure at all Xaa locations
  Clone ID: PAT_MRT3847_81378C.1.pep
RIAEEGQVICVHXVHDWKEHLTKGEESTTLTVVDFTASWCGPCRFTAPIRAECARXLPNVIFDKVDVXDELETVYNECGTEAMPTFLFVYNGKLVNNVLGAKSEELQLTL

SEQ ID NO: 265071 - protein, 92 aa, Glycine max
  Clone ID: PAT_MRT3847_81379C.1.pep
CQPRDRHNQKQHHRYDYSQPHDTQHYNHQHDISVAGSCTKDQLLVQHCPPRPRSSQGTSTHLQPWLVHHHNQMLSEHIYTICYVFASPLCLL

SEQ ID NO: 265072 - protein, 89 aa, Glycine max
  Clone ID: PAT_MRT3847_8137C.1.pep
VQVCFCLRFNFLTFIHWETLPYVYIYTCIPVKLLHVVGSWVLCLNRKKGKCGVVCGIKGLCKLILLSSTPVPVSSYLQKGLCLGSFLYL

SEQ ID NO: 265073 - protein, 131 aa, Glycine max
  unsure (1)..(131): unsure at all Xaa locations
  Clone ID: PAT_MRT3847_81380C.1.pep
KXXKYDIIGGGXXXXENFXEKEDXEKXKKIDXRLRKRIDXXXNEVXGXMEXNLXKLXXDDVEIFKGXMLDXKXXXXKIVLXKXKVGGXIXXSDXLXNFLKEXNFRXSVDLXXXXXIKGMIKMVXXVGIXEK

SEQ ID NO: 265074 - protein, 69 aa, Glycine max
  Clone ID: PAT_MRT3847_81381C.1.pep
NCLDHYLSVGLPVRRFALPLQGIFLLDSLPGTKANGYTIFYFNSNLLLSVTGNTNPGRDVIRPRSLSCD

SEQ ID NO: 265075 - protein, 323 aa, Glycine max
  unsure (1)..(323): unsure at all Xaa locations
  Clone ID: PAT_MRT3847_81382C.1.pep
WFLHFQIVDKLHWYVQNGDTIVDFCCGANDFSILMKKKLEETGRCSYKNFDLLPTKNDFNFEMRDWMTVQTKELPAGSQLIMGLXTPPFGLKAALANKFIDKPLTFRLKLLILTVPPETERLDEKRSPYDLVWDDKKFLLGKSFYLPGSVDANDRQIDQWNVKPPPLYLWSRPDWTDKHKAIARKHGHFISQRGLLRIESFDKEKSPASHTLDDSSGFDSMPGHDILNLTDAPINEGQTGCSPHGNVDRESQERQKYMVRKADKTSWKRKRSEENDGRRLGVTSPPNSIDGRSSVESFQLRPDMPPPDYELGDKSYRHLEPTS

SEQ ID NO: 265076 - protein, 72 aa, Glycine max
  Clone ID: PAT_MRT3847_81383C.1.pep
VLYAYLQSFLVNKFSRHARKRKIKKNTRKTLNYVFRSFWLIKKKITYLSIQNKLKIMVFWVNNVALSQSLET

SEQ ID NO: 265077 - protein, 86 aa, Glycine max
  Clone ID: PAT_MRT3847_81384C.1.pep
RIPRHSQLHFGVRISAYPFRASSEWIMSRSTHLALPMTAATDDNNNPAQDNPNKTLDPAEPDPIPATEDEADDDTKDYDAQTIPPT

SEQ ID NO: 265078 - protein, 110 aa, Glycine max
  unsure (1)..(110): unsure at all Xaa locations
  Clone ID: PAT_MRT3847_81385C.1.pep
NSARATVTGAERDKRRKTKKKRKKENPCLHCIALQHLLLVLPNPPPHALSPTRPDPLSSRGNFAQKGLRIRPWPSISDLRDPSRFRLFFFAFSPFSGPQXLXPLQLRKIF

SEQ ID NO: 265079 - protein, 77 aa, Glycine max
  Clone ID: PAT_MRT3847_81386C.1.pep
SLGLKFVREHATLRVGTRHCHLQNLRSNSLINRIMVLYITLSYINVYLKSMYILTITFNTISIHISYTNHSILILLS

SEQ ID NO: 265080 - protein, 76 aa, Glycine max
  unsure (1)..(76): unsure at all Xaa locations
  Clone ID: PAT_MRT3847_81387C.1.pep
SSTXLLKPYWVLEWXXXXXXXXXXXXNLLTSHSTPSQKTNHFSXPXAXTSSIXPPNHPXCKXSRTTTDDDDXAGEP

SEQ ID NO: 265081 - protein, 83 aa, Glycine max
  Clone ID: PAT_MRT3847_81388C.1.pep
VSSWECLSVERQSETKKMLSFVFIIASLFLSLCHGHVYTFTMHHRHSEPVRKWSHSTASGIPAPPEKGTVEYYAELADRDRLL

SEQ ID NO: 265082 - protein, 40 aa, Glycine max
  Clone ID: PAT_MRT3847_81389C.1.pep
MHARASRVIISPFYFLSHFSRIVSYGKVLPHRERRPRHCQ

SEQ ID NO: 265083 - protein, 170 aa, Glycine max
  unsure (1)..(170): unsure at all Xaa locations
  Clone ID: PAT_MRT3847_8138C.1.pep
WAAPVDRASLWPQLHYVACNNLEMQEAYLVNLVNVLRELYLHSPEEARQLRRKALSRIEWLQKADVPTIAQIEEFHSMQRMMNAPDSNDNIDLLMSIDLLGLQGAGKAFPNKIVINDKLVLANTQEFFDGNLTVDSWIPIFANCIYPVSQIPSEASRVNDTXGSGRGGLP

SEQ ID NO: 265084 - protein, 54 aa, Glycine max
  Clone ID: PAT_MRT3847_81390C.1.pep
VIQVLISFGPQVYFLVSSTNKPLWYITFKRVGACKIHLLIKSPSKISSKIRFNH

SEQ ID NO: 265085 - protein, 26 aa, Glycine max
  Clone ID: PAT_MRT3847_81391C.1.pep
GFVQAKCLGSCYKTERFSNQIILSFF

SEQ ID NO: 265086 - protein, 73 aa, Glycine max
  Clone ID: PAT_MRT3847_81392C.1.pep
PNSSKAIFGLKPLGSTSLRAPKNGLWKTKGGLNLIGGVFYMEAAQKGLDFFVCRKFLWQCPFILKGLCTVPNM

SEQ ID NO: 265087 - protein, 100 aa, Glycine max
  Clone ID: PAT_MRT3847_81393C.1.pep
MCTRNIMHEQQVTGFNRAVERATNGSKLRLMDITEAFQYRHDGHPGPYRSPDPNKITKRGPDGRPPPQDCLHWCMPGPVDTWNELVFEIIRREYEGGSAS

SEQ ID NO: 265088 - protein, 141 aa, Glycine max
  Clone ID: PAT_MRT3847_81394C.1.pep
QKRTTGQFQVPQPPKTLKHHRRSKYHRLVPRDGGIVIGDSGVLYLLPTAPFEFQFDYSKTSKVKPIAIHELSFPPFVPPTMSRSWTEKAPLKGKKSKKVPHCPTTSTSTTRFPLLLDSTMMSSSLSTSLRASYIQTHTILH

SEQ ID NO: 265089 - protein, 260 aa, Glycine max
  unsure (1)..(260): unsure at all Xaa locations
  Clone ID: PAT_MRT3847_81395C.1.pep
PRVRWLAAQHHESLLRQKARVRWIKEGDCNSRYFHLLVNASRRNNTVSGVWIDGAWIEEPKKVKEAARSFFYNRFREENQQRPRLDGIRFQIINQHHNVMLSGRFEEDEIKEAVWGCGSEKSPGPDEINFKFIKRFWTTLKPNILRFFDEFYVNDIXGIFPRGSNASFIVLIPKVANPQHLEEYRPISLIGCMYKIVAKILANRMKKIMPVIIDERQSAFIEGRHLLQSALIANEVVEEARKSQKPCIVFKVDYEKGLRF

SEQ ID NO: 265090 - protein, 71 aa, Glycine max
  Clone ID: PAT_MRT3847_81396C.1.pep
GTLMFLSHDHRVILQSHFLKQSLVILIFNTFLFLNILLDTLSSYILYYWNMFKFVVLGISFVDAIVSPIKF

SEQ ID NO: 265091 - protein, 79 aa, Glycine max
  Clone ID: PAT_MRT3847_81397C.1.pep
LEIKHCASSSSSSSLSLSTFEFLPFHHFHARLGFLALCSSSGLLLFFLPCGFRLLKHRLFNAHRFFAFACLQVSMSRSW

SEQ ID NO: 265092 - protein, 153 aa, Glycine max
  Clone ID: PAT_MRT3847_81398C.1.pep
MGSFSGTCEIVEVREDLNTEKHAGICQSNSGYSLDEKNQKHPVQKLGYKGNLDDDINKLFESITLKSSSRDLGILQDGTSPKMKSAFKKPTTVGASRSPRIGPSEPVTLKQALRDLCISKASEMAAMKRLSKSTASPRISEVGKIQTLYNSVV

SEQ ID NO: 265093 - protein, 54 aa, Glycine max
  Clone ID: PAT_MRT3847_81399C.1.pep
FGTSSLLEDAWFEEKDAFLKPGRRKPIVVCVETWEEKCQERLVSMIQVFELQML

SEQ ID NO: 265094 - protein, 81 aa, Glycine max
  Clone ID: PAT_MRT3847_8139C.1.pep
MGASSDNVTGFVLAVCSSVFIGSSFIIKKMGLKKAGATGKRAGAGGHAYLYEPWWWFGMISMIVGEVANFAAYAFAPALLV

SEQ ID NO: 265095 - protein, 252 aa, Glycine max
  Clone ID: PAT_MRT3847_813C.1.pep
GSRDNLRYQAMNIVAARLGRAEPPLRKEVVEYMLDVDSHMWSMRRSKANFFRIMSLFSGMITMGKWFSDVCLWKNHVTSVLVHILFLILIWYPELILPTVFLYMFLIGLWNYRFRPRHPPHMDTKLSWAEAVHPDELDEEFDTFPTSRSQDVVRMRYDRLRTVAGRIQTVVGDIATQGERFQSLLSWRDPRATSLFVVFSFCAAVVLYATPFRVVALVTGLYFLRHPKFRSKMPSVPSNFFKRLPARTDSLL

SEQ ID NO: 265096 - protein, 74 aa, Glycine max
  Clone ID: PAT_MRT3847_81400C.1.pep
MTQQNVVVSDTKSGVSLTVFPTTTQKPPAAPGGYISIPRRRVLKNLEINGGQRINAWVESMRASSPTHHKYTPL

SEQ ID NO: 265097 - protein, 155 aa, Glycine max
  unsure (1)..(155): unsure at all Xaa locations
  Clone ID: PAT_MRT3847_81401C.1.pep
HLKGHTKDPKXGAPRRXXKGKNAXDDFPAREADEGEAILDALPIFLXIIYCSTAGVYLQSDLLPQTETDGMDANSIHKGELYTESLLQAMGVNWTSIRSVYIYGPLNYNPVEEWLLXHNWKEGRPIPIPXSRIQITQLGHCNDLAKAFIQVLGNE

SEQ ID NO: 265098 - protein, 56 aa, Glycine max
  Clone ID: PAT_MRT3847_81402C.1.pep
LKIEILLIPRCPSASLVSSKIASKVPTISYKESQDSTVTFESLKSKLPTFRSRSLH

SEQ ID NO: 265099 - protein, 71 aa, Glycine max
  unsure (1)..(71): unsure at all Xaa locations
  Clone ID: PAT_MRT3847_81403C.1.pep
GKRKAKAKPPPKKQMDXLNTVFXCPFCNHSSSVECRLNIKNLIRKTICRIYQKXFSTTITALSEPIDIYSK

SEQ ID NO: 265100 - protein, 89 aa, Glycine max
  unsure (1)..(89): unsure at all Xaa locations
  Clone ID: PAT_MRT3847_81404C.1.pep
MMGWVANWGTGVADAIWIQWSCGAXYTFSIYCCVLKSTQGYYQFTLNTVYVLKDIGCQLSDVMLRIFSTTPPLSTQPTAPAASRAYGPH

SEQ ID NO: 265101 - protein, 71 aa, Glycine max
  Clone ID: PAT_MRT3847_81405C.1.pep
SNPTFLCSSTGCSVDTSSYGCLTVTYERAYRRFTSRSALTAFAGSSAPVYFTVRALMAVMSTEQPYAKSHG

SEQ ID NO: 265102 - protein, 148 aa, Glycine max
  Clone ID: PAT_MRT3847_81406C.1.pep
GNGNGREENDVAGESCRHRQSPRRSSQGRRRTPSRERDQSNGRERKVSRSPGRRSSDTTNTTNASNNNNNTSSRPGKMVSVPATVSSLVMDKSNSCGGDSGTKKITTVKRNSGDAGSKGAASPRAQSPARVNGNVGRDKMLNENLEQQ

SEQ ID NO: 265103 - protein, 395 aa, Glycine max
  unsure (1)..(395): unsure at all Xaa locations
  Clone ID: PAT_MRT3847_81407C.1.pep
MATIVSHHHRLFSAATRFNSTGRDSRRQRSGANSVRCADVSTATSENRRVTVSNRNDSLEICRVLNGMWQTSGGWGRIDRDDAVEAMLRYADAGLTTFDMADHYGPAEDLYGIFINRVRRERPAELLEQVRGLTKWVPPPVKMTSSYVRDSINVSRKRMDVESLDMLQFHWWDYSNPGYLDALKHLTDLKEEGKIKTVALTNFDTERLQIILENEVPVVSNQVQHSLVDMRPQQRMAELCQHTGVKLITYGTVMGGLLSEKFLDTNIAIPFAGPAINTPSLQKYKRMVDAWGGWSLFQGLLRTLKQVASKHGVSIATVAVKYILDQPAVAGSMVGVRLGFAEHIQDTNAIFSLVLDENDVNSIRKATAKGKGLLKXIGDCGDDTGVPESCWLITL

SEQ ID NO: 265104 - protein, 162 aa, Glycine max
  Clone ID: PAT_MRT3847_81408C.1.pep
GNRPAINVGISVSKVGSAAQIKALKQVAGKLKLELAPFAELEAFAPFASDFDKASQNQLARGPRLRELLKQSQSAPLSVEEQIITIYTGTNGYLDSLEIGQVRKFLVELRAYLNPNKPPFKEIIFFTQTFPGEAEVLLKEAIQEQMELFFLQGPVEKNCLIL

SEQ ID NO: 265105 - protein, 212 aa, Glycine max
  unsure (1)..(212): unsure at all Xaa locations
  Clone ID: PAT_MRT3847_81409C.1.pep
MAYQNPPSIPISDPEAPEITPTPTPSTNPLANGFSAKGVANKVKNNLVFHSKWGELNGAMGDLGTYIPIVLALTLARDLNLGTTLIFTGVYNIITGAIYGVPMPVQPMKSIAAQALSDTDFGVPEIMTAGILTGGVLFVLGVTGLMQLVYMLIPLCVVRGIQLAQGLSFALTAVKYVRKIQDLPKSKSLGQRHWFGLGWXWSWPLVCLCFIV

SEQ ID NO: 265106 - protein, 142 aa, Glycine max
  unsure (1)..(142): unsure at all Xaa locations
  Clone ID: PAT_MRT3847_8140C.1.pep
VSGWDYLKRIPVATSEGFPHVLSRKNGDKGKRRFVSGDGEKTTLISGTSVEEAYNKLIIELEKSVPTLVGIECPKDDKLPRRKIFDKPKTRXFTILPMKFNLAVRQKFLNFVWFIMNNMDKLRCQVGINPYSMEWTGLAIDY

SEQ ID NO: 265107 - protein, 184 aa, Glycine max
  Clone ID: PAT_MRT3847_81410C.1.pep
MAAIVSHHHHRLFSASTRFNSTSRDSRRRRSGSNSVRRADVSTATSENRRVTVSNRNDSLEICRVLNGMWQTSGGWGRIDRDDAVEAMLRYADAGLTTFDMADHYGPAEDLYGIFIDRVRRERPPELLEQVRGLTKWVPPPVKMTSSYVRDSINVSRKRMDVESLDMLQFHWWDYSNPGYLDAL

SEQ ID NO: 265108 - protein, 211 aa, Glycine max
  Clone ID: PAT_MRT3847_81411C.1.pep
EVTSQLSSQLGEGSMTALPIVETQSGDVSAYIPTNVISITDGQIFLSADLFNAGIRPAINVGISVSRVGSAAQIKAMKQVAGKLKLELAQFAELEAFAQFASDLDKATQNQLARGQRLRELLKQSQSAPLTVEEQIITIYTGTNGYLDSLEIGQVRKFLVELRAYLNTNKPQFKEIISSTKTFTGEAEVLLKEAIQEQMELFLLQEQVEKN

SEQ ID NO: 265109 - protein, 35 aa, Glycine max
  Clone ID: PAT_MRT3847_81412C.1.pep
KSSTVEVIRKWPQVLLAGLDIQWSAHCSHVIPSSS

SEQ ID NO: 265110 - protein, 244 aa, Glycine max
  unsure (1)..(244): unsure at all Xaa locations
  Clone ID: PAT_MRT3847_81413C.1.pep
QNPSLGSSRPCPVSSESLSIFNNEDELNLPPGLPDSLINRNETQHRCDLLNASLASQVPIQCHQEASNNLRSNTLTLVSPGNLVSSRISSVQDVVRDGNGTREVPDMNLFSPRIHTDTEDIETRHTDRRNGAREPVERNVRFSRTLSVGRLRDRVLRRTTVSDFTFCPLQRERDASQDXEDGQGRETQDCHHXGRNATNSSTPRYPLPSTPSSLFGIQDYEVETSRSRETRYQDLLEHRSNFLD

SEQ ID NO: 265111 - protein, 56 aa, Glycine max
  Clone ID: PAT_MRT3847_81414C.1.pep
VGWVNKFGTVFTFAPVKANVHMVPYAQPSGALHVPGCFVRVRRLPNPRGRPSDEKR

SEQ ID NO: 265112 - protein, 52 aa, Glycine max
  unsure (1)..(52): unsure at all Xaa locations
  Clone ID: PAT_MRT3847_81415C.1.pep
MLASGAKFSLIIDINKSXFNYYDFSQSFYHKRDYGSNMSIDSVGSLHTSYRR

SEQ ID NO: 265113 - protein, 82 aa, Glycine max
  Clone ID: PAT_MRT3847_81416C.1.pep
NSFLINLLVDLTSKRVILRITYLPDIIKLKTMKICTRSSYLFLLPTKSLSFPMSYIFRSTFLFIIIKNSIKVTKNYPRTPLL

SEQ ID NO: 265114 - protein, 177 aa, Glycine max
  Clone ID: PAT_MRT3847_81417C.1.pep
VILQSSYRSPDSFDDPDQEKMKLLRMVYKLQEQLNRTCYLNGETNGRLSMGSHVSAYQSHDLHERRLYHGLDYPRCDEICSHGTDWCQKHNFPHVPCLTEPTSSIHHVDHSFFPCCPQQCQCSTELPPCDLYQHEELCRPSPGHNCCSPHHSYPSGPQWLKNLPAHGHETKSCDQKL

SEQ ID NO: 265115 - protein, 63 aa, Glycine max
  Clone ID: PAT_MRT3847_81418C.1.pep
FLMRPHGRSNRGAFSSLRGLSIPLLDRKLATALWEVIQRSKSTACNSLPTGILKLPRLRTPAR

SEQ ID NO: 265116 - protein, 45 aa, Glycine max
  Clone ID: PAT_MRT3847_81419C.1.pep
CICLMHHYWYLNDKGRVSSRELISTWGKHIKSRNCYISSGTLFCY

SEQ ID NO: 265117 - protein, 254 aa, Glycine max
  unsure (1)..(254): unsure at all Xaa locations
  Clone ID: PAT_MRT3847_8141C.1.pep
CGDDNLISVHEYAKPYFSGSKLKSFLAGHNITITDGIDKTRATLQSRQIADCDCLKRNFKQMSNALWAASEDKASLWTQLHYGSCNNLEMQEAYIVNIVNALREPNLHSPEEARQLRRKALSRIEWLKKAEAPTIAQIEELHSMQTMMNAPDSNDNIDLLLSIDSLGLQGAGXAFPNKIVCNDKLALANTQEFFDGNCTVASSLPIFVNCLYPASQLPSEADVCNCTCGSGPGXLPTTARIRSAVNNGCSDINK

SEQ ID NO: 265118 - protein, 148 aa, Glycine max
  unsure (1)..(148): unsure at all Xaa locations
  Clone ID: PAT_MRT3847_81420C.1.pep
FNIIKRQFKQISESKIALTKNTVGGTILRTDLLAHFLTEGNFRASGDLQRTHRVKGMIKMVATDGISENTGIALVWGMNRYFRGRARIDIYTIWSEDXESWNAVCTEAMTMLFNPNPXLDAWSXEFVKRTGVHCDIICATGRAVTSMQ

SEQ ID NO: 265119 - protein, 67 aa, Glycine max
  Clone ID: PAT_MRT3847_81421C.1.pep
PTLDLPNSIGGAILRASPPPPSGAAFTQLLPLNLLPPHRMVLNYFSLEPFYAYPFFCPLDDPLSFFR

SEQ ID NO: 265120 - protein, 75 aa, Glycine max
  Clone ID: PAT_MRT3847_81422C.1.pep
SQRQIEFQRMDRLSPAPNPRVFLLYYNKCPLISSSDVCNNQLYYFETTISKQAHNHHIFGKRKLRVYILLPKMVA

SEQ ID NO: 265121 - protein, 161 aa, Glycine max
  unsure (1)..(161): unsure at all Xaa locations
  Clone ID: PAT_MRT3847_81423C.1.pep
GNCIIAGSPICQCLDGFEPKSPXQWNVMDWRQGCVRSEEWSCGVKNKDGFRRFASMKLPNTTFSWVNESMTLEECRAKCLENCSCKAYSNLDTRGGGNGCSIWVGDLVDLRVIESGQDLYVRMATSDMDGKHEHRRKVVLVVSTIASLVLVMLVAFCIYMI

SEQ ID NO: 265122 - protein, 67 aa, Glycine max
  Clone ID: PAT_MRT3847_81424C.1.pep
CIYLQLSNYNSFEGVLYCKPHFDQLFKRTGSLDKSFEGTPKIAKPEKNLEEKPAAAKVSSMFGGTRD

SEQ ID NO: 265123 - protein, 177 aa, Glycine max
  Clone ID: PAT_MRT3847_81425C.1.pep
MELKSFSSCSVSTSEVAHVGRSYSTLISSFRHKVGVRFSTHFQCRRDKAVISSVGQDNFAAETSSHRINGTNGSISRFYSTNLKLLDAFDDEYGGVVVHPDRLPSNPYTFASVLRLSLSQWKKMGKKGIWLKLPLDQSDLVPIAVKEGFQYHHAEPGYVMLTYWIPEGPSMLPANAS

SEQ ID NO: 265124 - protein, 109 aa, Glycine max
  Clone ID: PAT_MRT3847_81426C.1.pep
PPILMELKSFSSCSVSTSEVAHVGRSYSTLISSFRHKVGVRFSTHFQCRRGLFLTTYCASDNTYLTDKAVISSVGQDNFAAETSSHRISGTDGSISRFYSTNPAITCCL

SEQ ID NO: 265125 - protein, 149 aa, Glycine max
  unsure (1)..(149): unsure at all Xaa locations
  Clone ID: PAT_MRT3847_81427C.1.pep
MELKSFSSCSASTSEVVHVGRSYSTLFSSFRHKVGVRFSTHFKCRRGLFLRTYCASDNTYLTDKAFISSVGQDNFAAETSSHRINGTNGSISRFYSTNLKLLDAFDDEYGGSLLXHPDRLPSNPYTFASVLRLSLSQWKKMGKKGXWLK

SEQ ID NO: 265126 - protein, 143 aa, Glycine max
  Clone ID: PAT_MRT3847_81428C.1.pep
APRPLRDRGPYPPPQGVRAFQGKFAFILYASGSKTAFVAADADGSVPFVWGTDADGNLVFSDETEIVTKSCGKSYAPFPKGFFFSTSGGLSSFEHPLNEVKPVPRVDSSGQVCGATFKVDAEAKKEATGMPRVGSAANWSNNI

SEQ ID NO: 265127 - protein, 367 aa, Glycine max
  Clone ID: PAT_MRT3847_81429C.1.pep
MELKSFSSCSVSTSEVAHVGRSYSTLISSFRHKVGVRFSTHFQCRRGLFLTTYCASDNTYLTDKAVISSVGQDNFAAETSSHRINGTNGSISRFYSTNLKLLDAFDDEYGGVVVHPDRLPSNPYTFASVLRLSLSQWKKMGKKGIWLKLPLDQSDLVPIAVKEGFQYHHAEPGYVMLTYWIPEGPSMLPANASHQVGVGGFVINDNNEVLVVHERHCSPTTHGLWKIPTGFILEAEEIYTGAVREVKEETGIDTEFVEVIAFRHAHNVAFEKSDLFFICMLRPLSSKIIVDDLEIAAAKWMPLVDFVEQPLIQEDSMFKKIVDIFIARLGKRYCGLSTHQVVSKFDGMVSSLYYNVIDNADNNCVGK

SEQ ID NO: 265128 - protein, 603 aa, Glycine max
  Clone ID: PAT_MRT3847_8142C.1.pep
MIIDQKGPMVQIITARWFVVFSSFLIMAAAGATYMFFLYSGDIKIVPAYDQTTLNSLCFFYNLCAIVGVQSTLILLSFFKDLGGNVGVLSGLINEITPPWVVLAINYVLNFFGYFIIWLTVTKKIPIRPVSTMVPFCFAGGTSQNAANIGCLSTCVKIFSENRAVDLGILQGYVGLSGAIIRQLYFAFYYDDSRSLILLIGWLPAAISFLFLRSSRYMKPLRQQPNELSVFYKFLYISLGLAGFLLVMIIVQKQVHFSQSEYGVSAGVVLFLLFLPLAVVFVEQYKIRESQKLAFIDPSAVKIVATEGESNTPISRKIDEEIITSTRWWQKVFSPPPRGEDYTILQALFSLDMILLFFAGTCGVGGTLTAIDNLGQIGTSLGYPKASISTFVSLVSIWNYMGRVFSGFVSEHFLKKYKFPRPLMLTLTLLLSCVGHLLIAFDVANGLYVASVIIGFCFGAQWPLVFAIISELFGLKYYSTLYNFGGAASPIGLYVLNVRVTGYLYDKEALKQLAATGISRKIDTELTCVGSSCFKLSFIIITAATFFGALISLILVARTIKFYKGDIYKRYREQAEEEATAVTEMAVVQNRAEKLEETKVIGA

SEQ ID NO: 265129 - protein, 250 aa, Glycine max
  Clone ID: PAT_MRT3847_81430C.1.pep
MLAVFDKSVAKSPEGLQSPHSNSVSALKDGFLAEHFSSVHPGSVTVNLGSSGLLAYSLHKQNPLLPRLFAVVDDIFCLFQGHLENVANLKQQYGLNKTATEVIIIIEAYRTLRDRGPYPAAQVVRDFQGKFAFILYDSGSKTAFVAADADGSVPFVWGTDADGNLVFSDETEIVTKSCGKSYAPFPKGFFFSTSGGLSSFEHPLNEVKPVPRVDSSGQVCGATFKVDAEAKKEATGMPRVGSAANWSNNI

SEQ ID NO: 265130 - protein, 100 aa, Glycine max
  Clone ID: PAT_MRT3847_81431C.1.pep
SFFFFFHKNFFFFFSQPRNESYMNTGTFYISLHHQQDNSFSSFETTQLYSPLIFSPHARMATPEIHPRKTLRKQTPIPASWGHRDNTSNPKLFKIALPGT

SEQ ID NO: 265131 - protein, 70 aa, Glycine max
  Clone ID: PAT_MRT3847_81432C.1.pep
QMDKHIISTPCPSTYLDLCLIFMALLLQPPHVIIIPNSSDLVHRTALEPPAPMSNNTETSHHTLGSTHAA

SEQ ID NO: 265132 - protein, 104 aa, Glycine max
  unsure (1)..(104): unsure at all Xaa locations
  Clone ID: PAT_MRT3847_81433C.1.pep
QKCXXLQKQMKQIHSLIITNGHLHQHQNVPSSSLSLPWMPTLLYNALISAFHIHNHNKALSIFTHMLAXQAPPNSHTFPPLLKISLSFGCTSSQTSGGFYXGSL

SEQ ID NO: 265133 - protein, 63 aa, Glycine max
  Clone ID: PAT_MRT3847_81434C.1.pep
KPAYSIFLYAGRSHNCYIAIGAGYLKTLATTRDAYNTFVTIHAAFYGWPIHHIPKRMHRILYI

SEQ ID NO: 265134 - protein, 63 aa, Glycine max
  Clone ID: PAT_MRT3847_81435C.1.pep
PLQLLPFHHNPILNKPFHPYPHLIRSINTDLPLLYIKKPQSFSLFSNIILFLLIYLHHFTILT

SEQ ID NO: 265135 - protein, 123 aa, Glycine max
  Clone ID: PAT_MRT3847_81436C.1.pep
MGYFDLNIPYPDPSPANKPTEQGNRTRLAVKAMEFGYTGIAYNRTIKGVMSDHHRCSISPLTLSSLLNVLPSLSLSANLHRHLLHVPLSTPFRQYTRLTVCVDSASQAQALNSGNPILKTYDL

SEQ ID NO: 265136 - protein, 117 aa, Glycine max
  Clone ID: PAT_MRT3847_81437C.1.pep
LIIFPQKCSILSVSHTLPRVPIKSMKILLRKCFDGIHFMLFGRNFNIMPKGFPFVPAQKHERLGTFGWGITLTEDLSPATRNFCSRSVTCFCKREISFFLVSSSSREFFKAASSSNF

SEQ ID NO: 265137 - protein, 40 aa, Glycine max
  Clone ID: PAT_MRT3847_81438C.1.pep
GNVIVGLQGGKDRLGIEASEWSNQDGLGKVEVGISWGRDH

SEQ ID NO: 265138 - protein, 106 aa, Glycine max
  Clone ID: PAT_MRT3847_81439C.1.pep
WFFGSKIFSWDDLGQILSVDSLLKARGFVVFFFIPPETNVVNWPITGGGKPLALGFPFSPFFLASEGLRSFFCGYQKAAALDEFWSPFFPPPLWGNAYIVFVCFPF

SEQ ID NO: 265139 - protein, 357 aa, Glycine max
  Clone ID: PAT_MRT3847_8143C.1.pep
WASWVFSCISDDNLVHTTIKSAEKIPMLHRDQSKDMLSMASGMNHLMEASSGKYSYGQGNTRLLLIFCFIFPQTTALGFLDFSYKSDDNLVHTTLKSAEKTPMLHHDQGKSKLSISSEMNHLMEASSGKYSYGQGNPSEREISQHLTQKSENHEQTNHAWDIQSERKLSSSAVQCSDPMKASQLGYLTVKTGKEKGRRKKRKSLGAKLAALSEVSSSQSGNSTPSSPLSPTPSATPKCNWPMSPDEEQPPEAPSSMTQVATQHSANDQASAAVAVSNILKPASTQRCTNSKSSQVPHSASRSATSLPVQKPCATSPIPASTFPSFLGSKSTVNLHARASGSQLYNQTAVQARETGLA

SEQ ID NO: 265140 - protein, 39 aa, Glycine max
  Clone ID: PAT_MRT3847_81440C.1.pep
CISDLNRATHREVNVSCLLGLKATKEYIPDLHVAYLYYK

SEQ ID NO: 265141 - protein, 76 aa, Glycine max
  Clone ID: PAT_MRT3847_81441C.1.pep
LSLCRCCLSWCFCSVFSSVARILVVSVMLACGLMAACFSCMGFFHCSCLFPRVAWRLLSGLASFVLYVSSVFPSFW

SEQ ID NO: 265142 - protein, 60 aa, Glycine max
  Clone ID: PAT_MRT3847_81442C.1.pep
RDHRMPHLNYRKQKHSLLDYKKISITSYYFVDDDLRERRSLFVLATDYVNHYLFHYWWIS

SEQ ID NO: 265143 - protein, 144 aa, Glycine max
  Clone ID: PAT_MRT3847_81443C.1.pep
PQGNPQGSQSGEVKTPKKKPNSFTPKGRRVQGRAGVLLRARPWGVTKKNPKAPLDRSPIIMKRCFLKSKHIAKAPVWKRWKTKRAPESGKGPKLAALGEALEVGGRKQGYQKSIFFGGGTIEYVPGSFDLSHMEEIIEMSFSPC

SEQ ID NO: 265144 - protein, 90 aa, Glycine max
  unsure (1)..(90): unsure at all Xaa locations
  Clone ID: PAT_MRT3847_81444C.1.pep
FGSTLKNPNFWTKPAKAVRKAYTRTDSTXLENQAKLRSRGSTAVTTRLINCYKLSVANTGDSRAVVCKNGVTKQLSVGYEPSIQSEDLKN

SEQ ID NO: 265145 - protein, 136 aa, Glycine max
  Clone ID: PAT_MRT3847_81445C.1.pep
MMGTLSTQFRSIKRPNSNPKLSKSSSPTKSEIKFNAKPKPKSESESESWSVYLILSTNHPIKTYVGITNNFPRRLKQHNGELKGGAKASRAGRPWICACIICGFTDRSEASVFESKWKTFSRRAPRKNQNDNLSKQ

SEQ ID NO: 265146 - protein, 109 aa, Glycine max
  Clone ID: PAT_MRT3847_81446C.1.pep
ILGYRTSNDNSRKISPLYKRVLTIKHAKLQYSQVQQTEIAPHHCFQKQFFGISECITKLRGQVQLKNSKCPTQLSHCLQCHNHYICELIRSSNTPLARRTRGRTRGRKR

SEQ ID NO: 265147 - protein, 36 aa, Glycine max
  Clone ID: PAT_MRT3847_81447C.1.pep
LRRPLGKKLPLEKENSYVLRWVSRLCLTLKPTFGHR

SEQ ID NO: 265148 - protein, 52 aa, Glycine max
  Clone ID: PAT_MRT3847_81448C.1.pep
NPMDLQMQVPTDTATGATARSDRRRDLHYPHTGRVGTVDHAVDGLKLGYLLN

SEQ ID NO: 265149 - protein, 70 aa, Glycine max
  unsure (1)..(70): unsure at all Xaa locations
  Clone ID: PAT_MRT3847_81449C.1.pep
XHXVXXGWXIXYPIGNFLIXTRQWNXXXRYLXSTLAXHXFTXGLXAFPXXSXKXHXLXXSLXXHSLXFFX

SEQ ID NO: 265150 - protein, 339 aa, Glycine max
  unsure (1)..(339): unsure at all Xaa locations
  Clone ID: PAT_MRT3847_8144C.1.pep
PNELSVFYKFLYISLGLAGFLLVMIIVQKQVHFSQSEYGVSAGVVLFLLFLPLAVVFVEQYKIRESQKLAFIDPSPVKIVAEGESANGNTSNTPISTEIEETRWWQKVLSPPPRGEDYTILQALFSLDMILLFFAGTCGVGGTLTAIDNLGQIGTSLGYPKASISTFVSLVSIWNYLGRVFSGFVSEHFLQKYKFPRPLMLTLTLLLSCAGHLLIAFDVPNGLYVASVIIGFCFGAQWPLVFAIISELFGLKYYSTLYNFGGAASPIGLYVLNVRVTGHLYDKEALKQLAVAGIPRNDAKELTCIGSSCFKLSFIIITAATFFGALISLXLVARTIKFY

SEQ ID NO: 265151 - protein, 35 aa, Glycine max
  Clone ID: PAT_MRT3847_81450C.1.pep
RLSRLVMWHEWPLCPQTRLVTLIYSTALPSARIEA

SEQ ID NO: 265152 - protein, 46 aa, Glycine max
  Clone ID: PAT_MRT3847_81451C.1.pep
HISMGNKTLLFLSNGGMIVDLAYRTGHILRGRRIKGDFPFFFPPAR

SEQ ID NO: 265153 - protein, 287 aa, Glycine max
  Clone ID: PAT_MRT3847_81452C.1.pep
MGQVLGCVQVKQSTVAVKECFGKYDDVLQPGCHFVPWCLGCGVAGVLSTRVMQLSLRCETKTKDNVFVNVVASIQYRALAEKASDAYYKLTNTKAQIQSYVFDVIRATVPKMELDAVFEQKNTIAKAVDEELGKAMSAYGYEIVQTLIVDIVPDEHVKKAMNEINAAARLRVATNDKAEAEKIMQIKRAEGDAESKYLAGLGVSRQRQAIVDGLRDSVLAFSGNVPGTSSKDIMDMVLMTQYFDTMKEIGASSKSNAVFIPHGPGAVSDVASQVRNGLLQGNATTES

SEQ ID NO: 265154 - protein, 287 aa, Glycine max
  Clone ID: PAT_MRT3847_81453C.1.pep
MGQVLGCVQVDQSSLAIKEVFGKYDDVLEPGCHCVPWCFGSRVAGALSLRVKQLDVRCETKTKDNVFVTVVASIQYRALAEKASDAYYKLTNTRSQIQSYVFDVIRASVPKMELDATFEQKNEIAKAVEEELGKAMSAYGYEIVQTLIVDIEPDEHVKKAMNEINAAARLRVATNDKAEAEKIMQIKRAEGDAESKYLAGLGVSRQRQAIVDGLRDSVLAFSGNVPGTSSKDIMDMVLMTQYFDTMKEIGASSKSNAVFIPHGPGAVSDVASQVRNGLLQGNATTES

SEQ ID NO: 265155 - protein, 157 aa, Glycine max
  Clone ID: PAT_MRT3847_81454C.1.pep
GYKNSPVRGKPRVWAFRTIWGQRLTWAIPFRARGFKLGGPSPIFPPDFWGGGNGPFPGLFLLGFDPKGVLSPPVGLVFPPRGPRALAPNWGGVGPPRGAPIFALGELTQMQKHSKGSPAARWGPFFFEKKKKKKKKKKKKKKKKKKKKKKKKKKKKK

SEQ ID NO: 265156 - protein, 121 aa, Glycine max
  unsure (1)..(121): unsure at all Xaa locations
  Clone ID: PAT_MRT3847_81455C.1.pep
MLDGILGRGFTAKCKSLIKLTNRRIDVIRRKRRATEKFLKKDIADLLLNGLDINAYGRACXELTLSSCYGFVENCCEFVLKHLPAMQKLSVLAAAIGLSSPRHCAAVPPRHCTATLSRPLC

SEQ ID NO: 265157 - protein, 70 aa, Glycine max
  Clone ID: PAT_MRT3847_81456C.1.pep
MAADWGPVVISVVLFVLLSPGLLFQLPAKGKVVAFGSMQTSGLSILVHTIIFFGLITIFLLAIGVHIYSG

SEQ ID NO: 265158 - protein, 246 aa, Glycine max
  unsure (1)..(246): unsure at all Xaa locations
  Clone ID: PAT_MRT3847_81457C.1.pep
MWNSAENAFARSSSFREETEDEEALRWAALERLPTYKRARRGIFKNVIGDIKEIDVRDLQAQEQRLLLERLVDCVDNDPERFFQRMRSRFDAVGLHFPKIEVRFQDLTVETYVHVGSRALPTIPNFICNMTEALLRQLRMYRRKRSKLTILADISGIIKPSRLTLLLGPPSSGKTTLLLALAGRLGPGLQMSGNITYNGHSLKEFVPQRTSAYVSQQDRHVAEMTVRDTLQXAGRCXGVGLNFDMC

SEQ ID NO: 265159 - protein, 52 aa, Glycine max
  unsure (1)..(52): unsure at all Xaa locations
  Clone ID: PAT_MRT3847_81458C.1.pep
CLIFFFLKXKKNKRLIKSDFIFYGTMCNPNYPTKGTKNFTKLTLKHTLPTTL

SEQ ID NO: 265160 - protein, 95 aa, Glycine max
  Clone ID: PAT_MRT3847_81459C.1.pep
TPIRPMQQQQLKPFFFSHYPLRPGIFINLQNRSKKERRDPFLSKKKKTISNLSVLIILNMKGLKSPFPKGGIPLIRSQGSLRICLGPKKEPAFGL

SEQ ID NO: 265161 - protein, 446 aa, Glycine max
  unsure (1)..(446): unsure at all Xaa locations
  Clone ID: PAT_MRT3847_8145C.1.pep
VIPDLRCIANLLFASNYVQECSNAYIIVRRDALDECLFILEMERLSIEDVLKMEWGTLNSKIKRWIWAVKIFVRVYLASERWLSDQLFGEGEPVGLSCFVDASKASILQLLNFGEAMSIGPHQPEKLFRVLDIYEVLQDLMPDIDALYSDEVGSSVKIECHEVLKRLXGDCVRVTFLEIXKCPGPQVFASAPFVGGGIXPLTKYVMNYLRALTDYSDILLLLLKVNYEDAISLSPDISPLLLEDQDEDAISLSPDIMARTEEDSASQGDPGRVSSMALHFRFSLQILFLMNEVKSKLYKEVSXELRLVHGDEWIRKRNWKFQQHAMKYERASWSSILNLLKDEGVFVPGITSVSKSLVKERLRSFYLGFEDVYRIQTAWIIPDFQLREDLRISISVKVIQAYRSFVGRFSSYTSDKIIKYSPDDLENYLLDFFEGSQKLLQNPHRR

SEQ ID NO: 265162 - protein, 40 aa, Glycine max
  Clone ID: PAT_MRT3847_81460C.1.pep
LSQFWQTCMALLLLTLWLFVNLYSSLNYRNDLRTVSCFKR

SEQ ID NO: 265163 - protein, 95 aa, Glycine max
  unsure (1)..(95): unsure at all Xaa locations
  Clone ID: PAT_MRT3847_81461C.1.pep
LAIIADARVHDPKGLEMARGAPXPTVXDKMSSEEMKQVYTELXLRAKSXLALARTGDAGCAQNFRSCRTSAARGSLFKDLTGELTQVSALNDART

SEQ ID NO: 265164 - protein, 62 aa, Glycine max
  Clone ID: PAT_MRT3847_81462C.1.pep
LLHYTSANSSPLARILYMGAGNKLSQPIHIKSSINLSISPPKIYPSSNIMTRKTIFATNIIT

SEQ ID NO: 265165 - protein, 78 aa, Glycine max
  Clone ID: PAT_MRT3847_81463C.1.pep
LTSIRDCIGQVTSLRSLNISGCEKLESLPEAMKDLKSLETLRISNCKLLKPRCVERSGEDWPGVRHIKRLHVESTFQG

SEQ ID NO: 265166 - protein, 101 aa, Glycine max
  Clone ID: PAT_MRT3847_81464C.1.pep
WGGLFLVWGGSFSWRCGWRLFSLPCGCSRRWWGCSVVWGERGLFGGRSPLAVRWFSCFSRRGVCRVPCLLVSRSVAPSGSYRLVYSRPRVFLILPRGPSLG

SEQ ID NO: 265167 - protein, 168 aa, Glycine max
  unsure (1)..(168): unsure at all Xaa locations
  Clone ID: PAT_MRT3847_81465C.1.pep
EKSAYAHSKSQAGRPLSNIDDLENIWPTEKNGMRELPDLNLSEGKSATQATKSENMHKKEGSSVRPKTSMLEKALRELEKMVAESRPPAVDNQEADATXSRQXKRRLPREIKLKLAKVARLAATHGKVSXEVINRLMSILGHLIQLRTLKENLAILINIGLLAKQEED

SEQ ID NO: 265168 - protein, 63 aa, Glycine max
  Clone ID: PAT_MRT3847_81466C.1.pep
LELTTSVRKRLRHGMQVAKKAQSSPVGDIFNDKMPKPSTLGQESLLDTQKSIPMSPLLMFLCR

SEQ ID NO: 265169 - protein, 84 aa, Glycine max
  Clone ID: PAT_MRT3847_81467C.1.pep
LPSGACFYFLTAIEGVPLIKKVIWGKSLKKEKLGLIGRYSFDDPPNPYFGGNPWSLFGKTCFGFWGHKRIFLFLRKRKYIFAPF

SEQ ID NO: 265170 - protein, 31 aa, Glycine max
  unsure (1)..(31): unsure at all Xaa locations
  Clone ID: PAT_MRT3847_81468C.1.pep
VLSXXNLNSRTLIKLKNYQLIHIFRGNTRLF

SEQ ID NO: 265171 - protein, 60 aa, Glycine max
  Clone ID: PAT_MRT3847_81469C.1.pep
LSVQMQVTIFPPGLLPVTIEGSNFPTHNSLHLVGASWAPFVSECDFLTSCYGQRQYPLSM

SEQ ID NO: 265172 - protein, 278 aa, Glycine max
  unsure (1)..(278): unsure at all Xaa locations
  Clone ID: PAT_MRT3847_8146C.1.pep
EFILSKFAQDMVEEWLDRVDEEDSFEEVYLSATLNGAEGLDYMERISLATSDGFPHVLSRKNGEKGQWRFVSGDGEEMTSIPGTIVEEAYNTLIVELEKSVPTSVGIXCPKDEKLTRRKIFDKPKTRLFTILPMEYNLVVRQKFLNFVRIIMKKRDTLSXQVGINPYSMEWTGLANKLLSKGNDILCCEHARFDGLTTKQVMSKMAEMINSLCGGDEKLMRERTHQLLASCSRMAISNKDVRRVECGIPSGYPVTAIXHSIINEMLIRYSYEKSLRQA

SEQ ID NO: 265173 - protein, 47 aa, Glycine max
  Clone ID: PAT_MRT3847_81470C.1.pep
DLALHSRVKISLKIKKTDGLIHDHQGSCIDCGFNSDCLGCNITTSDF

SEQ ID NO: 265174 - protein, 244 aa, Glycine max
  Clone ID: PAT_MRT3847_81471C.1.pep
RKAWHVGPMFLFNRVKEEKAHRGMDASINDEHECLKWLDTKEPNSVVYVCFGTTTKLTDSQLEDIAIGLEASGQQFIWVVRKSEKDGVDQWLPDGFEERIEGKGLIIRGWAPQVLILEHEAIGAFVTHCGWNSILEGVVAGVPMVTWPIAYEQFFNEKLVAEILKIGVPVGAKKWAAGVGDTVKWEAVEKAVKRIMIGEEAEEMRNKAKGFSQLARQSVEEGGSSYSDLDALIAELGSLSYSNE

SEQ ID NO: 265175 - protein, 78 aa, Glycine max
  unsure (1)..(78): unsure at all Xaa locations
  Clone ID: PAT_MRT3847_81472C.1.pep
GXSLGIGLTXXIYPWXRPNYXXXPWNKSXEXFLLIRNWXSNXELDXGIGXTXGXXFXIXXLXWXXXXFNNRKXALELV

SEQ ID NO: 265176 - protein, 130 aa, Glycine max
  Clone ID: PAT_MRT3847_81473C.1.pep
RWRHRLGQGACPWDRSRPMEPPGRSSSLPFSPPALTLTFLPPSPTLPLPSLPVSLSVSLCLLLSLRSTASHTLHQYCCPTQVLDSMKLTPSGRLAESREEEEEEETEEEEEEDAHQFCCPASECSSPSSR

SEQ ID NO: 265177 - protein, 38 aa, Glycine max
  unsure (1)..(38): unsure at all Xaa locations
  Clone ID: PAT_MRT3847_81474C.1.pep
HAGPASSWLERXNSLLLIKICTVRASGPRAECHARVRA

SEQ ID NO: 265178 - protein, 95 aa, Glycine max
  Clone ID: PAT_MRT3847_81475C.1.pep
PGGLKNHFFPFLGGSLLRDFFWGASKNCLEPPVKNFPPLGDCKRVFLFGVFSPLGFRGPPPPPPPPPPPPPPPPPPPPPPPPPPPPPKKVVLLHM

SEQ ID NO: 265179 - protein, 42 aa, Glycine max
  Clone ID: PAT_MRT3847_81476C.1.pep
NSVPYLTNVGIYAFPKNKATVGFGSQSAPSLCNKTSYFFFFF

SEQ ID NO: 265180 - protein, 58 aa, Glycine max
  Clone ID: PAT_MRT3847_81477C.1.pep
SPPVGGPLVGGQEGFAPDFFKKRSKRKNKKEKKKKKKNQKSKKKKKKKKKKKKKKKKE

SEQ ID NO: 265181 - protein, 94 aa, Glycine max
  Clone ID: PAT_MRT3847_81478C.1.pep
YFVHQSILRLQLSLYSNSTPVTSINSPIDLLRMKSFAVLALAATGVLAQSSPPSGCQASRAGTFNVQTVNVTRSAKRELAARQQAGTLTLTLQD

SEQ ID NO: 265182 - protein, 233 aa, Glycine max
  unsure (1)..(233): unsure at all Xaa locations
  Clone ID: PAT_MRT3847_81479C.1.pep
ITENQSMKAERVSSRRKSISLSIMMPDDVAAQAFHDGDRVEAQAMHRNQSAWMAHWKQTSYKSATPACKNLGVDSEVRKEKEDSGAEQHDLLGGLDSSMRAGAVGEAARATSVTFSNEADDEKSKKAGCDPKPFPTFKFSRKLDGRLSLQREQHDGEGGKSETEPCSGDGNVSLNRAGTSGVGLSLASAHAPPKIEALAKECQVLSQEVLPTALVMKSXXDVEQKNLAXSHHP

SEQ ID NO: 265183 - protein, 59 aa, Glycine max
  Clone ID: PAT_MRT3847_8147C.1.pep
GRALSQGEFGNKLFFKHMFCLKYKNGMVFVKMQRPPHYKKYLFLKNCPKEKLLPKKLKK

SEQ ID NO: 265184 - protein, 143 aa, Glycine max
  unsure (1)..(143): unsure at all Xaa locations
  Clone ID: PAT_MRT3847_81480C.1.pep
MRGNKLVPLEERIMAEDHPQRMTLEDYSSFATPQYLTSIARLDVQAANISYPHSLIQLIQGNIFHGLPSDDPYIXHLATYIETCNTVKLAGVPEDAIHLNLFSSSLASEAKRWLHSFKGNSLWTWEAMVEKFLKKYFPKSKTA

SEQ ID NO: 265185 - protein, 75 aa, Glycine max
  Clone ID: PAT_MRT3847_81481C.1.pep
MVYFLRVFKHFITFPLKKKRKIKKKKGKKKKKKKKKKKKKKKKKKKKKKKKKKPKKKKKGPPSKRPNLSPPSFPI

SEQ ID NO: 265186 - protein, 57 aa, Glycine max
  Clone ID: PAT_MRT3847_81482C.1.pep
SSHSFPLPCFKQWLWLLMSNEATCMTTITYMIVRFSTYTIAHHNARRDLTRPNTTIP

SEQ ID NO: 265187 - protein, 75 aa, Glycine max
  Clone ID: PAT_MRT3847_81483C.1.pep
PSKEGFPSSLYDVLLLWGGGGGGGQRAHARGTAQNHNIIRLPYGQQPAYVHVMSVIPPNITITPVVNGPRNEKER

SEQ ID NO: 265188 - protein, 202 aa, Glycine max
  Clone ID: PAT_MRT3847_81484C.1.pep
MENSLGKYGKELNLEATELRLGLPGSDEPEKRSAVRSNKRSSPEASEEECISKGNMNSSDGSDITSDDQDNVVPPAKAQVVGWPPVRSYRKNSLQQKKEEQAEGAGMYVKVSMEGAPYLRKIDLKVYKSYPELLKALENMFKCTFGQYSEREGYNGSEYAPTYEDKDGDWMLVGDVPWNMFVSSCKRLRIMKGSEAKGLGCF

SEQ ID NO: 265189 - protein, 53 aa, Glycine max
  unsure (1)..(53): unsure at all Xaa locations
  Clone ID: PAT_MRT3847_81485C.1.pep
MLLTTVTFQLCYAYTELNDPVVQRQRFAEQLXDRQSGDDEVLASDETFWRILK

SEQ ID NO: 265190 - protein, 211 aa, Glycine max
  Clone ID: PAT_MRT3847_81486C.1.pep
FAIVQVIYQEIDNSMGKYEKELNLEATELRLGLPGSDEPGKRSIVRSNKRSSTEASEEECISKGNMNSNGSDITSDDQDNLVPPAKAQVVGWPPVRSYRKNTLQQKKEEQGEGSGMYVKVSMAGAPYLRKIDLNVYKSYPELLKALGNMFKCTFGEYSEREGYNGSEYAPTYEDKDGDWMLVGDVPWNMFVSSCKRLRIMKASEAKGLGCF

SEQ ID NO: 265191 - protein, 78 aa, Glycine max
  Clone ID: PAT_MRT3847_81487C.1.pep
KGPQFTFCSLKMSHTADQVSRTRKRNRKHYHGIFNRYCTHLIRCKQPLGIALHVSWHLLQKQKWLLPGRCQPRYRRLH

SEQ ID NO: 265192 - protein, 50 aa, Glycine max
  unsure (1)..(50): unsure at all Xaa locations
  Clone ID: PAT_MRT3847_81488C.1.pep
GAKLXSYTPPPIFFXXXXMIRNSPPPPPKKRVYYIMIYIGLAIITRIIIY

SEQ ID NO: 265193 - protein, 59 aa, Glycine max
  Clone ID: PAT_MRT3847_81489C.1.pep
HNHIKRILLQCLYSELGYLHDNADPHIIHRDINSTNCANFLMMIAAKYCRLLIYQIRAP

SEQ ID NO: 265194 - protein, 210 aa, Glycine max
  Clone ID: PAT_MRT3847_8148C.1.pep
LREELEKRVGTLLGMDCPKDEKLPRRKIIDKPKTRCLTILPMEFNPVVRQKYLNSVRFIMKKRDKLSCQVGINPYSMEWTGLANRLLSKGNDILCCDYASYDGLITKQVMSKKAEMINSLCGGDEKLMREKTHPVLARCSRMAICEKDVWRVECGNPYGFPFTDICNNMFNEMLIRYSYEKSLCQAIAPRMLLQSVKKYVSLCVHGEDNL

SEQ ID NO: 265195 - protein, 82 aa, Glycine max
  Clone ID: PAT_MRT3847_81490C.1.pep
VLIKLCHGNETAFLVFHTLFLTESPQNKPKSPSLSLVLLALKVESSNLLHFSFPLIFDSLWRFCIYSLSLKFVSLFAFCGNF

SEQ ID NO: 265196 - protein, 39 aa, Glycine max
  Clone ID: PAT_MRT3847_81491C.1.pep
LAEAEWGVHSHRSGVSLKETRPPHARGGPCRFRGHDSLC

SEQ ID NO: 265197 - protein, 82 aa, Glycine max
  Clone ID: PAT_MRT3847_81492C.1.pep
TTQNQIPQRAFFGLTAFGKNSKGGGGSISFYQPFGINFSLWGVGRNSFFLQGGFKKLWKWNWPKREKTGLGDLVWEQGVLGL

SEQ ID NO: 265198 - protein, 121 aa, Glycine max
  unsure (1)..(121): unsure at all Xaa locations
  Clone ID: PAT_MRT3847_81493C.1.pep
KPIDIXGKAKEDASLPKATITKIIKEILPPNIHITRDTQDLLIKYYIKFINLISSESNKVYNKEEKRTITPKHIXRTVKILKFSEYIREGDTAYEQHKVKTMQHSXKDAEKNNRPEXTEEE

SEQ ID NO: 265199 - protein, 31 aa, Glycine max
  Clone ID: PAT_MRT3847_81494C.1.pep
RPRINVYYVKKEGVPEGLDLRNTVLYHPCSF

SEQ ID NO: 265200 - protein, 71 aa, Glycine max
  unsure (1)..(71): unsure at all Xaa locations
  Clone ID: PAT_MRT3847_81495C.1.pep
FPKEGWGPKKGFKXGSFEGAKQTSGALSFLFGNPKQFTGFEIFLGIFQNFENGGKNFKPGFFFSKGYARFF

SEQ ID NO: 265201 - protein, 71 aa, Glycine max
  Clone ID: PAT_MRT3847_81496C.1.pep
GTLNVSPTSEQEVAKTNSSGHNSWPPPIDSKTFNTSCKPNSYGIARYHGIPPFLLLPPPSVVFSQPYGRVG

SEQ ID NO: 265202 - protein, 95 aa, Glycine max
  unsure (1)..(95): unsure at all Xaa locations
  Clone ID: PAT_MRT3847_81497C.1.pep
MGNKSSSTSKAQYSSNSQGEKVASTQLQYVAAPHPRKISTNNPKDVSQTQQHGKKPLGNDEAFTTYIKDARVKMKSKSNIGVHHEESNNVIXVDV

SEQ ID NO: 265203 - protein, 60 aa, Glycine max
  unsure (1)..(60): unsure at all Xaa locations
  Clone ID: PAT_MRT3847_81498C.1.pep
TVPIPQVGCETCSVTNLGMVFGEITTKANVHYDKIVRDTCRNIXIXSHDVGLDADNCKVL

SEQ ID NO: 265204 - protein, 126 aa, Glycine max
  unsure (1)..(126): unsure at all Xaa locations
  Clone ID: PAT_MRT3847_81499C.1.pep
EDACLSIIIWDANYINCISRSETTLREQCEEKDASWISLPQLGDWDQNGQVPDYSLDFSKHRERRKQNMTKVYRASLDDEXELMAGPGTNNSITEHRDDHHHPHYHQIYCPTAERSILSYFNCGIK

SEQ ID NO: 265205 - protein, 67 aa, Glycine max
  Clone ID: PAT_MRT3847_8149C.1.pep
GKGSPTKDCPLLGKFDLWGIPPAPRGPPQIEVPFEVDPTGILNVKAEAKGLGKSEKIPIPNEKGGFC

SEQ ID NO: 265206 - protein, 70 aa, Glycine max
  unsure (1)..(70): unsure at all Xaa locations
  Clone ID: PAT_MRT3847_814C.1.pep
LCYRGLGCSHFARRYYXNRFCFLFLWLLRCFSSPGCLLPAREFTSSPKGSRISGIPGYTLTLYSPKHFAA

SEQ ID NO: 265207 - protein, 58 aa, Glycine max
  Clone ID: PAT_MRT3847_81500C.1.pep
NYPPLVCPKIGWGSREKWIFFVFQHEKGFFMPRECKKGGPFFCPPLIIQKPKNLVWVK

SEQ ID NO: 265208 - protein, 27 aa, Glycine max
  Clone ID: PAT_MRT3847_81501C.1.pep
LCKSNIFHSSRFSPILLTFYSTSQKRD

SEQ ID NO: 265209 - protein, 202 aa, Glycine max
  Clone ID: PAT_MRT3847_81502C.1.pep
QDAQSSHVTAFNSGDGSSKSDNERDVHISMRLMEDFLDLAKENTEKDLETCGILGAYLEKGTLYLTTLIIPKQESASNSCQATNEEEVFKILNERSLYPVGWIHTHPSQSCFMSSVDLHTQYSYQVMIPEAFAIVLAPNDTSRSCGLFRLTKPEGMNILKNCQETGFHPHKEPDNGSPVYEHCSNVYKNSNLRFEIFDLRQK

SEQ ID NO: 265210 - protein, 246 aa, Glycine max
  unsure (1)..(246): unsure at all Xaa locations
  Clone ID: PAT_MRT3847_81503C.1.pep
REQVPACDMDRCKENCVSRPVKTTVPFGPKRVLVTEQIPSQNLGSASSGQAQRVLCPSNSQRVPSQAQKLGAGQKPAPKQLPAASVPRPVSRLNNPQKNEQPAASGNDSEKEQASLQKTEDTKKRQWTLEDFDIGRPLGKGKFGNVYLARERQSKFILALKVLFKTQLEKANVEHQLRREVEIQSHLRHPNILRLYGYFHDATRVYLILEYAPLGTVYRELQXLQFDEQRTATYITELANALSYCH

SEQ ID NO: 265211 - protein, 87 aa, Glycine max
  Clone ID: PAT_MRT3847_81504C.1.pep
THAHCWSKLGANCPKQYPACATPLAGDREFLVSQLICKNQRARPIIMDPALYLSKKAELAQSAQRRTLPTCYKQPTGLAITISTKHL

SEQ ID NO: 265212 - protein, 41 aa, Glycine max
  Clone ID: PAT_MRT3847_81505C.1.pep
SHRGCPKAHRKLGCLSVLSSILAPTVYRPCYPMYYCRLLSL

SEQ ID NO: 265213 - protein, 82 aa, Glycine max
  Clone ID: PAT_MRT3847_81506C.1.pep
WTRDAHFHKGPDLIKRKDQIIRLSHSLGATKEGTCTPFSNLKPSKKTQDRVKSSLFLDAPHRRSPSILQMLPTPNQPLRGGG

SEQ ID NO: 265214 - protein, 184 aa, Glycine max
  unsure (1)..(184): unsure at all Xaa locations
  Clone ID: PAT_MRT3847_81507C.1.pep
FLVFLRGGGLVGGRVGGRVGGDELFKDEMTDAQREIKQNLFEDQQQQLEANVEKLSKILEEPFETFSDDKVVEIRMHILNLSTIIDKLCQKMYECIENDLLGSLNLGIHSIAPYKSKGIEPIRTFSXWNNKVNNTGVTEELDRPSGSGSSEDSGCSSRKRPRKEGLGGGGFFDLNLPAEFVDRN

SEQ ID NO: 265215 - protein, 541 aa, Glycine max
  unsure (1)..(541): unsure at all Xaa locations
  Clone ID: PAT_MRT3847_81508C.1.pep
MDVYASSDEDYHYDSDHEDSVEAYENDENYALLSSKGTTTKVITKESLLAAQKEDLRRVMDMLSVREQHARTLLIFHRWDVENLFEVLVDKGKSFLFAEAGVSVDEHRNSDSPVPPAFMCYICMEEVPSSKTTRMDCGDXFCNISWIEHFIVKINEGQSKRIRCMEHKCNSICDDALVRTLLSREHPHMAEKYERFLLESYIEDNKRVKWCPSTPHCGNAIRVEDDELCEVECSCGVQFCFSCLSEAHSPCSCLMWELWAKKCRDESETVNWITVHTKPCPKCHKPVEKNGGCNLVSCICGQAFCWLCGGATGREHTWSSIAGHSCGRYKEQEKTAERAKRDLYRYMHYHNRYKAHTDSFKIESKLKETIQGKIAISEEKDSTLRDYSWVNNGLSRLFRSRRVLSYSYAFAFYMFGDELFKDEMTDAQREIKQNLFEDQQQQLEANVEKLSKILEEPFETFSDDKVVEIRMQILNLSTIIDKLCQKMYECIENDLLGSLNLGIHSIAPYKSKGIERASELSVGWNNGVNNTGKCLLGGLFE

SEQ ID NO: 265216 - protein, 46 aa, Glycine max
  unsure (1)..(46): unsure at all Xaa locations
  Clone ID: PAT_MRT3847_81509C.1.pep
LKGLPGFCIRTCALKNPPPFTGPVXIRGNGSNKTLTPLLKALSANR

SEQ ID NO: 265217 - protein, 223 aa, Glycine max
  unsure (1)..(223): unsure at all Xaa locations
  Clone ID: PAT_MRT3847_8150C.1.pep
MEYGLIPSSQLLLSLFCVMNPYSMEXLVLANKLLSKGNDILCCHYASFDGSITKQVMSKMAEMINTLSGGDAKLIREKTHLLLACXSRMAIRKKDVRRVECGIPSGFPLTVICTSIFNEMLIRYSYEKLLRQARASSMFLQSFKNFVSLCVYGDDNLISRHEYVKPYFSGSKLKSFLAGHNITITDGIDKTSATVQFRKLADCDCLKRNFKQMSSVVWVAPED

SEQ ID NO: 265218 - protein, 62 aa, Glycine max
  Clone ID: PAT_MRT3847_81510C.1.pep
KVKKKTNLTSQKFMHLYFFLGFYYLLDFFQKNNRRVNPIHLTQVGGCQLRNSEYLTLSLTRS

SEQ ID NO: 265219 - protein, 63 aa, Glycine max
  Clone ID: PAT_MRT3847_81511C.1.pep
ASAPTHWRNLLNETARPSIPSPQQNMVLTVLTHNHRLMKLAHTRSWTTTFFPTHKRPPFSCWT

SEQ ID NO: 265220 - protein, 223 aa, Glycine max
  Clone ID: PAT_MRT3847_81512C.1.pep
HRFACMGKITHIVVIPSAGYSHFVPVIHFSKRLVELHPEIHVTCIIPILGSLPSAAKPILQTLPQNINTVFLPPVNPNDLPQGVPVVVQIQLAMAHSMPSIHHTLKSITSKTPYVAMVVDSFAMHALDFAHEFNMLSYVYFPISATTLSMHLNLPLLDEETSCEYRYLPEAIKLPGCVPFHGRDLYAQAQDRTSQLYQMSLKRYKRCWFVNGIFINSFLALET

SEQ ID NO: 265221 - protein, 157 aa, Glycine max
  Clone ID: PAT_MRT3847_81513C.1.pep
MVEIHEEIDPFDQEEHEEEETDYDQLKKRMQKDRILLQQMKEKRPKEEAGQQEKQEASRRKKMSRAQDSILKYMVKIMEVCNAQGFVYGIVPEKGKPVTGSSDSLREWWKEKVKFDQNAPGAIAKYMPLLETDELDPSSYIHLLNDLQDTPLVGGLL

SEQ ID NO: 265222 - protein, 151 aa, Glycine max
  unsure (1)..(151): unsure at all Xaa locations
  Clone ID: PAT_MRT3847_81514C.1.pep
MVRARENWEKLVRATLKREQHRNAGQGHARVPSGIAGAVPPSLAQTTNIDLILQAADDIQSEDPNVARILCEQAYSMAQNLDPNSDGRGVLQFKTGLMSVIKQKLVKKDRVRIDRNHDIEHLWKXYQHYKXRHRVDDXPREEQRLAESGTF

SEQ ID NO: 265223 - protein, 85 aa, Glycine max
  unsure (1)..(85): unsure at all Xaa locations
  Clone ID: PAT_MRT3847_81515C.1.pep
XQXXXXINXNXXAGXSSXXXXXRXXXIRVLHXXQWGREXGXXVREGTRVXXCCVRCXXXSXXXXEEXXXXXVXXXXXXLGNIXGX

SEQ ID NO: 265224 - protein, 75 aa, Glycine max
  unsure (1)..(75): unsure at all Xaa locations
  Clone ID: PAT_MRT3847_81516C.1.pep
FXXXXAXEXAXSIVNWTAEGSSSSXWRGIXGQXTTLASSVEXXQGMKPXPMHFKXTTKXXHXPSKXXQPGLSSXX

SEQ ID NO: 265225 - protein, 112 aa, Glycine max
  unsure (1)..(112): unsure at all Xaa locations
  Clone ID: PAT_MRT3847_81517C.1.pep
VSHCLTLLFLRPPPRTSTACGIGNKDSKSLDRSSTILGRHSFLFVSGFDFVFLGAPXHSRITGILWSEDVGVFNPSSSFSDPTREYGISSFKFIGGHTGFAVTIMLVRRCFC

SEQ ID NO: 265226 - protein, 172 aa, Glycine max
  Clone ID: PAT_MRT3847_81518C.1.pep
ACPEPPGQAPEAPPGSYYPEPPNSGGQYGSGLPPGGGYGGPAPGGPYGPPAGGGPYGHPNPGMFPSGTPGGPYGGAAPGGPYGQPPPSSYGAQQPGLYGQGGAPPNVDPEAYYWFQSVDSDHSGYISMKELKQALVNCNWSSLNDETCLMMINMFDKTKSGRIDVYGFSALW

SEQ ID NO: 265227 - protein, 56 aa, Glycine max
  Clone ID: PAT_MRT3847_81519C.1.pep
TKVINFLKFGYITFVIESRKCPGTQETALLAFTIYRVTSTRSGMLSITPIPEKVDV

SEQ ID NO: 265228 - protein, 63 aa, Glycine max
  Clone ID: PAT_MRT3847_8151C.1.pep
LGIRLEVNLRPHYLVFRTTNHYYYGGVFFETAIGHLRAGWGSKGSEFEALTTDCKINEWHDTD

SEQ ID NO: 265229 - protein, 119 aa, Glycine max
  Clone ID: PAT_MRT3847_81520C.1.pep
NQSLFEEHHSQHGPLFSTKQLQGLMQLQDLQGNTNNSDSCSVAAPNSNLFNLSFFPSSNISTGTIIPDQFNNISGGDQGTTTTTTLYGNAIENVTSPHVGSSICSIFGNSMENVSAPHM

SEQ ID NO: 265230 - protein, 118 aa, Glycine max
  Clone ID: PAT_MRT3847_81521C.1.pep
MKRKVVQHKWKKKLFALILVVFCLGSLLFMQTRYHHVAGLVSLQHRFVSEPEVQGPKVAFLFIARNRLPLEMVWDAFFRGGDRKFSIFVHCRPGFLLNKATTRSPYFLNRQVNDSVQV

SEQ ID NO: 265231 - protein, 63 aa, Glycine max
  Clone ID: PAT_MRT3847_81522C.1.pep
VPTRTNRCEEATYMVQTGDDNKKGTIQTHTTYDAKLSLERKKKEEHINLTKEEEPYKGGSTHH

SEQ ID NO: 265232 - protein, 338 aa, Glycine max
  Clone ID: PAT_MRT3847_81523C.1.pep
DVHTRIMKRNYEQVPEWWFVSILLLMIVVSLITCEGFGKQLQLPWWGVLMSLVIALVFTLPIGVIQATTNTQVGLNVITELIIGYIYPGRPLANVAFKTYGYISMSQALGFLQDFKLGHYMKIPPKSMFVVQLVGTIVASGVYFGTAWWLLTSIPHICDETSLPAGSPWTCPGDEVFYNASIIWGVVGPQRMFTKDGIYPGMNWFFLIGLLAPVPVWLLARKFPNHKWIELMPNRFKIAGGGGIPPARSVNYITWGFVGIFFNFYVYSKFKAWWARHTYILSAALDAGVAFMGVILYFALQNYGVFGPIWWGQDADDHCPLAKCPTAPGVIAHGCPLL

SEQ ID NO: 265233 - protein, 35 aa, Glycine max
  Clone ID: PAT_MRT3847_81524C.1.pep
VVLTFGEIRPLVRKLWYKEPMLMLVLHISAIAKII

SEQ ID NO: 265234 - protein, 90 aa, Glycine max
  Clone ID: PAT_MRT3847_81525C.1.pep
NSNFLSYFYGISSSNFSELCTKEETLKEVHASLVKEGQKARLEKFEIPAKIKLLSDPWTPESGLVTAALKLKREAIKKTFDEELSELYAS

SEQ ID NO: 265235 - protein, 84 aa, Glycine max
  Clone ID: PAT_MRT3847_81526C.1.pep
RESVGLDWSLVFIVHAMASLVLILSFLVRPKVKNQASIVTSTSFDTIKDYSSLLAKGAQHRECEKLEMGDQNILEEPRVCIYLV

SEQ ID NO: 265236 - protein, 69 aa, Glycine max
  Clone ID: PAT_MRT3847_81527C.1.pep
RLREDDRRAMSTSLRFSWMWYVSILLFYFQKGFVDTIQVSSLERKRKKMFKVHVWVERRESKRKVKGRN

SEQ ID NO: 265237 - protein, 44 aa, Glycine max
  unsure (1)..(44): unsure at all Xaa locations
  Clone ID: PAT_MRT3847_81528C.1.pep
RXTXSSILXLIFVLIVWLHXVDCCITXKSFRHXIAFQTTFCLVX

SEQ ID NO: 265238 - protein, 39 aa, Glycine max
  unsure (1)..(39): unsure at all Xaa locations
  Clone ID: PAT_MRT3847_81529C.1.pep
TPNHSTVLLPHXXXXELIXXKEDKRXRETGAEIWXGGGA

SEQ ID NO: 265239 - protein, 86 aa, Glycine max
  Clone ID: PAT_MRT3847_8152C.1.pep
NFFQSLFSKVFLEPSTSPPPCFWCLLVFLLLTPSIRLFFRVFFLGGISWPLFFFCFFVSYAFEKVPSFCPPLWLFKGPFLGAVFFD

SEQ ID NO: 265240 - protein, 39 aa, Glycine max
  Clone ID: PAT_MRT3847_81530C.1.pep
KRMVVAPVLLFQASRQTSQYLCCVSKTILRNGSSVCARA

SEQ ID NO: 265241 - protein, 68 aa, Glycine max
  Clone ID: PAT_MRT3847_81531C.1.pep
KLSLSTDLYGFTKRKKGLPLVTKCPNSIPFFGPSSTFKKAITIHLCHPCHFSCPKNLLHLRIMIVTSL

SEQ ID NO: 265242 - protein, 35 aa, Glycine max
  Clone ID: PAT_MRT3847_81532C.1.pep
MARTKQTARKSTGGKAQLNHLATKAPRNSVPLTGE

SEQ ID NO: 265243 - protein, 53 aa, Glycine max
  Clone ID: PAT_MRT3847_81533C.1.pep
MSKKQTVKLDEEQIAELREIFRSFDRNNDGSLTQLELSSLLRSLGLKPSADQL

SEQ ID NO: 265244 - protein, 111 aa, Glycine max
  Clone ID: PAT_MRT3847_81534C.1.pep
MAAAADGLFRPIYEGCISAYDNDVERRPYHKNCGCALHSKSRRNSRACTHKLPKCNNVSYPMRRAWSEGSLSMASATTSAHSSPSSSPAAGFRPQHDEEGNSNKLGVLFEM

SEQ ID NO: 265245 - protein, 446 aa, Glycine max
  Clone ID: PAT_MRT3847_81535C.1.pep
MSSLTFTTEVASSFLGLAYHNPKPFTLSLQTTLLPLLRRTTTHSRSLTFPLRPSRRFFVTSATTAPPQSEDSDVSTVIPPDNRIPATIITGFLGSGKTTLLNHILTAEHGKKIAVIENEFGEIDIDGSLVAAKTAGAEDIMMLNNGCLCCTVRGDLVRMISELVAKKKGKFDHIVIETTGLANPAPIIQTFYAEENIFNDVKLDGVVTLVDAKHAGFHLDEVKPKGVVNEAVEQIAYADRIIVNKTDLVGESDIASLVQRIRKINSLANLKRTEYGKVNLDYVLGIGGFDLERIENAINDEGAKEDHDHSHDHEHEHHDHDHHHHDHDHSHDHKHEHHDHHSHDHSHDPGVSSVSIVCEGSLDLEKANMWLGTLLLDRSEDIYRMKGLLSVQGMNERFVFQGVHDIFQGSPERLWGPDEPRVNKIVFIGKNLDAKELEKGFKACLL

SEQ ID NO: 265246 - protein, 66 aa, Glycine max
  Clone ID: PAT_MRT3847_81536C.1.pep
PTSCSASALSEDMFHWPTTLMAPADCPYAGGVFLFTIDFPADNTVQPTNVALWTKVSNPNINSNGS

SEQ ID NO: 265247 - protein, 79 aa, Glycine max
  Clone ID: PAT_MRT3847_81537C.1.pep
RDKVAVEEALRNWRSEGQKKRSSIHNSTKFKNCCLSHHRRDPRLLDVNGMHLVNDKARPVLKPTLSIGQILSKKLLQPQ

SEQ ID NO: 265248 - protein, 528 aa, Glycine max
  unsure (1)..(528): unsure at all Xaa locations
  Clone ID: PAT_MRT3847_81538C.1.pep
MHSSPLLLEEPIRMASILEPSKPTFFPAMTKIVGTLGPKSRSVDIISHCLDAGMSVARFDFSWGDPEYHQETLENLRVAIKSTKKLCAVMLDTVGPELQIENKTDHPITLEADTLVVLTPDQNKEASSNLLPLNFTGLSKAVKKGDTIFIGKYLFTGSETASVWLEVSEXVEGEDVTCLVKNTATLSGSLFTVHVSQIHIDLPTLADKDKEVISTWGVQNNIDFLSLYTRHVEDIRXAREFLSKLGDLKQTHIYAKIENIEGMKHFDEILREADGIILARGNLGIELPPEKVFLFQKAAIYKCNMVGKPVVVTRVVDSMTDNLRPTRAEATDVANAVLDGSDAILLGAETLXGAQYPVETISIVGKICAEAEKVHNQDLYFKKAVKYVGEPMSHLESIASSAVRAAIKVKASVIICFTSSGRAARLIAKYRPTMPVISVVIPQLKTNQLRWTFTGAFEARQSLIVRGLFPMLADPRHPAESRSGTNESILKVALDHGKAFGIIKPHDRVVVCQKVADSSVVKILELED

SEQ ID NO: 265249 - protein, 117 aa, Glycine max
  unsure (1)..(117): unsure at all Xaa locations
  Clone ID: PAT_MRT3847_81539C.1.pep
MDNYFLLFIIFLSLFHHPISASNLHKLKQLTPNFPPEPLSSNDPPPPTEYFEVARPIEHPKTKPCSHHILHHDFGYTYGQPPVLATYTPPSHCPFNTFSXIVLEWKATCKGRXFDRI

SEQ ID NO: 265250 - protein, 275 aa, Glycine max
  unsure (1)..(275): unsure at all Xaa locations
  Clone ID: PAT_MRT3847_8153C.1.pep
PSRSEDSFEEVSLSAALNGVEGLDYMERIPLATSEGFPHVLSRKNGEKGKRRFVSGDGXEMXLISGNPVLKKAYNKSNQLNLEKSVXLHCVGIECPKDEKLPRRKIFDKPKTRCFTILPMEFNLVGRQKFLNFVRFIMKKRDKLSCQVGINPYSMEWTGLAHRLXVRGNDILCCDYAXFDGLITKQVMSKMAEKINSLCGGEXKMMRERTHLLLACCXRMAICKKDVWRDELRIPFGFPLTGYLNSIFNEMLIGISXEKSLCPAKAPSWLLQSFK

SEQ ID NO: 265251 - protein, 49 aa, Glycine max
  Clone ID: PAT_MRT3847_81540C.1.pep
TRAGFMTHGMRNAYYVGCSAFHTKRYDSQLPSDERSCGQAQRQQESPYH

SEQ ID NO: 265252 - protein, 54 aa, Glycine max
  Clone ID: PAT_MRT3847_81541C.1.pep
VSFYFFMRAYEYVYESFDAACLYIIRDTICPVLRKNKRFPIAINSFVTSFLEVY

SEQ ID NO: 265253 - protein, 244 aa, Glycine max
  Clone ID: PAT_MRT3847_81542C.1.pep
RVWSLRMKIAVETASALAYLHASKIIHRDIKTNNILLDNSFYVKVADFGLSRLFPNDMTHVSTAPQGTPGYVDPEYHQCYQLTSKSDVYSFGVVLIELISSMPAVDMNRHKDEINLSNLAIKKIQERALSELVDPYLGFDSDKEVKRMIIEATELAFQCLQQDRELRPPMDEVLEVLKRIESGKDELKHLEEAVHGSGVSHNNNVTTSTELDEAGLLKNRKPPSSPISVPDSRESKSTTPNASS

SEQ ID NO: 265254 - protein, 104 aa, Glycine max
  Clone ID: PAT_MRT3847_81543C.1.pep
LGSSEIHNLSPYGTKTHPVKFGRIPNVPTTVAGSCEKGSNQSLFLELRPPSSFASEMCRSCEQLEQFVVGMQGELSLHHGQPEPCITIRFSCKRIIVLKQTQDV

SEQ ID NO: 265255 - protein, 69 aa, Glycine max
  Clone ID: PAT_MRT3847_81544C.1.pep
GFLPQGTEKPQALFDDENACIGCRECVHHASHTFTMDETQGSARVKVQYGDNDQSIEVSVESCPDNCIH

SEQ ID NO: 265256 - protein, 74 aa, Glycine max
  Clone ID: PAT_MRT3847_81545C.1.pep
LWRWAGRGSLRSKVNQPGLQSGFPAQQRQAVPWISAGRPTVLGDIIPRSGRTIVTCQPPQVSVQKFKGGPGSLP

SEQ ID NO: 265257 - protein, 54 aa, Glycine max
  Clone ID: PAT_MRT3847_81546C.1.pep
GKTPFQISIKQAKTEQESWPFFENTFSLILGGKRSLKIKFPHRLKDPKLDSTTL

SEQ ID NO: 265258 - protein, 56 aa, Glycine max
  Clone ID: PAT_MRT3847_81547C.1.pep
STWKKETCNRVCQWVKYVENEIFLLGASPSPLTHSRTTGGAKSVYLIPFPGPIFLN

SEQ ID NO: 265259 - protein, 90 aa, Glycine max
  unsure (1)..(90): unsure at all Xaa locations
  Clone ID: PAT_MRT3847_81548C.1.pep
ESRQSQTQREEGKWLSLTFSVVLLLFLFXXXXXXXXXSIIVNKSTNTTSIPSYSSRHSKLXNFXSSHQSKTLLQDTMXDDPDAKSSSLSK

SEQ ID NO: 265260 - protein, 110 aa, Glycine max
  Clone ID: PAT_MRT3847_81549C.1.pep
QQKLLLHYKSYFLLQILQQNNNYNIKSCYYTFYLKYIPPKTNITIKNEKPNNTMFVKFLIFFCKASICSLKSVTTIVSLETEDELESWFSSSTQKKKRQTSWSVRGNAQV

SEQ ID NO: 265261 - protein, 187 aa, Glycine max
  unsure (1)..(187): unsure at all Xaa locations
  Clone ID: PAT_MRT3847_8154C.1.pep
VRFVFVDEEDSFAEVSLCAALNGVDGLDYMERIPLATSEGFPHVLSRINGEKGIRRFVSGDGEEMTLIPGTTVEEAYNKLIVELEKRCPTLVGIECPKDEKLPRRIIFDKPMTRCYTILPMEFNLVVRQKFLYLARLIVNXWDKLSCHAVINLFSMEWTGLANRLLCKGIDLLCGDYASFDGLFTKQ

SEQ ID NO: 265262 - protein, 116 aa, Glycine max
  unsure (1)..(116): unsure at all Xaa locations
  Clone ID: PAT_MRT3847_81550C.1.pep
SXXXXXRNSXXXXXXXTXXSSXXXXRXNXTXCLRXXVXSSXXXSXXXXXXPSXXXQXVXSIIGEVLLXXXSCKKXXXWATAAXLXXVKXXXGXHMXGXXXXXXXQXXXGRWXXXMX

SEQ ID NO: 265263 - protein, 62 aa, Glycine max
  unsure (1)..(62): unsure at all Xaa locations
  Clone ID: PAT_MRT3847_81551C.1.pep
WSVHVSFFRLLTLTEGENSNGGAEAINTTLLNGKYXAGPSVXQRTFSEANHVRKVKTGKSVV

SEQ ID NO: 265264 - protein, 84 aa, Glycine max
  Clone ID: PAT_MRT3847_81552C.1.pep
LKVYALGALLDPKLKEFPPQKNEELATGAPPKKSRAMIFQKIKFALSSQNLICHDDPPMFNKKVGFQVSFFFQNCPPGGKGKSL

SEQ ID NO: 265265 - protein, 67 aa, Glycine max
  Clone ID: PAT_MRT3847_81553C.1.pep
LKKKKKKKNKKKKKIKKNKQTDFSFLTYTFIHLPYYYIPSPKFNLKSNYFTTLLTKKTLSKPILFPF

SEQ ID NO: 265266 - protein, 89 aa, Glycine max
  unsure (1)..(89): unsure at all Xaa locations
  Clone ID: PAT_MRT3847_81554C.1.pep
ILTHAIDANTKGIRQPTHSXLIISSQLDNPIFLTSAFSLSLIYFSLISLLLNTGLDSIYCRHHILMKKYFVGVLLINALNAPFRKQGMK

SEQ ID NO: 265267 - protein, 333 aa, Glycine max
  Clone ID: PAT_MRT3847_81555C.1.pep
GSRLVPQWLIGSGNDSRVAGINNQFTSSSYSDHITYSGRQWSSSSKGPGHSRSYSSSERSWQDTYWEKDIGSDGLNSASHDIPMTVSKAMMMHRYNVPTSTSSITPGTMGLSMAETLAQGPPRSHSPQLSASTQKLEELALKQSRLLIPVTPSTPRSLVSSSSEKSKVKTGQQQYSFSHSRRPNHSLHGAHPNLDIQKISSGNSLSVNTSREWNGVSSAAKDNLSPNSRVVLSPVGATRSTSLSAPSRNLGNNSTPSAWITLEKRPTFPIQSRNDFFKNLSRKSSLEKPCSDVLSIDMSCALENSEASMRNVSSCPILESRDASLVDTSGLTC

SEQ ID NO: 265268 - protein, 82 aa, Glycine max
  Clone ID: PAT_MRT3847_81556C.1.pep
LSVTLHQHREAVKFEPPHNQNKANYKTQGLKTKQAPKTPSGQKTTGGPTKAKHQAYGKKNTYSMGRKGRTVPTHIFWRHQQA

SEQ ID NO: 265269 - protein, 80 aa, Glycine max
  Clone ID: PAT_MRT3847_81557C.1.pep
SFVITCTQRNNFFVCLYRHFYSLSFPQSYIIAIYMLTLIQHPIANKCEGHSRSFASFSSSLHLYYTLAILELVNSQHLCP

SEQ ID NO: 265270 - protein, 88 aa, Glycine max
  unsure (1)..(88): unsure at all Xaa locations
  Clone ID: PAT_MRT3847_81558C.1.pep
KPVEMTPPADQATAEKKPKAENMITNDGRSEKLKKRTNKNVESXAIYIYXRLTQVHAHIGTSSNAMGIITSLICDIFEKLLNEASRLV

SEQ ID NO: 265271 - protein, 66 aa, Glycine max
  Clone ID: PAT_MRT3847_81559C.1.pep
GPLFPVLKGWIRKISWPHQGRFCCSCWPKEPREIGPTFNKSNWVRKLTFFLKICRIKKGSLTLNPK

SEQ ID NO: 265272 - protein, 239 aa, Glycine max
  unsure (1)..(239): unsure at all Xaa locations
  Clone ID: PAT_MRT3847_8155C.1.pep
CSLSRLNGEKGKRRFVSGDGEEMTLTPGTTVEEAYIKLIVELEKSVPTWVGIECPKVDKXSRRKIFDKPKTLCCTILPMEFNLVVHXKFLNFVRIIMNKRXDKLSCQVGINPYSMVWTVXVNRLMSKGNDFLXCDYASFDGLITMHVMSKMAKLINSLLCGDEKLMPLRTHLLVACCXMMAIFKKNFRIGECEIPSGFSLXAFCYCILNEMLXINIVIKYYCSRLKXPSMFLQSFKNFV

SEQ ID NO: 265273 - protein, 60 aa, Glycine max
  Clone ID: PAT_MRT3847_81560C.1.pep
LTNLYHCLRLKKKGKENIEYHFSTRLIITTRMIHLMERMENFNYLIKYQPFLKRLCSKKT

SEQ ID NO: 265274 - protein, 72 aa, Glycine max
  Clone ID: PAT_MRT3847_81561C.1.pep
MYVYMILMMSKEESNKAHFASRLIQDCFNEQSLDLRFLQDQALPHNERFEVIQGTCNRLPIHVIDYQWFESV

SEQ ID NO: 265275 - protein, 103 aa, Glycine max
  Clone ID: PAT_MRT3847_81562C.1.pep
AEGAGPDLAAPEAQGLAPADAGTPHGVANTAAGKESFDEVFRQDKAYSGEWAQTAGRFKPAYRPVPQRWKNSEILARLRSHVKSRSAGGGMGFMPELKNYDRA

SEQ ID NO: 265276 - protein, 140 aa, Glycine max
  Clone ID: PAT_MRT3847_81563C.1.pep
VVFGVPPKGVVLLPSGGAGVFTPWWKSFWGGNLFVLQRGASLLVFFGFSNMLAPIIGAAVVGPPLFFLLNSASLAFFLVPFFSWVVFFFPPVVFVVFCFFVEPQGIFFFFFFFSFLLVVYCPLSPHHCCNNRGRPRWFYA

SEQ ID NO: 265277 - protein, 32 aa, Glycine max
  Clone ID: PAT_MRT3847_81564C.1.pep
LTAAKTRPGQFSCCNERTLHMSAFKGEVDVHH

SEQ ID NO: 265278 - protein, 71 aa, Glycine max
  Clone ID: PAT_MRT3847_81565C.1.pep
EFYASKHSVNVKKEAGVLPVINVDMGTVQLTRTNGETTNKCLNWLYQHCTHYYEAVAHCAKWRAEVKIGAN

SEQ ID NO: 265279 - protein, 72 aa, Glycine max
  Clone ID: PAT_MRT3847_81566C.1.pep
VKFGAVKTKAMAIIALTSSLPSSYIFFLPEKTIGRMAPLYVVRRPFASSHVGMVPRIRINPWKQEQKKKGGR

SEQ ID NO: 265280 - protein, 67 aa, Glycine max
  Clone ID: PAT_MRT3847_81567C.1.pep
TFLVHNQLSSSISKFTPRPNRKLWWTPRPPPVHPTKERTYRGKRTGSPTEKKTNRPGRYLKTRFAVQ

SEQ ID NO: 265281 - protein, 111 aa, Glycine max
  unsure (1)..(111): unsure at all Xaa locations
  Clone ID: PAT_MRT3847_81568C.1.pep
QLXSKSIQXXRXFVYEMGXYLXCNIPILXKLYGCCVEGNXXILIYXYXGXNCXXRIXFGXDPNKTKRXWXTRXXIALVELKXLXYLHEEXXXXIIHXELRLMFARLGFMLS

SEQ ID NO: 265282 - protein, 40 aa, Glycine max
  Clone ID: PAT_MRT3847_81569C.1.pep
STKSSNKSEVTPLVGISALAGSTMICYSYRSYEGLSGRTC

SEQ ID NO: 265283 - protein, 230 aa, Glycine max
  unsure (1)..(230): unsure at all Xaa locations
  Clone ID: PAT_MRT3847_8156C.1.pep
MAEEWTDCGDEVDSFEDVSSSATLNGVEGSDYMERIPLATSEGYPHVLSRKNGEKGKRRFVSRDREEMTLIPGTRVEDAYNKLIVELEKRVPTLLGIECPKDEKLPRRKXSDKPKTRCFTILPMEEKSCGPAKSLNFVRFIMKKRVXFSVKLELTPYSMEWTGLANXRLLSXGNVFLCCDYACFDGLITKQVLSKMAEMIXSLCGGXEKLLRERXHLLLVXLSRMAICKK

SEQ ID NO: 265284 - protein, 139 aa, Glycine max
  Clone ID: PAT_MRT3847_81570C.1.pep
LLSAILHSQPLFRSPINCVFVHVSSTFEFGAMRSDCLVQFSILNLFRSPMNYVFVHVSSTFEFGAMRSDCLVQFSILHLFRSPMNCVFVHVSSTFEFGAMHSDCLVQFSILNLFRSPMNCVFVHVSSTFQFGAMRSDCL

SEQ ID NO: 265285 - protein, 45 aa, Glycine max
  Clone ID: PAT_MRT3847_81571C.1.pep
TKHSIQQSLNEESPIKNAFNNYGHFSPLFVTKMFLDPFCRFFATV

SEQ ID NO: 265286 - protein, 63 aa, Glycine max
  Clone ID: PAT_MRT3847_81572C.1.pep
YLKYIVSFQCLFGRVFCMVRFLGFRHFTSQYVWVVCTLLTLQQPSKLSKAYNEHIVNAFIPYS

SEQ ID NO: 265287 - protein, 62 aa, Glycine max
  Clone ID: PAT_MRT3847_81573C.1.pep
KGKNSWGENWGKNGFLGIQKNPGNLLGGGGMNYFASTPPKKESEPLGFAPVKGLQKVAPFPF

SEQ ID NO: 265288 - protein, 94 aa, Glycine max
  Clone ID: PAT_MRT3847_81574C.1.pep
NSARALNGRLRGLRLSRSRKLSLGVVVLSSRIVRLYNEVVNQMMNMENKYPAIALTTQWGLPVLSFSSHVCRRRVFPLDRKVTLCQQLGLCFGS

SEQ ID NO: 265289 - protein, 57 aa, Glycine max
  Clone ID: PAT_MRT3847_81575C.1.pep
KQIAGHIITFSGAFTLVPYKLDSLFFLYIYVRTNESLKKKRKEKKRKKKTSSPTSFR

SEQ ID NO: 265290 - protein, 113 aa, Glycine max
  Clone ID: PAT_MRT3847_81576C.1.pep
RFGAGVFLLKVKKIRPCMFGYAANRFVHPPKILLAPQPVFPHKLKSGMKPFILEGAVGLIKLTHHSSCKSGKCFNAQISLQEEPNDPCVLLKMGGRVESSAGIRGIADREAAQ

SEQ ID NO: 265291 - protein, 141 aa, Glycine max
  Clone ID: PAT_MRT3847_81577C.1.pep
SKNDEAKLARETKIEKVMMDEEVDPLIKRETAYENTVKNVSCEDNFLDNPITELIKKEVEGGDATKPHCLQDSDFHKKIGMMKQKSLLDPDMIMKVVGKSMVLESWNFNLLSEPLALNFVASMADSSTMELRQKECTEAAW

SEQ ID NO: 265292 - protein, 64 aa, Glycine max
  Clone ID: PAT_MRT3847_81578C.1.pep
NQFKNQWIYVSNVESLVIALQREKKICVTILQNPTTEWMACRSMVVLLVIVKTIHSVVGFCRIC

SEQ ID NO: 265293 - protein, 84 aa, Glycine max
  Clone ID: PAT_MRT3847_81579C.1.pep
FSKRGFLPPFLLVFPGPGAPIEPRWTPPGLGGDTVKGSSRDLPAGPVSFFPWSGSGNPWTRLAPKQPCPLNALWAPNILAGPPP

SEQ ID NO: 265294 - protein, 56 aa, Glycine max
  unsure (1)..(56): unsure at all Xaa locations
  Clone ID: PAT_MRT3847_8157C.1.pep
GAWKIIKAXXWWPXQVGXXRLXSAWFXFFDIWAXRLAXFSNTXMXXVHXRTFGDTD

SEQ ID NO: 265295 - protein, 49 aa, Glycine max
  Clone ID: PAT_MRT3847_81580C.1.pep
AHSMVSNPFPNPKSYQKMKTIFVHPNNNLYLTLLSMNHSASSQITPMTP

SEQ ID NO: 265296 - protein, 78 aa, Glycine max
  Clone ID: PAT_MRT3847_81581C.1.pep
TLLPPMYTHSAYWLWASGFYVLAMLQETADRVIYLLTFHIVSGHTLKHLSAAMVPIILTVMLAKRSVYSEKLLHAKSA

SEQ ID NO: 265297 - protein, 173 aa, Glycine max
  unsure (1)..(173): unsure at all Xaa locations
  Clone ID: PAT_MRT3847_81582C.1.pep
FLSPLPPLLNPKTSGGGPWVPNLVPKVGVFFLGGLGPPPGPGGFFGLKGPFPYNPFXRKFFGTFFAPFPKRGLFPQVFFLGGGSPPAFFRAPPPGGLFPPQKGPPPPPKFGPRGQILFFLVQSPPHWGPGLFFFPRVAKRGRMLAGQPTKKRLPSRLIWGPWLGFPLNQALFW

SEQ ID NO: 265298 - protein, 201 aa, Glycine max
  Clone ID: PAT_MRT3847_81583C.1.pep
MQFNITSQFLHIFSLTFFLIITSSLSQSNQFCDAGTEIPSSKLLIKGGTVVNGHHQQMADVYVEDGIIVAVNPNFRVGDDVTVIDATGKYVLPGGIDPHTHLDMDVGFTATVDDFFSGQAAALAGGTTMHIDFVIPLNGSLTAGFDDYEKKAKKSCMDYGFHMAITKWDETVSREMELMVKEKGINSFKFFMAYKGNSYDQ

SEQ ID NO: 265299 - protein, 54 aa, Glycine max
  Clone ID: PAT_MRT3847_81584C.1.pep
PNGNSFSTFKTYPMPGYITTWACTTLTHTHYPYINNSSKITVPLTYTSYIILSY

SEQ ID NO: 265300 - protein, 213 aa, Glycine max
  Clone ID: PAT_MRT3847_81585C.1.pep
MQFSITSQFLHIFSLTGGAEYRHSVAMAMGLTSQLLLSLFISTLLLLLPSSLSQSNQFCDAGTSSKLLIKGGTVVNAHHQQVADVYVEDGIIVAINPTITVGDEVTVIDATGKFVMPGGIDPHTHLEFEFMDTETVDDFFSGQAAALAGGTTMHIDFVIPHKGSLTAGFEAYEKKAKKSCMDYGFHMAITKWDETVSREMELMVKEKGHDLFP

SEQ ID NO: 265301 - protein, 37 aa, Glycine max
  Clone ID: PAT_MRT3847_81586C.1.pep
YHLEKFYWLMCVLSGLNFLHYLYWATKYKYRGTGTTN

SEQ ID NO: 265302 - protein, 51 aa, Glycine max
  Clone ID: PAT_MRT3847_81587C.1.pep
TLPEIVQCYAIARFNCVSTVISQQFRSGTSYVHVYFELLIRHTIGTHSYAS

SEQ ID NO: 265303 - protein, 42 aa, Glycine max
  Clone ID: PAT_MRT3847_81588C.1.pep
KMQLVREQASNGCSARPAYRDRSHRATGDRTNCRSQPVMHLN

SEQ ID NO: 265304 - protein, 370 aa, Glycine max
  Clone ID: PAT_MRT3847_81589C.1.pep
CGPRPGGPVPGGRVPSLPPQGRGTGLGLHNSPGLPYSGTLLTKSKSKWIRMKGDSSHISSPPVLHPQTTLFLQDKSDAGASTLLSGGHPLGVNQEQKLLTNPATIKPALPPISIKKPESRWTLATDTGSGFTFPVSASTSVFSEPPTPSITPPPATAARRRQKGKILDHIDRNTPTPKEKSAELKLATKWKNPESSIDFSTIWSNEDNGLLKLDDVSPYKYDGLEGKESTLWNESKGKYHVDMQPKESTDKSIAVRKVGTLLSDVNVYSSIPRLGNDVSTTQNLCSSKKDAMKTTPPSGDHPFGVNQEQKLLTGPATIKPALPPISIKKPESRWTLASDTGSGFTFPVSASSSVFSEPPTSSITPFLFGG

SEQ ID NO: 265305 - protein, 62 aa, Glycine max
  Clone ID: PAT_MRT3847_8158C.1.pep
GSIGGAICWVVVFIRGPRTVGRAFELIIHADRVLLEEALCYYVASECDTSTKKYRQSGRTSR

SEQ ID NO: 265306 - protein, 193 aa, Glycine max
  Clone ID: PAT_MRT3847_81590C.1.pep
MADEVPSPPAASASTAPLGSSVISLVNRLQDIFARVGSQSTIDLPQVAVVGSQSSGKSSVLEALVGRDFLPRGNDICTRRPLVLQLVQTKRKPNLDNNDEYGEFLHLPGRKFHDFSEIRREIQAETDREAGGNKGVSDKQIRLKIFSPNVLDITLVDLPGITKVPVGDQREDIEAAIRTMLMRISNLTPSAGF

SEQ ID NO: 265307 - protein, 48 aa, Glycine max
  Clone ID: PAT_MRT3847_81591C.1.pep
RSQHLYSVLMICWWGVNTKNYCARLELQACFCYFLFCLSSILCLFARE

SEQ ID NO: 265308 - protein, 165 aa, Glycine max
  unsure (1)..(165): unsure at all Xaa locations
  Clone ID: PAT_MRT3847_81592C.1.pep
LISGASSSLGCGRPIWTSINEFLDPPGVSNTWRATAALHDSDMARALGLSIFSSXRLEGLLPLAGVVPAVTHLGLHPGRPPPKLLAFCASXKDMHISGYAPVRPPSAVKSDILNNACCTKIAERLGKTPXHVALRWGLRASHSVLPMSTDVTRTNGDLDLFDWAI

SEQ ID NO: 265309 - protein, 59 aa, Glycine max
  Clone ID: PAT_MRT3847_81593C.1.pep
PSLHIIPSLPILFDPLHFLPPLVQKKNGGGDTLNFLLILTKKSNTFSSKYFIAQTILKN

SEQ ID NO: 265310 - protein, 68 aa, Glycine max
  Clone ID: PAT_MRT3847_81595C.1.pep
ETAPNPVGRRPCVLFFIIGFVFVVCLFSELFYWPLFFSVGRSGLCYLPAMGCVHINTFQLISFLCQKK

SEQ ID NO: 265311 - protein, 108 aa, Glycine max
  Clone ID: PAT_MRT3847_81596C.1.pep
GGCVALLGAAKLVLGLVLGTSLAHILKQFPVGILGVLLLFAGIELAMCARDMNTKEDSFVTLVITAVSLVGSSAALGFLCGMVVYVLLRLRNWTKDNPLSTIWMQKRT

SEQ ID NO: 265312 - protein, 112 aa, Glycine max
  Clone ID: PAT_MRT3847_81597C.1.pep
AMEHCTAWVACRPLFHPSHCFHHSLLFFLLCNTYRHPHSEYGPNRSASYLDVVHLHLGTYNSLSSLPSTSSVSRSRSPIQNTPYYHVYQHHLEHLISFYSKIRSSYAGYRNK

SEQ ID NO: 265313 - protein, 355 aa, Glycine max
  Clone ID: PAT_MRT3847_81598C.1.pep
MIRGDISRNTLLAPSDKACTFPHLAETHAQLIRNGYQHDLATVTKLAQKLFDVGATRHARALFFSVPKPDIFLFNVLIKGFSFSPDASSISFYTHLLKNTTLSPDNFTYAFAISASPDDNLGMCLHAHAVVDGFDSNLFVASALVDLYCKFSRVAYARKVFDKMPDRDTVLWNTMITGLVRNCCYDDSVQVFKDMVAQGVRLDSTTVATVLPAVAEMQEVKVGMGIQCLALKLGFHFDDYVLTGLISVFSKCEDVDTARLLFGMIRKPDLVSYNALISGFSCNGETECAVKYFRELLVSGQRVSSSTMVGLIPVSSPFGHLHLACCIQGFCVKSGTILQPSVSTALTTIYSRLNE

SEQ ID NO: 265314 - protein, 71 aa, Glycine max
  Clone ID: PAT_MRT3847_81599C.1.pep
APKMLNCLMYKLSYYRFGELTTEYGKPPGYDRARGVEIGNKDIKLEYLEEAFPTQNWIVRIYKVKPPKNRW

SEQ ID NO: 265315 - protein, 67 aa, Glycine max
  Clone ID: PAT_MRT3847_8159C.1.pep
ALTVISIPISILSQKLSAKMQVSTHLFPLSLKCTQSHAHKKKAIACHYVYDTMCRHISLMRLIVYNV

SEQ ID NO: 265316 - protein, 427 aa, Glycine max
  unsure (1)..(427): unsure at all Xaa locations
  Clone ID: PAT_MRT3847_815C.1.pep
SPAHGSSSSRFGSRHTNHTKSRWWAWLIVIAGVFVVLIFGYLCCIIWRKCKIEADRKKKQKELLLEIGVSSVACIVYHKTKRHRKRSKVNYEMQIFSFPIIAAATGNFSVANKLGQGGFGPVYKGVLPDGQEIAIKRLSSRSGQGLVEFKNEAELVAKLQHTNLVRLSGLCIQNEENILIYEYLPNKSLDFHLFDSKRREKIVWEKRFNIIEGIAHGLIYLHHFSRLKVIHRDLKAGNILLDYEMNPKISDFGMAVILDSEVVEVKTKRVVGTXIGYMSPEYVIKGIISTKTDVFSYGVLVLEIVSGKKNNSRYQADYPLNLIGFAWQLWNEGKGVELIDSSMLESCRTAEVLRCTQVALLCVQANAADRPSMLEVYSMLANETLFLPVPKQPAYFTDACANEKNALVGNGKSYSTNEVTISMMDAR

SEQ ID NO: 265317 - protein, 109 aa, Glycine max
  Clone ID: PAT_MRT3847_81600C.1.pep
YLPSSCHLDGIFFVSRSDTKNASITGQRKSDRLKTPSAGLLVSLILLLPLCPFCFQINLLPDNASIKNSMLVVFSFSLKKKKKKKKGARSIGYQALRTRCIADVYSFLL

SEQ ID NO: 265318 - protein, 455 aa, Glycine max
  Clone ID: PAT_MRT3847_81601C.1.pep
RFQHVQSGEHMAAMGVFFLLQVFFFLDWVKHLLSDTKLFQAFLRITVTSAVAVGAVALGVGMASGYNSARAGRFYSLLDPTYAKDHIPIIASVSEHQPTAWSSFMFDFHILLFLFPAGLYFCFKRLSDATIFLVMYGLTSMYFAGVMVRLILVATPAVCLISAIAVSATVKNLARVVRAKSPAVQSGSTKGTNSAKSSSKGVVDNSQPFQKNGAIVLLLGAFYLLSRYVIHCTWVTSEAYSSPSIVLAARGAHGNRVIFDDYREAYFWLRQNTPPDAKVMSWWDYGYQITAMGNRTVIVDNNTWNNTHIATVGRAMSSYEDEAYEIMRSLDVDYVLVVFGGVTGYSSDDINKFLWMVRIGGGVFPVIKEPDYLVNGEYRVDKGAAPKMLNCLMYKLSYYRFGELTTEYGKPPGYDRARGVEMGNKDIKLEYLEEAFTTQNWIVRIYKVKPPKNRW

SEQ ID NO: 265319 - protein, 66 aa, Glycine max
  Clone ID: PAT_MRT3847_81602C.1.pep
STFITANVHTHFNEHHPNIASDDNHMVHISRDLDIAKDALMHVLTQVKTNLGEMEGALSTILPVLS

SEQ ID NO: 265320 - protein, 62 aa, Glycine max
  Clone ID: PAT_MRT3847_81603C.1.pep
NDIMLKTTFLITATRVYNLRPRCVWNQSVTQSPIPALWNISQGPESLFTCTNFVSTSTRGHY

SEQ ID NO: 265321 - protein, 150 aa, Glycine max
  Clone ID: PAT_MRT3847_81604C.1.pep
MAENLIAPKLPVEGKRNILITSALPYVNNVPHLGNIIGCVLSADVFARYCRLRGYNAIYICGTDEYGTATETKAMEENCSPKEICDKYHAIHKEVYNWFNISFDEFGRTSSPEQTEVCQAIFRKIFQNKWLSENTMQQLYCNTCERFLAD

SEQ ID NO: 265322 - protein, 46 aa, Glycine max
  Clone ID: PAT_MRT3847_81605C.1.pep
FIVTIKLPMILSHIGCWLAVFRFKITLIYVTHDFIINRLQLLFVFN

SEQ ID NO: 265323 - protein, 61 aa, Glycine max
  Clone ID: PAT_MRT3847_81606C.1.pep
NSSMMDKGWCFTILYVSRYVELQVSHIYEARILLPVQNVTVCLTCFSSSLAISECAITCIL

SEQ ID NO: 265324 - protein, 97 aa, Glycine max
  Clone ID: PAT_MRT3847_81607C.1.pep
QPLHGVCGIFWFLALLHSLFPLCIFWCRANYNWPASSILSPGLPSLLLPLSSRSLGPLLFIIIVYCIGPHWYEGNISQNELLSFLFYRIFNAYGYSL

SEQ ID NO: 265325 - protein, 169 aa, Glycine max
  Clone ID: PAT_MRT3847_81608C.1.pep
MQLSSNVLIPANKPPRPLFFKPRFCSNPNSPESNSLQAETLKTLEWGSVCKQLSAFTSTSMGSAAALNARLPIGRTRRDSQRLLDQTSAARLVAEPLDFSGVHDLTEILGVATSGHLLTIRELCTVRHTLAAARELDALKRVASASNHPQRYLPLLDILQNCNFQVGFE

SEQ ID NO: 265326 - protein, 140 aa, Glycine max
  Clone ID: PAT_MRT3847_81609C.1.pep
MVNKFLPLIIFVFLLIDTAICRHHHRHSHHHHQQNEQPEMISVPLRRMDTVRARLALTGSLEQFRKHRTESLRRTVEQMNNNYNNNEEVGTEIDELLRNYMDAQYYGDIFIGSPAQNFTVIFDTGSSNLWVPSKKCPIYD

SEQ ID NO: 265327 - protein, 97 aa, Glycine max
  Clone ID: PAT_MRT3847_8160C.1.pep
TMELNNCLLLRIQVSQFTRSVEKTKVLVPSAETQGKVVFRVIWGVLKDDKSYGEPVLHFKFVVSSSRLADKYSTYCINSEHSSFLLARESRERSIVK

SEQ ID NO: 265328 - protein, 81 aa, Glycine max
  Clone ID: PAT_MRT3847_81610C.1.pep
DELTLEGIKQSHVYAEKDEWKLDTLCDLYDTLAISQSDISANTTRKVDWLTDTMQIRHHTASVTHGDMVYTTKDIIMHEYR

SEQ ID NO: 265329 - protein, 59 aa, Glycine max
  unsure (1)..(59): unsure at all Xaa locations
  Clone ID: PAT_MRT3847_81611C.1.pep
XXRQGREFQLIDGWETMGSSIQSRKNKYSGNMTEENFRKFDRLFTILTFYEYLNYLDYM

SEQ ID NO: 265330 - protein, 105 aa, Glycine max
  Clone ID: PAT_MRT3847_81612C.1.pep
MSEIKKMDCFEDQTSGKDSDAYSPLEEREHAQTQKASQLVLTILRVRSASIKTLLLSASGCGCALQRSNKRMNGVLVTTYEVEQLTAMLRQFWRRPYLTPHYRFN

SEQ ID NO: 265331 - protein, 54 aa, Glycine max
  Clone ID: PAT_MRT3847_81613C.1.pep
GNTVPKGYGLGIHLSLIKLCRSRRKKNKVYRIGNKPLFIENGMEAGKYNMVYSQ

SEQ ID NO: 265332 - protein, 65 aa, Glycine max
  unsure (1)..(65): unsure at all Xaa locations
  Clone ID: PAT_MRT3847_81614C.1.pep
XXXXXXXGRHKYALSTGWRSLTRTPFRVDEASDIYFKDTTVIISGSLKDTRLSPSCASRLVQCWA

SEQ ID NO: 265333 - protein, 27 aa, Glycine max
  Clone ID: PAT_MRT3847_81615C.1.pep
FPTAMAPLLPIFMVVTCTCQFSVLPLL

SEQ ID NO: 265334 - protein, 273 aa, Glycine max
  Clone ID: PAT_MRT3847_81616C.1.pep
AMPGAASGTAVAPLAPIPAQLPVGPCPPSSIPGAHAGVGSARWTGPLGRLFARLTRLAPCMALECSASHSGSKRCSPMPRLQPLSPIPTTSIAGAVAGVSSTLCTYPLELLKTRLTVQRGVYKNLLDAFVRIVQEEGPAELYRGLAPSLIGVIPYAAPNYFAYDTLRKAYKKAFKKEEIGNVMTLLIGSAAGAISSSATFPLEVARKHMQAGALNGRQYGNMLHALVSILEKEGVGGLYRGLGPSCLKLVPAAGISFMCYEACKRILVENEQD

SEQ ID NO: 265335 - protein, 48 aa, Glycine max
  Clone ID: PAT_MRT3847_81617C.1.pep
LSRAYLQRRAKYTLVDWTPSRGKNLPDAGTRNYQFPPIFRHSSGLGGD

SEQ ID NO: 265336 - protein, 144 aa, Glycine max
  Clone ID: PAT_MRT3847_81618C.1.pep
AKEKGTLGETPQPPPPKRPLKGGGPYPKKVGNSWERGTGRAPSQITQPGKRGRAAKRKKWGTPRVSPAPRGKNPAPEIKLGGPKKKKKTCKQAEGKLGPPKRPPPPFIFLLIFIFFFFFFFFFFFFFFKINLFSFFFFFFPRDR

SEQ ID NO: 265337 - protein, 60 aa, Glycine max
  Clone ID: PAT_MRT3847_81619C.1.pep
AIAVESVCVVCVHPQNMHCLSFATFDYSFAFKTLSIRPLFNISRAGESSLAPFGKKHPRV

SEQ ID NO: 265338 - protein, 54 aa, Glycine max
  Clone ID: PAT_MRT3847_8161C.1.pep
LLCLSKLAIARLMRFPNGLALLRTAVIRYGAPSKAWGPMWTINALPYFAHLPIT

SEQ ID NO: 265339 - protein, 144 aa, Glycine max
  unsure (1)..(144): unsure at all Xaa locations
  Clone ID: PAT_MRT3847_81620C.1.pep
GKATNLRGQVSLPTLGAGEDAYDVHFEWDRRLXIPGAFYIHNLMPGESYLKSVTLGDISNHGTIHWVCDCWVYNSISYHSDRILFGNNTYLTXETPATLVKFREEDLQNVRWDGSGERNEWDRIYDYDVYNDLCDAYEGERYAR

SEQ ID NO: 265340 - protein, 63 aa, Glycine max
  Clone ID: PAT_MRT3847_81621C.1.pep
MLVTLKKKKKKKKKKQKKKKKKKKKQKKKKKKKKKKKGGPPNKKPRHPENKFGTGPGRGTTFP

SEQ ID NO: 265341 - protein, 85 aa, Glycine max
  Clone ID: PAT_MRT3847_81622C.1.pep
SIKDSCVISEVLRCIHVSLLCVQQYPEDRPTMTSVIQMLGSEMDMVEPKEPGFFPRRILKEGNLCTNLNQVTSNDELSITSLSGR

SEQ ID NO: 265342 - protein, 241 aa, Glycine max
  Clone ID: PAT_MRT3847_81623C.1.pep
MVSSNTAELLREEIPVKQQPLTLSADIITGLVLVDVVNGFCTVGAGNLAPKEPDERISQMVKESLRLSKAFSERKWPIFAFLDCHHPDKPEPPYPPHCIIGSGEEKLVPDLLWLENDPNATLRQKECIDGFLGSTEKDGSNVFIDWVKNNQIKQILVAGICTDICVLDFVSSVLSVRNRGFLTPLENVIVSSQACATYDLPLHVAKTNKDFVSHPQELMHHVGLYIASGRGAHIASEVLFE

SEQ ID NO: 265343 - protein, 120 aa, Glycine max
  unsure (1)..(120): unsure at all Xaa locations
  Clone ID: PAT_MRT3847_81624C.1.pep
CPGQNKKPCWEQKTWGHFPLCLKFERQPPFCGAPIGGPKPLTKEHPSEFSLKLGFSPPPSAFVYLPKTQGFDFPGPAKNPPLSPRVFQFPGVSKKNLASLKSPWXVHPAFWVPKPFCPKC

SEQ ID NO: 265344 - protein, 40 aa, Glycine max
  Clone ID: PAT_MRT3847_81625C.1.pep
AQCPWTMTCNHTGRPDTSVNHQACESGRTLHSSCSTNPCL

SEQ ID NO: 265345 - protein, 129 aa, Glycine max
  unsure (1)..(129): unsure at all Xaa locations
  Clone ID: PAT_MRT3847_81626C.1.pep
SIVRFITGDDTFNDEMNSAAAYDTLYTDLVTDADNVIQNALDSXFNSVENAERNTVPKTTNKITVLADGETHIVLRIIESIDEANFGYSYSTVSGXAALANTTFNITLDSKPNAGPNGRPTGKLNVKCD

SEQ ID NO: 265346 - protein, 78 aa, Glycine max
  unsure (1)..(78): unsure at all Xaa locations
  Clone ID: PAT_MRT3847_81627C.1.pep
DHSVCFATMANFFAAIILALFAISILQTLLIAANEQXGHLYYNMIKYGSGSFKSYQCPSQCSRRCIHTQYHKPCMFFC

SEQ ID NO: 265347 - protein, 144 aa, Glycine max
  unsure (1)..(144): unsure at all Xaa locations
  Clone ID: PAT_MRT3847_81628C.1.pep
APTDGPTVHTSYIACVAIDLMTDQNDIYEAIRPIHDSQYKDICTRERHIYIPDLDYPXRLNXMRNRDIXYGCEVLIXYLMDPAQVAYAQYGIMRTLIPKMKDDEEGGRPLKMCIEKLNIMGLTANEDWRESEFMSQCIDYVYKD

SEQ ID NO: 265348 - protein, 107 aa, Glycine max
  Clone ID: PAT_MRT3847_81629C.1.pep
MAKFFAAMILALIAISMLQTVVMAANEQGGHLYDNKSKYGSGSVKRYQCPSQCSRRCSQTQYHKPCMFFCQKCCRKCLCVPPGYYGNKAVCPCYNNWKTKEGGPKCP

SEQ ID NO: 265349 - protein, 74 aa, Glycine max
  Clone ID: PAT_MRT3847_8162C.1.pep
MADYDRSVQHQSKETAFQALNSIIHRHFEKTLENERAIDRQKKELYKLVEIFFIFLGLVVLILAHSPRRQCRHC

SEQ ID NO: 265350 - protein, 113 aa, Glycine max
  unsure (1)..(113): unsure at all Xaa locations
  Clone ID: PAT_MRT3847_81630C.1.pep
TITGRKIIIDTYSRWLAHGGGAFCGEDPTNVDSSGAHIVRHSAKSIEASILPTRCITQVSYAIAGPEPLSVCADTYSTCKIHDEXILNIGKLNYDFKPGVIFINPYLNRGGNY

SEQ ID NO: 265351 - protein, 107 aa, Glycine max
  Clone ID: PAT_MRT3847_81631C.1.pep
MAKFFAAMILALFAISILQTVVMAANEQGGHLYDNKSKYGSGSVKSYQCPSQCSRRCSQTQYHKPCMFFCQKCCRTCLCVPPGYYGNKAVCPCYNNWKTKEGGPKCP

SEQ ID NO: 265352 - protein, 143 aa, Glycine max
  unsure (1)..(143): unsure at all Xaa locations
  Clone ID: PAT_MRT3847_81632C.1.pep
QQLFQIYLSHLQQPYLELQLVPFXXXXXQQGPXSXSVNFLNKQAISDIWRASAADLSRVYLGGYIYGRLAFPYQVAGVIYLYPPYLSKVLSGPYLPISFCCRSRSNLSWFSRSYGKYISSFSIWHGIFRSWRHLEVILYPIAS

SEQ ID NO: 265353 - protein, 111 aa, Glycine max
  Clone ID: PAT_MRT3847_81633C.1.pep
FIYINFWKLLRTPSNLHERTIMSFILCYIIKQWFICMSHYSPINAFSSSFIKLPSFFFGFLLLVPSSPWCFFFFYYFIFLIFNIHINFFIHHIIIHSLSSSILIKHLTNLI

SEQ ID NO: 265354 - protein, 317 aa, Glycine max
  unsure (1)..(317): unsure at all Xaa locations
  Clone ID: PAT_MRT3847_81634C.1.pep
MENTAGHNDDSKQKEAPKLAALLKEMKEGLDTVRRKIQSLTATVKEGQYPTADGFSYLEAKNLLLLNYCQSLVYYLLRKAKGLSIEDHPVVRSVVEIRLFLEKIRPIDKKQQYQIQKLIQASENATRSDIQNKEPVASNKSEDVSKYRPNPDMLVSKVDLTLQDGTXYYQPVKFAPTSMDLEKSSKYERNALRREKEILKQAKQSDYIRTLMNDMEEKPEEIRDFEGASREVDRYIAKMDERARQEEELFTRVPLTKQERKREKYLKKSRNGLQGLTESFYDEIKTLPFEDKTGEQVVGSSNGSRTNNRLKKRKRKH

SEQ ID NO: 265355 - protein, 77 aa, Glycine max
  Clone ID: PAT_MRT3847_81635C.1.pep
GPPNGPKTLGFDSSPLNLFFSQVPPPPSPQRVVPSLTPSEPRQGGTPVEETGGGQTVPRGNFLIPPWMVRCMFAKLG

SEQ ID NO: 265356 - protein, 91 aa, Glycine max
  Clone ID: PAT_MRT3847_81636C.1.pep
NKKELEQIIILGIHFEEIKWGRGIRRTLVRCRRRWVRCRCVALKYQKYRPHEGIERQRGWFRGVLLFSPTPNCVETGKMCPHSPCVVFSHR

SEQ ID NO: 265357 - protein, 53 aa, Glycine max
  Clone ID: PAT_MRT3847_81637C.1.pep
HYFLIYIYKLHMSGKHLDRDVGSIGWVLGMIYLFYLLILQQLFCVIQFIRSFQ

SEQ ID NO: 265358 - protein, 69 aa, Glycine max
  Clone ID: PAT_MRT3847_81638C.1.pep
VSIHSVSLVELRSLSCCCMVYSYRSLIVKRCLFFSGCLGKNNIVHRDPLPLMASPAILSYCSGVFEIIE

SEQ ID NO: 265359 - protein, 108 aa, Glycine max
  unsure (1)..(108): unsure at all Xaa locations
  Clone ID: PAT_MRT3847_81639C.1.pep
QLQLLRMNLTAVREVNEGMERHVEDSXSHCGASCNKLSLVDVGTGAGLPGIVLAITRPEWDVTLMESMNKRCVFLEHVVGVIGSSNIQIVRGRAEVAYTPVLLTSISV

SEQ ID NO: 265360 - protein, 59 aa, Glycine max
  unsure (1)..(59): unsure at all Xaa locations
  Clone ID: PAT_MRT3847_8163C.1.pep
VNEXYVRSEXCSXXKXRFXLXXLXXXRDEEVDGXRXXNLAXKRXXXXRXSXYXWVVYXT

SEQ ID NO: 265361 - protein, 61 aa, Glycine max
  Clone ID: PAT_MRT3847_81640C.1.pep
ISDGCTYHTPRNLQRRHTNTNQSKQLTCFILLGTTILCTRPPGPNDYNYQHHLAIQLHLPD

SEQ ID NO: 265362 - protein, 107 aa, Glycine max
  Clone ID: PAT_MRT3847_81641C.1.pep
HLAASGTCLVARLEPVYASPHEEVLPPLRAGSGSRASLAIWSPAGLSRVFSGWGTGGGLWGLPDRGGVLGLWDGTGGCGQVCYYVEELYHLGIDRTRFIIIFFGSLW

SEQ ID NO: 265363 - protein, 50 aa, Glycine max
  Clone ID: PAT_MRT3847_81642C.1.pep
GNKNSIQYNKEVSLYKYKRLEHKKGMEIIRCAGYKLIDDISSYISCSVIY

SEQ ID NO: 265364 - protein, 68 aa, Glycine max
  Clone ID: PAT_MRT3847_81643C.1.pep
NHHITIHNPSTSSSSSPNLITPIKPHQSITRFDAHDISQSLHRNLMHNNNNKKADFVDFFFFLWRDGN

SEQ ID NO: 265365 - protein, 80 aa, Glycine max
  Clone ID: PAT_MRT3847_81644C.1.pep
NKTLTHPRRGPLDPGKLLFIPMANTCFSCQLKFFYLHKLLVLFFGQSLHRTHFTTPLPGLAIEMVRPNICPSQLPFPNVF

SEQ ID NO: 265366 - protein, 72 aa, Glycine max
  Clone ID: PAT_MRT3847_81645C.1.pep
LYLHNQGAGADSMKWAGISSNCKSIHRTIMQTLLPVSDMYLTSTGVSRLNRRLRVRLVHRCPLSRLLTSGLT

SEQ ID NO: 265367 - protein, 52 aa, Glycine max
  Clone ID: PAT_MRT3847_81646C.1.pep
TNKRLTIIKGDCFNTAIPFLYISNTGAHSYQKHQLPALTPYNHKVSLLLSSN

SEQ ID NO: 265368 - protein, 154 aa, Glycine max
  Clone ID: PAT_MRT3847_81647C.1.pep
MALKLSSLSLHSSLRHQHPNSSHSNHRIPLRFFAPSLPPTSCLSGAASVSTFHRTLFAVTVRAFQSQDESKSSDVFEEEEKDEEISRQGEKKELAKQSIWSQIKEIVMFTGPATGLWICGPLMSLIDTAVIGQRSSIELAALGPATVVCDYMSY

SEQ ID NO: 265369 - protein, 187 aa, Glycine max
  unsure (1)..(187): unsure at all Xaa locations
  Clone ID: PAT_MRT3847_81648C.1.pep
LEARDSVPNSVTMVNVLQACAGLAALEQGKLIHGYILRRGLDSILPVLNALITMYGRCGEILMGQRVFDNMKNRDVVSWNSLISIYGMHGFGKKAIQIFXNMIHQGGSPSYISFITVLGACSHAGLVEEGKILFESMLSKYRIHPGMEHYACMVDLLGRANRLDEAIKLIEDMHFEPGPTVWGSLLG

SEQ ID NO: 265370 - protein, 71 aa, Glycine max
  Clone ID: PAT_MRT3847_81649C.1.pep
SGRALLFFFHSQQNLQYFPFITYTMTTSILEFWALPFTEPASLYFYPLMEPCITNITFYKRATSTIIFLYT

SEQ ID NO: 265371 - protein, 431 aa, Glycine max
  unsure (1)..(431): unsure at all Xaa locations
  Clone ID: PAT_MRT3847_8164C.1.pep
MGICIHLRRESMMTMRCLVILKLIEKLSKNLVLQMLKIVILYGDAFVTNKQSEDRRLPNAILPLLRYCQCESSESSCSFQLSSCDDRNLRRKEDDIYTEIMILSHREGLNDLXDILEWAMTHYWELFEIISVFYCLTDLAIASLHKIYHWHPIHSGEKYRPASTFLHSSVSTIDSKXRIKSFLFVEAHNFLLDDVQAASLSIWAVSCMCGTLRLENVLTFFAGAQLEKQIVFVCSNLGILSASVLSVIPLIRPYQWQSLLMPVLPNGMLEFLDAPVPYIVGIKNKTNEVQSKLTNNVILIDVSRNQVKSSTVPQLPRQKELISSLRPYHETLVGESYLGRRRPVYECTEVQTEAAKGFLSELRSYLDSLCYNIRSHTITNVQSNDDKVSLLLKESFIDSFPYRDQPFMKLFVDTQLFSVHTDIVLSFFQKE

SEQ ID NO: 265372 - protein, 35 aa, Glycine max
  Clone ID: PAT_MRT3847_81650C.1.pep
NSARVFLFQLCLISEDLSHHRLSSLFILCFAPSWK

SEQ ID NO: 265373 - protein, 92 aa, Glycine max
  unsure (1)..(92): unsure at all Xaa locations
  Clone ID: PAT_MRT3847_81651C.1.pep
XXXNEFIXXKFSMAHXGQGIPSNVLHDMFEGGNQWTTQEGLGLYMSRKILSRISGHVQYVREQNKCYFLIDLEIRKRKERKRNLHAETSMLS

SEQ ID NO: 265374 - protein, 74 aa, Glycine max
  unsure (1)..(74): unsure at all Xaa locations
  Clone ID: PAT_MRT3847_81652C.1.pep
KWIGNTXVKKKXLIIIHFIVYLFVINKYCSSTMTTKFXKYLKGYNSTTVSPPTSXNWRGTQKISVDYFGVLVII

SEQ ID NO: 265375 - protein, 55 aa, Glycine max
  unsure (1)..(55): unsure at all Xaa locations
  Clone ID: PAT_MRT3847_81653C.1.pep
GTRPSCGTEYTFFFGTILPISNGGSTSTVPCSNRGTXMDSDSTPGLITFPERSTA

SEQ ID NO: 265376 - protein, 63 aa, Glycine max
  Clone ID: PAT_MRT3847_81654C.1.pep
NSNIIKNNRKLQACGEPKHLRFKITKLLHRDSLHAKAPLSIQTFDDATWFSFLALVCVSASSF

SEQ ID NO: 265377 - protein, 63 aa, Glycine max
  unsure (1)..(63): unsure at all Xaa locations
  Clone ID: PAT_MRT3847_81655C.1.pep
GKSILLLRFVNGQFLQFYFSTIGAGVFSQTLAGNDSTVNLYILDTLXQYRYHILASMYYICSF

SEQ ID NO: 265378 - protein, 76 aa, Glycine max
  unsure (1)..(76): unsure at all Xaa locations
  Clone ID: PAT_MRT3847_81656C.1.pep
ILKNLNLSDTTKKENAEYIWIGGSRMDLMSKERTLPGPASDPSELPKWNYDGXSSTRQAPGENRXMILYPQAIFRE

SEQ ID NO: 265379 - protein, 48 aa, Glycine max
  Clone ID: PAT_MRT3847_81657C.1.pep
YIRGPKYFGNLIFWVPFQGRPACPYLGCPGASFFKTRFFNLVMGGGFL

SEQ ID NO: 265380 - protein, 249 aa, Glycine max
  unsure (1)..(249): unsure at all Xaa locations
  Clone ID: PAT_MRT3847_81658C.1.pep
MDFHGGGPLRSRSSQSPSPSHSASASATSSIHKRKLVSEDHAPPFPPSSFSADTRDGALTSNDDLESISARGADSDSDSESEDAVVDDDEDDYDNDNDNDSSMRTFTASRLSNPPSAPRNTKLKTENSTVKIENSDGAKDAGAVGSGAAAAAGPVPGIVVKEDPTKIFTDNLQTSGAYTAREESLKKEEEAGKLKFVCLSNDGVDEHMVXLIGLKNIFARQLPNMPKEYIVRLVMDRSHKSVMVIRRNH

SEQ ID NO: 265381 - protein, 34 aa, Glycine max
  Clone ID: PAT_MRT3847_81659C.1.pep
TETLTDLFDATPAEASQHFRGASYNRIQYRRERR

SEQ ID NO: 265382 - protein, 247 aa, Glycine max
  unsure (1)..(247): unsure at all Xaa locations
  Clone ID: PAT_MRT3847_8165C.1.pep
RFLAVHNITITDGIDKTSATLQFRKLADCDFLKRNCTQMSNVLWVAPADKASLWSQLHYGSCDNLEMQEAFLVNLVNVPRELYLHSPKEARQLRRKALYRIERLHTACWPTIAQIEEFHSMHRMMNAPDSNDNIDLLLSIDLLGLQGAGKAFSNKIVFDDKLVLANTQKFFDGNFSGDSWLPIFGNWLYSCRQIPLKTGVVXVHCGVDAGGLPTTGWIKFGVTNCSLNINKRISTALGKGKKNVFFT

SEQ ID NO: 265383 - protein, 84 aa, Glycine max
  unsure (1)..(84): unsure at all Xaa locations
  Clone ID: PAT_MRT3847_81660C.1.pep
PFLMPIDDFFSIHGQCIHVPLDGVGNESLKFVIKSXLFGLMQGGPLKTTLSGFEMFNMILDQGQAGDNVGLLLRGLNREDIQKY

SEQ ID NO: 265384 - protein, 286 aa, Glycine max
  unsure (1)..(286): unsure at all Xaa locations
  Clone ID: PAT_MRT3847_81661C.1.pep
MMKGKVKSSKLKLGVPTLFILCALFFFVGFFVSPLLFQDLDDVGPRSRILQESVKKEYEPLEHGESGEPFVDSIPSQILSWRPRAVFFPNFTSVEVCQQIIEMAKPKLEPSKLALRKGETAESTKDTRTSSGTFISASEDKSGILDLVERKIAKVTMIPRTHGEIFNILKYEVGQKYDSHYDAFNPDEYXXVESQRIASFLLYLSNVEAGGETMFPYEGGLNIDRGYDYQKCIGLKVKPRQGDGLLFYSLLPNGKIDKTSLHGSCPVIKGEKWVATKWIDDREQHY

SEQ ID NO: 265385 - protein, 64 aa, Glycine max
  unsure (1)..(64): unsure at all Xaa locations
  Clone ID: PAT_MRT3847_81662C.1.pep
SALHGVYRLRGGIIEPSPRGVAGKSNQGKMICREXYASLHPRAVICCNNKCGHSNQLGPNNKIE

SEQ ID NO: 265386 - protein, 619 aa, Glycine max
  unsure (1)..(619): unsure at all Xaa locations
  Clone ID: PAT_MRT3847_81663C.1.pep
MFFPKNTSVLIRRVPGRPRLPIVTEIEQKVENKVVESEPENGSLPAEDTSAMKYPEDSDWDEFGNDLYSIPDQVPVQSSNLIPEAPPPSKADEDSKIKAFLDTPALDWQRQGSDFGTGRGFGRGTGGRMGGGRGFGMERKTPPQGYVCHRCKVPGHFIQHCPTNGDPNFDMRKVKQPTGIPRSMLMVNPQGSYALPNGSVAVLKPNEAAFEKEIEGMPSTRSVGDLPPELRXPLCYDVMKDAVLTSKCCFKSFCDRCIRDYIISKSICVCGATNILADDLLPNKTLRDTINRILESGNSSAENAGSTFQAQDMESARCPQPKIPSPTSSAASKGELKVSPVNEKTTNIQETTDDRKAVSAPQQTSEQVRNPRAADISEATHESMSVKEPASQWSAQQVEEEVQQKLVPTEAGKKKKKKKVRLLPNDLQWKTPHDFGAENYMMPMVPPAGYNSYWNGMQPMDGFMAPYGNPMQMMGYGLGPLDMPFGGMPQDPFGMQGYMMPGFPPHXDLADFSMGMNAPAPVMSREEFEARKADMRRKRENDRRPERDFSKDRDFGREVSSVGDVSSMKSKTRSIPPSSGSDYHHPRFRSERHSPDRSPREVEPPPPRPTKRKSDHNSD

SEQ ID NO: 265387 - protein, 287 aa, Glycine max
  Clone ID: PAT_MRT3847_81664C.1.pep
FWCTGFPPHRDLADFSMGMNAPPPVMSREEFEARKADMRRKRENDRRPERDFSKDRDFGREVSSVGDVSSMKSKTRSIPPSSGSDYHHPRFRSERHSPDRSPREVEPPPPRPTKRKSDHNSDREREDRDRDYEHERHHHNRHQRSESSSRRSSEPVAKASSTASAAAAAAAADRKQKASVFSRISFPAEEELPKKRKVTASSTTEPAAAAAAAAAAPTASSAHLKTMSNGYYEGRKSSSAVADYESSDDERHFKRRPSRYEPSPPPQPAEWEEEGRHSRGTRERKHR

SEQ ID NO: 265388 - protein, 69 aa, Glycine max
  Clone ID: PAT_MRT3847_81665C.1.pep
KLAHILFMCPKVNLIWKHWYRWVQLVTVLPRNVEDHMWQHGASIKDEVEQERQYVLWLCHYMVCMEEKE

SEQ ID NO: 265389 - protein, 359 aa, Glycine max
  Clone ID: PAT_MRT3847_81666C.1.pep
PRAVYYKFKSARDYDSIPMDGPFISVGTLKEKIFESKHLGRGTDFDLVVTNAQTNEEYLDEEMLIPKNTSVLIRRVPGRPRLPIVTEIEQKVENKVVESEPENGSLPAEDTSAMKYPEDSDWDEFGNDLYSIPDQVPVQSSNLIPEAPPPSKADEDSKIKAFLDTPALDWQRQGSDFGTGRGFGRGTGGRMGGGRGFGMERKTPPQGYVCHRCKVPGHFIQHCPTNGDPNYDMRKVKQPTGIPRSMLMVNPQGSYALPNGSVAVLKPNEAAFEKEIEGMPSTRSVGELPPELRCPLCNDVMKDAVLTSKCCFKSFCDRCMFFIHLLYLGFSEFEYYAFMLMFLWFVVLPHHASTEQFRC

SEQ ID NO: 265390 - protein, 93 aa, Glycine max
  unsure (1)..(93): unsure at all Xaa locations
  Clone ID: PAT_MRT3847_81667C.1.pep
GALSLWFSSSSFSYISXFXXSXXXAETMAGKGEGXAIGXDXREPPTLVXXXGKIXXVEXMAKXXRXXDRRRXXVXFXDTGGXIGMGXKNQXGQ

SEQ ID NO: 265391 - protein, 116 aa, Glycine max
  Clone ID: PAT_MRT3847_81668C.1.pep
PTLKAFPKPPLFKQENLSTKVYKKNPHPPGKGYLALAPRGGFFFNKGNGKNFISLNTWPKKKKKTHPPWFAPEKKNPLWGGSTGKKNKSCIKNAKSKTKISQPTHNPIFEKAPIGP

SEQ ID NO: 265392 - protein, 87 aa, Glycine max
  Clone ID: PAT_MRT3847_81669C.1.pep
LTIRKEWCPRRVRGGISGGTHTRGPAVRQEVGRVGKTTLWGARWLPLDISLHTKGIKMRIRYRYLADMKVAAAYLLGVGGGNPSRSG

SEQ ID NO: 265393 - protein, 275 aa, Glycine max
  unsure (1)..(275): unsure at all Xaa locations
  Clone ID: PAT_MRT3847_8166C.1.pep
LCVRSFLAGHNLTITEGIDKTSATLQFTKLADSDFLKRNFKQMSNAVWVAPEDTASLWSQLHYVSCNNPEMHEAYRDNLVNESREXYLHSPEEARQLRRKALSRIEWLQKADEPTIAQIEEFHSMQRMMNAPDSNDNIDLXQSIDLLGLQGAGKAFPNKIVFNDKLVLANTQEFFDGNFPVDSWLPIFVNSLYPASQLPSEAVACNVTCGSGRGGLPTTAWISSAVNNRSSDINKKIRTALWKGKKIVVLTRVDPFSEAYWLSFGVRMNFESTPY

SEQ ID NO: 265394 - protein, 106 aa, Glycine max
  unsure (1)..(106): unsure at all Xaa locations
  Clone ID: PAT_MRT3847_81670C.1.pep
IDQMDGEXILQLVRTANVGSLLTSYECPGDDTLFVCHSLLXVIEPRVDNPGLKLGVYKWVGRIYNLMDECDNYIAIPQRQTDLPFLLNVEDGSYITHRETVATGRV

SEQ ID NO: 265395 - protein, 82 aa, Glycine max
  unsure (1)..(82): unsure at all Xaa locations
  Clone ID: PAT_MRT3847_81671C.1.pep
MVETDMDAETVSNVDPPNETPNTVPIYYHFSHSHSPLNERIISYMTTTSCAAHPWHDLEIGPDAPTIFNXSNEIVKGSKVKY

SEQ ID NO: 265396 - protein, 105 aa, Glycine max
  unsure (1)..(105): unsure at all Xaa locations
  Clone ID: PAT_MRT3847_81672C.1.pep
FCWLRRGCLSVLSCXXGCCVSSLXVLGXPSVLPXSWCVVSSALPLSVPAAGFXVFLFLRVGLPSRGGPVLSSCGXLXLRXAXPGGGAGGVSLXXPLVCLGXSRQR

SEQ ID NO: 265397 - protein, 137 aa, Glycine max
  unsure (1)..(137): unsure at all Xaa locations
  Clone ID: PAT_MRT3847_81673C.1.pep
TQVANHIFQIRALSKRESELNKKERELLDFQVKLASRESDETHKVTAVQEAELIARKTNFEAELQXVENEIEMRRRAWELKEVDLTQREEQLLERKHELEILSRTLGEKEKDLLDMSSALKEKDQSLKASEKELELK

SEQ ID NO: 265398 - protein, 130 aa, Glycine max
  Clone ID: PAT_MRT3847_81674C.1.pep
TIWKFCIFTKKKKNISWGGKEHRGFWEKKKKIKLVPPGSWLGKERKYRKRGGGQRGARNWVSNTDKKLARFPALGVCRFIQEPGEKHKVCFFAYPVTNNSGGGGTRPPKKESYPAPLEGWLKKKTQRGGE

SEQ ID NO: 265399 - protein, 102 aa, Glycine max
  Clone ID: PAT_MRT3847_81675C.1.pep
FISYGKKYLASHELKHSAEISLQVDSCFTLWHFYPEQVNDTRPLLNALGNAKTNPYGAPWASKSRVLQGWDQTQTLFPQIFVPRETPNWLHKYLTSKPDLKG

SEQ ID NO: 265400 - protein, 94 aa, Glycine max
  Clone ID: PAT_MRT3847_81677C.1.pep
FQRKRIVNIQLFIGFSEMDRDFMGLNLKEPLAVATEEMNNDGCTNYGFKKRRIAQRPFSNKVSALPHLMSIKASHDGKTNNTMDDTLSSAGYMY

SEQ ID NO: 265401 - protein, 119 aa, Glycine max
  Clone ID: PAT_MRT3847_81678C.1.pep
VTGKALMLYEIINYVQSLQNQVEFLSMKLASVNPMFYDLATDLDTLLVRPEKLNSMASPSPPLPSVSHCNSPNNQATTFADTTTMTPTNIFHIASDYLLDNSVSFFLQGQRSHVFSEEV

SEQ ID NO: 265402 - protein, 48 aa, Glycine max
  Clone ID: PAT_MRT3847_81679C.1.pep
LSRSARRACGRHLLPETSSVGILVYKSENVVGARGARCFTGEEGTLWE

SEQ ID NO: 265403 - protein, 42 aa, Glycine max
  Clone ID: PAT_MRT3847_8167C.1.pep
NERNKMSYFSITKDEEAYNGRSTLPMNRPPSSRKPLSRSTRT

SEQ ID NO: 265404 - protein, 173 aa, Glycine max
  Clone ID: PAT_MRT3847_81680C.1.pep
MANQGAKKRKEENARHMARLRQIIIACNVIYVLLRMLVFHSSFTWKHWIGLIVTSLAYVIPYQQLAKMATPAYAEDGELLDGGFDMSTGGVCGYLHDVIYITCFVQVMSIVSGKFWYTYLVIPAFGAYQSFGFIKGFLPGGSEESFEDEKTRKKREKMEKKASRPKFAKTRTR

SEQ ID NO: 265405 - protein, 72 aa, Glycine max
  Clone ID: PAT_MRT3847_81681C.1.pep
MLFWTLGHKKVVPIIPFGASPNVLVSTDCIFGRGPIFLNWVIKLDELIVRDRGPFYQSGIGCVGIDVKHLLD

SEQ ID NO: 265406 - protein, 145 aa, Glycine max
  unsure (1)..(145): unsure at all Xaa locations
  Clone ID: PAT_MRT3847_81682C.1.pep
TGYPTLKTNYDIPDIVHNGANKPCIFFCTPVPHNHFETHTYQPDLNDAQKSNQXNTLIRIAESPAKEXPVNLNFVYPCHTXTPEYYKVTYLPIYQTTICESPADSPQPHAPLEDKTTYPNGPIRNIGVNNGLLLQGIHFIAYKSP

SEQ ID NO: 265407 - protein, 78 aa, Glycine max
  unsure (1)..(78): unsure at all Xaa locations
  Clone ID: PAT_MRT3847_81683C.1.pep
FKTNAAPAKTKVTTPKTPVEDGLFGTSGXFGFTKQNELFVGPVAMLGSASSLXVEGITEEGILAQLTLETGIPLYDAE

SEQ ID NO: 265408 - protein, 73 aa, Glycine max
  Clone ID: PAT_MRT3847_81684C.1.pep
ISGLSEPNKRTIHSKGQCNTCVSMNTNSGTHIRTSVDLQSTNSIKGMIKKVERVAPTLPSVNRSGDRSLRRKI

SEQ ID NO: 265409 - protein, 42 aa, Glycine max
  Clone ID: PAT_MRT3847_81685C.1.pep
CCLQAETKFSFGLAPFLALRFSVCDTNLPVVKEWFSPDREVT

SEQ ID NO: 265410 - protein, 98 aa, Glycine max
  Clone ID: PAT_MRT3847_81686C.1.pep
HYEISIKEDQTRDREFVEKMNFNKKKMAGEVKCHKYSRRRPSDGWTFTVEKLGHQGKRGGGGGWKFASMPDGSSRPLNDMEKMYVKRETPRRRRRILP

SEQ ID NO: 265411 - protein, 329 aa, Glycine max
  Clone ID: PAT_MRT3847_81687C.1.pep
MQALHRLASSTHRVATSSLRHDSLLSRTTSRILSFSTDSPAGGGSFDAAWESSSSWSTGLAGDHFNGQSPSEVLSNLQDTEDRLFQLEAENRRGKAYCDSWRSRLEETTVLLKQVQEPGARGSYLKDSEKAEIYRLHKKNPEVYTVEKLARDYRIMRQRVHAILWLKEIEEDEEKKLGRPLDDSVEQLLDSCPEFFNSHDREFHVASLPYKPDFKVMPEGWDGITKDVDEVHYEISKKEDEMLYREFVEKMNFNKKKMAGEVKCHKYSRRRPSDGWTFTVEKLGSSGKRGGGGGWKFASMPDGSSRPLNEMEKMYVKRETPRRRRRILP

SEQ ID NO: 265412 - protein, 85 aa, Glycine max
  unsure (1)..(85): unsure at all Xaa locations
  Clone ID: PAT_MRT3847_81688C.1.pep
SIHTYTPTLRHSYIAVATSLGPEWDLLLTYPFIQKVAALDTTYVLQPYENGXVLDDDFYGKPTAHYYDSELSLISSGIKIANYIY

SEQ ID NO: 265413 - protein, 41 aa, Glycine max
  Clone ID: PAT_MRT3847_81689C.1.pep
RLKTLLYLTLAVAFTTHSLTQHGKRRRSEKLSAVAGNNYIG

SEQ ID NO: 265414 - protein, 63 aa, Glycine max
  unsure (1)..(63): unsure at all Xaa locations
  Clone ID: PAT_MRT3847_8168C.1.pep
GTXXXXXVXGTXLTXAIXVSRVAXXRFLPISXRXXLXFPLLYAXQIPTESWRRGIXGISLGSN

SEQ ID NO: 265415 - protein, 70 aa, Glycine max
  Clone ID: PAT_MRT3847_81690C.1.pep
IISSWHLRVAGSIMVAVTYQLILTEYRHFNGEGGGEIEKSFQDANREALSPHVMRTHLFMNQRHEMPQPY

SEQ ID NO: 265416 - protein, 108 aa, Glycine max
  Clone ID: PAT_MRT3847_81691C.1.pep
MPATTENNQGSFLGRISIRRNQVMSMDGSHDQKVEDLELFQKHVGDRFSELLFSTNTFFGDALLFIAWLRKILDEFLCCEAEFKAVVLMGRDPFQIAKPPVDKVLPEL

SEQ ID NO: 265417 - protein, 37 aa, Glycine max
  Clone ID: PAT_MRT3847_81692C.1.pep
DSAGDAEHKRMTSYKMFDRVDSAQDLCYSCPKKASSS

SEQ ID NO: 265418 - protein, 48 aa, Glycine max
  Clone ID: PAT_MRT3847_81693C.1.pep
PPHPLISWEKDCPPPTKWGLNPFWIKKLKGLEVLSKVLVFKIFWDKKF

SEQ ID NO: 265419 - protein, 129 aa, Glycine max
  unsure (1)..(129): unsure at all Xaa locations
  Clone ID: PAT_MRT3847_81694C.1.pep
MTPIRRFGGNDLFGLASVNLDHLTEPLKRSFYRTNLAGGPDYFHVAEGPGNGIRGSILGKVEGQGEFWLGQVTAGTVVPKFRRRQLAKKLLNLLEXIRANIVKAFLVDLLGGSVNAPAFKLFERLGFGI

SEQ ID NO: 265420 - protein, 127 aa, Glycine max
  unsure (1)..(127): unsure at all Xaa locations
  Clone ID: PAT_MRT3847_81695C.1.pep
KNTVGAKNLRQLAALYCGANAGFEIIHGLVDRVMEKMXVPFVSPGDKSGYYIERSDEPXFLAGRQSRIIYKGKHIGTFGIVHPEVLNNFDIPDPXSFVELNIESFLSWCSVSIKNFLSVTHLSNSPF

SEQ ID NO: 265421 - protein, 243 aa, Glycine max
  Clone ID: PAT_MRT3847_81696C.1.pep
MPTVSVGRDRLFAALGKTYTQEEFEDLCFSFGIELDDVTTEKAIVRKEKHLEEEEADEDEEVIYKIEVPANRYDLLCLEGLAQALRVFCEFQEIPTYKLSNISKDAMLKMHVKPETSLIRPYVVCAVLRGITFDKARYSSFIDLQDKLHQNICRRRTLVAIGTHDLDKLEGPFTYEALPPSSITFTPLKQERNFRADELMEFYKSDLKLKKFLHIIEDSPVFPVIYDSKRTGVSLPPIINGAH

SEQ ID NO: 265422 - protein, 136 aa, Glycine max
  unsure (1)..(136): unsure at all Xaa locations
  Clone ID: PAT_MRT3847_81697C.1.pep
PGILKTVAHXKDHPKPIKIFEVGDIAVLDDKRDVGAKNLRQLAALYCGANAGFEIIHGLVDRVMEKNGVPFVSPGDKSGYYIEQSDEPEFLAGRQARIIYKGKHIGTFGIVHPEVLNNFDIPDPCSFVELNIESFL

SEQ ID NO: 265423 - protein, 566 aa, Glycine max
  unsure (1)..(566): unsure at all Xaa locations
  Clone ID: PAT_MRT3847_81698C.1.pep
MPTVSVGRDRLFAALGKTYTQEEFEDLCFSFGIELDDVTTEKAIVRKEKHLDEEEADEDEEVIYKIEVPANRYDLLCLEGLAQALRVFCEFQEIPTYRLSKISKDAMLKMHVKPETSLIRPYVVCAVLRGITFDKARYNSFIDLQDKLHQNICRRRTLVAIGTHDLDTLEGPFTYEALSSGMANFNLLKFHNFYTITAEIAFLNSXVNPSKGYTYARLLDHLFVKQELLTPLSPVSHRIYSRIVXESCHAALXATATGWIEQLFLXFFIQTNREMKNSVIEWSKIPVEFCGFEDIYCVGQSDVPVILSDTHAIIFYKIKLLGAFCFVHLYVIDNINIPDPCSFVELKIEIVDNKAPKIFPASSVLLSLDHLSERIGKXVALIGFTEVLTFILCSKKENFAMLNRKDDKSKAAIIGNPRSSDFEAVRTSLMPGILKTVAHNKDHPKPIKIFEVGDIAVLHEQRDVGAKNLRQLAALYCGANAGFEIIHGLVDRVMEKNGVPFVSPGDKSGYYIERSDEPEFLAGRQARIIYKGKHIGTFGIVHPEVLNNFDIPDPCSFVELNIESFL

SEQ ID NO: 265424 - protein, 57 aa, Glycine max
  unsure (1)..(57): unsure at all Xaa locations
  Clone ID: PAT_MRT3847_81699C.1.pep
KGQNSVIFKGSKNVRETVKHFGPAPGVPHSHNXPYVRAKGKKFXRVRGRRNSRGFRV

SEQ ID NO: 265425 - protein, 303 aa, Glycine max
  unsure (1)..(303): unsure at all Xaa locations
  Clone ID: PAT_MRT3847_8169C.1.pep
DLLILERTHLLLACCSRLAICKKDVCRAVCGIPSGFPFTVICNIIFNEMLIKDSYEKLLRQAKAPSLFLQSFKNLDSLRVHGDDNSISVHEYVKPXYFSGSKLKSFLAGHNITITDGIDKTSATLQFRKLADCDFLKRNFKQMSNVLWVAPEDKASLWSQLHYVSCNNLEMQEAYLVNLVNVLRELYLHSPEEARQLRRKALSRIEWLQKADVPTIAQIEEFHSMQRMMNAPDSHDNIDLLLSIDLLGLQGAGKAFPHKISFDDXLCXANTQEFYDGYCAVDIWLPHLCELAVISVSEVPAEA

SEQ ID NO: 265426 - protein, 83 aa, Glycine max
  Clone ID: PAT_MRT3847_816C.1.pep
RLLFFTFSPEPNRPLSWPPIKSPRRRPRREAPDGKLRKPPTRNTFHSPYSRPPEATHQRWISKLEDPAYRLNVGGATRIFPSF

SEQ ID NO: 265427 - protein, 57 aa, Glycine max
  Clone ID: PAT_MRT3847_81700C.1.pep
HFSLVSDVLYKTDYQFVVIKGLKPQLDKAGSVGLRGNITPRIWAQEEKSKGSVHRFS

SEQ ID NO: 265428 - protein, 124 aa, Glycine max
  unsure (1)..(124): unsure at all Xaa locations
  Clone ID: PAT_MRT3847_81701C.1.pep
XXHXXXXTIXXXXXXTXXXXXXKSLXTXLXXAPXXQXKXXXTXXXXXXHXXPXXATXTXXWXXLPIXXXXMXXIXXXPHSXXHXXXXTHDXXXXXRXLXXSTLXXXLSXXRPXIHXXXXXXXTX

SEQ ID NO: 265429 - protein, 49 aa, Glycine max
  Clone ID: PAT_MRT3847_81702C.1.pep
SLTVMGTAVKVTKMICWPAPRLTTRYKVHSISSSSRAAYARPRNALRIS

SEQ ID NO: 265430 - protein, 84 aa, Glycine max
  unsure (1)..(84): unsure at all Xaa locations
  Clone ID: PAT_MRT3847_81703C.1.pep
DYWSVKILIPGYNMSDHTGGHGKSSKRKKPTQSSEFKPGCTGSKVYPVHALSAASRATASLVDQMYYYSLQYRHRLYVXLISYQ

SEQ ID NO: 265431 - protein, 117 aa, Glycine max
  unsure (1)..(117): unsure at all Xaa locations
  Clone ID: PAT_MRT3847_81704C.1.pep
WPLVKSFFFFFLGTNPSLAKKIAPIFFHHQILTLAVLAEALIMYSSGRGQTIPPXGGGKGPPKPIKKKKPQRRGYMGSNTNAPSCGLVCPTQRNKGRNSTMFGRNFFIARRLVFSLN

SEQ ID NO: 265432 - protein, 42 aa, Glycine max
  Clone ID: PAT_MRT3847_81705C.1.pep
SITHKYITCRLALQVQCIFFPKTSCRYILDRFLRLADAVVDR

SEQ ID NO: 265433 - protein, 79 aa, Glycine max
  Clone ID: PAT_MRT3847_81706C.1.pep
MFSGKDIVAVDSPVGRLGLSVCYDLRFPEMYQLLRFQHEAQVLLVPAAFTTVTGEAHWEILLRARAIETQCYVRIHFCI

SEQ ID NO: 265434 - protein, 129 aa, Glycine max
  unsure (1)..(129): unsure at all Xaa locations
  Clone ID: PAT_MRT3847_81707C.1.pep
VQPLLFSDPDGMVQRGLALTHQDEILTPAAHTIDSSFRNDHVDSYALPDSNLYANAYKNIIMTRGTTKLLLDMAPISKFAEMLYLNARSANYTMGRKIFTGAHSYRHXHYHDEAAILDSYRCMHSALSN

SEQ ID NO: 265435 - protein, 82 aa, Glycine max
  unsure (1)..(82): unsure at all Xaa locations
  Clone ID: PAT_MRT3847_81708C.1.pep
MAKLVFSHRFLVCSGCCLAFSSGEQTLENECQILTLHALIPDNRIRSXGGLIEAWYPSNKPFQCAGVXLSRCSLNRNALRRP

SEQ ID NO: 265436 - protein, 59 aa, Glycine max
  Clone ID: PAT_MRT3847_81709C.1.pep
CLGGCECFLMRGWKHYIFLQKNHIHATNTIIPCKSRSSSFSLPILVTPPTHLILAFGIL

SEQ ID NO: 265437 - protein, 116 aa, Glycine max
  unsure (1)..(116): unsure at all Xaa locations
  Clone ID: PAT_MRT3847_8170C.1.pep
QLPSEAVVVNVTCGSGRGGLPTTCXINSAVNNRSSDINKNIRTALGKGKKIVFLTRGDPLPVTLLAALCGAHNEILNSNATNPMLTRLLENCKSLKYMEDECPFTFSELLCSILFT

SEQ ID NO: 265438 - protein, 66 aa, Glycine max
  Clone ID: PAT_MRT3847_81710C.1.pep
SPDDMLYPRGGCLLVIDTPMALIPNQRTSLLCSLIPVITVSRSGLHHLRLLLPRKHLPHDTSLLFR

SEQ ID NO: 265439 - protein, 161 aa, Glycine max
  unsure (1)..(161): unsure at all Xaa locations
  Clone ID: PAT_MRT3847_81711C.1.pep
MFAKRLLHKAVQHHSNHKLQHGGLQGSELDPRIVIHYGIPSTASVLAFDPIQRLLAIGTLLKHENGIQDFRKIXIWGYSNXPWDGRLKVIGGDNIEGLLVSPKQLPYKYLEFLQNQGHLVGVLNDNDIHVWNLESRSLVCSLQWEFDITALSVSAVKISLL

SEQ ID NO: 265440 - protein, 130 aa, Glycine max
  Clone ID: PAT_MRT3847_81712C.1.pep
FKLCSKSGDLAMADMRFLKDDPWVYMKEKNPSLVSCGEVRNSVVHCYRGQVFVAREGALEVWSRAEQKENSEGNAEGFFRRNFVDKREDSERGVIKKIEGGGDRLFVSREDVEGIEVWESSHSAGAISVL

SEQ ID NO: 265441 - protein, 58 aa, Glycine max
  Clone ID: PAT_MRT3847_81713C.1.pep
VFPCFPGVRPSWQIQSMFVECYRVRVFSLCGLRYGFVSYPPPYLLCEKSHRVRGRVGR

SEQ ID NO: 265442 - protein, 53 aa, Glycine max
  Clone ID: PAT_MRT3847_81714C.1.pep
KRKVQQRIYYDILKTDGYNFSQLNQNEVLSLIKDSYNFPQLNQNEALRNFVKK

SEQ ID NO: 265443 - protein, 77 aa, Glycine max
  Clone ID: PAT_MRT3847_81715C.1.pep
MDDIFKDLWKLKIPAKASIFAGRLIRDRLPTKSNMRKRQIDINDSLCPFCSIKEETASHLFFDCSKTQHFGGNPYHG

SEQ ID NO: 265444 - protein, 126 aa, Glycine max
  Clone ID: PAT_MRT3847_81716C.1.pep
MSQLAEDWAHTEKFHNYLGVVVREKIPILHNSWKDVPDSLKDLVWDNILAKFDIPEAANAKIKVMSTVATRWRQFKSTMTTKFVYADSERQDKHDHSVKHGLDAETWEEFAASCKTLNWQVRCSCV

SEQ ID NO: 265445 - protein, 33 aa, Glycine max
  Clone ID: PAT_MRT3847_81717C.1.pep
FLNYNPIFKSRENKINTGFRLSPKTAHGSFNHI

SEQ ID NO: 265446 - protein, 158 aa, Glycine max
  Clone ID: PAT_MRT3847_81718C.1.pep
VEMIISQQNLIQDFEKENKANQVCTGSRDGKAKVITSSEDKVKRETLYVGSRTAPESQRGDMSDGHPFHASGNDVPKFVRNPVDVSCKVGFNCSSESFIPDGQLSESGPVTTNSSKTATSILEEATKLKDSADHYKNAGFEFESNETYFKSALKFLHG

SEQ ID NO: 265447 - protein, 216 aa, Glycine max
  Clone ID: PAT_MRT3847_81719C.1.pep
MARRAEEEYDYLFKVVLIGDSGVGKSNLLSRFTRNEFCLESKSTIGVEFATRTLQVEGRTVKAQIWDTAGQERYRAITSAYYRGALGALLVYDVTKPTTFENVSRWLKELRDHADANIVIMLIGNKTDLKHLRAVATEDAQGYSEKEGLSFIETSALEATNVEKAFQTILAEIYRIISKKSLSSNEPASANIKEGMTITVGGPQSNTSKPSCCTSS

SEQ ID NO: 265448 - protein, 111 aa, Glycine max
  unsure (1)..(111): unsure at all Xaa locations
  Clone ID: PAT_MRT3847_8171C.1.pep
GQVLYTSFAISLFEAMFLIWHYTYRPITKGENGNWTWIGVLASKLTFAFYWVLTQALTXNPEFRQPFKNRLSXRYEKKFPRVDIFVFTANPDIEPPMMVINTELSGIAYDY

SEQ ID NO: 265449 - protein, 217 aa, Glycine max
  Clone ID: PAT_MRT3847_81720C.1.pep
MARRAEEEYDYLFKVVLIGDSGVGKSNLLSRFTRNEFCLESKSTIGVEFATRTLQVEGRTVKAQIWDTAGQERYRAITSAYYRGALGALLVYDVTKPTTFENVSRWLKELRDHADANIVIMLIGNKTDLKHLRAVATEDAQGYAEKEGLSFIETSALEATNVENAFQTILAEIYRIISKKSLSSNDPAANIIKEGKTITVGGAPEPNTNKPSCCTSS

SEQ ID NO: 265450 - protein, 137 aa, Glycine max
  unsure (1)..(137): unsure at all Xaa locations
  Clone ID: PAT_MRT3847_81721C.1.pep
SCSPSSSWFSGLRLFLFFLGPXPSXWGXXCVPGFXXGSGSVASFPXXLVWRFXWXXXXASGAXXSWLRLVVVXXXWXLXXPPPWFGSXXALVLFLLFPPGXXFLXXLXLXCGXSXFSXGCCPPPGXPXXGSAPPPXP

SEQ ID NO: 265451 - protein, 99 aa, Glycine max
  Clone ID: PAT_MRT3847_81722C.1.pep
MTGKLVEFMWPALVANKILNKRLGSSNFIADYPSNNTDIPLLGHDQSSLSSKSILNDHKDTDKYKIFVSTWNVGGIAPDEGLNMEDLLETSNNSCDIYV

SEQ ID NO: 265452 - protein, 104 aa, Glycine max
  Clone ID: PAT_MRT3847_81723C.1.pep
MNKLLEKENDQSGSFLKKPHHEKYAPLKLIIMSASLDARAFSEYFGGAKAVHIQGRQFPVDIFYTRDGETEYVDASLITIFQIQLEEGPGDILVFLTGQEEIES

SEQ ID NO: 265453 - protein, 48 aa, Glycine max
  Clone ID: PAT_MRT3847_81724C.1.pep
AIQSSVQLKLFTLLEKIIETKTQIHPVIYTRSSQELEFDFDLQRVACS

SEQ ID NO: 265454 - protein, 129 aa, Glycine max
  Clone ID: PAT_MRT3847_81725C.1.pep
MGRRILNDALRSMVNAERRGKSMVELKPISTVMSSFLQIMKHHGYIKDFQVYDPHRVGRISVELQGRINDCKALMHRKDLKARDIEAYRLQTLPTHQWGYVVITTPDGILDHEEAIRKNVGGQVLGYFH

SEQ ID NO: 265455 - protein, 52 aa, Glycine max
  Clone ID: PAT_MRT3847_81726C.1.pep
MIVAMDLNASPVPEEDEDIFEEKIHVEEFHEPEERIETGADIARREREERKR

SEQ ID NO: 265456 - protein, 58 aa, Glycine max
  unsure (1)..(58): unsure at all Xaa locations
  Clone ID: PAT_MRT3847_81727C.1.pep
MIVAMDLNASPVPEEDEDIFEEKIHVEEFHEPEERXETGAXLARREREERKERFGERT

SEQ ID NO: 265457 - protein, 685 aa, Glycine max
  unsure (1)..(685): unsure at all Xaa locations
  Clone ID: PAT_MRT3847_81728C.1.pep
MIVSMDLNASPVPEEDEDIFEEKIHVEEFHEPEERIETGADIARREREERKRRLKRERPDDRPVHVSQSPGYDQLFHTKNQRSYDKSRLTPGWLDCPSSGQEIRCMIPLKETLCESSYDISRRITRYSLXLVIHQYQSLXGRKLGXAIDLTNTTRHYAVSDLKKECIKHFKMQWKWRASVPYNXCMNQHVYEVTHFVSPQTYSKDYIHVVFTXAQNSVGYTIVGYIMHSXCSVVTRAVXIFSEARTPGIYKPDYIDALYTFYHEKKPEMVVCPPTPEWKRSSEFDLNGEAVPDDDDDGVPDPDLQENHETDTRMTNDDVLGDEIPTDQQDALRQFCYQTLKLGVGARGHTQFPGSHPVSLNRDNLQLLRQRYYYATWKADGTRYMMLITMDGCYLIDRSFNFRRVQMRFPCRSTNDGLGEKTHHFTLLDGEMVIDTLPDSQKQERRYLIYDMMAINQVSIIERPFYERWKMLEKEVIEPRNHERHNIYQSRNPYYRYDXREPFRVRRKDFWLLSTVTKLLKEFIKRLSHEADGLIFQGWDDPYIPRTHEGLLKWKYAYLNSVDFLFEVDGDRELLFLNERGKKKLLEGNRVEFTDGSDPSLYSGKIIECSWDFDKLEWKYMRIRTDKSTPNEFNTYRKVLRSIRDNITEEDLLNEISEIIRLPMYADRIRIDSKANQHANVARRR

SEQ ID NO: 265458 - protein, 179 aa, Glycine max
  unsure (1)..(179): unsure at all Xaa locations
  Clone ID: PAT_MRT3847_81729C.1.pep
ERTKNGEPLGLVGTNYGCMNMAGFAANIGFNISSHFPCRVFSIHRSIWKFQIVCLKRREYSSSVPIRYISSTSCRVKILETALPVKSLGYCSCPDVNVLKINGGKDVQATIAHCEISQDPNEICPDLLFDDSEQDSFDQMEEVGELTIHEGGDSCDQELIQIDKFTSDVXEAAIKLLAS

SEQ ID NO: 265459 - protein, 231 aa, Glycine max
  unsure (1)..(231): unsure at all Xaa locations
  Clone ID: PAT_MRT3847_8172C.1.pep
GDLLWDGKRCTDSGTHVRCLHKLIVELEKSVSTLAGIECAKDEKRSRRKMLDXPKTRCFTILPMEDNLVDRQKFLNFVRFIMKKRDKLSCQVGINPYSMEWTGLANRLLSKGNDILCCDYASFDGLITKQVMSKMAEMINSLCGGDEKLMPXRTHLLLACCSRMAICKKDVWRVEXEIPSGFPLTDIGNSIFKERLIRYSYEKLLRQAKAPSLFLQSLRNXGSLSVYGEGN

SEQ ID NO: 265460 - protein, 213 aa, Glycine max
  unsure (1)..(213): unsure at all Xaa locations
  Clone ID: PAT_MRT3847_81730C.1.pep
AYVPAVSALNDSITALEMQTLAQVEDLTDHKYAEGGPQTAEDQNAMATDALPDFQDLQKRISAIEMAVKQMNESFKTKDEMREIQVLKSGISRHQGNIQASKYVTEMDEAKEQHRGGPSGEQKAKKSVSDVPVAEIEVLPKDIMLDQTSECSYRLSRRGTLENDDQMLELWETANKDGVIGLTRWQGARKRXSXLLDSHQKRATXGPKNQYXS

SEQ ID NO: 265461 - protein, 51 aa, Glycine max
  Clone ID: PAT_MRT3847_81731C.1.pep
IVRGLDFYAFGVHALGKCDVVPSSLWGNLVGVQGPLCFPGLNEESARNQYE

SEQ ID NO: 265462 - protein, 42 aa, Glycine max
  unsure (1)..(42): unsure at all Xaa locations
  Clone ID: PAT_MRT3847_81732C.1.pep
LSYTHNTNDFXCRLXLWTSKLXVLDQNGKTLSXXXXQHXXXX

SEQ ID NO: 265463 - protein, 156 aa, Glycine max
  unsure (1)..(156): unsure at all Xaa locations
  Clone ID: PAT_MRT3847_81733C.1.pep
MFSIVKEILASPXQMADQVSKLAEEAQNFRQECLELKSKTEKLAGLLRQAARNSNDLYERPTRRIIDDTEQVLDKALVLVTKCRANSLIKKLFTIIPATAFRKTSMQLENSVGDVQWLLRVSASADERDDEYLGLPPIAXNEPILCLIWEQVAILL

SEQ ID NO: 265464 - protein, 62 aa, Glycine max
  Clone ID: PAT_MRT3847_81734C.1.pep
DIFHNDVGTAIITIFFSPPLAQLTIVVSLSPVDTIRYCLCSHFHHCPSLFRLSPLLASKRFK

SEQ ID NO: 265465 - protein, 171 aa, Glycine max
  unsure (1)..(171): unsure at all Xaa locations
  Clone ID: PAT_MRT3847_81735C.1.pep
MARLIQWCGARWRCYCAPRRVIGQCRRALKFARFMSRFGKSYRSEEEMRERYEIFSQNLRFIRSHNKNRLPYTLSVNHFADWTWEEFKRHRLGAAQNCSATLNGNHKLTDAVLPPTKDWRKEGIVSDVKDQGSCGSCWTFSTTGALEAAYAQAFGKSIXLSEQQLVDCAGR

SEQ ID NO: 265466 - protein, 106 aa, Glycine max
  Clone ID: PAT_MRT3847_81736C.1.pep
MFCVQGAEDELKHAVAFVRPVSVAFQVVNGFHFYENGVFTSDTCGSTSQDVNHAVLAVGYGVENGVPYWLIKNSWGESWGENGYFKMELGKNMCGVATCASYPVVA

SEQ ID NO: 265467 - protein, 49 aa, Glycine max
  Clone ID: PAT_MRT3847_81737C.1.pep
FIYFLFYFKQEHSFFGFGYKKHIGWAYLPTEGTLFLFVPLKITKEPSIF

SEQ ID NO: 265468 - protein, 280 aa, Glycine max
  unsure (1)..(280): unsure at all Xaa locations
  Clone ID: PAT_MRT3847_81738C.1.pep
MSYSSVCQGLQSSVEPWLMEPRVLKLKLAPPGSKSNNTSTHSPVTPPPSNTNDAHGKNWSFFQSLSNISHCKEPQIENVYVHPSVKSSSSMLSAKSLELCTESLGCETGSNSSDNTDDMSLFFSLESXPSLRSNNNTPVINKNSESKRLNRGSTFPPPLTSMGGVRVRSHREDGRLILEAVTSSSPQPYFQVERGDGRLRLRLFESVASAYYEDDDGVADDEALNQEDAVVEEDLEEYIGNAEDEIGVTKFVRPSRCKESGKRVIFGDGYFEHFPLSLCL

SEQ ID NO: 265469 - protein, 96 aa, Glycine max
  Clone ID: PAT_MRT3847_81739C.1.pep
FFSTTINVIYFNKYGQVVLLVHRCRYYCCWLGVLAASSQSFQVCIHLCSLEFPSFTGLHNTHEICLFLFKNLLLTDLHLLPQIDDRLTCQLTFGWL

SEQ ID NO: 265470 - protein, 248 aa, Glycine max
  Clone ID: PAT_MRT3847_8173C.1.pep
DERLIGTEHEGYDPFLGGIQKYATPMMPLDEEILSKVAQDMVEEWFDCVDEEDSFEEVSLSAALNGVEGLDYMERIPLATSEGFPHVLSRKNGEKGKRRFVSGDGEEMTLIPGTSVEEAYNKLIVELEKSVPTLVGIECPKDEKLPRRKIFDKPKTRCFTILPMEFNLVVRQKFLKFVRFIMKKRDKLSCQVGINPYSMEWTGLANRLLSKGNYILCCDYASLDGLITKQVLSKMAAMINSLCGGDEN

SEQ ID NO: 265471 - protein, 355 aa, Glycine max
  unsure (1)..(355): unsure at all Xaa locations
  Clone ID: PAT_MRT3847_81740C.1.pep
MARLITVVWCAVAVLLCAAAGASWVEEAANPIRMVAGVEAEVVRVIGQCRRALKFARFMSRFGKSYRSEEEMRERYEIFSQNLRFIRSHNKNRLPYTLSVNHFADWTWEEFKRHRLGAAQNCSATLNGNHKLTDAVLPPTKDWRKEGIVSDVKDQGSCGSCWTFSTTGALEAAYAQAFGKSISLSEQQLVDCAGPFNNFGCNGGLPSQAFEYIXKYNGGLETEEAYPYTGKDGVCKFSAENVAVQVLDSVNITLGAENELKHAVAFVRPVSVAFQVVNGFHFYENGVYTSDICGSTSQDVNHAVLAVGYGVENGVPYWLIKNSWGESWGENGYFKMELGKNMCGVATCASYPVVA

SEQ ID NO: 265472 - protein, 84 aa, Glycine max
  Clone ID: PAT_MRT3847_81741C.1.pep
KATNAICILYEIDLKQLPDYVILYTRLHWFWFKDNYLNQFCISQEVKKHTRSKNIQNYVLHSNTFLGSLSISDRSSWLTAINPA

SEQ ID NO: 265473 - protein, 59 aa, Glycine max
  Clone ID: PAT_MRT3847_81742C.1.pep
KGSGFPNGAPKFGAGWEKHRITVTFVHWAHQCTKKKILSLGRNKLRFLTVEKKYGHLFH

SEQ ID NO: 265474 - protein, 34 aa, Glycine max
  Clone ID: PAT_MRT3847_81743C.1.pep
TYKRKLIMVRHEPIERIINCAPLTIDQMPIALSL

SEQ ID NO: 265475 - protein, 36 aa, Glycine max
  Clone ID: PAT_MRT3847_81744C.1.pep
AYRYTFLPYVVQMCPCHFLCQVVYFCSNFMLGCPLP

SEQ ID NO: 265476 - protein, 215 aa, Glycine max
  unsure (1)..(215): unsure at all Xaa locations
  Clone ID: PAT_MRT3847_81745C.1.pep
MCGDATNWDEDAYRETILKEREIQTRTVFRTAWAPPYTSNLDTLILASSDGSVASYSISSSIAASKIKNPFGFVNADTDELLAEPNCFVQAHDGPAYDVRFYGDGEDALLLSCGDDGRIRGWRWNEFSSSNYSVSSQGNDIKPVLDVVNPQHKGPWGALSPIPENNAIAVNTQGGSVFAASGDSCAYWWDVETXXVKMVFKGHMDYXHCIVARTH

SEQ ID NO: 265477 - protein, 167 aa, Glycine max
  Clone ID: PAT_MRT3847_81746C.1.pep
SSRAVTDDCRYKVVHAGGWHSGANARRNVTRTSAEIGSRTLPPRASARDDEINDTIPTLGSETNFRNGKYLYYSRGGDYCKGMNHYLWSFLCGLGEAMFLNRTFVMDLSVCLASTYNPSNKDEEGKDFRYYFDFEHLKETASIVEEGEFLRDGKNGDKTHLKKKKIP

SEQ ID NO: 265478 - protein, 27 aa, Glycine max
  Clone ID: PAT_MRT3847_81747C.1.pep
LCEPACTYYDLYFLLIVLNRTAISTSP

SEQ ID NO: 265479 - protein, 70 aa, Glycine max
  Clone ID: PAT_MRT3847_81748C.1.pep
SDFDEIVGVIGIVHSNSGKDEIYEERGLNSNSVVAATEDVQAENTSAAQNEIVEVVHPNTQPIQSNISLT

SEQ ID NO: 265480 - protein, 242 aa, Glycine max
  Clone ID: PAT_MRT3847_81749C.1.pep
MSEMVSALAQVMGTTNRNPYMPQSTSFPFSTSVVKDQPQPYPSQPPPDQEVAKKPHYRGVRQRPWGKWAAEIRDPKKAARVWLGTFETAEDAALAYDKAALKFKGTKAKLNFPERVHQDVPFMQQHQQRSSNRNVFPIHATSTTSSATGSVSSVDAVAPPSLSTHDQHGHQVFPNLYQYAQILSSDDAQLPYFTSHLFNQQQQQQQQQPFNSQFSSTFSSTSSYFYNQQQQYDQQGHDHSNH

SEQ ID NO: 265481 - protein, 65 aa, Glycine max
  Clone ID: PAT_MRT3847_8174C.1.pep
STEGLSAFASLNPALRSYYPGYVGLSVRPRLPKRVEIRAGGSMYGDHFGVLIIWSIAWRRCWLYD

SEQ ID NO: 265482 - protein, 134 aa, Glycine max
  unsure (1)..(134): unsure at all Xaa locations
  Clone ID: PAT_MRT3847_81750C.1.pep
KFSSPGLIVKKPSLPTKPGIPYRWAAFTQVFYRNWKETEGFVFPLFKKFIAPRIKVWVFHGDVDPMGPVPPPKYAPAPLKLSPXKPWDPWFVQNPVGGWAKVFQRVTFPPLKGAGPXVPLFKPQAALPFFQSFP

SEQ ID NO: 265483 - protein, 33 aa, Glycine max
  Clone ID: PAT_MRT3847_81751C.1.pep
ITLHVYLSGKNGYRYNVKSVKLEISGINIHVMS

SEQ ID NO: 265484 - protein, 90 aa, Glycine max
  unsure (1)..(90): unsure at all Xaa locations
  Clone ID: PAT_MRT3847_81752C.1.pep
VGITCKNGHTATKGCFRKAAEALILKIGKYGYVKRYPAGTDTPIVKKSEDTAFLLYNRDAFYANCIDHXSTDTVEDGPPSSSIEXGNIKD

SEQ ID NO: 265485 - protein, 107 aa, Glycine max
  Clone ID: PAT_MRT3847_81753C.1.pep
NTLFLPYYLKTRRAKKPKIHMPRLHSESELPKHPPEQKQTGYWGGKHPGKTPLKKKSPATAPKEEPRAKTTTQPPNQTGPMVTKRPKPPGPGIKNKGGACTEPSKRG

SEQ ID NO: 265486 - protein, 67 aa, Glycine max
  Clone ID: PAT_MRT3847_81754C.1.pep
SNIHFKYNFNFLKKSAFSHSQTLYISIQAYTYHTYTSISLCYRVNICATCILKSMCIGSAPKLYSGF

SEQ ID NO: 265487 - protein, 37 aa, Glycine max
  Clone ID: PAT_MRT3847_81755C.1.pep
NSRLDRTHTLTTYLTYKYFLQLTTNLLRIVFYLIPTI

SEQ ID NO: 265488 - protein, 124 aa, Glycine max
  Clone ID: PAT_MRT3847_81756C.1.pep
LENPSSFNLEEKKPSRGSCVDPLKVVARRAPHTLLGSCRFGPPKFWSSPFSSVCSPAPNSPPFSKFSFMPNCCRPCFFGFVNKVVPFPLLEKMGCALFPLFFFFLERASSIFFSVVFVFLPPLC

SEQ ID NO: 265489 - protein, 73 aa, Glycine max
  unsure (1)..(73): unsure at all Xaa locations
  Clone ID: PAT_MRT3847_81757C.1.pep
APSYLVIXLQDYCKXLLISYVHVEDFATTPMQWVMGTTCILTGWHKGWGQNDCFVLANYVIISNFIFIYHKLK

SEQ ID NO: 265490 - protein, 137 aa, Glycine max
  unsure (1)..(137): unsure at all Xaa locations
  Clone ID: PAT_MRT3847_81758C.1.pep
ASSVMASVALRPAPFTVEKSSVRGLPSLSRNSSSFRVVATGNKIKTDKPYGINGGMALRDGTDASGRKGKGNGVYHIVNKYRANVDGYSPIYNTKDWSSTGDIYTGSSTGXSICAVTLLGLLAGGALIVYNTNALVQ

SEQ ID NO: 265491 - protein, 126 aa, Glycine max
  Clone ID: PAT_MRT3847_81759C.1.pep
MASSVMASVALKPGPFTGENSSMRGLPSLSRNSSSFTVVASGKNIKTDKPYGINGGMALTDGTDASGRKGKGKGVYQFVDKYCANVNGYSPIYYTKDWSTTGDFYACGTTCFSYLGLDSTSAFNLL

SEQ ID NO: 265492 - protein, 312 aa, Glycine max
  unsure (1)..(312): unsure at all Xaa locations
  Clone ID: PAT_MRT3847_8175C.1.pep
CLSRRNGEKGKRXRFVSGDGEQMTLIPGTSVEEANNTLIVELEKRVPTLVGIECSMDEKLTRRKIFDKPKTRCLTILPMEFNLEDRQKFLNFVRFIMKKRDKLMLQVGINPYSMEWTGLANRLLSKGSDILCCEYASFDGLITKQVMSKMAKMINSLCGGDEKLMRERTHLLLACCSRMAICKKDVWRVECGIPSGFPLTVICNSIFNEMLIRYSYEKILRQAXASSMFLPFFKKFGSLGGDGEENLIXVKEMASPSFRGLKWKSFLLGLIFPIPEGFAKTMAPLQFKKLANWDFFKKNFNQMSNVLGGAPE

SEQ ID NO: 265493 - protein, 139 aa, Glycine max
  Clone ID: PAT_MRT3847_81760C.1.pep
MASSVMASVALKPAPFTVEKSSVRGLPSLSRNSSSFRVVASGGKKIKTDKPYGINGGMALRDGTDASGRKGKGKGVYQFVDKYGANVDGYSPIYDTKDWSPTGDVYAGGTTGLAIWAVTLLGLLAGGALLVYNTSALVQ

SEQ ID NO: 265494 - protein, 76 aa, Glycine max
  Clone ID: PAT_MRT3847_81761C.1.pep
MMRARFPLLLLGVVFLASVSVTFGIAYSEKQNPSHNMCLRSCNIEIDSYRNQACHARCNLLKVEEVELYEEGQIPR

SEQ ID NO: 265495 - protein, 212 aa, Glycine max
  Clone ID: PAT_MRT3847_81762C.1.pep
MTTMEIKLWNDKREREMYDNFGELYAIIKATERLEKAYVRDIISPQEYELECQKLIAHFKTLASTLKDTVPSIERFADTYKMECPAAINRLVVSGVPATVEHRATAAASASTSAATVAECVQNFITSMDSLKLNMVAVDQVHPLLSDLYASLNKLTILPPDFEGKTKMKEWIARLSKMGAADELTEQQARQLHFDLESSYNSFMAALPNAGT

SEQ ID NO: 265496 - protein, 81 aa, Glycine max
  unsure (1)..(81): unsure at all Xaa locations
  Clone ID: PAT_MRT3847_81763C.1.pep
SDNKPRPRTPEQADPDKGGGNAPKTKKXREKKPEKPKAAGKGSQPDPNKKAKPTQRKASTQTPTSTTTEAKGKEQXEAKHP

SEQ ID NO: 265497 - protein, 152 aa, Glycine max
  Clone ID: PAT_MRT3847_81764C.1.pep
MGGDAQKRNVIIGVSTFLLVAMVVAVTVNVNFNNKGSSSDSKEESKSHVASSMKAVKTLCAPTDYKKECEDNLIEHASNITDPRELIKIAFHVTISKIGEGLEKTQLMHEVENDPITKEALDTCKQLMNLSIGEFTRSLDKFAQFDPDKLDN

SEQ ID NO: 265498 - protein, 44 aa, Glycine max
  Clone ID: PAT_MRT3847_81765C.1.pep
EIHNHIHTSFLLTTICQYSIKRRVSIARPNVHIRVSDLIVQVLG

SEQ ID NO: 265499 - protein, 158 aa, Glycine max
  unsure (1)..(158): unsure at all Xaa locations
  Clone ID: PAT_MRT3847_81766C.1.pep
PPPTKREGRAPPQKKKKKKSPAGGGGDPPPLFFLPPPPPPLFFSSPQKKTPSGWGEKYILLPKKVFFLGGPPPKKTPXKPPPGRGGGKKIPPPPKKKKGGLKEPKIVLNSTRPLLAKRGWELANNQNQLWATILLCRYGGWRDLISHRNCRSTLEDPR

SEQ ID NO: 265500 - protein, 45 aa, Glycine max
  Clone ID: PAT_MRT3847_81767C.1.pep
SNSTYFEYLNFVITNHHIVYLKEEGLTIETNERCGVDCLKVTTIL
